United States Patent Application Publication US 2004/0034888 A1 - sequence listing, part 4

SEQ ID NO: 7437 - DNA, 795 bp, Glycine max
  Clone ID: 700661828_FLI
gggaaggatcgtcaatattgcatcagttgttggtttggttggcaatgttggacaagccaattatagtgctgcaaaagcaggagtaattggcctgacaaaaactgttgcgaaggaatatgctagtagaaacatcactgttaatgcagttgctccagggtttattgcatctgacatgactgccaagctaggacaagacattgagaaaaagattttggagacaatcccattaggaagatatggccagccagaggaagttgctggactggttgaattcttggctcttaatcaagctgccagttacatcactgggcaggttttcaccattgatggaggtatggtgatgtaaattagcaatccttttaccttgcaacatgagcttttgcacttttaaactacttctgtacggtgatagtttgttctttgctgagttttgtttaagctagttttaccctgtgatttatcgtagaatattagttgaaatgcaattcagtcacttttggcactagctctgaattgcttactgatgaaatgcaatgtgtccagcatcttgtaccattttggtttttatggtcatgtcagcagaataggcataattcttatatgcaattcagtcacttttggcactagcttttccttggatgttctttcagggaactgtctcatttaagcaagcattattatgtttattttctggtttcccgaaaaggggtatgcttttaggcttcctatccgaattactattttccatttccatttgcaatcgtgcacaattgtacccatgatttttcctcattc

SEQ ID NO: 7438 - DNA, 533 bp, Glycine max
  Clone ID: 700661887_FLI
aatttaaataatataatattatatataaagcaagcattcccctggaagtgagcaaagggtaacaatcatttcttccctcagcaaccaacactgaatacataaatattaacatgaagtttgtattatccatgctaatctacagaaaatgcgggcaccacgtatatatctcttgatgctgaaaatgctctctccatttaatatgttgttgtctttcaagtgtaactaagatcaaactatatggcatacactatctccccactgctatctatatcaagatcagattcagcatcagattcagattccaagtcataaatttgttcctccataaactggtcaaaagaataggtcccaactgatggacgagaagataatgggcaatcaatttgaagagccagaccaacccatgcagagcatcgatacgatcatgcagataatttcagaagctaccgtaccagcagttgggacctattcttttgaccagtttatggaggaacaaatttatgacttggaatcagattcagcatcagattcag

SEQ ID NO: 7439 - DNA, 1145 bp, Glycine max
  Clone ID: 700661911_FLI
aaaacagagcaaagagagagtgtgtgaaaagtgaaacaaaaaacagaacaacaatggcgacacttaaggttcctcagcctcttccccccgttgcagatgattgtgagcagctccgaaaagccttctcaggttggggaactaacgaggagctgattgtatcgatcttggctcataggaatgctgctcagaggaagcttatcagagaaacttatgcccagacctatggagaagatctcctcaaggccttggacaaagaactcacgagtgattttgagaggctggttcatctttggacacttgattctgctgaacgtgatgcatttttggcaaacgaggcgactaaaaaatggacttcaagcaatcaggttctggtggaaatagcctgcactaggtcctctgaacaattgtttgctgcgaggaaggcttaccatgttctttataagaagtctctggaggaggatgttgctcatcacacaacaggagacttccgtaagctcatactacctctggttagttcttatcgatatgaaggagatgaggtcaacttgaccctggcaaaaactgaggcaaaattgctgcatgagaagatttcaaacaaggcttataatgatgacgacttcatcaggattttggccacaaggagcagagcacagattaatgctactttgaatcactacaaagatgcatttggacaagatatcaacaaggacctgaaggctgatccaaaggacgagttcctgtctttactaagagcaactgtgaagtgcttgatccgtcccgagaagtacttcgagaaggttgttcgcttggcgatcaacaagcgaggaaccgatgaaggagcccttacaagagtggtggccacaagggctgaggttgatttgaaaaacatagcagatgagtatcaaaggaggagcagtgtccctcttgaacgtgctattgttaaggacaccaccggtgactatgagaaaatgcttgtggcgcttttaggacatgatgatgcttgacatactcctttgtgtttgtgtgtgtgtacttgtggcagagttactatatagtgtgcagtgtactgctttgtggttccatgttgttgtgttttctggccattattgtcttcctttgttgaataaaatgaaccactttggcac

SEQ ID NO: 7440 - DNA, 187 bp, Glycine max
  Clone ID: 700662030_FLI
attcggctcggtagggacatgccaacatgatgtaccaaattatagagtgtgatatactcatgtgattcagttctagactttcaaattccaatctttctttatcatactgtttggatctgctcttgacttgtatgttgtttaatggcttttagcctatatcagtgaaatatttttcttttttatatct

SEQ ID NO: 7441 - DNA, 1988 bp, Glycine max
  Clone ID: 700662109_FLI
attacattacacttctcttcatctggggaaacaaatggctaggtctgcgaaagggcatcaagatgaattcgacgacgatgatgaagaagaactcttaactgctaataacacctctttcaaagtgaaggtggatgaacccagcacggggaagagggtgaacccacagcgttcaaagcattcagaaaccgagcaacgtagaaggagcaagattaacgaaaggcaagctttaaagaaaagaagaagaaaaaattctttttgttgagttaattgtttgtgtgtaggttttgagtggaagtttgatgtaattctatattatttggcaatatatgctcgcttgaaaaaattgtgtttttgagccaggtttcaggttctgagagatctgatacctcaaaatgatcaaaaaagagataaggcatccttcttgttggaggtcattgagtatattcagttcctacaggaaaaattacaaatttatgaacagacttatgaaggatggaatcaggagcccacgaaattaactccatgggtaaagttatttggaatggtgcaatgcgaacattttttgtatctgtatactctggaccttgatttatgaaatgttaggcaatgcattatgcatggcaatgcaagtgtgcactatagcagctttcccgactgatagtggtgccacctcaacattgttagacttgtgattttctgattgtataaggattcattttgtatagactgcaaaagaaagagcatcaactaggaagccttattcccactaagtagggtcaccaacatggatttgggaacaccgatgtacttggtcatgtgccatgtactcatgatgccaactgcaaaaaattctcataaagagtttaagttcctttcatgtttaggatttcactactttatgctgtttctttgaattcatgtctgcttgttttctttttttatttatttacaatgtccttttcttccagagctagtagcccagtatgcatatttgaatgagttcaggatggcattgtggcaacttcagtgatctatttgtcacaatggttggttgtgacttagtgtcttgaaattgtaacaatggctttttatctgaagtttattgttctcatctgtttttttttcagagaaataatcacgggcctgcagaaaatactacagatccttctcaagctactcaaaatgggtctgttgatgagaaaaataacaatgtctctccattgttgcccaaaaatgtacagaacccgatagagtctgacttctcaatgacaactattcagaagggcaacatccctggttcaactacagaagcagttcccctgcccatgcaaatgcgattggacatgtttgatccagttgttagcagtagtatggcaacccaacatctgctggaacctgtatctaatgttaacatgctttcccatacccagcctcaattgtggcttgataaacgaaacaagggcaactatattcttccacataatgatacaatgaaggaacaggaggagctggtgaatgaaagtgggtcagatagcatctcaagtgcctattctcagggaattttagattctctcacacaagcactgcactcttcaggcgtagatatgtcccagactaatgtctcagtgcaaattgatgttggtagacaagaaaatgctgggctgatcccctctgcatctacttcaaagggtcatgaaaaccaatctgtgagcaatccagcaatagcacgttccggagttgattactgcaatattgattctgaacaaagttcaaagaggctcagacaagaagcaagctagagattcctctcatgttcattttgtcaggagtttctttttttgctgtttgtcttcagatgagagtaagaggaattgggtggatcggttcatttttgccatgctggttagggccagatcaaatgtaaattttcacgattctggttttgggactaagacattctgaaataaaatgttatatatgcttgcttc

SEQ ID NO: 7442 - DNA, 674 bp, Glycine max
  Clone ID: 700662225_FLI
accaacataacaatgtcgttgattccaagtttcttcggcaccgggcgaagaaccaacgtcttcgaccccttctccctcgacgtgtgggacccattccatggcttccccggcaccaccgccctctccgctccgcgctccgagacggcggccttcgccaacacgcgcatcgactggaaggagacggcggaggcgcacgtgttcaaggcagacctgccggggctgaagaaggaagaggtgaaggtggagatcgaggaggagggaagggtgctgcagataagcggacagagaacaaaggagaaggaggacaagaacgacacgtggcaccgcctcgaacgctccagcggcagctttctccgccgcttccgcctgccggagaacgcgaaactcgatcaggtgaaggccggcatggagaacggagtgctcactgtcactgttcccaaggtggatgtcaagaagcccgatgtcaagcccgttcagatcactgaaggctaagttgtgttctcaatcaatcaaaattcatgtgtctcaataattgagtttgaggtgtgttgtgtgagatattattaccatgtattgttatagtgtggtgttatagtgtggtgaattgttggtcgtgttgtgtaactttttttaataataaagaatattgatatatgaatatttttattttaaat

SEQ ID NO: 7443 - DNA, 1880 bp, Glycine max
  Clone ID: 700662226_FLI
ggacttgtaaattattatgcttcctttttcttgctaaattttgaagtttaaaggcttaccaagttaactagcttgtgtgtgggtcatggcctagggtgggccatgacatataactttctattttattttttcatttcttgtgaaagggagtgggagtatttatatgatgaaccctgactgaattgtgacatactttttatgtggatgctaaaatcccctgttgcagctgaaatttggttgcagcacctcagaagatcatcaatttgtgaggggtattccaatttatgcaataagtcaggtccttgacaagattatatcaggtgcaaatgggtcacctcttcttataaatggtgtcaaaaggcctatgccacttgtgagaattctagaggttgaactttatccaacattgctttcaaaggctcggagttttggattaagtgatgattggattcaggcacttgttaagaaagatccagtaagacgtcaggttttacgtgttaaaggttgtttggctggatcaaaggctgagaatcttttagaacaaggggacatggttttagcaatcaacaaagaaccagtgacatgcttccgtgacatcgaaaatgcttgccaagctttagacaaatccgacgccaatgatgggaagcttcacttgactattttccggcagggacaagaggttgaactttttgtgggaacagatgttagggatggaaatggtactgctcgtgcaattaattggtgtggttgtattgtccaagatccacatccagcagtgcgtgctcttggatttcttcccgaagaaggtcatggtgtatatgtggcaaggtggtgtcatgggagtcctgtacatagatatggtctatatgctcttcagtggatagttgaaattaatggaaaaccaactccaaatatagattctttcgttaatgtgacaaaggtatggaatttactgtgcatgtatgtaactcacacttacatgctgttaccacccctttcttcctagttagagcttatatatatgtgatatgatacggtgcccgtggtgatcttgaatacacaaaaatgcatggcatgcgtacatgtggaacatctatggtgtgtgtttcattttatatgattaatttatccacttaataaaggttgatctattacttatttattgacatgaaacatttaaggaatttgtaaacccgtgatgtttctgctgcaagctttttcctttttatgcccgagaaatctggatttgtaaagaatattgtaacttttgccatgatgactcaggatctaataccacagtttgatagcatggcataacgttttttggctgcacatttattctacgacttgacaagctgctttttttggtattctcttaaattatttattgaatggcaggaactagaacatggcgagtttgttcgtgtaaagacaattcacctcaatgggaagccacgagtcctaacattgaagcaagatttgcattactggcctacgtgggaattgagatttgatcctaatagtgcgatgtggcatcgcaatataatcaagggattgaactgcagtacggtctgaatgatcggagcaatgtaattctttcaaattcctatggacgcagctgcgctggagtataaaaaatcttgtggaaggcttcttctggttcagaattatggtttaccagtgctgcctcgttgcaaatttgatgcgcttcgtccaaagatattctattgcattgccatgattgataatttatgaggcattcgattcaggctggcaattatttattcggttatgtaccgcaacatatgacttgtaggttaattatattggatgctggaaagcttggataataaaagaaaaatgaaaaatatttatagctt

SEQ ID NO: 7444 - DNA, 1539 bp, Glycine max
  Clone ID: 700662287_FLI
gtcaccgctcatgtacactttcgccgacaatcccagcaacctccgcaagttcatgggacatgaagcaaatcagagagtttgattgggaagtatggtgtggaagcttttgggagcacgccctctctgctcatattcttcttctttgcttctcacacccctcttatttcgcagcaaaataagcttggttcatggccaggaacctatttttgggcacctctgttacatgaaaccatctcctttcttggggaacgtaagctttcattcatatccatttctaaagtttaacgataaggttgtagagcaacaacatcaggattctcaaaaggcctcaagtgctaatgttgatggtgatggtaatgccaaagtaaagaggaacaaattaaaggggaaaagagcagttgtaagatggctcaagttctttagatttaagaagaagaaagagtatgaaaggatgacagcagaggaaaaaaatttatacaaattgttaaaggctcgaaaaaaagaagagagactttgtgaagctctgaaaaagattgagcctgcagaatcttcagaaacaacccatgatcctgagatattaaccccagaagagcactttttcttcttaaagatgggcctcaaaagcaaaaattacgtgccagttggaagacgaggaatttaccaaggtgtaattttgaacatgcatctgcattggaaaaagcatcaaactttgaaagtggtggtgaagacattttcagcagaggaggttaaggaaattgctgctgagctggcaagattgagcggaggtatagtgcttgacattcatgaagataacacaataataatgtacagagggaaaaactactctcaaccaccaacagagatcatgtctccacgagtctctctttcaagaaagaaggcattggataaatccaaatacagggatgccctccgagctgtgaggagatatattccaaggcttgaacaagagcttgaaattcttcgtgctcaatttaaaagttcagctgaaagtaatacagatgctgctgaggcaatccagaacagtggcagagagagtattgagtctgggagcatctcaaatttccagctacagaattcatataaagaccgtgaaatgatgaatgttaacattgggagcacagaggatgagacagatatgaactctgaattggattctgattctgataagttatcagatatatttgagactgattcagatactgagaatttcgtaaaggaggagaaacctctttacttggacgagtttgataattttccagagcaaagcgatggagaaatgaatgattttgaggagcatatgcgacaaatgtctctgaaatcaaaaaacatggaaaaggacgataacttacctaagttggacgaagttgacaagatttttctgcaagctacttcctttttaaagaaaaagataaaatgagaaatatgcaaaagacaagtgtaatcattgtattggatataaacagtgtagtttgggagaaattacaacgtacaacaatgaagtaacattgtgtctgactc

SEQ ID NO: 7445 - DNA, 694 bp, Glycine max
  Clone ID: 700662628_FLI
cggcatgtaaaccacgataagataaattgtttctcttctctgcaaaaaggcgtgtcctattgaaaacatattttggggaaaaaaagtataagaagattgaaatcaaattgagccctaaagatctctcgtcggacgcggagagtttcactttcacccttcggttctcgatgtcagcgtttgacaatgttgttggtgggaaattgaagttgaagggaaaagcactggatgtggctggtggagtgaagaagaagaaaaagaagaacaagagaaatcaggaacaacttctgcaagtcgccgaagatgaagtttcagcaggtggaaatacagaacaggccaaagatcctaatgatggagatataaatgatgtgagtgaattaagcgggaaagggaagacagcccattatgatgatcatcttacaccggcggagaggcgatacatagagcagagggagcaacttgatgttcacagattggctaagatttctaataaatctcaccgtgatagaattcaggatttcaaccaatatcttgcaaacatgagcgagcattatgatattcctaaagttggtcctggatgattcaatgaaggccaatccttatcatttgtatttgttcgttaatactactattaatgccgtgtgcccgcacaatggttattgtcactgcttattgatactctgttttggattaagct

SEQ ID NO: 7446 - DNA, 416 bp, Glycine max
  Clone ID: 700662768_FLI
gaaagatgcgttattatgagtcaactcttctttctgcatacaaggcatacttgcaaaggctagtagccttagaaaagaagcctttatttcagcatgtagcagttcgttgtatttgttctttgcttgatgcaaatccccatttcaactttcgtgaaagtttgttggatgctactgtcagaaacataagctctcctaatgacgctataaggaaactttgttgttccacaattaattcactctttgcaaatgagggtaaacatgggggtgaagttactgtggaggctgttcgattgattgccgatcatgttaaagctcataattgccaaatgcacccagattccgttgatgttttcttgtccctttcatttgatgaggatcttgtgatggctaaaaggatagaagatgatcagaaattt

SEQ ID NO: 7447 - DNA, 550 bp, Glycine max
  Clone ID: 700663110_FLI
atccaaaggaatttaaccctaatagatggaataaagagcacaaggctggagaattccttccctttggaggaggaagtagattgtgtcctgggaatgatcttgccaagatggaaatagcagtttttcttcaccatttccttctgaattaccgatttgaacagcataatcctaattgccctgtgagatacttgccacatacaaggccaatggacaattgcttgggaagggtcaggaaatgtccatctacaacaacctaagagcacatgtctatgctgttttttatttgaaaatccatctccatgttttccctcagctatatgctttcatgtccactttgagctacgttgtcatagcttcaacaaaatggagaggaaaaaaaaaggcttgtcacagcacatgcaaataagtataatttcgaaagctccatctttcaccctctttaagtactagttagaagcctagtatgtcttacatctgatatgttctgaaaaatggacaaaagtaactttgtttcattaggtattttttcaaaggaaagaatcgagtttct

SEQ ID NO: 7448 - DNA, 1441 bp, Glycine max
  Clone ID: 700663123_FLI
attggaatatggattgctctgcagttgtgagagttagaacactacacatcagttctcctattttggctgctaaaagtcctttcttctacaagcttttctcaaatggaatgagggagtcagagcagaggcatgtcaccctaagaattaatgcttctgaggaagctgctcttatggagcttctgaattttatgtatagtaataccttgagcattacttcaccacctgctttgttggatgtgttgatggctgctgacaaattcgaagttgcttcctgtatgagatactgtagccgattattgcggaatatacctatgacacctgagtctgcattgctttaccttgagcttccttctagtgtcttaatggctgatgcagttcaaccattgactgacgcagcaaagcagtatcttgccagtcgatacaaagatataacaaagttccaggaagaggttatgggcttgcctctagctggaatagaagcaatattgtctagtgatgaactccaggttgcatcagaggatgctgtatatgactttgtgttgaagtgggtccgaacacagtatccaaaactagaagagcggagagaagtcctgggtacacgacttgcccgtttaattcgcttcccttacatgacctgtcgaaaacttaagaaggtcttaacctgcaatgactttgaccatgatgttgcatccaagcttgtactcgaagccctctttttcaaggctgaggctccacaccgccagcggatactagctgctgagtctgcttccttcaatcgactttttgtggagcgggcatacaagtatcgccctgttaaggtggtggaatttgaacttccgcggcagcagtgtgtggtttacttggatactgaagcgggaggagtgcaccaatttgttcccatctggccgagtatattcacaggcattccatttaggtggacaagggttttcttatcagcacattgcaacatggaccaacagagctctttccattgctttggcctgtttttaggaatgcaggaaaagggctcagttagctttgccgttgactatgagtttgctgctaggtcaaggccaacagaggaatttgttagcaagtacaaaggcaattatgtattcactgggggaaaggccgtcggatatagaaacttgtttgcaattccatggacaacgttcatggctgaagatagtctttactttatcaatggtgtacttcaccttagagctgagctcaccatccgacactgactgggatttatacgtgtaaaccttttcttctagtcggtagctctgactttttttgggcaatgtgtctcattttcagataacctgctgtaatattcaggcaatgtgcactaggtggctagtgctggatgtgagatcaaatgaattgcaatgactttactttttctttcacttagatttacaagattttgagtagc

SEQ ID NO: 7449 - DNA, 2209 bp, Glycine max
  Clone ID: 700663290_FLI
caacaacacactactttccttcttccaataatgtcttcttcattctctgttcgttttcttgctcctccatcatcatgcttccccagctctcggcccaagacatggctctgcgccgccaccaccccaacggtggctccggcaactgcctcctcggaggtggaggcttcaaggttggagcctagagtggaggagagagatgggttctgggttttgaaggaagagtacaggggaggcatcagccctcaggaaaaagtgaagcttgagaaagaccccatgaagctctttatggaaggtgggattgaggacttggctaagatgtcccttgaggaaattgagagctccaagcacaccaaggatgatattgatgttagactcaagtggcttggcctttttcataggagaaagcagcattatggtagatttatgatgaggctgaagcttccaaatggggtgacaacaagtgcccaaacacgatatttggctagtgtgatcaggaagtacggaaaagatgggtgtgctgatgtaacaacgaggcagaattggcaaattcgtggtgtggtgctacctgatgtgccagaaattctcaagggcctcgatgaggttggattgactagtcttcagagtggaatggacaatgtgagaaaccctgttggtaaccctcttgcaggcattgacccagatgagattgttgatacacgaccttacaacaacttgttatctcaattcatcactgccaattcacgcggcaacccagccatgtcaaacttgcctaggaagtggaatgtgtgcgtggttggatcccatgatctgtttgagcatccccacattaatgatctggcttacatgcctgcaaacaaggatgggcgttttggattcaacttacttgttggtggtttcttcagtgccaagagatgtgctgaagcaattccacttgatgcatgggtctccgcagatgatgtaatcccactatgtaaagctgtccttgaggcctatagggaccttggcttcagagggaacagacagaaaacaagaatgatgtggttgattgacgaattgcatggtctatttccactgtcattaagtgtatctgcttggcaagtaagtgataaaagtgtttggcaaatgaaggggatagaagtattcaggtcagaggtggaaaaaagaatgccagggaagcagctggagagagcatctgaggaagaactggttaagaaaaaatgggaaagaagagactacttaggtgttcatccacagaaacaagatggcctaagctatgtagggattcacattccagttggtagagttcaagcagatgatatggatgagttggcgcgattggtggacaaatatggaactggagagctcaggctcacagtggagcaaaacataataatcccaaatgtggatagcaacaaaattgatgccttgctcaatgagcctctcttgaaggagagattctcacctgaaccttctctattgatgaagacactggtggcatgcactggcaaccagttttgtgggcaagccataattgagacaaaggaaagagcattgaaagtgactgaggaagtggagaggcaagtggctgtgactaggcctgtgagaatgcattggactggctgccccaacacttgtggccaggtgcaagttgctgacattggtttcatggggtgcatggctagggatgagaatggtaaggccactgaaggtgtggatattttcctgggagggagaattggaagtgattcacatctagctgaggtgtataagaagggtgtgccttgcaagaacttggtgcctattgtggtagacatactagtaaagcattttggtgctgtccaaaggaatagagaggaaggggaagattaaactttatggccattggcaattttagtttctttactaaatctaccattgtccctgaacaaaagtatcagtgtcctctacataaaagaaaaagggatgatcatgagacatgcattatatcatatgcatgtacacttttggataagacatgtacattctttgctagtccctaagttacactttatttcttcaaagatgtatgctatatatttctcattttcttgtggcaaatgcttaagaattattttaacattataaactaattttagaggcaaaatggtttatatttaaattttttttatgtataacaaaatactaaggatttagatgaatcttccactcc

SEQ ID NO: 7450 - DNA, 1021 bp, Glycine max
  Clone ID: 700663319_FLI
ggtgagtctaatcatggaactaaggcttcaagatcagatcaggaacgacgaaaggggattgcttggactgaggatgaacacaggttatttcttctgggcttggataagtatggaaaaggagactggcgaagcatatcaaggaactttgtggtgacacgaactcctacacaagtagcaagccatgcccaaaaatacttcattcgtttgaactcaatgaacaaagatagaaggcgatccagcatacatgatatcaccagtgttaacaatggagatatttcagcacctcaagggccaataaccggtcaaacaaacggttctgctggaaattctactgccaaagcagccaaagcggccaccccggcctcaactggggtgccaggtgttggaatttatgcagctccaaccattggacaacctataggaggacccttagtatctgctgttggcaccacagtgaaccttcctgcacctgcacacatggcatatggggtccgagccccagtacccggtgcagttgtacctggtgcaccggtaaatatgggccctgtgacgtaccctatgcagcatacgtctgttcctcacaggtgaagtgctgtttagaggcctagtgtacaaaagaaacaagagactagtggtggcttctgcagtgaatgaaattcttttcttgacaattgctttttgcttattatatgcaacaatgagttatatgcataatctgtcatttcaaataagccatatgaggaagcaattgaatgtatccgtgtaggctgccatggaatgtttgacagccttgacataggagagcataaaagtacggttgttttgtagacatttgaactggctattattaaaccgtgctatagaggaaggttctatggatttcaagtgtaaattattgttgcactcttggtttttgtaggaaataaactcttcgcctatggtctaccttaactttatgtgtgtaagttactacaattgaattggcacgaattattaaggttatgcttggattaaagtttgg

SEQ ID NO: 7451 - DNA, 1260 bp, Glycine max
  Clone ID: 700663367_FLI
caaatgcggacattttggaagcaacttatccggcagtcgccaagagattacatggtgattggctctctgatcctgcaattgcaattgttacaggcttccttggaaaggcccagaaatcatgtgcagtgacaacactgggtagagggggcagtgatttgacagctacagcaattgggaaagcactagggttacctgagatccaggtatggaaggatgttgatggtgtcctaacctgtgatccaaatatatacccaaaagcggaacctgttccttatttgacatttgacgaggctgctgaactagcgtactttggtgctcaggttctgcatccacagtctatgagacctgcaagagaaagtgatattcctgttagggttaaaaattcttacaatcctaaagctccaggtactctcatcaccaaggcaagagatatgagcaaggcagtgttaacaagcattgttttgaaacgtaatgtgaccatgttggatatagtgagtactcgcatgcttggtcagtatggtttccttgctaaggtgttttcaatctttgaagagttaggcatatcagttgatgttgtagctacaagtgaagtcagtgtttccttgacattggatccatcaaagctatggagcagagagctaattcagcaggaacttgaccatgttgtagaagaactcgagaaaatcgctgtggtgaatctcctgcagaatagatccatcatctctctcattggaaatgttcagagatcatcactaatattggagaaggctttccgtgttcttcgaacccttggcatcacggtgcaaatgatctctcagggtgcatctaaggtgaacatctcattggttgtaaatgacagtgaagcggagcagtgtgtgagggctctccacttagccttctttgagagtgagctctcagagttagagatggattacaaaaatggtaatggctctgttcatgaattatctttaggggacacttgagtgtttcaattcttttcattaagatatgtatcccaattttatatgctaatgtcaagcaagcatttttgagttcctcctagtcttgtgtcactgtgatgtaccagaacaatgtattttacctgaagatagatgctggttgggaggaatggcaaagcattagtgtataactagtcttggtagttggtattactagtgagtaaacctttgtattcttttgtagctgcttccaaagggttaataaccagctgcaaatcaatttttggttgctatttttaag

SEQ ID NO: 7452 - DNA, 1132 bp, Glycine max
  Clone ID: 700663543_FLI
cagatggtgagctacgttatccatctcaccactggctgccgagtaatggtaaaactcaaggtgctggggaattccagtgttatgaccaaaacatgctcagctttctcaagcaacatgctgaagcatctggaaatcctctgtgggggcttggtggtcctcatgatgcacctatctatgaccagcccccatacaatggcttcttcaatgatggggcttcttgggagtctacttatggggacttcttcctctcttggtattccaatcagctcatagctcatggagactgcctcctttcattagcatcttcaacttttggtgactctggagtggcgatctatggaaaaatccctcttatgcactcttggtatggaactcgatcccatccttcagagctaacagcagggttctataacacagttaacagggatggctatggaccagttgcacagatgtttgctcggaactcgtgcaaaattatattacctggcatggacctttcggacgcgaaccaaccaaaggaaaaccattctagccctgagttgctacttgcacaaattatggaagcttgcaaaaagcatgaggttcaggtttcaggtcaaaattcgtctgaatctggtgttccaggggggtttgaacaaattaagaagaatttatctggagataatgtattggacttgttcacatatcatagaatgggagcatcattcttctctccagagcattttcctttgttcactgagtttgtccggagccttaagcaaccggaactgcattcagatgatctacctgctgaggaggaagtaggtgctgaatccgccgtggttatgagccgtgattcaactgtgagcatgcaagcagcctaatggttgtaaatttgtaatctatgataatcatgtatataacaattagttattattatactacccttgcatcagtgcatgggatgagattgaggacaggttattttgtaagcataatatgaggatcccttttccttgtttattctaagcagagaccttatagttattccttataatgtagccaggtgggtggcagattgcctttttgtcatttgtgctcatgtggtatacatttctggtcaatattacttagcttaataagcaccagtttt

SEQ ID NO: 7453 - DNA, 1360 bp, Glycine max
  Clone ID: 700663586_FLI
gttcaattgcctaccaggagaaacattgcacctcatgttattgatattaatggtggcactctggttgctgaaacactaggagatacaatcgtagtcaaacagcaagatgcttgggatttgactttgaatactaaaacaggtttagttgaaagctggaaggttaaaggagtgcatgttatgaaaaagggcatcctcccatgtttctggcgagctcctatcgataatgacaaaggaggaggttcagccagttatttgtccaggtggaaagcagctggaatggactgcctccactttattactgagagctgttctgtgcaaaatattacggagaactcagttagaatattggtggtttttcttggtgttaccaagggcgaggatggttctctctccaaccaagacaagtcaaaggttttatttacaacagaaatggcatatacaatttatgcttctggggatgtcattatagaatgcaatgtgaaaccaaaccctgatcttcctcctttgccacgtgtgggaatcgagttaaatgtggaaaagtctttggatcaagtaacttggtatggaagaggaccatttgagtgttatccagatagaaaagctgcagccctggttgcagtctatgaacataatgttagtgagttgcatgttccttatattgttccgggggaatcttcaggtagggcagatgttagatgggcaacattcagaaacaaagatgcttttggaatatatgcttctaagtatggtagctctccacccatgcaaatgagtgcaagttactacagcacctcggaacttgaccgtgcgacacacaatgaagagctcattgaaggagatagcattgagattcatctagatcacaagcacatgggattgggtggagatgatagttggtcgccatgtgtccacgaacagtatttgattcctcctgtgccatactcattctctgttaggctgtgcccagtaaatccagccacttctggtcatgacatctacaaatcccagtttcaaaactcttgatttcttggatcacatgacttgttctattcaagaataaacatcttgtagaagaccgaagaccgaagaccaaagactggtgtgcttactaaggactacaaagaaacttggaagctattggtgtaaagatcccatgcaatcattttggttggaagcttgatttaataatgtggaaggtgaataatcttattgtacaaatttgttccattacccaaggaaccaagcagacaatttcacaacttgtttaataaatgtgctgtaactgtgatatgaataatttactgttcttatctgaagatcaagggcaatgaaatgaacaaaaaataatcctcgattgtgt

SEQ ID NO: 7454 - DNA, 767 bp, Glycine max
  Clone ID: 700663631_FLI
caagtgtgctgaggtgaccgagcgcgttcttgcagcatgctacaaggctctaaatgatcaccatgttctgcttgagggcactctgttgaagcccaacatggtcacccctggttcagagtctaagaaggtcaccccagaggtgattgctcaatacactgttacagctttgcagcgaactgttcccgctgctgttccggccattgtcttcttgtctggtgggcagagcgaggaggaggcaaccctcaacctcaacgccatgaacaagtcccagggaaagaagccgtggtccctttctttctcttttggaagggcacttcagcaaagcactctcaaggcatggggtgggaaagatgaaaacattaagaaggctcaggatgctttatttgccaggtgcaatgcaaactcacatgcaactttgggaacttacaaaggtgatgctacccttgctgagggtgcctccgagtctctccatgtcaaggactacaaatactaactaaaggtgttgacttcttttaatttggagaatttttgcactattggctacaccattctcatgttctttccttcatagaagttagactcggccgatttgctttctgctctcggttataggatgtctacggattaaagaataatcgcatcaagctaaattggcttgctactgtactgttgctttacattttaatttctcttgtttttttctgaatgacttttactgtattattatggagaagttccattctatgtttcaatgctatttggatgtg

SEQ ID NO: 7455 - DNA, 1595 bp, Glycine max
  Clone ID: 700663736_FLI
gtacggtagctaatagtagtatttctgtgattggtgttgcagattgatcaagtgaatataatattggtaatgatggatctgaaggaatggtcatcatcttctgaggaattgaatgtgaacaggaaatgttgcgctgattgcaaaaccaccaagaccccactctggagaggaggaccagctggacccaagactctatgcaacgcttgtggaattaggtatcggaagagaagggcatgttggaggaagggagagttgaagaaacagaaacagaaacagaaacagaggtggaagatgctgggggaagaggaacaagcggcggtgtgtttgatggccctgtcctgtggttttgttttcgcttgagcattccttaatttagctcattcgaggttgtagctgctgactcattggatgaagaattcttgatcaaataactcgtcataattgaattcaaatgaagacaggctccatgattttttcattgttgcatgtacctagatttagaatacaaagcttagctaattgctggggtgaaaccttccacagtttcagtacaacttgtggaaacaattctaacgtcaggctgcttggttctagaatttatggtcttcagggaggacagagaaagaagtggacaagacctataactacaaatatagaaggcaaggggagcaccaaatcaaaaagtatcaagcatgagattttgagtgaaaccattttagcaaatgctacagtaaatgtaaataaaacacagctagataaatcccaagaaattcagtattgtgacatacaacaagagattgctgagaataaagacttgtcgagctatactgttattgtttttgatatcgagaccacagggtttagcagagagaatgaaagaatcattgaaattgcacttcgagatcttcagggtggcgagaacagcacttttcagactcttgtaaaccctcaatgcaaagttcctaattcacatattcatggcattactactcatatggtcaacaaacctggtgttccaaggatggaggacctaattcccattttattgcaatacgttcgaagtcgtgagaagcctgggggagatgttatatttgtagctcataatgctcgctgttttgacgtgcccttcatcattaatgagttacgacgttattctgtagagattcctcctaattggttgtttttggacacccttcctttagcccgtgaactaatcaagtccggaggaacaacactttcttcaacatccctagctgcccttcgtgacctctacggaattaaagtggatggatcagctcacagggctatggtagatgtgaacgcattgtccttgattctttccaggttgacctctgatctgaagttgaccctatctgaccttgtcaaaaaatcattcacagaatcagatattatcaactctaagaataaaaagaagaactagactagttttctgactgtattttgcattgatgttgtgacaaaagaattattttgtaacgaaaatttgaactctaaatttttagttgaagtagaaaagaaacgggttgttctcaataaaatcttacaattatgtaatatgtaccaagttctgagct

SEQ ID NO: 7456 - DNA, 1634 bp, Glycine max
  Clone ID: 700663762_FLI
ctccggcccatgggctgaagcccgaatgagtgaccgcatagcccggcccgggctcaagcccgaaccttacatacccgagtttctgttccccgtccattgtctccgtttgaaacagtttcagtttctgcctctttcggctgctacgttctctgaacttccattgacgcgccggcaaacatcttctgcacgcttcgtgtaacagcagaacccaagagaaaatgacaaatgagaatacaacaggcattgagatagattatgaatatgaagattgcagtaattctaagcgcccaaaaatgacttctaaagtatgggaagaaatgcagcgaattcaaaccactgaaggtagtaaagttctgtgcagacactgcggaaaactgttgcaagataactgtgggacttctcatttaaagcgtcatttgatcatatgccctaagcgtcctaaaccactggatattattactcaagattcaatgcctacagtgtgttttagaggtcccagtagtgtcaaagattctggattaaatacagtgcttatggttcgcccattaaaggtcgaacctgaatctcaaatcccatgtttttctcagactccaaatattcgagttccaactgctattgcatccattgaaaattctcccagtcccgtacaagaactacatccaaaaactagttctgctcttttgctgcctagcatagaatctcccaagaatcaaggggaactgactctggatgatgtagaaatgaaagcattttatgcttctcttgatgcccagacctcagatatgtcaccttcccaagacaccgctgtcattactgaattatccaattcaacaccttgtgaagagaccaagaaagcattgacaacgctgaaggaccttctttgcaaagacttctctgatctattgcatactggacaatctggttccatcaaatcttccatagaatacctttccaagttgtctgcagatgatggagtctcagcagaaatgaggttgttgatattagaagtttcaagagaattcactcgctggagttgcgactacaatgatgccagtaggaaaatagagtctgccagcaccaacatctcgaaagcagataaactagaaggaaatcttgaagctaacaagaacgagttcaaggaagttatgtccttagaaaatgagttaagcaaccagttatcatgtttggagaaaaggaagaaagagctagaagagcagataaatgcaattaaagctaacatttctgtttttcaatcggccaaggtaacaagtacaaagagaaaaagggaagtttttgaagaagcaaagattctgaaagtacaaagagatgagttgagggaacaagtgcctcacttgagaaatgagttggaagtggccaagaaaaaccaagctcatattcgagctgaatggtcaaagcttggagaaaaatttaacaaaagcttgaatgagatgaattgtgagcacttgcatggcaaatctatcgaggattgtcctcaggaaaattccatttaagaatctgaatttcaattttaactaatatcaatgccttcataccaactccatgatgagctaaaagtaagctctgatatttgttatacctctgctgaaaaatgaagcattttcaccgttgatttt

SEQ ID NO: 7457 - DNA, 1562 bp, Glycine max
  Clone ID: 700663766_FLI
gtcattgttgaccgtgaaaccaatcttctgactcgaatctatcgtcttgctgagggagaagaacgttccgtgaacattcttgaccttgagaagcccgtgaactctgaggttgttcctgtcatcatattcttccatggtggaagttttgcgcattcttcagccaatagtgctatatatgacacactgtgtcgtcgcctggtgggtatctgtaaggctgttgtggtgtctgtgaactataggcgtgcacctgagaataggtatccctgtgcatatgatgatgggtggacagctcttaagtgggttagttctacatcttggcttcagagtaggaaggataagaaagttcatatctacatggctggggatagctcgggtgggaacattgtgcaccatgttgccctcaaagccatggagtcgggaattgaagtgtttgggaatatactgctcaacccattgtttggcgggcaagaaagaacagagtccgagaagcgtttagatgggaggtattttgttggagttaaggatcgagactggtattggagggcttttcttcctgaaggggaagatagagaccaccatgcatgcaacccgtttggccccaagggcaaaagccttgaagggataacctttcccaagagccttgtggtggttgctggtttagaccttgttcaggactggcagttgggttatgcaaaagggcttgagaaggctggccaagaagtgaaattgctattcctggagcaagcaaccgttgggttttatttgctgccaaacaatgagcacttctctcctgttatggatgagataaaatattttgtcggctctgactgttgataggcttaacttttgctataatacacaacaagtgggcgttagaagattgtgtaggaaataggtatgttactacttaaccttttttttttgtttgctttttgggttctttactgtaggactttgctcccgctattaggtacttacatgctactaaatgtgtcgtgagatttggtgtaatcagcatatagctgtgtgatgtttttcctgagcacataatgaggaaattgggtgctgcggataggtgaaagctttttaggacaaagggagctcaggtcatgtttatgggaaccaccaaagttgtgattacccactctgacttctagccaaaaaggagaggaaggccttattctatttctgggcgtgaccttgatgccaatcaggtggggcttgtcgttgtctggctagtgttatatatatatatatatataaaactaattttggaactaggataggaaaatatcaatgatatgttggtgctgttaggttatatacgtctgtgctatcttcatatgagtgttttaagactgttcactctttctctatatagctaattttacattcccatgtcttgggttgggtttgtccttgtttgacgatggagactccttgcaaatgtaatggatgtcttttccgcagcaatgcttagggtttgtattatgtttgcttctgtatatatagatattttgcagctttttcttatgcattattatgggttaaatttctgcttc

SEQ ID NO: 7458 - DNA, 137 bp, Glycine max
  Clone ID: 700663768_FLI
gaagtatcttgatcccttcttcacagggtaccacctaagagatttcaaggtctcagaggtgtcaaaagattacagaaagcttgtgtctgagtttgtcaaaatgggtctttttgagaagaaagagcatgttactcttt

SEQ ID NO: 7459 - DNA, 527 bp, Glycine max
  Clone ID: 700663968_FLI
cacaattaaccatgaagtgagagatacagatatgtctgaagcagctgctgaagatcccgagttggctctagctctccaattgtcagtagaagacagctcaaaggactcggcaagccagtctgacgtgagtaaactgttggcagatcagtcctttgtatcttctatccttgcatcgcttcctggggttgacccaaatgacccatctgtcaaagatttgctggcttccatgcaaaatcagtctgagccacagcagaagaatgaagacaagccaccaaatgaagaggagaaaaaataatcttaatagtctcattgtggttttatttgtagtattcctttggtaggcatattggtagcatgttggaaagtgattttactcgggtagttatttcacgtgttccaattgttgagttcccctgctgattggaacgagtatatgtctgttgattaattacggatcattgagtagagcacatttcaaaagcctattgtctatgttcatcatcaagggaatacatggttttatggtt

SEQ ID NO: 7460 - DNA, 1625 bp, Glycine max
  Clone ID: 700664169_FLI
gaatgtggggattctcgctatcgacatctacttccctcccacctgtattcagcaggaattgctggaggctcatgatggtgccagtaaagggaaatatactattggacttggtcaagattgcatggcgttttgtacagaagtagaagatgtcatctcgatgagtttgacagtagtttcttcccttcttgaaaagtatgcgattgatcctaaacaaattggtcgtctggaagtaggcagtgagactgtgattgacaaaagcaaatccatcaaaactttcatcatgcaaatctttgagaaatatggaaataccgatattgagggcgttgattcaactaatgcatgctatggaggaactgctgctttgttcaattgtgtcaattgggtggagagcagctcatgggatggacgctatggacttgttgtctgcactgacagtgctgtctatgctgaaggacctgctcggcctactggtggagccgctgctgttgccatgctaattggtcctgatgctcccatttcttttgaaagcaaattgaggggaagtcatatggctcatgcctatgatttttacaagcctaatcttgccagtgaatatccagtggttgatgggaagctttctcaaacttgttaccttatggcccttgattcttgctataatcacttaagtcacaaatatgagaaacaagagggaaaacaattttctatttctgatgcagaatactttgtatttcactctccatacaacaagcttgtacaaaaaagttttgctcgtttggtgttcaatgacttcttgaaaaatgccagttttgtggatgaggctgccaaagaaaagctggaaccttttgcaacattatctggtgatgagagctatcaaagccgggatctagaaaaggcatcccagcaagttgcaaagcctcaatacgatgcaaaggtgcagccaaccaccttgataccgaaacaagttggcaacatgtacaccgcatctctttatgcagcctttatttcacttattcacaacaagcatagcacattggatggtaagagggtaatattgttctcgtatggaagtggcttaacttccacaatgttctctttgctattacgtgaaggtcaacatccatttagcctgtcaaacattgataaaatgatggatgttgctgggaaattgaagtcaagacatgagtttccaccagagaaatttgttgaaaccatgaagctaatggaacataggtatggtggcaaggagtttgtaacaagcaaggacaccagccttttatctccaggcacattctatctcactgaagttgactccatgtataggagattctatgcaaagaaaactagtgaaaatggtttggtcaccaatggtcactgacgttttacttagagaacgtgtaatacctggaaaccaggaattcaactgtgcttagcatttagaaggctgttctcgtttggattagtttcttcttaagggaagacaaacgaacaattatgaaatctgtaggagccaggtgttgttagttcaaaaattttccgaaactcttcaagtttaaatgattccaccaaaaattgtttctagcaattatgcttttgaatatgtagagcactgtgaaggattggacgtt

SEQ ID NO: 7461 - DNA, 983 bp, Glycine max
  Clone ID: 700664293_FLI
ctactagcaccgaacccgaatttgaaaaatggatctacacgacccgaaccggttccgcaaccgcaaacaaaccctctcctcgcgggaacgcttcctcggcgtcccatcatcccacgcgcctcgaatcgaaaactcttcctcctccgccaccgacgacgacgtcgtcgttttctccaacaacgacgacctaatcgaagacgatgtcgttttctccaacaatgacgactccaccgaaccctcttcttcttctcaaatccctaatcgccaccacaaccacaataaccaccacaaagccttcgcgttcggtccctccgacgcttcgttcggcatcctcgccgcgctgccggagaacgaccacgcctcctcgaacggctcgcacttcttccaccacaaaccctcggtttccgtctccgtctctgtctcgctctcctcgtcctcctcctcctccgccgccgcgcgcctcattccggcgatcccgaagcccccgccggagcggactccctcctcctcctcctccctcaagttccaccagtccgcgccggtgaacgtgccgcttatgccgatgagaagacaccaccgccgcgacttcgatgacgacgacgacgcgacggaggagatgctgccgccgcacgaaattgtggcgcggaattctgcgcagtcaccaatgctggcttattcggttcttgaaggagtagggaggacgctcaaggggagagacttgcgtcaggttcggaatgccgtttggcgccaaacgggttttctcgattgattgaattatgaagaaaatgcttttagattttcggttttttctgtttcattctttagatatgtttttcttttaggaagtgctaaaaccctaaaacctcgattgattgtaaagttgaagagttggtgaataatggctcagtgctttattattgtttgattattgtatatctcttatgcaataatttatttttgtggtccataatgagctctattgg

SEQ ID NO: 7462 - DNA, 1125 bp, Glycine max
  Clone ID: 700664385_FLI
gttctcttggccgagtttacaaggctgatttcccaaatgggaaggtaatggctattaagaagatcgacaactcagctctgtcattacaggaggaagacaattttcttgaagctgtttctaatatgtcacgcttgcggcacccaagcattgtgacattggctggatattgtgcagagcatggccaacgacttctagtttatgagtatatagcaaatggaaatctgcatgacatgctccattttgctgaagatagcagcaaggcattgtcttggaatgcccgtgtacgcatagcacttggcacagcccgggctttagagtacctgcatgaagtgtgcttgccttctattgtacatagaaatttcaaatctgcaaatatattactcgatgaggagctcaatcctcacctgtctgactgcggtttagctgctttgacaccaaacactgagcgacaggtatcaactcagatggtcggttcattcggttatagtgctcctgagtttgcattatcaggagtatacactgtaaaaagtgatgtttacagctttggggtggttatgctggaactattgactggtcggaagccacttgacagtttgcgggttcgatcggagcagtcacttgtgaggtgggctacaccccaactccatgatatagatgccttggccaaaatggttgatcctactttgaacggcatgtatcctgcaaagtcactgtcacgctttgctgatatcattgccctctgtgttcagccggaacccgaatttcgacctccgatgtctgaggtggtgcaagcattggttcggttagtgcaaagagcaagtgtggttaaaagacgacccagtgaagaatctggttttggtcacaagaccccagaccatgaggccatggacatgccattttaaatgttagtgcctttaagtgatcttttacaattttgtgcagtagcccggctaaaaaaattactactacagaacacaggaaggaaggagtagaaaagtttgtgaaaatgtatcatcaatcaaacaaattacgtgttggaatttttcacacaccatttaatactctggaaaataagctgtatattttaattaacttgcaatgctgtaatataatgtaatttaattg

SEQ ID NO: 7463 - DNA, 1322 bp, Glycine max
  Clone ID: 700664442_FLI
caagtttctcttaagccattggattcttctagaaagaggaaaagtaggagcagaggggatgggtccaaatctgtggctgagactattgcaaagtggaaggaatacaatgagcatctttattctggcaaagatgatagtagaacaactcgtaaggcgccggctaaaggttcgaagaaagggtgcatgaaagggaagggaggacctcaaaattctcagtgtaactacagaggagttaggcagaggacatgggggaaatgggttggtgagattagggaacccaatagaggaagcaggctttggttgggtaccttctcttctgcccaggaagctgctcttgcctatgatgaagctgctagagctatgtatggtccttgtgcacgcctcaattttcccaaaatcacagattatccttctgttaaggaatcgttgaaggactcttcgatggctgcatcgtcgtcttgttcttcggcagcaactgcagcatctgacactactactacaacatcgaaccaatcggaggtttgtgctgttgaggatgttatcgagaaacctgcgaatgtgaatgataagtttaatgattgtcataaggcttacgtatctgcctcaccaactagtagaatgaagcaagagcctaaggatgaggctgtggaccacatggacacaggggctggggaaattcaagatgtcggactagaaggaacacatgatactgggcaggttgcagagaatgtaaataaagatcagatggatttgtcatggattgatggctttgactttattgacgattacttgaagagcttttccgcggatgagttatttcaggtggatgaacttttggggcttatagataataacccaattgataactctgtgttgatgcaaggtttggattttggacaaatgggttttcctggagatggtaatcctcaggttgacgatactccttcaagctttatttatcagttgcaaaatccagatgccaagttgttaggaagtttgccccatatggagcagacaccatcgggtgttgattatggattagatttcttgaaaacagtggagccaggggactataatggtggaggggaagaaccaccatttcttaatttggatgatgatctgaaccatgattcaaatggcatgcaagcaaggaagggtggctagagaaggctacgtgtatctgcttcattttcaactggttctagcgtctgctagtaatctgtctcttgggctgttgtcccctttttagctatataataggtgcataagaggaataccactatacaactaatacaagaaatgtgttttgtttgtgttctttt

SEQ ID NO: 7464 - DNA, 2062 bp, Glycine max
  Clone ID: 700664514_FLI
ggtaccttagtttgcataaaaggatttgaaaatcttgtctgtctcactctcaaaggaatttatgcaacaagacagcgacacaaagttcccacttccagatctacttctgttctgtcagtcaccacagatagtttaactccactcacctctcaccgcaaccttaacttactatgtacctttcttcttcttttctttgtgtaaagtttaaaacttgaagcaaaaccaattgccccatttgccatttggtggtaataatcgatcgatggagttcactgaatcttacaagcaaacgggtccctgttgtttctctcccgacgctcgcttcattgccgttgctgttgattatcgtctcgtcattcgggagaccgtttctttcaaggttgtgcagttgttttcatgcttagacaagattagctatattgaatgggcccttgattctgaatatattctttgtggtctctacaaaaagccaatgatacaggcttggtcactgacccagccagaatggacatgcaagatagatgaaggacctgctggtattgcatatgcgaggtggagcccagatagccgccacatactcaccacatcagatttccagttgcgtttaattgtttggtcattgttaaatacagcttgtgtgcatttacagtggccaaagcatgcttccaaaggagtttctttcactcgagatggaaaatttgcagcaatatgctcaaggcgtgattgcaaggactatataaatctgttatcttgtcacacatgggaaatcatgggcaattttgcagtcgacactctagacttggctgatatcgaatggtcacctgatgatagtgctatagtgatatgggattcaccacttgattacaaggttctaatatattctccagacggaaggtgccttttcaagtatcaagcatatgaaagtggattagggattaaaagtgtgtcctggtctccttgtggtcagtttctggctgtgggcagctatgaccagatgctgcgggttctgaatcacctaacttggaagacatttgcagagttaatgcacccatctacagtccgtggtccttgttatgctgctgttttcaaagaagtagatgagccactacaacttgatatgtctgaactatgtttgagtgatgatttttcccaagggcatgatgattctcctgaagaaccctttagagtcaggtatgaggttatggaagttcctatcaatttaccattccaaaagcctcctgccgagaaacctaaccccaaacaaggaattggtattttgtcatggagcactgatagccaatacatatgtactcgtaatgatagtatgcctacagtactttggatatgggatattcgtcatcttgagcttgctgcaatattagtgcataaggatcctatcagagtggcagcttgggacccaacatgcacacgccttgttctttgcaccggaagcactcacttgtatatgtggaccccatctggcgcctattgtgttcatgttcctctatcgcaatttactataacagacctgaaatggaattctgatggcagttgtctacttcttaaggacaaggagtcattctgctgtgcagctgtacccttgttgccagaatctagtgagtacagctcagatgattgatgatcacgagggaatgaaacaaaatgatggtaaaatatgaatgaccctgtatttctgtgcatctggtagacaagactccaaggtttaagatcatacaaagtcctgttggtgtaagggtgtgtttggctggagtattttaagaagggaaagtaattttcaagagaaaaagaaaaggcttggttgttattgttgcctccaattgatcagggaaactatggtgatcaagcattttcaggaggggcaatggagcaaagctatgtagtagcatttggaaaaattcaatggccatctcggcccttgttgtaggagcatagattaaattgaacattaaacagcattctgctttcctgtttgatttttaaggtgtaatgctgttgattgcaatgccatctatttatctatgatattttaaacttaaagtgc

SEQ ID NO: 7465 - DNA, 2079 bp, Glycine max
  Clone ID: 700664692_FLI
gctcgggaaactcgttgccatatgcatggggggatcattcccggtggagcaaggagatctacacaagaggtggaagttggtgagtaagaggttgagaaactttcaccaatgtgttgtgcttcctgtaggtagcttatctagtggactctgtaggcatcgcgcaattctcttcaagagattggcggattacataggtttgccatgtcgaattgctcggggttgtaggtactgtgtttcagatcatagatcgtcttgccttgtcaagattaaagatgatagacagctctcaagggaatatgtagttgatctggttggggaaccaggaaatatccatgggccggattcctctattaatggagcatatgtgtcttcaataccttccccatttcaaatttctcatttgaaagaatcccaatcaccatatgtggatgttgcagcatgttctcaatctcttggctgtgtacaggaagatcaacaagctgaagaaactgatctgcagaaaaataataatggctctatttatcctgcaatagatcaaactcgtggaggtgcagaaccacctctaattccttttggcttgaaagggaatcacaaggaatgtgcaatccttggtttattaaattttcctccagtatatgaaggtgtttctgaggatcttcacccagccactgaagcatcgttacatgaataccccaggctcagtaaagattcagttgtagtactagaagcttccaacaaagagatagagatcattgtaaaaggaagttctggggtaaaaagtaactataagcaatctacggtgagcttatccagcgaatcaaaacaggaacaagaacatgtaaaaaataaagttgaaaatcagggtgctggtaatattccaagatacttgaatcttgaaccatcacttgcaatggattggcttgagataccatgggatgatttgcgaatcaaagagcgtgttggtgccggatcatttgggactgtgtatcgtgctgaatggcatggatcagatgttgctgtcaaagttttaacagttcaggatttccaagatgatcaattgaaagagtttctaagagaggttgcaataatgaaacgagtacgtcatccaaatgtggtgttgttcatgggtgcagttactaaacgtccccatctatctatagtaacagaatatttgcctaggggcagtttatttcgcctaatacataagccagcatctggtgagattctagatccaaggagaagattacggatggctttagatgtggctaaagggatcaattatctccactgtctaaagcctccaattgtgcactgggatctcaaaaccccaaatctgttagtggacagaaattggaccgtgaaggtctgtgattttggattgtccagatttaaggcaaatactttcttatcatcaaaatccgttgctggaacacctgagtggatggctccagaatttcttcgaggagaaccttcaaatgagaagtctgatgtttacagttttggggttatcctgtgggaacttgtgactctgcaacaaccatggaatggacttagtcatgcccaggtggttggagctgtcgctttccagaataggagactagctatccctccaaacatctccccagcattggcctccctcatggaatcttgttgggccgataaccctgctgatcgtccatcttttggtagcatagttgagtcgctaaagaagctactgaagtcaccagcggatgcaataaaaatgggtggggcaataacataaggagtactctgcccatgacgggtttttggttgctgaaatttattaattaacctaattgatggcatgaagccctttggttgttgcaatttgtatatcgatcggttgattcatgcaaacccatttcgtaagggcacttaaagcaatctttggattcttctgctaaaatgatgacctcaagctcttttatctatagctttgagatcaataaaaatagtgacttgctccctccaagctataattatttggagcttgctattgtttttcagattgtatatatgtaataaattatttggcaatatatatctgatatctcgtct

SEQ ID NO: 7466 - DNA, 534 bp, Glycine max
  Clone ID: 700664703_FLI
cttctacgacgcacgcagcagcatcagcttctactcgtgtaatctctgcgtgggctacaatggattccggtgtccaaggttgcatcttagccactttaattctccacgacgaggaaatcccagtcaccgctgagaagatcaacgctctgttgaaggcttctaatgtctccgccgagtcttactggcccagcctcttcgccaagctcgcccagaataagaacatcgaagacctcattttgaacgccggcggtggtggggccgccgttgcagttgccgctcccgccggcggtggtggtggtgccgctgctgcagccgcacccgccgccgaggaaaagaaggaagaagtgaaggaagaaagtgacgatgacatgggtttcggcttgtttgattagatctttttatatagttgtagccagattttgagtctttgaattgaaatcttgttttgttctatataatttttattgaagggattcttagccaatctactatcataattgttgaattttggtggttttttaatatatttgtggc

SEQ ID NO: 7467 - DNA, 1831 bp, Glycine max
  Clone ID: 700664708_FLI
gggactgtatttatgcattggaggaagaggatgaagacggaatcatcgccggcgggatcggagaagacggcggtggagccgccgggtttgatttgacttctctgtgtagagcgtatcatattcaccagactttagggttagaggatcggtttaagcagtattattttgagaacaggaagcttcagttgacttcggattttcaggtttcgtcgatgactccttttctggagtctcatcaaacgttctttgcgcagattgcagggttcttcgtggtggaggatcgtgttttgagggccgggggtgggttgatttcgaaaatggaagttgagaacctttgggatattgctgttagtaaaatgtgttctgtgttggaggatcagttctctagaatgcaaactgccaatcatttattgcttattaaggattatgtgagtctgttaggagtgacgctgcggagatatgggtatcccattgatgcgttgcttgatgttttgagcaaacatagggataagtaccatgagttgcttttgtctgactgtaggaagctgattgcggaggcagttgcggctgataaatttgagcagatgttgatgaagaaggagtatgagtattccatgaatgtgctttctttccagatacagacttcggatatcatacctgcttttccctatgtggcgccattttcgtccactgtgccagattgttgtaggattgtgcggtccttcattgaggattctgtgagtttcatgtcatatggagggcagcttgagttctatgaagttgttaagaagtatttagacaggcttttgagtgaggttttggatgaagctttagtgaagcttatcaatacatcaattaatggggtttcccaggcaatgcagatggcagcgaatatggctgtcttggagcgtgcttgtgatttcttctttcgccatgctgcacagctttcaggtgttcccttgagaatggtggagagaagcagaaggaacttccctctaagaaaagctcgtgatgctgctgaagagatgctctctgggctactcaaagccaaagttgatggatttatgacattgatcgagaatgtaaattggatgggtgacgaggcacctcagagtggaaatgaatatgtaaacgaggtcataatttatttggaaattttggtttcaactgctcaacagatattgccttctcaagtccttaagagagtattacaggaagtttttgctcacatatcggagaagatagttgggactttagttagtgattctgttaagaggtttaatgtaaatgctattactggaattgaagttgacatccggctcttagaatcatttgctgataatcaggcctcccttttctctgatggggatgttgatgttctgagagcatcacttgccagctcaaagcaactgattaatttgctgttaagcaatcatccagagaacttcttgaatccagtgatcagggagaggagttacaatactttggaccacaagaaagtggtgattgtttcagaaaagttgagggatccttccgatcggctctttggaacctttggtagtcgtggggcgaggcagaatcccaaaaggaaatcattggatacattgataaaaagacttagggatgttagctgattaagcttatagctgtatgtaaggtattttctcttgttttattttcttgttttgtctctagttccattttgatgatgaattatttaatagtgagttgtcgataaaattatttgctttaggccaggctgtcactgtgttccaaatgcattttaagattttccaagatatttgtttgaaatgtataattcttatgctct

SEQ ID NO: 7468 - DNA, 1565 bp, Glycine max
  Clone ID: 700664781_FLI
gcaatgccgaattgtctgggtataatgataggattccctgtagcttgttgtccaagtcgtgacaatgtaccagtagttagtagagatgatgatgaaaactcttctgggtgtactcaccctataaatactgaaaccaagtcctttaggccaaagacttgtataggtaaaagaatggcttctaactttcagaaagttgctgaaaaaacaaagaattatgcactttctaacaatgatggagattggaagcgaacttacctcagcaagaggaactgcaataaacaccaaagttctcagatgaatattcctttcaaaaagaggaagctttttaattatcgctctgttgcaaactctaatggattgatcaggagaggtggcatttattattcacctgagaattgtatgaatcaggatggatgtgattcaccacctgggatgcacaaagaccctggaatgtcatctttggaagcatgccaacatcagacgttacgaagcataggttctcatgtgaatcttaggatcagtcatttagagtgccagagctttttatagaggttccagaaactgcaacaattgggtccttgaagaggacagtgatggatgcagtgactgctgtgcttggaggtgaattgcacattggtgtttttctccagggaaaacaagttaaggatgacagtaaaactctacttcaaactggaatttctcatcataacgagttggatgctttgggtttcaccctggagcctaattcttcacaaagcctaccgattgtatgtgcttcacattctcctcgtcctaaagctgacataactgagcctgtaataaggtatccctccagtccagctgtaattcatcagaggattcaaggcaactctgacatgttacctgagcatcaagtaaccagtttaggtagacattttgaaagtgaccatgattcagcaccttctcctgtcaatgcgtctgttgacaaaaatatgaaagattccaaagaactggttactgttcctgaaatggatgaggaactagctatggtacctgtacaccagaagccaaagcgatctgagatcgtccagcgtcgaatacgcaggcctttttctgtagatgaagtagaagcactggttcaagcagttgaaaaactaggaactggaaggtggcgtgatgttaagctttgtgcttttgataatgcaaagcatcggacatatgtggatttgaaggataaatggaaaacactggtgcacacggcaagaatatcccctcagcaaaggaggggtgaacctgttccccaagaacttttggacagggttctagtggcccacgcatactggtcccagcaacagactaagtcacagcacaagcaccatccagaaactgaaactgtcttctccttttaataataataagggccagggtcaggggttgtcagcagcaagtggccatgtggatgatgagggtgccttggtttctgacttttgttattaatgtcttttccttttttgctttcaataaaacatttatgaagcctctctgtttatcaaccatgtaaaaagtgatgatgacatggaaaatgt

SEQ ID NO: 7469 - DNA, 1187 bp, Glycine max
  Clone ID: 700664839_FLI
cttgagtcttcactctcttagtggaagttcctcagtggagtggattcagggatctttagtttctcaaaggcagccattgacttggtacaaaacaacatttgacgcgccagctgggactgcaccattggctttagacatggacagcatgggcaaaggtcaagtgtggttaaatggacagaatcttggccgctactggcctgcttataaagcatccggtacctgtgattactgtgactatgctggaacttataacgagaataaatgcagaagtaactgtggcgaggcttcccaaagatggtatcatgttcctcaatcatggcttaagccaacaggaaatttattggttgtgtttgaagagctaggtggagaccccaatggaatctttttggttagaagggatatagatagtgtatgtgctgatatttatgagtggcagccaaatcttataagctatcagatgcaaacttctggcaaagcacctgttagaccaaaagttcatttatcatgtagcccgggacagaaaatctcatcaatcaaatttgctagctttggtactccagcaggttcttgtggaaacttccatgaaggaagctgtcatgctcacaagtcttatgatgcctttgaaaggaattgtgttggacagaactggtgcacagtaacagtgtcacctgaaaattttggaggagatccatgtccaaatgtcttgaagaaactctcagtggaagctatttgttcctgatcattttaacctcagaaaataaatagattaaactctccagattgatttttcccaccactattcatttcaatacagttcttttgggtcaaccaaagtctacacttctgaatctgatcaacacgagcattattattttggctttaccaaggtgaagttgcagaaaacacaacacaccatatggttgaaagcctgtaaagattgctgagatgattgtggatatgtgtatatacttgtgttctgcatgttatacagaggtgaaaggtgatgatttgcttggtgcactatgagacgatactgaattgagtccatgtgctagtgttttagacttaggtgtggaagcctcttgcttcctgtaatattagttttcccttgtaagctgcattcatagtgatttagtttctttcttcctgtaagaaacttctcaagatgataaagatcagattcagtc

SEQ ID NO: 7470 - DNA, 2311 bp, Glycine max
  Clone ID: 700664879_FLI
aactcacgctctaaacgcaacgcagcatcgttcgtgtatccactgcagttgcctcagttgacggtgttggtagggaaaaccatggcggacgtggtgcagtaccgtttggagcgcatggtggacgagctcgacgacctcgagcagcgcggcctcttcagccggcgcgagatcgcggagatcgtgaagcagcggcgaaagttcgagtaccggctgaagcgtccgagtcctctgaaggaggatttcttggcctacgtcgagtacgagactcagctcgacgctctccgcaggctccgcaagaagtccgtggcgcgcgaattgatgaagcaaggcaataagaagctcaagaagtctaagtccgatttcgctggattgctcaggattatggacatttacgagctcgctttgaagcgctataaaggcgacatcgacctctggtttcgctacctcgagttttgtaggctcagaaaaaatggcaggatgaagaaggccttggcgaatgttattagatttcatccaaaggttccgggaatttggatttatgctgcggcttgggaatttgatcataacttgaatgttgcggctgctcgtgctttgatgcaggaaggtctcagagtttgtccaacttccgaagacctttgggtcgagtatcttcggatggaacttacttaccttaataagttgaaggcacgcaaggttgctttaggtgaggatcagggaactctcacccgtgatcctaggagttctgatgaaaaacattggagggatgaaaacagtgagctgtttatgcctcttggtgaaagaggggatggtgatggtgatgatgatagagcaaatgttggaagtgatgagtcggaaaagaagcaggagctgtttgaagaacgtggtatgaatatttttcaaactgtctatggcggagcagttgaagctgtcccctcgagtctcagtcttaggaagcggttttttgaaatattggagggtacaaacttgtcgcattatgaagatatgtgcaaggagatattgaatgacatgaagagggatttttcaacacaaccggaattttgggactggctcgcaaggcatgaatgtgatcttgaaaatgatctggagataagtgaggagggcattattcctcaggtggaaaaggcagttcaggtttatgaggaggctttggaaaatgtgccatcaggaactatgttttgtttgtatgcaaattttctaacggatattgtagctcataaagaaggagaaaccaatataaatggatcatcaggtcatgctgcaaactatatatcacatctcctgttaatatacgaaagggctgaaagcatggggtgcattactgaagatcttgcttgcaagcatgtgtccttacatttgcaattgagacagctggatgaggcccggaaactggcagcaaaactttgcagtggaaaacttgcagaatcggtagagttatggggattaaggattactatagaaattagatgcaccacaaaaagttcttcaccaagtgacgcagatttgcaatccctttttgaactccttcaacaaattttgatgaaagtgtctgtttcaaaatcagagaacttgtggctaaaggctcttaaattctatgcaaatcaaagacaatattttgataaattagtggagatttctgttgttaccttggtcagagatggtggcagtgaaaatggattttccctttcttttgctattgtaagttttatatttcaaaaggatggaattcagaagaccagagatatctataaacgatttctagctttaccgcgtcctggccttgctttatatagacattgcattgacctggaaacaaaccttgcatcaataggagataaagatggtcttataaatgccaggaaattatatgaatctgcactcgcaacttatgaccaaaatgtcagcttgtggcaagattactatcgcatggagaccaagatgggaacatcagaaaaggctaatgctatctattggcgtgcaaggaaagtactcaaagatgctagtgaatttgtcactgccacagatatgtgataatatttctaaattacgaccatggctattggagttcaattttgaccacttcatttatttggtttttctacagaaatttcttttcgaccagtctagtctagactcaaatttgtttttccttcccaagaggtgaggaatagagcttcctccttttccccaaaaagctaattaactgtattgtacccttgtacccctgtatgcgtatgttgggtcacgttaatgagaatgttaaatgcatcgtaagtacatattcttatactcg

SEQ ID NO: 7471 - DNA, 1066 bp, Glycine max
  Clone ID: 700664914_FLI
agcgggttgacgaaccgttgattcgcggaaaagagaaggggagtgaaagtgaggtggagagagggaatgtattagcggaagaggcggcggcggagggaatgagtggaccggcggtgggggaggagcacacgatatgggaggctctgaaaacggtggatttttggattttgtttgtttcgtttctctgtggggttggaacgggtttggcggttatgaataatatgggtcaaatcggtttggcgctgggttattcggatgtgtctctctttgtatccttgactagtatttggggcttcttcggtcggatcgtctcgggttcggtttcggagcacttcatcaagaaagctgcaactcctagaccactttggaatgcagcctctcaaattctgatggcggtgggatacatactcctggcaatggctatgccaggttccctttacatagggtccgttgtggttggcatatgctacggggtgaggcttgccattactgtgccaactgcctcggagttattcggcctcaaatattatggtcttatatacaacattctcattcttaaccttccccttggctctttcctcttttctggtcttcttgctggcattctgtatgatatggaggcgactaccaccgtaggaggaggcaacacttgtattggagctcattgctacagactagtattcatcatcatggctgtagcttgtgttgttggcttcttcttagacattttattgtcattcagaactaagaaggtttacaacaagatctcctccagcaaaaactccaacaaaaactctctgaattcaagtaggcgatgatccaaaatggcccatataaagagggtatgacacttgcgttgaccagcattttgcacaatggtatcctaatttccattggtatggtatggttatcactaacctttttccttttggtaataaaggctggctaatttgtttgtacatccattttgagtgctctgtagcaatagttgtcaaaatgttatagtagcaatttgttgaagaaaatgttgtcaaagattttccatggatggaaatattttgcaatt

SEQ ID NO: 7472 - DNA, 1398 bp, Glycine max
  Clone ID: 700665019_FLI
cagaactcaaaattccttcaatttgtgtcaaagatgagccgtggtgagttgattattgatgacaatcaagttaaagagaatgcattacctgcatctggagattgggcaacagaatacaatcagcaatataatcatggtcatgcatgggctggagaatttttgaatgataaggtttatcatggacctgatcagtgggcgaatgaatttacaagtgaaggacggcagcatgatgcagttgatgatcagtgggttaatgaattctcaaagttgaaagttaatgattgggcagatgaatttggtcagcagtttggtgaaggagccttaggggatagcacttctgatagttgggcacaagcatatgatgagttcctaaatgagcaagtggctgccaagcagcagttagacagttcgaggggtgtgtatgtcttttcagatttaaatccttatgttggtcatccaaatccgctaaaagaaggccaagatctattcagaaaaggacttttaagtgaagcagttctagcattggaagctgaagtcctaaaaaaaccctgagaatgctgaagggtggagactgcttggaatagcacatgcagagaatgatgatgatcaacaggctattgcagcaatgatgcgtgcacaggaggctaacccaacaaacctggaagtgcttcttgctcttggtgttagtcatacaaatgaactggagcaaacagctgctctgaagtatctatatggatggttgcgccatcacccaaaatatggaacacttgccccgcctgagatggctgattctttgtactatgctgatgttgctaggttatttaatgaagcagctgaactctcacctgatgacgcagatgtccacatagttctaggggtcatgtacaacttatccagagaatatgacaaagccattgcatcttttgaaagagcactgaaacttaagccgcaggattactctctatggaacaagctgggtgcaacacaagcaaacagtgttcaaagtgctgatgcaataatggcttatcaacaggcactggatttaaagcctaattatgttcgtgcttgggcaaatatgggtatcagttatgcaaaccagggtatgtatgacgagtccattcgatattatgttcgagcacttgccatgaatccaaaagcagagaatgcatggcaatatttgagaatttcattgagctgtgcttctaggaatgacatgttggaagcttgtgatagtcgtaatttggaccttctccagaaggagtttccactacagtaagggtgcgtttgagtgaacagcttaatcaagcgcttagtgaataagtacttatcatataagcactattgtataagattttttttttttaataattgaagaggatatagggttaacttcttttc

SEQ ID NO: 7473 - DNA, 945 bp, Glycine max
  Clone ID: 700665233_FLI
aatgtatgaaatgttagtggggtatccgcccttttattcagatgaaccaatgttgacttgtagaaagatagtaaattggagaagttatttaaaatttccagaagaagttaaactttcggcagaagcaaaggatcttattagtagactcctatgtaatgtggaccagaggcttggaaccaaaggggctgatgaaataaaggctcacccatggtttaaaggtattgaatgggacaaattgtaccaaatgaaagctgcttttattcctgaggttaatgatgaattagatactcaaaattttgagaagtttgaagaggttgacaaccaaactcaaccttcctcaaaatcaggcccatggagaaagatgctgtcatctaaagatgtcaactttgtcgggtacacatataagaactatgaaatcgtgaatgatgatcaactacctgaaattgccgaattgaagaagagcacaaaacctaagcggccatctatcaagaccctattttatgatgaatcggctacaactgctaatcaacctgcccaagggagcttcttaaaactcttacctactcaaccggaagttcctgagaagagtgaatctcaatgatcccaaatagtaacattttacaggactcttgcatggccattgaggtatgaccaaatgctgagttgaaaactgattgttttagtctttcccacattcttttgttagtttggcgtggatagttatgggagcaaaggctctgaaactttgtggttttggatagctgggttttgggttgactgggatatttgtctgtagaaaaagctttgaaggtatgtattctttacatttttggttggtgatgtattcttttgttcaccatttatcaagctgcaatgtgttgaaaatccaagttaattcttgtaattaagttactgctgaagtgctgacaaggatgtgcaattctc

SEQ ID NO: 7474 - DNA, 949 bp, Glycine max
  Clone ID: 700665239_FLI
gagaactttttcgtaccatcatttctcagagcaattaaagaaaacacagaagcgaattttagaagtataatggctgaaccttgtaaaggagtttatacatttgaaatgcttcaaccgcaattttgtaaaaaactgatgtctgaggtggatcattttgaaagatgggtccatggtaccaaactcaaaatcatgcgtcctaatgcaatgaataaaaataaacatggtgttatccttgatgattttgcctttgaagccatgcttgacagatttatgtgtgatttcatacgtcctatatctcaagttttctaccctgaacttggtggatcctcattggactctcaccatggttttgttgttgaatatggaattaataaggatgtggaacttggcttacatgaggatgaggcagaagtcaccttaaatgtttgcttgggaaaagaattttctggtggagaactgttcttccagggtgttcgatgtgatgcacatgtaacatcaaatgcgcaaccagaggaggccttcaattattcccatgttccaggacacgcaattcttcatcctggtcgtaaccggcatggtgctagacctacaacatctgggaatcggatgaatttaattctctggtgtagaaggcatagttctggtcaattacttagtgcatcagccttcatgttgtcacacagttcggtgtttagagagttgaaaagatatcagagagatttttatagctggtgtggagaatgcaaacagaagaaggcggagagagtgtgtttgtcagttatggccaccaaacaggaattactgaagagcgaaatataattggcctcgtgaactttcacatgcaaattatgtttgtatagtttattcccaccattgaacttcttttctgtttctagattatggattatttttaacaaaatgaaatatattgaagttgcaagttatagac

SEQ ID NO: 7475 - DNA, 864 bp, Glycine max
  Clone ID: 700665290_FLI
aaactatctggtggtgtagctgttttcaaagttgggggggctagtgaggccgaagttggggaaaggaaagatagagtaacagatgctttaaatgccactagagctgctgtggaagagggaattgttccaggtggtggagttgctctcctatatgctaccaaagtcttggataaccttcaaactcaaaatgaagatgagaagagaggagtacaaattattcagaatgcactcaaggcacctacctctacaatagcttcaaatgctggttttgatggtgctttggtccacagcaaattgttggaacaagatgatcataatttaggttttgatgctgctaaaggtgtctatgttgatatggtaaaggctggaataatagatcctcttaaagttgttagaacagctttggtagatgctgccagtgtgtcattgctactgacaacaaccgaggcagctgtgttggataatccacatgacaaaaataaacctcctagtcgggtgccagatatggatgatttggatctctaacctgcttcaccaaatggtgaaaacatttttttgtaccaatgtcgaattttgctcttccttttaaggatgtagctgaggctgaggtatataaacttgggtggcaaaatctgtgttttactgagtgaggttaaaattatgcaaccttctatttacagtgttttaggaaaaactgataggaaaagatgaaaacttgcctcattctataggtgttcatccaatttatgttacaagtgcaaatcaaagaactattgaaagtcaagtttttgctccattttccccccttattgtaatgcaatttgctttagtcatcaaatttcaatttgggttctgttcttgttt

SEQ ID NO: 7476 - DNA, 1459 bp, Glycine max
  Clone ID: 700665294_FLI
cttgatctttatgagcgggttataaaaacaattataagcaaaggtaatgtttctggcactgtaattggagaagctctaaatgcttatgcctcaagaaggatgcctggtttcaacaagggtgtgatccaaggagatattgtaagaaatagattactgttggagaccataatccgaatattacccttggacgtgggcagtgtctctttcagtttcttggtgaagttattaagggtagctattcagttggaacgtgaagagttggagagatctgaactgattaggagaataggtatgtgccttgaggaggctaaggtgtctgatttattaatttgcgccccagttggtgacacagtttttgatgttgacattgtgcaaaggctagtagaagagtttgtagcatgtgatcaacatgttcagacggatactctgttggaagatgactttcaggaggagatcagaagccccgggatggtttcagaatcttcaaaggcaaaagtggcaaaattggtggatggataccttgctgagattgcacgtgatccaaatttaccttttgcaaaatttgttaatcttgctgaattagtatcaagctttccaagagcctctcatgatggcctttatcgtgccattgacatgtatttaaaggagcatcctggaatcagcaaaagcgaaaagaaaagaatatgcaggttgatgaactgcaggaagttgtctgcagaggcttgcatgcatgctgtgcagaacgagcggcttcccatgcgcgttgttgtgcaggttctcttctttgaacagctgagagctacaacatcttctggaggcaatggcacaccggatcatcctggctccatcagggccttacttcctggtggatctcatgggagctcaaggtctactataacaaacacagaagaggaatgggatgccgtgggaacaatggaagacataaaatccctgaaaggggagcttgatgcactgaaattatctggtggaaccagcggggccagcagcagaagcgacaacaacgatggcggtaaagacaatgctgagaaagttgctgctagtaaaatgaaaggtctcatgtcgaagaagataatctctaagatttggtcaagcaaagaaagaagtggtgagctaagtagttctgatacatcagagagccctgcttctactgttgtagaggaaacaaaatctactccatctagaagtaggaggcattcattgtcttagagaccatgttctgcagaccctagtccttagagctccattcagtttattgtataatcatctcattcaagtagcatcaggagttagaggacactgacatcatattccatctgataattcaatcagaaatctatgtaactgtgaactaatgtgagcatgtggctaaaatatgaagcaccaaaagtatatgttaattgaggtttatgtcatgcccttagggatgcaacttttattc

SEQ ID NO: 7477 - DNA, 1570 bp, Glycine max
  Clone ID: 700665347_FLI
cctatatgttctcccgagtctccctctaatactttctcttctctttctctcctaattggtcgagagagaaaaagagataggtagagaaaaacgaagagtctctctcttctttatgtcagggcacaaatctttcacctcttcttctttcttctgacccatttcagaaggaaccaccaaaaaatagaggcagaaggttctagaagccgccaattcttttttttttttttggtttaatctgtctgagtccgagaggtttgtgattgtaacaatggattcctcgtgtgtcccaaacggtgatgtttccgggttcaaagataaggagccaatggttgaccctttcttggtcgaggctcttcagaaccctcgtcaccgtgtcaccattttgcggatggagctggatatccagaggttcctgaataatgcagatcagcagcattttgagtttcaacatttcccttcttcatatctcagactggctgcacatcgtgttgctcaacactatggtatgcaaacaatggttcaagataatggcttcaatggccagggaaccagaattatggtaagaaagatagcagaaagcaggtatcctgtggtttgcttatctgaaatacctgctaaacagttggaagatgataaacctgagcagataaaaattgccataaggcccaggcaaaataaaaacagtttaaatgaagccggaaggaaaagcaatcctcttagaagcgtggaagagagaaaggaggaatatgatcgggcacgagcacgcatttttagtagctccagaagttgtgactcagatgatactctgtcccagacttttacagatgagaaaaattctcttataatcaaggatgagaatgaaactagcaagacccctgtggttgattcagaacaatgcactgttggcagggatattagttctactcgagttgccattttgagagatagggaaaaggaccgtagtgatccagattatgatcgtaactatggaagatatgctaggagtattccaatttcttcccttaacttgatgccttttaatttgcaacaagttcaacctccatttgtgcagtatgacaatgctttaatccgttcagtcagatatcacaaaatcaagcttcacttggctatggacctcctccaagccctatgatgaatccttttggtgtcacggggtcaaatcaggtgtctagggatggtgcttatgtacagtggccaagtgctgcaatgatgtatgcacattcatatgaccaatttagacatgctgttttccaggctccgattgctcaacgcccattgagtttcgattattcacagaattactagatgacgtttagagggaagttttccatttggctgcagatgttattttagctattaaggatttcagagtaagatacaatttttctgtactgttataatagacccttgttttctattctggtttttaagttttgatggtggtagtaagcattcggtatttcctagtgaaatttttatactggactgtagtgaaagtactggatttgaagtctatgaagagttatatgtggttaccttgtccaatgtt

SEQ ID NO: 7478 - DNA, 565 bp, Glycine max
  Clone ID: 700665357_FLI
gacagtttgatggtgagaggtgatgtgtggtttggggctaatattactttgaaggggcaagtgactattgctgcaaaacctggcttgaaattggaaattcctgatggggtgacgattgagaataaggagatcaacgaccctgcagatatctaaggatgaatgttgtcgaagttgctgagatttggttccagtgaatacatgactgctgaactttgatttgcagtgctatacaatttagtttgtcacattagcagccagccatcttttagcttttctatttgctgggaactaaaaggttgcagaagcaaatagttccttacacatttttttttcaagcggcatgatagtggtgaaataattgtctgctcatctatttattcatcctgtaactcttagggcaaggcttgatatagtcacagctgagagcctgagaagctgagacaaggaataggaatagtttcagttttgctggtctttttgccttagatactattagaatcacaccaattgtttactgtaccaatgagttggagcatacattacagaaaagacatttttaaggcat

SEQ ID NO: 7479 - DNA, 1081 bp, Glycine max
  Clone ID: 700665388_FLI
attcaggtcaatgtggctcttatggggtttctagtcgagaaaatttaagtgaaagtagattgatggatctccttcatggttcagaatatgttcttacctatgaagacaaggacggagattggatgctagttggtgatgttccgtgggagatgttcactgagtcttgcaagaggctgaggataatgaagagttttgaagcaattgggctaggtaggtccaacgttcgttttaattaatctgttatactctgctttccttcgtttatatagttgtagaattgagaaaacaggaaactcatcaatcaaactggaaaacagaatcctggtttggtaaacacaattgtactccatagttaatgctttgactttagtttcatgtttctttaattttattagttagttatttataatgtttttttagggcgagttatatataacattaaattgatatattgtcttaaaaaaaatagattaatatggtcttgttgcatatattattggtcttgatgatgatgtttggttcagatccaaataaatatctccatgataatttgaagttgggaaaggggtaaagataaaacggtctccatttacacccttgtccagaattgctaccatagaatttggtctctatatttcttgttttttttttttcttttttgaaagctttattatgacactcatctaaatttgtgatcattgcagcacctagagccatggaaaagtgcaaaagtcgtaactagtgccaatgctgtatgcttttgtcttctaatccggaaagatggaagatcacatttaagcatataataccttgtttcttacctataattctatatacgagattggggtgtcctaaactttagtgggaaagatatattgatgacagcatattagttttgttgtagtagcggtctatatcattgatgtagacgtttaaggtttaaggttttaggttttaggttgttctcccacacttcaattactgccatcatggcttaccgtagtttgtaaattttgcatttctgtaagcgagcattttgtttgtcatggcaagccaagaaaagaaatatcatactttcttt

SEQ ID NO: 7480 - DNA, 518 bp, Glycine max
  Clone ID: 700665701_FLI
gattgcctccctctgctgccgtccctaatctgaaggctcccgccatctgcgatcggatttcatggctccaaagaaggacaaggctcccccaccttcatccaagcctgccaagtctggcggtggcaagcagaagaagaagaagtggagcaagggtaagcaaaaggaaaaggtgaataacatggtgctcttcgatcagggtacctatgacaagctcctctctgaggcacccaaatacaagctcattactccttccattctctctgaccgtttgaggattaatggatcacttgcaaggaaggctattagggaattgatggctagaggttcaatcaggatggtgtctgcccatgcaagtcagcagatttacactagagctacaaacacctagatgtactggttataatttatgtagtattgatgcacctctgaagtgaaattttgttttttctgtttgagacgtacctcatgctagattgcatcagttcgacagttgctaaattcatggtttatttcctttt

SEQ ID NO: 7481 - DNA, 1691 bp, Glycine max
  Clone ID: 700665732_FLI
ggcgccctctatcattgtcgtcgtctcggtttcttcccttctcgtggcagatgaggttggaaggtcagaaaccgaaccgtctaacccacacaaacacaacccagatactataattgactagcacttttttgtttattcctaaatacatggacactgatgccactggagatcctgttgacaagctcaaggctatccagaatgatgatgtagaatatcaagacgaagatgatgattttgatgacgaagaagaagaagaagatgaccctattactcttggtttcgttgacaaacccaagaatgaatggtctcttcgccgtcaatatttcccaagcaaaactggtggagtcccggcttggcttgaccctctgaatataccatcagggagatcatctgtgtgtgacatttgtggagatcctttacaactcttgcttcaggtttatgcaccaactgacaaggaaaccacatttcaccgaatgttgtttgtttttatgtgtccctccatgaaatgtcttcttagggatcagcatgagcaatggaaacgccatccagagaagccatctagaagtgtgaaggttttccgttgtcaactaccccgcattaatccattttactcacctgaatgccctcagtataatgagagccacgaacctgctggcagtggagctgctctttgtgattggtgtggcacctggaaaggagacaagctttgtagtagttgcagacaagcacggtattgctctgagaaacaccaggtaactgaattacttaaatgtattatgtatccttattttttcttccacaaatttgatttccatgacattccttttctcttccaactcacaggctatgagttggcgcacagggcataaaactgcttgccaacagatgaaagtttcttcacctgtttttggacccaacaaaagtggaaccacctccttggagtctcataaagttggaagcaagaatctgtggcctgaatttgagatcagcattgaagatgaaagtgaatataatagggacatatctgaggaaaatagcttagctaattccttgatctctaggaacaggaatgatgacacaatgaattcacttatggataactttaagggtgatgatgacaaaaagagctgggcctccttccaggaacgcattgccgaggctcctgaacaagtgttgaggtattataggaatactaatgccaagccaatatggcctgtttcaagtggtcgaccatccaatgctgatatccctaaatgcagttactgcagtggaccaatgtcttgtgaatttcagattttgccacaactgctctattacttcggcgttgacaacgaagtggactctctggattgggcttcaattgtggtgtatgcgtgtgaagcctcttgtgaagcaagtttgccttacaaaaatgaatttgcttgggtacaaatttattcactttccacaaccttatagagaaatgtctttttttttttaatttttttatataaattattatcgtttttaaattttgggctcagaagtatatgttattcttcgtttgacttggtggaagtatgaggaaggattttctttatctacttcaactatcaattttgaggattggctgttgattgtgtaatttataggataggcttgattaggatgtgtacgtttttcactgaaaaaatgataattaattttgctac

SEQ ID NO: 7482 - DNA, 1652 bp, Glycine max
  Clone ID: 700665771_FLI
gtgtacgaaaaggaaagaaatagaagattcaaagcgagtacgctgtgtacgcgttggttcatggtttcatcttgatcatggtcacgatgtaaccttaactgataaaaccaacacaaccacacaactcaactccatctccacgctttctcaactgagtcttctctgcaacttcttctataaaaaaccatctttgttttgtttcttcacttgtttcctcgtccaccttctgacttctgaggtgatcttggaagtgatttcattagaagcaattgataccatttgatatttgaagctacttgtacttaattcagttatgacttgttttcctttattattcagtaagtcgtcttcttcagcgagacacgatccagaaattgatgaaggcattcataatgttaaactctactcctacaaacaactaagaaatgccactgaaaagtttagtccagccaataaaattggagagggtggttttggttctgtctacaagggacggcttaaagatggaaaagttgctgcaataaaagttctttcagctgaatcaagacaaggggtgaaggaattcttgacagagattaatgtgatctccgagatagagcatgaaaatttggtcaagttatatggttgctgtgtggaaaaaaataacagaatattagtctacaattaccttgagaacaacagcctatcacaaactcttctaggtggaggtcacaatagtctctactttgattggggaactcgatgtaaaatatgcattggggttgcacgtgggcttgcctatcttcatgaagaagtgaggcctcatattgttcatagggatataaaagcaagcaatatcctccttgacaaagatcttacacccaagatttcagattttggtcttgcaaagcttattccagcaaacatgactcatgtcagcacacgtgtagcaggaacattaggttatttggcaccagagtatgcgataggggggaagctaacaaggaaagcagacatttacagctttggcgtcctccttgcggaaattatcagtggaagatgtaacataaactcacgattaccaatagaagaacaatttcttctggagaggacatgggacctttatgagcgaaaggaattggttgaactggtggatatatcactaaacggggaattcgatgctgagcaggcttgtaagtttctgaagattagccttctttgcactcaagaatccccgaagctccggccatcgatgtcttctgtggtcaagatgctcactggaaaaatggatgttaatgacagtaagataacaaaacctgccttaatttctgattttatggaccttaaagttagaaggaacgaagaaagtagtattgatatgaagaattcatctatgtatacaacctcttcttcagacaaccatgatagtaccatgtcatttgccacaactactacctttgcagcaatatatgatgaaagcatgtaaacattgatcaataagatttgtcctttactaaaaaaaatgttttgatttgtttaggcatgtatctcatgtaaattttgcaaccttttagatactttttgagtgatttttttcctggatgtagtcctccatgactaggaagttgctatgtgctgttctgtaaatataaacggggtttgtgttcgatgat

SEQ ID NO: 7483 - DNA, 1785 bp, Glycine max
  Clone ID: 700665788_FLI
ccaaagcaccgattctgatttcaagaattacatcatcatatcaagaaaaccttggaactacacaaaaatggtgtcggcgaacaaggagatggtcgtgcactgctttgacaccctcctcgctcactacaacagcacggaagcacctcctcctgccttcgatcaggctcaacagtaatccctctcatcttttatttctttaataaatattttttattaatactatatacgcttttctgtaaatggtaagacatatttttttgaaaattgttctgttttttttttaatttcatgagatggtccactgtttaaattttgtgatgttggtgaaattttcttaattttttgctcggataagtaagtgattctgcaatgggaatttgcgtgaataaggttgtgtttagataaatctctccataagcacaagtaaatgaaggaaataagattgtaaaatgaattgagcctctctcatatgttaaaactagtttatgcacctcagcttatggagaagttagatgagagaacttttgtagaagttgagtgcttaggttgattttaatgtatgggagaaatttacttaattgcaccttattttcttctcttgtaagtgcttatagaaaagtttattcaaacaggacttaagtacaaatgggaatttgaagcagtggaagagatattgcgtatttggttttaagaaagaaaagatttgttttccctttagttaagtcatagtttatacctgagctgagttatggaaaaggattttggggaagaggatgtgcccaatttgacaatttctttgcattgaaatggattaatctctgattttgtaagggggaaatccttttagcagtaaataaaaaaactatacttgagtcgacaatatgatataatatggtgtccttgtttcaagcaactatgttttgttttagtccattgtttgttacatggaagaaagtggtgaatggtggagatcctcgccttcggggatgtattggaactctggaagcacgcagcttgatcaatgggctcaaagattatgcgctgaccagtgccctcagggaccggagatttccacccatacaagttaatgagcttccgcttttggagtgtacagtgtcccttcttactgactatgaaactgctaaccattaccttgattgggagatagaaaagcatggtataattattgaattttctgatcctgtctataacacaaggtgtagtgctacatacctgcctgaagtggccgccaatgaaggttggacaaaaaccgaagccgttgattctttgatacgtaaagcagggtacaatggtccaataaccgatgaacttaggatgcaaatacagctaaccagataccaaagcaccttatttaccatgcactatagtgagtacgtctcctatgtgaaggagagaagaggtgaagctcctattcttgcggctaaatcacccaactattgaatatgttgcctacctttcttgaggctgcataatttctttactaaaaaaaagaattctgttttcaaatgaattacaaaataaaaaaagaaaacccacttgcctagggtcggaatcaatttgtttgtctaacccaaactaccgaagtgattggtgcaactttctatgctctccaaatttgtgtgcttttgaagagactaagaacattggacttagttcctaggaatgtcctctaccactgcagtttatgaaactgctgcactgttgaactgttttatgtcaatcttattgataacaggaatttcaatttctccaatgttgacaaat

SEQ ID NO: 7484 - DNA, 526 bp, Glycine max
  Clone ID: 700665830_FLI
ctgaaccatggtgtgttacttgtgggatatggtgcagccttttcttgctacatatgagagggcatgagacaccaccaatgtatgtagcaagaaaaggctgaaccatggtgtgttacttgtgggatatggtgcaaaaggcttctcaattcttaggcttggcaacaaaccatactggatcatcaagaattcgtggggggagaaatggggagaagatggctattacaagctctgcagagggcatggcatgtgtggaataaacactatggtttctgctgcaatggtgcctcaaccacaaacaacacctacaaagaattatgcttcttattagctatgcacttaaggaaatctaaataaatatttttcattctaggtgatgtatcatgtatgtaccaaaatattttggtacgtaagtcttttaaaaagtttgcatctcctctttggttttccttagttctgaaagttatctcctaagaagacaatcatatgtactgtacgtagtgtgaagatatagtattgtatgctgcag

SEQ ID NO: 7485 - DNA, 935 bp, Glycine max
  Clone ID: 700665913_FLI
atgaagactggggtcctggcaaaagaaagcgaagagaaaaggagtctgatgctgttgattctcttatgactttgcatgaaagtgagaataggcatcccaataatgagcacaacatgacaagtaaagattcttcaagcataaagatcaaaaggcattgttttaggattccacgtgatgcagttgagaggcttcgccaagtttttgctgagaacgaacttcctccaagatctataagagagggtctttcaaaagagctgggccttgacaccgagaaggtcagcaaatggttcaaaaatgcacgttacttagcacttaaaaacagaaagcatcaagcagaaggagtagcagatcagcttcagagtatcacttctacaaagaacagattacaaaaacaggagaatgtcgatcctttgaaatcaaagaccccaaaaattactaggacacattcccagaaggatgttaaaaatgtcaatggaagaaagaaaatgaagtcatctaacaagaaaagacaaccagaaattcctccacctccaggagaaaatggcaagaaggactttatggagatcagtgatgatgtgagcttgaagaaactgttgaagaaaagaaagaagaggttgataaattttacgtttggaggagactctcagttggcagagttggaatttgaaagactaagcgaattgaagactaaagtagatagtatgaagcaaaaattaactgcaattcaaaattacagagttaagggttcaccctattcgaatgaaccatccattgtatatgtacccacagctgtgttaagggaaaaggttgaatgataactttaattgaaaaatgcacagtgggggaatacatgatttgtagttagttcctgtctttcctttgtagtattcaaagaaaggaactgttttgaagttaatgatattaatacttgtctc

SEQ ID NO: 7486 - DNA, 337 bp, Glycine max
  Clone ID: 700665970_FLI
ctaatgttcttgttttaggagcatgttgtaaagagaattgcagacgacatgtcatgcaagtgcttagtttcaatttcagcttggaattcagtgagctttgagttcaatgagcaagtgcttagatacttaaatgcactctaggtgcttagtgcaaattgtattcttgcggttagttttacttacagttgtttatgtttgtctcagaatacagatactctactattttatattattttattccatttgctcccctcccatatttacacagcgtttgaatttgttggacctgaatgggttcacatatttagtatgatattcaagacctcagttgttatat

SEQ ID NO: 7487 - DNA, 2096 bp, Glycine max
  Clone ID: 700666092_FLI
aggcggagaagttgttggacaagatgattgagaaggagattgtgttgcggcagaagaatgcttatgagacagagctttttgagatggagcctagtgcttataatttgatgattgggtatttgtgtgagcatgggcggactggtaaggcagagacttttttccgccagttgatgaaaaagggtgtgcaggattcggtttcttttaataatttgatatgtgggcactcgaaggaaggcaaccctgattctgcctttgagattataaagatcatggggaggagaggggttgctagagatgcggattcctacaggttgcttattgagagttacttgagaaaaggggagccggctgatgctaaaacagctttggacggcatgcttgagagtgggcatctaccggaatcatcgctttataggtcagttatggagagtttgtttgatgatggcagggttcaaactgctagcagagtaatgaagagtatggtggagaagggggtgaaggagaatatggacttggtttcgaaggtattggaggcccttctcatgaggggtcatgtggaagaagctctgggacgaattcatttgcttatgcttaatgggtgtgagcctgattttgaccatcttttatctgttctttgtgagaaagaaaagacaattgctgctctcaaactgttagattttgttcttgaaagagactgtatcatagatttttcaatctatgataaggttttagatgctctcttagcagcagggaagacactcaatgcttattccattttatgtaaaattctggagaaaggaggatcaacagattggagcagccgtgatgagctgatcaagagtcttaatcaggaggggaacacaaagcaagcagatgttttgtcaagaatgatcaagggaacagatggaggtcctccaaagagaggaggaaagagaaaaactactgtatccacatagtttgttctctcttcattttcttgtgttttagaggtgagacaggtattactccttgttgttttggttttggttgtaacaagttatcttatgaggaagagaattcatgaattgttctttatttcaaatccaaatttgcaactcctgtgctgagtcttctgactgactccaacattcttttggttttggatcagagatttgttatgacactcatcacttgttttttattttacttttttaatattgttatcagtctactcctatcaaggtctccatttatgttttttatatttaactcaattctttcgaataatgtaacagtgagaagttggaactgaactgtagttttcaatcaaacttttctcgactttacaggattttgaatctttggatttctctttaattttgcttttcaaatcctgttttgccatgttgaatacacatgatgctgaatccatcccgtaccaagaactgccatcatcagtctatcctgctaagtgctgacaatacaaccaccagccacctggcattatatctgctctttagcctaagtcttgtgctgtgctgggcatttgcagtgtttgcttgttatactgactgagattctaagatctgccacttcccagaatcagctatgcccttggagagcaagatgggattcattttttagtcctgctttctacagctactggacttctgttttgcaggttctataaacaatgaagttgttctgctcacaagctaagaaaatctgggtgcagagataattgcattttccctattttttgagaaattaggtatgtctgatcccacaagtttcacgataccttctgatcctgtgggggattgccgggaatcttaaatgctggaatcggtagtcttccacaagttgggcttctgcaacgagcgtaggtggtccaaacctctctgttctttgttgttctcagttgaaacttacatcgatcccttacctcaaaacaaagtcactaaactggaataatttccggtaattgcattctcagtagatgtctaaaacccaaaacaagggattcaagtcatcttatgccatttgtattgagaggttgcagaatgtttgacggttgtgaagataataatggcatggtaaatttactttgtggatgc

SEQ ID NO: 7488 - DNA, 1125 bp, Glycine max
  Clone ID: 700666157_FLI
catggtggctgagctgcttggtgtgacattgggtccaaaggggagaaatgttgtgctgccaaataagtatggaccacccaagatagtaaatgatggagaaactgttctcaaggagattgaattggaagatccgttggaaaatgttggagttaaattggtgagacaagctggtgctaaaacgaatgaccaagctggtgatggctcaactacatctgttgttcttgctcgtggcttaatcagagaggggacaaaggttattgcagctggaatgaatcctgttcaaattgctcgtgggattgagaagacagcagcggcacttgtttctgaactcagattgatgtcaagagaattggaaagtctggctgaatacaacaacattggctgcacttgtaggttgaggatcatgaacttgcagatgttgctgcagccagtgctgggaatgattattcagttggaaacatgatttctgaggctctgcataaagtaggtagaatgggagtagtgacaattgaaaccggaaggagtactgagaattgtctagagattgtggaagggatgcaattcgatcgtggatatctgtcaccatactttgtcaacaatagaagaaagatgacagttgaactccacaactgcaagttgcttttggttgacaagaaaatcacaaaaacaaaggaattgatcaacatattgaacaattctgcaaaagaaaagtatcctgttttgatagttgcagaaggcattgaacaagaagctcttgctccagtcatcaaaaataaacttcggggtgctcttaaggtagctgccattaaggctcctgcctttggtgaacgcaagacacattacttggaagatattgccatcttgactggaggtactgtaatcagagaagatatgggtttcaccctagaaaaggctcacaagaatgatctgggttctgctactaaggttgtcataacaaagaattctaccttaatagttactgatgggagtactcgagaagctgttgagaagagggttcatcaacttaggaggcttgttgagaatactgtagaaaatttccaaaagaatatattgaatgaaaggatagcaaggttatctgggggcattgctattcttcagcaactg

SEQ ID NO: 7489 - DNA, 1444 bp, Glycine max
  Clone ID: 700666220_FLI
atccatgttaagctagtggcgatcggatccagctacagcctacaacctacagagtattcgccccgccttctccgcaatcagacacttctcttctgcagctaaagagattactgtcagggatgctctcaactccgcactcgatgaggaaatgtcagctgatcctaaagtcttcttgatgggtgaagaggttggggaatatcagggtgcatacaagatatccaaggggctgctcgacaagtatggccccgagagggttctcgatactccaatcactgaggctgggtttgctgggattggagttggcgctgcttactatggtctaaggcctgttgtggagtttatgacttttaacttctccatgcaggcaatagatcatattattaactctgccgcaaaatcaaactacatgtctgctgggcaaatatctgtacctattgtctttagaggacccaatggtgctgctgctggggttggtgctcagcattctcaatgttatgcatctttgtatggttcatgccctgggttgaaagtcttgtcaccatattcatctgaagatgcccgtggtttgcttaaagctgctattagggaccctgatcctgttgttttccttgaaaatgaattgttatatggtgagtcattccctgtttcggccgaagttcttgattccagtttttgccttcccataggaaaagcaaagattgagagggaaggaaaagatgtgactattacagcctattcaaaaatggttggctatgctctcaaggctgctgagacactggcaaaggaaggaatcagtgctgaggtcattaatttgcgttcaatccggccgcttgatcgatccacaatcaatgcttctgtcaggaaaaccaacaggctggtgacagttgaagaagggtttcctcagcatggcgttggcgctgaaatctgcacatctgtcattgaagaaagttttggttatcttgatgcacccgttgagagaattgctggggctgatgttcccatgccttatgcagcaaatctggaaagaatggctgtcccacaggttgaagatattgttcgtgctgcaaagagagcatgctacagatctgtgcctttggctgcatctgcttgaatgttctggaaaattttcatgtcctggttagttctttgcagaaacaaaattttccctattttccgccacaaaacagcaggaagaaattgcaaccaaagaatgctgattttaactcatttattatgttaggctttggtttaaaagattctgttgtatgcataatactgtcctaattttcaggactcacagatgctatacattttttccccttctcagcatatctgggaggaagttaatgttaaataacttgtacaacaatgacacaaaggcagcaggaagttttctgcgtttttggtttctgcttggcaataactaaaaatcaactttttgaat

SEQ ID NO: 7490 - DNA, 1370 bp, Glycine max
  Clone ID: 700666233_FLI
gtcccaacgctaaaccaaaccaaaactaaaacaatgttgtctgtctgagtttacattgagagtgcccaagttcgaattcgaaagcaaaaacatgtttttggcgagacccattttccgaggaccctccctttgggcgttgcactcttcctatgcatattcctctgcctctgcagctgctattcaagctgagagaaccatcaaagaagggcccagaaacgattggagccgagaccaagtcaaatccatctacgactctcccattctcgatcttctcttccacggggctcaagttcacagacatgctcataacttcagggaagttcagcagtgtactcttctgtctatcaaaacaggagggtgcagtgaagattgttcctattgtcctcaatcctctaagtatgatacaggagtcaaaggccaacgccttatgaacaaggaagctgttctccaggctgcaaagaaggcaaaagaggctgggagcactcgcttttgtatgggtgctgcgtggagggatacactaggaagaaagaccaacttcaaccagatccttgaatatgtgaaagacataagggacatgggaatggaggtttgttgcacccttggcatgctggagaaacagcaggctgttgaactcaagaaggcaggtctcactgcttataatcacaatcttgacacttcaagggagtattatccaaacataatcacaacaaggacttatgatgagcgtcttcaaacccttgagtttgttcgggatgcagggatcaatgtttgttctggaggaattatagggcttggagaagcagaggaggatcgtgtaggtttgttacatacattgtcaacactccccacccatccagagagtgttcctattaatgcacttgttgctgtaaagggaacccctcttgaggatcagaagcctgttgaaatatgggagatgattcgcatgatagcgactgcacgtatcataatgccaaaagcaatggtaagattatcagctggcagagttcgattctccatgcctgagcaggcattgtgctttctggccggtgcaaattctatattcactggtgaaaagcttctcactactcctaataatgattttgatgctgatcaactcatgtttaaagttcttggactcctcccaaaagctccaagcttaaatgaaggtgaaactaatgtgacagaagattataaggaagcagctttttctagttgagctgtcaacggtttttaaaaagtgtgatctttcaatttctctaattgctcattagcatgtactgatgttaggtttcattgaattttgtctattctcagctttgaagacacaaactccaacagttaaaaataaatattgaaattatttatttttc

SEQ ID NO: 7491 - DNA, 1347 bp, Glycine max
  Clone ID: 700666279_FLI
gggccttcaagggcttcaaggcaaaagaccctttattttgtcccgctccacttatgtcggttcaggcaaatatgccgcacattggactggtgacaatcagggcacatgggagaacttgaggtactcaatatccacaatgctcaattttggcatatttggggtgccaatggtgggttcagatatatgtggcttctatccacagcccactgaagagctatgcaatagatggattgaagtaggggctttctaccccttttcaagggaccatgcaaactactactcccctagacaggagctttaccaatggcagtcagtagccgagtctgcgagaaatgctttgggtataaggtataagctactcccattcctttacaccctgaactatgaagctcatgtcagtggagccccaattgccagacctcttttcttctcatttccaacttacaccgaatgctatggccttagcacccagttcttgctaggaggcagtctcatggtttctccagtgcttgagcagggaaaaacacaagtgaaatcactctttcctcctggtagctggtacagtttgcttgattggacacacaccattacgtcaaaggatggagtctatgtcaccctcgacgctcctcttcatgtcgtcaatgtgcatttgtatcagaatgccattcttcctatgcagcagggtggaatggtctctaaggaggctagaatgacacccttcaccctcatcgtaaccttcccatcgggcgccacccaaggagaggctaaggggaacattttcgttgacgatgatgagttgccagacatgaaccttggaaatggctattcaacctatgttgatctccatgcaactgtggaccaaggagctgtgaaagtttggtcagaagtccaagagggcaagtttgccttggataagggttggattattgattctatatctgtgttgggattagaaggaagtggagcagtgtcttcactcgagatagatggaaagcctctaatgggtggtggctcaaatgtgaatgttactacatcagcacatgagcacttgaacaatgagggagaaggagaaaagaagactgtgatggttgctttgaggggcttgaacatcgttgtgggtaaaaactttgccatgacatggaaaatggggtgataggttgtgtggtctcatcttatttttatcatcttgtaactttgtgttctttttctttgctacaattcttgtaggtgtttgtgagggagaagagatgagctagaattatgctcgtccttttccaatttaacaagccgatgcaacactggcttatgtgttgaaatcttcaatgttatgttagtttttttttgggt

SEQ ID NO: 7492 - DNA, 701 bp, Glycine max
  Clone ID: 700666475_FLI
gaaagcccttcatcagagataacttgacaaataaaatcaccatgtctatcatcccaaacttgttcggtggtagacgaagcaacgtcttcgacccattctctctggacgtatgggaccctttcgaggggtttcctttttccacaggtcacgtgccttcctctggtggggaaagcagtgccatagccaacactcgcgtggactggaaggagactccggcggctcacgtgttcaacgttgatcttcccgggttgaagaaggaggaagtgaaggttgaagttgaagatgggagggtgctgcagattagtggtgagaggaccaaagaacaagaacagaaagatgataggtggcaccgcgttgaaagaagcactgggaagttcatgaggaggttcaggcttcccgagaatgccaaaatggatcaggtcaaggctgctatggagaatggagtgctaactgttactgtgcccaaggaggaagacaagaaacctcaagtcaagtcaattcaaatatctgcctagatctttaattggttgttgctgtctctcattccaaacaagtgtgttctgttctgtctttactgtatgttgttccatgtatgtgtttatgctgtgtgttgtgctttatgtcatttgtgagggtttaatactggggaagttgaaagttttccgttaaatgtatcaataaacttttattgctttatctcg

SEQ ID NO: 7493 - DNA, 447 bp, Glycine max
  Clone ID: 700666713_FLI
caataatcggtcatatacgcggaagcttgtgatatacgaggaagcatgtttgagggtatgatgcctaaggatttgaagatttatgccacaactgcatccaatgcacaagagaatagttggggaacttattgtcttggaatggatccttctccacctccagagtacatcatttgcctaggggatttgtacagtgttgcttggatggaagataagtactaaatatagtgttcttttgtaatcaacccatatataccatgtataatattctaatccaaatgttatgacactgggaggattcaaattgggaggattcaaactcgtctatgacctccttattactccaaatgttcttttttctctttctttgtttcacacttgtactcgctaggtgactttttgttttcactaaagctttttaagttgttgtgcacctcaatctatttgatc

SEQ ID NO: 7494 - DNA, 796 bp, Glycine max
  Clone ID: 700666775_FLI
atttcttaatggagaagtgagcggtgagaggaaacagaagagagaagagcaatcggtgagtgaatggaatggattcaggtcctccggcgaacgatttgtgttcagtgtgccatggcaactttcatattccatgccaagccaattgttctcactggttttgcggaaattgcataatgcttgtgtggcagcacggatcagtgggttgttcatgcaagtgcccactgtgtcgtcgagccatcagtctcttagtccccacagaagagtctctgaggcaacagcaggaccccgaagtttcccagattctgtcaaagattcatgcctataaccgtttcttcggtggccaacccaccactctctatcagagactgcgagatcttccctttctcttgcacaggctgctcagggaattcctccaccctcacagatcccttcctcttctcattcgcgctcgcgtctttgttgttatgatagcgagtgttatatacctcttcagccctattgacatcattcctgaagggatattaggagtagttggtttcttagatgatctcctaattgtgctcatctgcttcctacatgttgctgccctttatagatcagtactctacctccgtcatgggggttcctgaacatgttctacaattttacaggtaaaatgagatgatgatgcctagataggtgccggatatggatagtgggcattattctttcattttcaaaattgaactactttgttttctatgtacatagacaagttcaatttcaaatagtggaattagtaatggaaattacaatg

SEQ ID NO: 7495 - DNA, 2003 bp, Glycine max
  Clone ID: 700666881_FLI
gatgaattgttctttatagatattcttcattgtgtatatacatttggtaacctcttgtctgactttgttttgacaagttgctgacccctgtgttgacaaactacggcatttgaacttttttttcttttcaataccgcaggcctattctacagtcggaacacctgactatattgcccccgaagttcttctgaagaaaggatatggcatggaatgtgattggtggtccctgggagcgataatgtatgaaatgttagtggggtatccgcccttttattcagatgaaccaatgttgacttgtagaaagatagtaaattggagaaattatttaaaatttccagaagtagttaaaatttcggcagaagcaaaggatcttattagtagactcctatgtaatgtggatcagaggcttggaaccaaaggggctgatgaaataaaggtgttgtggcgcacccatggtttaaaggtattgaatgggacaaattgtaccaaattaaagctgcttttattcctgaggttaatgatgaattagatactcaaaattttgagaagtttgaagaggctgacaaccaaactcaaccttcctcaaaatcaggcccatggagaaagatgctgtcatctaaagatgtcaactttgttggttacacatataagaactatgaaatcgtgaatgatgatcaactacctgaaattggttcgtacattttcaattttatgtgtatatttgtttatgttttgtttaaacccttttatctcattttcatcatttttgttttgtaattagaaagttcctctttaatatattgcttctaataatcttagattcttttgctcctgtgacatttctgaatctaatggaaggtttggtgctctatcaattttattgcactaaaccttgtctatttgagcttcatattgtggggctgaacatgaggtttttattgctaggggatggaaaaatttatcaagtaatgcacttggataaacttgcacatactttgaatgttccagattgtgtacatactttgcatagtttgtgcaaatgtattttaccctctattaattaatgtactgttgtctactttcgtaagttttattgacagtttttggcttgtcgaaacccattttattgtggcctttaatgcaacaagcctttggaaaaaaatgatgcagcttgctaaagaaagaaaaagtatatatgttattgctagttgctgccccttgcaaatttctcgttgatgcattaattgactataatttcaataaaatgtgattttgctgaagatcatgctgctgattcttgctgtttattattgcttatgcgtttgttattttgattaccccccaacaccaaatttattgttcttttccaaatagatttatcattgtactaatcttaacaagcaatatgggtatgttgttatcagctgaattgaagaagaagagcacaaaacctaagcgaccatctattaagaccctatttgatgatgaatcagctacagctgccaatcaacctacccaagggagcttcttaaaactgttacctactcaaccagaagttcctgagaagagtgaatctcaatgatcccaactagtaatattttacaggactcttacatggccatggaggtatgaccaaatgctgagttgaatactgattgttttagtctttcccacattcttttgttagtttggcgtggatagttgtgggagcaaaggctctgaaactttgtggttttggatagctgggttttggcttgactgggatatttgtctgtagaaaaatctttgaaggtatatattctttacatttttggttggtggtgtattcttttgttcaccatttatcaagctgcaatgtgttgagaatccaagttatttcttgtaattaagttactgctgaagtgctgacaaggatgtacaattctcacatgtagagattcattagtttgtaaggtaacattttcgttcttatcttacttcaaaaagtataatttttacaaatt

SEQ ID NO: 7496 - DNA, 2500 bp, Glycine max
  Clone ID: 700666962_FLI
tgttctctgtgctactgagagactatagagcacatgctgctgcatcttgcatgaatcgtttagctaaattgagtgcacgatggattggcaatcatgggttctcaataggcattgatgatgtccaaccaaagagattctgattaacaagaaagatgaaacaatttcagaaggttatagggaatgtgataaacacatagaagctttcaataagggaaaactagaactcttagctggttgtgatgctgcgcagacattagagactcggattactggggtattaaatggacttcgtgatacggcagggaaggtctgcatgcaaaccctacactggagaaatagtccattgatcatgtcacaatgtggctccaaaggatcttctattaatatcagtcaaatggttgcctgtgttggtcaacaatcagtcggtggtcgtcgtactcctaatgggttcatagatcggagccttcctcatttccccagaaaatcaaaaacccctgctgcaaaaggttttgttgctaattccttttacagtggattgtcagctactgagtttttcttccatacaatgggagggcgagaagggcttgttgatacagcggttaaaactgcagacacgggatatatgtctcgtcaattaatgaaatccctagaggatttgtttttacattatgattatactgtaagaaatgctggtggctctattgttcaattttgctatggagatgatggcatggatccagcaggcatggaaggaaaaaatggaaaaccattgaattttgagcggttgtttcttaaaagcaaggccatatgtcccaatgatgaagatgatgaaattttatcttcctcagatgtgagtaaagtagttcatgagaagctctcagaatttgatatgtctaggttagcagagaaaggggtttttgaggtgggcttctctgctgacttcgttgaatctctacaatcctttatcaaagataatgcaaaattaacggaagaaggtttcactgatgagcattctcaaaacctgaaaaaatttgggcagaggatatctgggatcactcgtaaacagctagatgtttttttgaatatttgtctatctcgttatcattccaaaaaaatggaggctggagctcctgttggtgcaactggagctcatagtattggagagcctgggacccagatgactttgaaaactttccactttgctggagttgcaagcatgaatgttactcttggagttcctcgtgtcaaagaaataatgaatggaaacaaaaaaatcagtacaccaattatcactgctatacttgagagggatgacaatgcaaatactgcaagaattgtaaaaggtcgaatagaaaaaacaaatttaggccaggttgcaaagagtataaaagttgttatgacttcaagatcagcatcagttgttatcacccttgacatgaaaagaatccaggatgcacatctaaatatagatgctaatattgtaaaagaatcaattttacgaactaaaaagacaaaactgaaaccagagcatatcaagattttagatattaaaaagcttgaagtggttccccaagatgtggatagaagtaaaatccattttcagcttcactatctgaaaaatttgcttccgacagttgtagtgaagggcattaaaactgtggatcgagttgttatcagtaaagacaccaaggctgaaaagttcagattactggtggaaggcacgggttttcgagaggttatgggagttgaagggattgatggacgtaaaactgttagtaatcatatccacgaagtgagggacacactgggaattgaagctgctagagagagtattgttaaggagataaagtatacaatggtggatacacatggaatgaatatagacatacgccatatgatgcttctagcagatatgatgactgccacgggtcatatccttggaataaatagatttggaatttcaaagatgggcaaaagtgtattaatgcttgcatcattcgagaggacagcagatattcttttccaggcatctgtacgtgggagggatgactcgattggtggagtaagtgaatccataatcatgggtataccaattcaaataggtactggaatgatcaaggtcaaacaaaggttggatcctccggagttgcctcatggtaccagtcctattctatcttgaatttgaaatatatatttccagcaagaatgtggatcatccaggtcggagtgcattgaatgctgtcagcttaagttgggaaatttgaaatgtatgtgcgtatattttgccaaaaactattgcagaacatttctctgcttagagatgcatgcatggaatgagatttcctggcttccaaatggtctttagctatcaccagagttcaagcacatgagaaggggataggaaagaaaaggagacattattttcaaccgagcattgcttgtatcttttagccaaaatatgattttaatgattagtaatcattgtgaaattttgcatttt

SEQ ID NO: 7497 - DNA, 1330 bp, Glycine max
  Clone ID: 700666969_FLI
ctctaggtcagatttcttcaaatttataatgtggtatgtttttacatgcaatctaatataaacaggtgtaggatttctaactgttgttccttttcaatgcaggtgtatggcctcatcattagtgcgcacaggatttgtacgaggttctctgacccagggaaatggttgttatcagcacaggtgtatcaacaattctttagaggttgctgtggatggtatctggaaagtgtgtcctcaggctggtggaccccttcagtttcctggctttaatggtaaattaatctgccctgcatatcatgagctctgtaacacaaatccagtggttgtgtctgggcaatgtcccagtgcatgtaattccaatggagactgtgttgatggaaggtgccactgcttgcttgggtttcatggtcatgattgcagtagacgttcctgccccagcaattgcaccggcaatggcatgtgcctctccagtggaatttgtgaatgtaaatctggctatactggcattgactgttctactgctgtttgtgacgagcaatgcagccttcatggcggggtttgtgataatggagtttgcgaatttcgctgttctgactatgcgggatacacttgccacaacagctccatgctcttctccagtctttcagtttgcagaaatgtgctgggaaatgatatctccgggcagcattgtgctcccagtgaatctagcatactacagcagctagaagaagtggttgtcatgcccaactaccatagattatttcctggtggtgctaggaaactatttaatatatttggaagctcctactgtgatgaggcagctaaaaggcttgcatgctggatctcaatacaaaagtgtgagaaggatggagacaacaggctacgagtatgtcattccgcttgtcaggcttataacctagcatgtggagcttcactggactgtggtgaccaaacccttttcagcagcgaggggggggatgagggtctgtgcactggctctggtgaaatgaaattgtcatggtttaatcgactgagaaatagtttttctttgagaaacagtttctccaaaggaatatctgtaagatataggcagttttagcttcaattgtttttcacttttggggaagtggattgtaatttttacagggttattattgtaggagttagtaattggtggcacgtaacgtcgtagatttagggccttgctcatccaaaattgtctagaaaaatgggggatgagaaggttactgatttggctttcgaagagagcctcttgtagagaaaattgaaagtctttggaattggatataggtaatgaggggaaaaaaag

SEQ ID NO: 7498 - DNA, 1759 bp, Glycine max
  Clone ID: 700667058_FLI
ccattctcatgagtcttttggtcctttgcaacgcagcagtagagtagccaacatggccacccaatcaccgcctcctcccactcccaccgccaccgaccaaaaccaaggttctgaagtcgtgcaagcaacaactgtagatcagcaaaatgccagagaagagcctgctaaacagagttcaactacatcagtctttgtgaactcgcaactgatgcgagaagaacaaattcagaatgctgtgaaatttctatcacacccaaaagttagaggttcacctgtcatgtataggcgatcatttctagagaagaagggccttacgaaggaggagattgatgaagcttttcagcgtgtgccagattcagctccaacagtgcagacaggtggtgtaaatcaagatggccaattgaaatcgtcatcaaacattcagcaacaagcccaacatcaaactttgcagccgggtttacctgcttctactggtgttaatacttcgccgggaaccttatcacgctccaaatttcactggtctcatacacttattgcagttggattactggctgcttcaggtgctggaacagctataataattaagaattctgttctccctcggttaaaatcttggatacgtaaggttgtcttagacaatgatgatgaacaattaaagaaaactgacaacaaaccgacactgatggaagaagctgcgcaagctgcaaaatcagctgcagctgcagctgcagatgtggcaaaagcaagccaagaaatgctggcttcaaaaggtgaagagaggagatactttgtggaagttgtgagccttttagataaacaagtacaagaaatgaagtcaatgacaaatgccataagaaggttggaagggcaagaagatcttcaaatcagtcaaacaagttcgaagcaactgattgtgaatggaaaagcagactacgacttgcattcagtgagattttcatccccacctacatctgttgaaccatcaagtggtcttcatccaaaggcatatgcggagataatggccatggtccaaagaggagagaagtcttctaatattaggccttgggaggttagtcaggtgcaaagcacgtctacccagatgcttcagtctcaagtaaatggtgaagacttgaatactaaggcccaggatacccctctagtaaatggggatgactcattaccctggtggcagaggaaaaatgtcagaatcagagagattgataatgaaaatgagtctaatggagtaccttatgcttctgcatccaatcagcagccagtccaacgcgtatgggttcctcctcaacctccccccatagctatgccggaggctgcagaagcaatcagacgaccaaaaccagcggcccaaaaggaacaggtgtctgataatcagtcagtagctcattctttagacagctctgatgacgtacatatggccccaaaactattggaatccgaaggtgcagtagagggcagcagtgtcagctcggttcccacctctagtgagatacaagaggagcatgaagtcaaatatgatgagaaatgaaggtgaatcatgcatgatctatcatgaaaaaacatgaagtcggaaataacacttgaagtagtcccatatttggaataagcttgtcacacaatctgtttcataatcatatatagttgtacttttgaactggacatcaatacaatatgcaaatgcacgtatctttctatgcaagaatttgtttactaaagcaaaagttttaattactgaacttttact

SEQ ID NO: 7499 - DNA, 1579 bp, Glycine max
  Clone ID: 700667092_FLI
gcgctagttattcatcctaggcattctggatcggataatgagagtgtgaagataacagttgccggttcaagtgtcagcgttggtgctgccagtgaaacgcgaaccgtgccaggcagtgaggctagtgatattcaaatggttgaagcaggaaatatggtcatttccatacaagttctgaagaatgtcactgacaatttcagtgagaagaatgttctgggacaaggaggttttggaacggtttatagaggtgaactccatgatggtacaagaattgcggtgaaaagaatggagtgtggggcaatagctgggaagggtgcggcagaattcaagtccgaaattgctgttttgactaaggttcgccaccggcatcttgtttcccttcttggttactgcttggatgggaatgagaagcttcttgtgtacgagtacatgcctcagggaacgttgagtaggcatctttttgactggccagaggaaggactagaaccactggagtggaatagaagattgacaattgccttagatgtggcaaggggtgttgagtacctccatggcttggcccatcaaagcttcatacatagggatttaaaaccttcaaacattctccttggagatgatatgagggcaaaggttgcagattttggtcttgtccgtcttgctccagaaggaaaagcctctatagaaacaagaattgcaggaacttttggatatttggcgccagagtatgcagttactggccgtgtgacaactaaagttgatgtgttcagctttggggtcatattgatggagctgataacaggaagaaaagcacttgatgaaacccaacccgaggatagcatgcaccttgtaacatggttccgcagaatgtccataaacaaggactcattccgcaaggccattgactccacaattgagctcaacgaggaaacgcttgctagtattcacacagtagcagagttagccggccactgcggtgcgagggagccatatcaaaggcctgacatgggtcatgctgtcaacgtgctttcttctcttgtggaactctggaaaccatctgatcagaattctgaagatatatatggaattgaccttgacatgtccctaccacaagcacttaagaagtggcaagcttacgaaggtagaagtcaaatggagtcatctgcttcctcttcgcttcttccaagcttggataacacacagacaagtatacctactcgcccttacggatttgctgattctttcacatcagcagatggtaggtgaccatgattggttgtaaataattccaaggtgtttctttagtgtgcatgttcattctccagtccttgcttctttctggcttttcttttgtgaacttgtttttatctttttttcatggtgtagttctccacacctcctccatgattaatttcacaccatctttagcacttgttgttaaggacttttgctgacaaactgggaaagagattctcagctgaggatgtatttttcatcaactcacattcgtggtttcccccttttgagttaattttgagatgtgtaaatcaaatatcactattgaacttccagttagtagctt

SEQ ID NO: 7500 - DNA, 1481 bp, Glycine max
  Clone ID: 700667095_FLI
aattggttgtgaagtagtttcactggaaagctattataaacaaaatattgatgacataagaaatggtcaaagaacaaaagtacctatatttgacttggaaagtggtgctcggagtggcttcaaggaacttgaagtttctgaagattgtggagtgattatatttgaaggcatctatgctctgcatcctgatattcgaatatcccttgacttgtggattgctgttgttggaggtgttcattcacatttgatctcacgtgttcaaagggataagagtagagtggggtgttttatttcccaaaatgagatcatgatgacagtgtttcctatgttccagcagctcattgaacctcatcttgttcatgcacatcttaaaattcgaaatgactttgaccctgtgctttctcctgagagttcattatttgtattaaagagtaacaaaaaagtagcatatcaagatattgttgcaattcttgattcagcaaaattttgcagttcggtgcagaaatttattgatatttatataaggcttcctgggatcccttctaatgggcagttgagagatagtgattgtattcgagtcagaatatgtgaaggcagatttgcattgctgatacgagagcctatcaaagaagggaactttatcattcagcctaaagtggattttgatattggcattagtacggttgctggtcttcttaatcttgggtatcaagcagttgcttatattgaagcgtctgcattcatctatcaggatggaaagattttaattgaggttgatcatctacaagatgtccctggcccatacattcagataaagggtgtcaataaagatgcagtggcagcagcaggttcaatgcttaaattggatggttcatatactactaagagttatcttgaaataattttggaaagactaccagcaatagaaagaacttctggtgggattcattctcagcaatcagcaaggctgctggagattgttgagtttattcaatctcagggatgtagctctgcttcagaatcctcatcaagtagggtagtctctccaattgaaggggttattgaggagatgcaatcaaggattagaaggcttgaaagatggctagcgataaatacggttctatggacatttctgatgtctgccctcgttggttattcactgtatcaaaggaagcgtcaataatgatctttggaaattttcaggatcatgcattgccgttcttgtttagttaccttcgtataccgatcccaattttttaactggccactccataaactaactacagaaactaatcccttgagagtaggttgcattatacattgcggttcgtcatttcaatggttaactgttaattcatccatatgttcataatttggtgaccaaaacgagtgagatatgcagccaccgcctacttcccggctatggaatttgtaagtaatgaaagttttatggctcaacacacctaaagacgttaatgatc

SEQ ID NO: 7501 - DNA, 1785 bp, Glycine max
  Clone ID: 700667138_FLI
tttgatgcttccatcagatagtgctagacaatggcatgtgcacgagttagaactggttgaggtagttgctgaccaggtagctgttgctctttcacatgctgcaatcttagaagagtcaatgagggcaagggatcagctcatcgagcagaatgttgcattagatctagcaagaagagaagcagaaactgcaattcgtgctcgtaatgactttttggcagttatgaaccatgagatgagaactcccatgcatgcagttattgcactctcttcattactacaggaaacagatttgacagctgagcaacgactgatggtggagacaatattgaaaagcagcaatttgttggctaccctcatcaatgacgttttggatctttcacggcttgaagatggcagtcttcaacttgaagcagcaacatttaacctccattctttgttcagagaggtccttaacttgattaagcctgttgcatctgttaaaaagttatcactcacttcacatgtagcctcagatttgccaatgtatgccattggtgatgaaaaacgtctcatgcaaactattctgaatgttgttggtaatgctgtgaagttctcaaaagagggttgcatttccatcactgctttcgttgcaaagcctgaatcctttagagatgctagaattcctgactttcttccagtgccaagtgataaccacttttatttgcgagtacaggtaaaagattcaggatcaggaattaatccacaagatatcccgaagttattcactaagtttgcacaaaaccaatcattaacaagaaatcctgctggaagtggacttggcctggcaatttgtaggaggttcgtaaatcttatggaagggcatatttgggttgaaagcgaaggtattggtaaaggatgtacagtcacttttattgtaaaacttggaatcccagaccgatcaaatgaatttaagctaccttttgtacctaaagtaccaggaaatcatggatctacaaactttgctgggctcaaagttcttgtcatggatgacaatgggtcagttgcataggctttatttttgtaccttctgttctgatatatgtttctatatcatttacttactaagtaaaacattagaattttgggatagcatacaaaagcaaacttaggttgtttacttataactgattgtgaaacttgtactgtagggttagcaggacagtaacaaaaggacttcttatgcatttaggatgtgatgtaacaactgcaagctcaagtgaagaatgtctgcgtgttgtttctctggaacatgaagtggtcttcatggatgtttgtacagggttagatggttatgaacttgcagtccgtatacatgagaagtttacgaagcatcaagatagaccactgatagttgctcttactggaaacaccaaaaaggtaacaaaagagaactgtatgagggttggtatggatggccttatattgaaacctgtttctgttgacaaaatgaggggtgttttatcagaactattggagcgccgagttctgttcgaaagtgtttaacctgttagattgttgtacatagctatatcaaatttggagaagagcacaaacttatgaagcaatgaggcaattgacattagttgtcatcctttttgctgttttgagatcccggcaaaaggaacaacgattgagtctgcgttgttaaataattttttgtgaacacaagttcgtatatgttgtgtattctgcattttatagcagactttcgatgttttgcaatggcggtaaaattgcatttatact

SEQ ID NO: 7502 - DNA, 2138 bp, Glycine max
  Clone ID: 700667525_FLI
tgggggacaaggacaactcctctattccacccacaccgatgtctccttccaattcccccgtcgccgccgaaacgctattttccggcacggtgttcctgattctcctccacctctctctcttccttactcccacactttctcttgacttcctattcaactccttcgccggcgtcaccaacctcactctcatcaaagatgcccgcgtcgacgcctccgtcatccgcatgaacaacgactccaaccaatactcctacggccgcgccttctaccccatcaaaatccccatgaccaaaacaaactcttccatttcttccttctccacttcttttgtcttctccatcttgccgcagatctctaccagccccggcttcggtctcgccttcgtcctctgcaacaccaccaaccctcccggcgccctcgccagccagtacttcggcctattcaccaacgcaacctccccctccgttttccccctcgtcgccgtcgaattcgacaccggccggaaccccgagttcaacgacatcgacgacaaccacatcggaatcgacctcaacaacattgaatccataaacgccaccaccgccggctacttcaactcgtccggcgccttcgtcccggtgcgcatgcgcaccggccagaacatccacgcctggatcgacttcaacggcgagaatctcgagttcaacgtaaccgtcgcgccagtcggcgtttcgcgccctacgaaaccctcgctttcgtatcagaatcctgccatagctgactacgtgtccgccgacatgtacgtagggttttccgcttcgaaaacgaactggatcgaggcgcagagagttctcgcatggagcttcagcgattcgggacctgcaaaggagctcaacacaacgaatttaccagtgtttcaactagaatcgtcttcttcctcgatctccggcggcgcaatagcgggaattgtcgtcggttgttttgtatttgtccttatatgcgcttctggtttttacctatggtggcgaatgaacaaagcgaaagaggaagaagacgagatcgaagactgggagctagagtactggccgcacagattttcctacgaggagttaagttcggcgacgggggagtttcggaaggagatgctgttaggttctggagggttcgggagagtgtacagagggacgttaccgaaccatacgcaaattgcggtgaagtgcgtgaaccacgattcgaagcaagggttgcgggaattcatggcggagatttcaagcatggggaggcttcagcacaagaacttggttcaaatgagagggtggtgcagaaaggggaacgagcttatgttggtttatgattacatgcccaacgggagtctcaacaagtgggttttcgataagtcggagaagcttctggggtgggagcaacgccgtcgtatccttgtcgacgtggcagaggggcttaactaccttcaccacggttgggaccaggttgttattcacagggacatcaaatcgagcaacattttgttggacgccgacatgagagggagattaggggactttggtttggccaagctttacacgcacggggaggttcccaacaccacacgtgtggtggggacgttgggctacttggcgccggagctggccacggttgcagcgccgacttcggcgagtgacgtgtacagcttcggggtggtgctgctggaggtggcgtgcgggaggcggccgattgagacgtcggtggcggaggaggaggtggtgctcattgattgggtgagggagctgtacgccaagggttgcgcgcgcgaggctgcggatgcgtggattagaggggagtacgatgagggagatgtggagatggtgttgaagcttgggttggcttgttgccaccctgatcctcagaggagacccaccatgaaggaggtcgttgcgcttctcctcggagaggagccgcaggaggcccccggaaaagtcttgtccgatttggttcgcggcggcaaggatatggatgagactgcgcccttgcaaccctcccctcctcctgtttgagttttttttttttttttttgcacgagtttgagatttttttcactgtacatattagacttattttttttttttcctcgttgtgaatggattttgctagattgcggtttg

SEQ ID NO: 7503 - DNA, 668 bp, Glycine max
  Clone ID: 700667729_FLI
gagataattcctctatgcttgcgaaccatggaaatgggcagtgagctatccaaaacagttgcaacatttattgttcaaaaaattctgttggacgatgtgggcttggactacatttgtactacagcggagcgcttttttgcggtaggtcgagttctggggaacatggtggcagctctagctgagcaaccttcatctcgtctattgaagcatatcattcgatgctatcttcgcctgtcagataatccaagggcttgtgatgcattaagaagctgtctgccagacatgttaagagatgctactttcagcacttgccttcgtgaagaccccacaactaggaggtggctacaacaattgcttcacaatgttggagtgaatcgggttcctgcactacaagctggaggaggtttcgatcacatgattgtgacctgagtataaaccaagatcttgcttcattggtgctatcagcattttagggtccgttatatctatatttcatggaacttggtttttcagaggaaaaggttgtaaattattggtgcgtggaaaccaagttagaagacattttctttctttatacccctcccctccttgtgcggttaagcttatatcaagacattgaggcagtttttactccttaaatgaactttgagtaggtacattatgatgtc

SEQ ID NO: 7504 - DNA, 1093 bp, Glycine max
  Clone ID: 700667779_FLI
cgcagaagaatcatcaccccaaaacccaaattaaaaaaaaaacccaaataatacaactgaagttattttaattttcttagtaaaaaaaaaaaagagaagaaaaatgacttcgattcatttgataaacactctcgctgctccgcttcgttctttttctcctccgtcgctttttccgcaatgccattctcctctccgttcttccgctgccccgaaacggcgtcgtttcgctaactcctctgggttccgccttgcttcaagccaaaccgtgaattcggttccgcgtgggaatggaacttacaccgttgctgatttcatgacaaagaagcaagatttgcatgttgtcaaaaccaccactaccgttgatgaagctctggaggctcttgtaaactacagaatcagtggtcttccggtaatcgatgaggtctggaatctggttggagttgtatctgattatgacttgttagctattgattcgatatcaggaggtcctcaaagtgatgcaaacttgttccccaatgttgatagtacttggaaaacattcaatgagttacaaaaactgcttagtaagactaatggccaagttgtcggtgacttgatgactccaactccacttgttgttcatgaatcaactagtcttgaggaagctgctaggctgttacttgaaacaaaatatcgtcgactacctgtggtagatgatgatggaaagctggttggacttattacacggggaaacattgttaaggcagctctactatcaaaacgtgctggatagtggtgattgtctttgtgaaaagttattcaaatagatttgcttgaaggttgtgctggcgacggtcagcgtaacctctatattattagctacggataatgttaatgtatgtagttatatctaatggatgtttagactattgcaaatgtatatggcaggccaaaggaggagctggaggcaacttttgatggccttgtgagatcttagtggtggataaaaaaccatatagagtgatgtgatttatcgataacctttattaagttgtcaaaattgtttcggtgcattggattgtttcgagcttggatatactacatcctgttcttg

SEQ ID NO: 7505 - DNA, 836 bp, Glycine max
  Clone ID: 700667785_FLI
gaaaacctaagcttagaattagaaacaaagaaaagaagaaaggaaagaattgatcgttgaaaatgcagggaggaaagaaagcgggagagtccattaaggaaacagctacaaacattggtgcttctgccaaggctggcatggagaagaccaaggccactgtccaagagaaggcagaaagaatgacagcacgtgatccggtgcaaaaggagttggcaacccaaaagaaagaggcaaagatgaaccaggcggagctggacaagcaggcggcgcgtcagcataacacggcggccaaacagtccgccaccacggctgggcacatgggacatggccaccacaccaccggaaccgggactggaaccgccacgtattccaccaccggggaatatggtcagcccatgggggcccaccagacgtcggcaatgcctggccatggaaccgggcagcccacgggccatgtcaccgaaggagtggtgggctcacatcccattggaaccaacagagggccgggtgggaccgctacagctcataatacccgtgcgggtggaaagccgaatgattatgggtatgggactgggggtacttaattaatgatgattatatcatcaaggtttattggcaatagtttaataataaggtttattaaatgtagttagtttggggtatggcttttgtacttgtttgtttggttatctttgtttgtctgcttttctctccacttgttatggagagacttgggtgtggttatgacagtgttttcactacgtggaaacgttatatgtggtaaacttgtacttgtatcatttcgtgataataattaaataaaatagtggttgtgt

SEQ ID NO: 7506 - DNA, 970 bp, Glycine max
  Clone ID: 700667788_FLI
caagaaagaacttccttataaccaaaaccaacaacaactatggcaagttatcagaagcactacgatgatcagggtcgcaaggtcgacgagtatggcaatgttgagaggcaaactgacgaatatggcaacccggttcatgccactagtgtcacttatgtagccaccaaaagtgttggtggctacaatgatgacgctaataagcaacatgatattactggtgtctatcccgagaaagacaccggtagacatcattttggtcgtggttacgacggtgacactaacaagcaacatgatgctactggtgtttatcccggaatagacattggtagagatcatgggactaccggtgtttatggcctaaacaccgacagacatcatggaacttctggggtgaatcccgggatagacacccataaccaacaacatgggactaccgttggttatgctggtgacactggaaggcagcatgggaatacaggtggcctttactatggaaccgacaccgcggacacaggaaccggtcctagaagtggaaacaccggtggcaccggttatggaggcactggtggtactgattatggaacagctggtggcactggttatggaagtggaactggctatggaatcaacactgggggtgcgcacactgaagcagggtatgggaaggagcatcgtcagcatgagcaatctcatggtggtcagcacgagaagaaagggatactggacaagattaaggagaagcttcctggaggacacagtgacaagtagatgcatcgtgcatgcatgcatatagtatatatataatattgttgtctttgaataaatttgctgcatatgtacttggaggatatagcatatggttatagtatattatatagaggaataaaaaatgtatgcctgtaatgtaagggttctcatatacatggctgaaatataaagcataataaaggcattgatgttgtgccaatac

SEQ ID NO: 7507 - DNA, 1693 bp, Glycine max
  Clone ID: 700667830_FLI
ctcatcctcctctgtctctctctctccaccattgccatggatccttacaagctccggccatccagcgccttcaattctcccttctggactacaaattctggtgctcctgtttggaacaacaactcctctttaaccgttggagctagaggtccaattctgcttgaggattatcatcttgtggagaagcttgcaaactttgacagggaacgtatcccagaacgtgttgtccatgccaggggagctagtgcaaagggtttctttgaggtcacacatgacatttctcacctgacatgtgcagatttccttcgagcccctggagttcagacgcctgtaattgttcgtttctcaactgtcattcatgagcgtggtagccctgaaaccttgagggaccctcgaggttttgccgtgaagttttacaccagagagggtaactttgaccttgttggaaacaaccttcccgtcttctttgtacgtgacggcatgaaatttccagatatggttcatgctcttaaacccaatcccaagaaccacatccaagagaattggaggatccttgacttcttctctcactttccagaaagccttcacatgttcacctttttatttgatgatttgggtgttccacaagattacaggcatatggatggttttggagttaacacatatacgctgatcaacaaggctgggaaagcagtgtatgtgaaatttcactggaagaccactagtggtataaagtgtctattggaggaagaggccattaaggtgggaggagccaaccacagccatgccactcaagacctccatgattcaattgctgctggtaactatcctgagtggaaactgtttgttcagacaatagatcctgagcacgaagacaaatttgactttgaccctcttgatgttactaagacttggcctgaggacattatacccttgcagcctgttggtcgcttggtcctgaataagaacatagataatttctttgctgagaatgaacaacttgcattttgccctgccattgtggttcctggtgtatactactcagatgataagatgcttcaaaccaggatattctcttatgctgattcacaaaggcacagacttggaccaaactatctgcaacttcctgctaatgctcccaagtgtgctcaccacaacaatcatcatgaaggtttcatgaatttcattcacagggatgaggaggttaattacttcccttcaaggtatgatcctgttcgtcatgcagaaacgttccccatacctcctgctatctgcagtggaaggcgtgaaaagtgtggaattgagaaggagaacaactttaagcagcccggagagagataccgatcttgggcacctgacaggcaagatagatttaatcgccgatgggttgatgctttatctgacccacgggtcacccatgaaatccgcagtgtctggatatcttactggtctcaggctgaccgttctctaggccaaaagatagcatctcgtctgagcatgaggccaaatatttaatgttgttgccaaccccagaatgattgttagagttgcagacgtgcaaagagtacgataaggatgtgattttcgatcaatttgaaagaacttatccatttcttgcaattttagttgtgtacccataactccatgcatgcaactcgttgagctatctcaataaatgccgtttgtatgtgtt

SEQ ID NO: 7508 - DNA, 1085 bp, Glycine max
  Clone ID: 700667851_FLI
caagctcaaccaactcaccccagaccaaattgttcagattcaggcccaaatccacattcagcagcagcagcagcacgtggcccaaacccaaacccacctgggcccaaaacgcgtccccatgaagcacgctggcacggccgcgaaacccacgaagctctaccgcggggtgcggcaacggcattggggcaagtgggtcgctgaaatcagactcccaaagaaccgcacgcgcctctggctaggaacattcgacaccgcagaggaagcagcattagcgtacgacaacgcagcgtttaagctcagaggcgagttcgcgcgtctcaattttcctcatctaagacaccacggagccttcgttttcggcgagttcggagattacaagcctctaccttcttccgtggattccaaactgcaagctatttgcgaaagcttagcgaaacaagaggaaaagccgtgttgctccgtcgaagacgtgaagcccgtgatacacgctgctgagctggcagaggtcgagtctgacgtggcaaaatcgaacgctgaatatgtttatcccgagttcgaggattttaaggtcgagcacgagaacccaatgttttctggtgaatcttcttcgcctgaatccagtgttactttcttggatttctcggacttctcggattctaataatcagtgggatgaaatggagaattttgggttggagaagttcccttctgtggagattgattgggaagctatatgatgactcggtgaattttcgttatgtcaaatggttggtttggttttgctctgcttttgggttttagtatgtacttattatgttttgtaattttttaggtttatgtttcgctagtgtctttggctgcttctgcaatggattttttgacatttgcggatgttttgctgagacacgagggttgcaaattttaggcagtgaaatcagagggtcgtagtgatctttttgtggtctgctcgtgttttttgttacttgcatgaccttgggggcttctacttgtgtcttggctagctacttcttgttcaactgtaattaaagtgcccttccaatatatgaaaaatttacatgttcttgt

SEQ ID NO: 7509 - DNA, 1339 bp, Glycine max
  Clone ID: 700667926_FLI
gcccaaatccattgcccagcgtttcagaggcatccaccacagcccgcggaaccagtggtgtaataacaaccgttgcgaaacgcaggtccaaagtgctgggcccgtggcttctctcctcaagtcccgttccgtcatacggttccgcgggcctgacaccctcaagttccttcagggcctgttgaccaacgatgtacggaggttgggtgagcccgttggtgacagaaccgaaaacttgcccacgcccaacgtgcctgctacatcgtttcctcctatctatgctgctctattgactcctcaaggaagattcctctacgacctctttctctataagcctcccacgtgcgacaccaagctcgatgacaccggcactggacctgattcccaaccacacgaaccctttcatttgtttgctgacgtcgattcttctgtgttgggatgaattgttgcaaaccctcaacaaataccggttgaggtcaaaggttgagattgatgatgtctcaagtgatttctcgtgctggcagcgttatggtgctggccttcttgagaagacctcacaagtagaagaacctgaagcagcctctgtaggctggggtgctggtgtggatcgtactgcaatgtcatcctctcaagggagtgatcaagggtggcaatggtttaaggatcccagattggtctgtcttggtttcagagggatcttcccgtcgaatataactccacctctaattgaggtggacaaagagactgatgaacagaatttccttctgtggagaatagagaagggagtagcagaaggatcaactgagattccaaaaggcgaggcagtaccgcttgagtataatcttgcaggccttaatgcaattagctttgacaaaggttgctatgtcggccaagaactcatagctcgtacacatcacaggggggtgattcgtaagcggatagttcctctaaggtttctagataacgatgggaaagagttggtaaacaaagtcattccaggctcagaagtaatgaacactgcatctggcaaacaagctggtacagtgactactgccctaggatgtcgtgggctggggctcttgcgactagaggaagaagctttaaaggggtcgagtgccttgtccgttcagggacaagaggatgtgaaggttgtcgctagtagaccagattggtggccttctgaatggcttcaagatcatggacagcacgctgcttttgcctaggatgcccaatgtcgttcaaagggcgagtatttatgatgaacaatttcgtgggtgaatgaataatttgtaaatgggggcgttaatgtgatcctaatgcttccagtgggtgaatagttggt

SEQ ID NO: 7510 - DNA, 2247 bp, Glycine max
  Clone ID: 700668085_FLI
ggtggtggttccgattgctcacatagggtttggtctcgggtcggtcaaggctggcgggtatttgggtgaagtaaatggcggatccggccggaatccggctccgtgagtggtgcaagcgtggtgttgcggcggcggcgttgatagggttacagtgcggtgacgattgttgccaacaagagtgaagcatgctgagcgtgctgcgcgtgcaccttccttctgatattcccattgtaggctgtgagctcacgccttacgtgctcctacgccgacctgataagaccgttaccaccgatgatttcccggaaaccgccccgttagacggccatttcttgcgctacaagtggtatcgtgtacagagtgataaaaaggttgctgtttgtagtgtacatccttctgagcaggccgcactgcagtgcctaggttgtgtaaaggctaaaatacctgttgccaaaagttatcactgctctccaaagtgtttttcagatgcatggcagcatcatcgtgtcttacatgaccgtgctgcaagtgcagctaatgaaaatggaaatgaagaagaagagttatatgggcgatttaataattctggatctggatctggatcaatgaataccagcttatcttcctctgcatcaagtgctagcttgacaaatgggtctgcacctgtgtatccagcagctgtgacgcaacggagtggtggtgaaacttggtttgaagttggacaatttaagacgtataccccaacagctgatgacattggacatgtccttaaattcgagtgtgctgtagttgattcagagaccaaacttgctgtagggcatgtaaacactctactaacttcccgtgtcattcctgctccctcgcctagcccgcgccgactgatacctgttgatgggatgggacatttggatgctgatgggcgtataacatcttcaggaacttttactgttctatcatacaacatattatctgatgcatatgcctcaaatgacctatacaattactgcccttcgtgggctctttcctggccatatcgcaggcaaaatctgttacgagaaatagttggttaccgtgcagatattatttgtcttcaggaggttcaaagtgatcattatgaagaatttttttctcctgaactggacaaacatggttattatggtctttacaaagaaaacaaatgaggtatacaatggaaacattaatacaattgatgggtgtgcaacatttttccgtagagacagattttcacatgtgaaaaaatatgaggttgaatttaataaggctgcacagtctttaacagatgctgtgattccaaccactcagaagaaaactgccttgaatagattggttaaggataatgttgcactaatagttgttttagaagcaaaagttaacaatcagcctgttgataatccagggaaaagacagcttctttgtgtggcaaatacacatgtaaatgttcaccatgatttaaaggatgtcaaactgtggcaggtgcacactctcttgaaaggattggagaaaattgctgcaagtgcagatattccaatgttggtttgtggggactttaattcaattccaggaagtgctcctcatgcacttcttgcaatggggaaggtagatccatcgcatcctgatttagcagttgacccacttaatatattgcgtcctcacagcaagttggttcaccagttgccactggtcagtgcttattcgtcttttgctagaacggttggtcttggatttgagcagcataaagggagactagacaatgcaacaaatgaacctttattcacaaatgtaactagagattttattggctctcttgattacatattttacacagcggattcattggttgtggagtcattgttggagctattggatgaggaaagtttgaggaaagacacagcacttccttctcctgaatggtcctctgatcatatagctatgttagctgagttccgctgctgcaagaatagatctaggcgttgacttataaggtcagatccagaggcacatacagaaaatggttgaaagaagcttttggttgataagttattattaaagtggtagatcttgcctttgtctttttcccaggtatctccttgtaggggagtccttgcaatgatctgctctgtattatgccacctttgtctcatagaaaaattatgataatgccttactgattttcgcccatatcttacccaatcttttttccctataaagtgaaaattttcttcgtacgtt

SEQ ID NO: 7511 - DNA, 2623 bp, Glycine max
  Clone ID: 700668119_FLI
atactgctgaacgggtattggaaatgatgcatctgctattggatattcttcaggctcctgatccttctacactagagacttttcttgggagagtaccaatggtattcaatgttgctatattatctcctcatggctactttggacaagccaatgtcttgggtttgcctgacactggtgggcaggttgtttatatactagatcaagtgcgtgcccttgaaaatgagatgctccttcggatcaagaaacagggacttgatttcactccaagaattctaatagttaccaggttaatacctgatgcaaaggggacaacatgcaaccagcggctagaaagagtcagtggtactgaccatactcatattttgcgagttccattcagatcagagtcaggaactctccgtaaatggatttcaaggtttgatgtgtggccttatctagagacttatgcagaggatgttgccagtgaaattgctgctgagttacaagggtatcctgatttcatcattggaaactacagtgatgggaatcttgttgcatctttattggcttataaaatgggagttacacagtgcacaatcgcgcatgcacttgagaagacaaaatatccagattcagatttatattggaagaaatttgaggataaataccacttttcatgccaatttactgctgacctaatagccatgaataatgctgattttatcatcaccagtacataccaggagattgcaggaacgtaagtaccgttttcatgatatatatggtttacttcatgattttgtgacaatgttaattcttttataatctcgcttgttatataactttcttttcttttacaagctccactctgactatttattttgcagataaaattatgatacaaatgattgccttttgtttaacaaacatatgctcccaaatggcacatctccattcttattttaactgttattggcttcttttcattgaaccttgcattacccatttggcattacatgtgtaggcatccatgactgtactgagagacttataccgtgtttggtgtaacataacttgttgtctcaagattcctaaattatgcgtggtgacagcaagtgtcatggactcatggcttaccaaagaccactcagttatatgatgctatacctagtcatttcttttgtctcttgatatttctctgaaaggcatatgagctagttactattttgtttaagcatcctctcttggcatctcacatatctatccctggtgctaacctacattttccttgtaatctatatatacttgtttttcagttaagctaatgttactcatttcattttcttaacctgtctttcaggaaaaatactgttggccagtatgagagccacgctggttttactcttcctgggctctatagggttgtccatggcattgatgtttttgatcccaagttcaatattgtctctcctggagctgatatgtcaatatatttcccctactctgaaaagcagaacagacttacagccctgcatggttcaattgaacagctattatttgctcctgagcagactgatgaatacattggtttattgaaagacaagtcaaagcccataattttctccatggcaaggctagacagagtaaaaaacataactggattggtagaaagctttggtaagaacagcaaattgagggaactggtcaaccttgtcatagtagctggttatattgatgtaaagaagtccagtgacagagaagaaattgcagaaattgagaagatgcatgagctcatgaaaaagtataacttagttggtgattttcgttggattgctgcccaaacaaatagggcacgtaatggggagctgtatcgctacatagcagacacacaaggtgctttcgttcagcctgctttctatgaagcttttggacttacagttgtggaggccatgaattgtggactccccacttttgctacttgccatggtggtccggctgagatcattgagcatggtatatcaggattccacattgatccttatcaccctgatcaagcttcacagctattagttgaatttttccaaaagagcaaggaggacccaagccattggaagaaaatatctgatggtggtcttcaaagaatttatgaaaggtacacgtggaagatttattccgaaaggcttatgactttggcgggagtttatagtttctggaaatacgtttccaaattagagaggcgtgaaactcgacgatatcttgagatgttctatatcctcaagttccgtgatttggcaaattctgttccgctagctaaggatgatgcaagttaactagctatataatttcaccaaaggcttgacagcagacataataagagtcatttatgtaaatataatagtctgcttctcgtgttttgaaatctagtgaggcgacctagaggagtttcatggaagacttgtcttgtctatgttaacttcgattatgtaagagatggcgagcactggttgttgaatttggatgtctcttgttttcgtttgattagtagtcatcaatgatatagacctggaaattacctgtgactgaggattgttatccttactgatgggtaagaataaagcattatgaatcaatggcctaaaaaaac

SEQ ID NO: 7512 - DNA, 1167 bp, Glycine max
  Clone ID: 700668304_FLI
ggaagagaagaaagagagaaaacaaagggcggtggtgagtgcttctgcttcatcatcatcagagaatggcggctactgtgtcttctgcttggtcaaagcccggcgcgtgggccctagattccgaggaacacgaagccgagctccttcaacagaacaacaacaaccccaacgacaagccactcgccgacttcccctcccttgccgccgccgccgccaccaagcccaagaagaagaaggcccagacctactccctcgccgaattcaccgccaagcccgactccgccttcgccgaccaagatcccgtcgtcctccccaccggcccccgccagcgcaccgccgaggagctcgaccgcacccgtctcggtggcggcttccgcaactatggcgaccgccccaacaggaataactcctccggcggcgacgagtcttccaattcccgctggggttcatctagggtttctgacgagcccaggagaaacggttttggggctagggattccaatcgcgagcttcccccttcgcgcgctgacgaaactgataattgggccgccgcgaagaaaccctccggggggtttgaaaggagggagagggacaaaggagggtttttcgattcgcagtcgcgcgctgatgaatctgacagctgggtttcgaataagagtttcgtgccttctgaagggcggagattcggttccaacggcggcgggttcgagcgagagaggagggttgttgggttcggctccagcggcggcgcggattccgacaattggaacacaaagaagggcgagtccaacgttggtagcgagagtgttggtgggaggccgaagcttgtgttgcaacctcggacagtgtccgtgagcgatgaaggggttgatggcaataatgcggggaagcctaaaggtgttaatccgttcggagaggcgaggccgagggagcaggttttggcggagaaagggcaggattggaagaagattgatgagcagcttgagagcgtcaagattaaggaggcaagtggtggtgatgggtttggaaagaggggttttggctcttccaacggtggtggaggacgtgctactttgcctgaaagtcgcactgagaggagttggaggaagccccaatttgatgatgatcgtcctaaaagtgctgagaaagtggaagatgaacctgatc

SEQ ID NO: 7513 - DNA, 818 bp, Glycine max
  Clone ID: 700668348_FLI
gtacccaggaagcagtgaacaagagagttgcacaaattaggaacctaattgaggctgctgagcaagagtatgagaaagaaaagctgaatgagagaattgctaaattgtctggtggtgtggctgtgatacaggttggcgcacaaactgagacagagctcaaggaaaagaaattgagagttgaagacgctcttaatgctacaaaggcagctgtagaggaaggtattgttgttggtggtggttgcactcttctgagacttgcatcaaaggtggatgcaatcaaggatagccttgataatgatgaagaaaaagttggagctgatattgtgaaaagagctcttagttaccctttgaaattaattgccaagaatgctggtgtcaatggtagtgttgtcagtgagaaggtattgtccagtgacaatccaagatatggatataatgctgccactggtaaatatgaagatttgatgtctgctgggatcattgatccaacaaaggtggtcagatgttgcctggagcatgcagcctctgtagccaaaaccttcttaatgtcagattgcgtggttgttgagataaaggaacctgaggccatacctgctggaaaccccatggacaattcaggatatggactctagagcaacgagcaacggctgcttcagtgagaagagtattttgttctccctcggatgaaatgcaaaatttggtggccatttagcaatgagtccaaatgtattgttagtgtggtgaactagatagtgatgcaccctttcctcccttatttttttcaagttaataataatttttttttgcttattacttcc

SEQ ID NO: 7514 - DNA, 952 bp, Glycine max
  Clone ID: 700668537_FLI
acgatgtatgcatgattcatgaggatacggtgtatcctactatcctactgccatacatcatacattcaacaccaatatgcagatgaatcattttcaccagaacccattaaaggagaagttcaagaagccaaagatcaggctggctcattttcaccggaactgtttcatggtgatgaaaatgaggaagctattgaccctgaagaggatcgagctctactggagcagaaacgcatggctgtaaaggaagagcagcaaagacaaattcaggaagcaatggcatcaaagcctgctccatctgaagataattttgagatgaaggccatgaaagctatgggagctatggaagatggggacgcagtgtttggctctggtgctgaagtgaatctagattcagaggtttattggtggcatgacaaatacagagccaggaagccgaagtatttcaaccgtgttcacactggatatgaatggaataaatacaatcagactcactacgatcatgacaatccacctccaaaggttgtacaagggtataaatttaacatcttctacccagatcttgtagacaagacaaaagctccaacttacactattgagaaggatggcagcaatggtgagacttgcatcataagatttcatgcagggccaccatacgaagacattgtaagtctactttttctcgatgttacgaaagcttttaaatttttcaaccaaattaccgatttcatgtgtcttcagacactggcttacattctggttttctctcctaccggttggcttccattttgaagagtaaggtgtgcatccgagtatgttaagctgctggcattagagtttcttttagatatttggaggaattgtccaaccaacattgaacaaaacctgattactgtattttgatgatacatttgacttgaaagttaaatgttgaaagaattagtggtggacagag

SEQ ID NO: 7515 - DNA, 255 bp, Glycine max
  Clone ID: 700668564_FLI
ttccttcttgcattcaaaccaccaccaaaattcaatgatgatggtgacttaattgatgaagaggccaaggataagttgaagcaagttcttctgtccttgcgtgcatttactctaagacttcaaggcaaaaactaagcttgaagttactttaattccacgaattattgttgaaataagctgaggatttagaaataaaccaatgttattctgaacgtgaatgatgccactatgtataaggatggtttttaaaggtcg

SEQ ID NO: 7516 - DNA, 1382 bp, Glycine max
  Clone ID: 700668858_FLI
ggaggcgttaccagacaaccccaatttatgccattgaggatagtaatggaagggatcgtatgctaaaatatactccagaacacatgcattgccttgctatgttttggggccctcttgctcctcccaacactggggttgtagcctttcagaacttatcaaacaatcaggcaacatttaggattactgcaactgcagttgtacttgagtttaatcatgcagcaaggatagtgaagaaaatcaaattggttggttatccatgcaagatattcaagaagacagcacttatcaaggatatgtttacctcagatcttgaagtagctcgttttgaaggtgcagctattcggacagtcagtgggattagggggcaggtcaagaaggctgcaaaagaagagataggtaatcaagcgaaaaggaagggtgggcaaaccaaagaaggaattgctaggtgcacttttgaagacaaaattctgatgagtgacatagttttcctgcgtgcatggactcaagttgaagttcctcagttttataatccattgacaacagcattgcagcctcgtgacatgacctggaaaggaatgaaaactgttgcagaattgagaagagagcataatcttgctattcctgtaaataaagattcactttacaagaaaattgaaagaaaacctagaaaattcaatccagtggtgattcccaagtctctacaagcgagtctaccctttgcatcaaaaccgaaggatatttccaagcgaaaaaagccgttacttgaggagagaagggcaaggggtgttgtcatggaacctcgagagcgcaaagttcatactcttgttcaacacctccagttaatagatagggagaagatgaaaaagcgaaagcttaaggaagagaataagaggaaagcacttgaagcagagagtgcaaaagaagagctgttgttgagaaagcgccggagagaggagagaagagacaaataccggaaggaagacaagcagaataagaaaattcggagagcagaggtttgagtttacgacttgaaccaactccaaaaaagagaaaaatgaaagaggaaatttcacgtattcagcatcgtgtcgtttgtttttgaaatgttgctctacggatttgtggaattacggggcaacattgatagataaaaatgcttggggattgaaattagtgagcttagaattaagcgtgcttcggcttctaaatcatgttagttacatgtattactacacaaatttataataaaattgttttgcatgttgttactatcctgaatatcatcaattttgatcgaggatttgaccttcaaccgtgcttgtgtaaaaaaattatttcaaattccatggaaaataatttctattggtttatgaactgtgctt

SEQ ID NO: 7517 - DNA, 1501 bp, Glycine max
  Clone ID: 700668902_FLI
ccgagattccccctaaacccgtttgcgttgttgtttgcgaagaaatggcgactaagaggagcgtgggaacgttgaaggagggtgatttgaaagggaagagggtgttcgtgagggtcgatctgaacgtgcctttggatgacaaccttaacatcaccgatgacactagagtccgtgctgctgttcccaccatcaagtacttaactggtcatggagccaaagtgatcctttctagccacttgggacgtcctaaaggtgtaacacctaaatacagtttgaagcctcttgtgccaaggctgtctcaacttctcggaattgaggttacgatggcaaatgactctattggggaggaagttgagaagttggttgcacaacttccagaaggtggtgttttgcttctagagaatgtgaggttctataaggaggaagagaagaatgaccctgagtttgcaaagaagttggcttctcttgctgatctctacgtgaatgatgctttcggcactgcccacagagctcatgcttctacagaaggagtggccaaatacttgaagccctctgttgcaggattccttatgcagaaggaacttgactatctagttggagctgtgtcaaaccccaagagaccatttgctgctatcgttggtgggtcaaaggtgtcttccaagattggagttattgagtccttgttggagaaagttaacgttctcttgcttggtggaggaatgatctttaccttttacaaggctcagggttattcagttggttcatctcttgtggaggaagacaagcttagccttgcaactacacttctcgaaaaggccaaggctaaaggggtttctttgttgcttccaactgatgtggtcatagcagacaagtttgctgctgatgctaacagcaagactgtgccagcatcaagcatcccagacgggtggatgggattagatattggtcccgattccatcaagacatttggtgaagcattggataagacccagaccgtcatttggaatggaccaatgggtgtttttgagtttgataagtttgccacaggaacagaggccatagccaagaaactggcagagctgagtgggaagggagtaacgaccatcattggaggaggtgactctgttgccgctgtggagaaggttggtcttgcagacaagatgagccacatctccactggtggtggtgccagcttagagcttcttgaggggaagcaactccctggtgtccttgcccttgatgatgcttgagtaaacatcactagttcctctgtaatttgtgctttatattattattatggttggatttcagccaacagtggattgaggtacaatgagagagctcttgttgctcctgtagaggcttaatataggttaggtttcgaaataagagggttttgtggcatccttggtgttgcattgagctttgatctaattgttcttgaacaatgttcatttcaaaaggagttttactttgttagttatgttcctttagttttatc

SEQ ID NO: 7518 - DNA, 876 bp, Glycine max
  Clone ID: 700669131_FLI
ccttgaatcaattttaaagggacccattagtatcacattacggcatcgtttgcaatgtcatgttatacgagatgcagctaaaaatgaatatgaaactgaagaacctatccttgttctaaatgaggttacaattgaccgtggaatatcttctttcctcaccaatttagaatgttactgtgacaattcctttgtcacgtgtgtgcaaggggatggattaatcttatctactacatctggcagtacagcatattctttagcagctggaggatcaatggtccatccacaggttccaggtattttattcactccaatttgcccacattcgctatcttttaggccattgatatttccagagcatgtgactttgagggtgcaagtaccattcaacagcagaagccctgcatgggcatcatttgatggcaaggacaggaagcagttagcacctggagatgcactagtgtgcagcatggctccatggcctgttcctacggcttgtttggatgattctactaatgacttcttgcgcagtattcatgagggcctacattggaatttgagaaagacacaatcatttgatggcccccgggaaacatgacttccttcttagtaagcctgtatgtagagcaactatagttggaaacaaactgactagtcagtcatttatcaagataaatagcagagtgttacatgtagtcatttatctagtagcaacttaaaatttagtgtaattttagttctttaccaatagttacatgtagttataatttacagtaaactatactcctctacaccctatttctctcttattttaaaatgtatactctcctcttgagaaagataaatatggataccttttaatagtatgaataatttatg

SEQ ID NO: 7519 - DNA, 1153 bp, Glycine max
  Clone ID: 700669174_FLI
ttgcaatcaaattagttcattctctttgcgcagttccctacctctcctttcaagatgcagatcttcgtcaagaccctcaccggaaagaccatcacccttgaggtggaaagctctgacaccatcgacaacgtcaaggccaagatccaggacaaggaaggaattcccccggatcagcaacgtctcatcttcgccggaaagcagctcgaggacggccgtaccctcgccgactacaacatccagaaggagtcaacccttcaccttgtccttcgtctccgtggtggcatgcagatcttcgtcaagactctcactggcaaaaccataaccctagaggtcgaaagctctgacaccattgacaacgtcaaggccaagatccaggacaaggagggaatccccccagaccagcaacgtctcatcttcgccggaaagcaacttgaggacgggcgcaccctcgccgactacaacatccagaaggaatcaacccttcacctcgtcctccgtctccgtggtggcatgcagatcttcgttaagaccctcaccggcaagactataaccctagaagtcgagagctccgacaccatcgacaacgtcaaggctaagatccaggacaaggagggtatccccccagaccagcagaggctgatcttcgccggcaagcagctcgaggacggacgtacccttgctgactacaacatccagaaggagtcaactctccacttggtgttgcgtcttcgtggtggtatgcagatcttcgtcaagacccttacgggtaagactattaccctcgaggtggagagctccgacaccattgacaatgtgaaggcgaagatccaggacaaggaaggaatcccaccggaccagcagaggcttatttttgctggcaaacagctagaggatggaaggaccctcgctgactacaacatccagaaggagtcaactctgcacttggtgttgcgtcttcgtggggggttttaagctggagctgatttctgtgtgatgttcgatgttggattttcccaaacattttaagaagaaatgtgatgtgtaatgggtctgtaatgacctttgaaaataagtttggtttgtgttgaactctattgtcccattaatgttactactgtttgttatcaatttgtggagctgatatataattatc

SEQ ID NO: 7520 - DNA, 1382 bp, Glycine max; identical to SEQ ID NO: 7516
  Clone ID: 700669647_FLI

SEQ ID NO: 7521 - DNA, 1472 bp, Glycine max
  Clone ID: 700669677_FLI
cttgctctatactacacagtacacacactagaagaataatggcttccatcctccactactttttagccctctctctttcttgctcttttcttttcttcttatccgactcagtcacccctacaaaaccaataaaccttgttgttctacccgttcaaaatgatggttccacagggctccattgggccaacctccaaaaaagaacccctctaatgcaagtaccagtcctggtggacctcaatggaaatcacttgtgggttaactgtgagcagcagtactcatccaaaacgtaccaagcacccttctgccactccacccaatgctctagagccaacacccaccaatgcctcagttgccccgcggcatcaaggccagggtgccacaaaaacacgtgtggcctcatgtccactaatcccatcacccaacaaaccggtttaggtgaactaggagaagacgttcttgcaatccacgccacacaagggtcgacccaacaacttggcccattggtcacagtcccacaattcctcttttcttgtgcaccttccttccttgttcaaaagggtcttcctagaaacactcaaggtgtggctgggttaggccatgcaccaatttctcttccaaaccaactcgcttcccactttggcctacaacgccaattcaccacttgcctttctcgctaccctacttcaaagggtgctataatattcggggatgcacctaacaacatgcgacagtttcaaaaccaagatattttccacgatttggccttcaccccattaaccatcaccctgcagggagagtacaacgtgagagtcaactcaataagaatcaaccagcacagtgtgttcccactgaacaagatatcatccaccatcgtagggtcgacctctggaggaaccatgattagcacctcaactcctcacatggttctccagcaatccgtgtaccaggctttcactcaggtgtttgctcagcagctaccaaagcaagcacaggtgaaatctgtggcaccatttgggttatgcttcaactccaacaagatcaatgcatatcctagcgtggaccttgtgatggacaagcccaatggtcctgtttggagaatctctggtgaggacttgatggtgcaggcacaacctggggtcacgcgtttgggtgttatgaatggaggaatgcaacctagagctgaaattaccttaggggcacgtcagttggaagagaacctggtggtgttcgatcttgcaaggtcaagggttgggtttagcacctcatcactgcactcgcatggagtcaaatgtgctgacctcttcaactttgccaatgcatgatgagccaagatcgcgagactttttataatatgcttatttataattaagcaagcatctactacatgttatggttaataaaagtaataatgtaagaataaagactttgaactaaataataatatgaacgattctctttcgttgttcaatgag

SEQ ID NO: 7522 - DNA, 1434 bp, Glycine max
  Clone ID: 700669702_FLI
tgtggatgcgccactgcatgaatctgttggggataaatagattgtcctagatctggggtcaataaagagcttactgcatcctcaacaaaagcatggcttgagaaaatgggaatcaagtatatatagatgtggacaaaggtaataaaatcattgaatgtagctattagatcataactacatatttgtatatataccttgtgtgagtgaaatgacaaattgttatttaactataagttttcttttctattgtactgctaaatttgatttgtattatgtacaagtgcatttttcctggtttcatcaaagaattagaacaattatggctacaactttgtatgttgcatacattagaggatcattaattcaaaaaaggatattcaatttgcatggacttatatatgtaggatgcatgtcatttgatgctattgttcagatttcatttgatgttattatttaatttgcatggtctgatttaatttataggtaccagagatcaatgtaaaaaaaatgcatcaataaaacgaagaaaataaaaaaaaaaacttagacatacaaagacggtttccgaaaacgtcataaaatgacaacataatatagacctacaaagacgcttcccataaccgtcgtaaatttgcataacatacaaagacgtttcccataaaacgtcttagtatgcaatcttgacatgctatctaagacggtcataaaaaccgtcttaaattggcacctattaagacggtcatggtaaccgtcttcatatcgcaaatttatctgtagactttaagacggttatggaagaaacgttgtaatatttagcacatactaagacggttcccataaccgtcgtaaaatagcttatacattttacgacgttggcattaacgacggttgaaaaccgtcgtgacatggccataagaaccgacttaaaatccaatttttctagtagtgctcactcttgccatactatatatatatataactaaacccacatggacatgttataaaacacaagaattattacttgtacgtttttgcaacaaaaatgatttgaatgacatttttggctcttttaattgctttatttttaactcacatacttttcaattagcagaacaccccatccttcccttttctcctagggttaattagtactacccttgcactttcaaattcaaccaaacatataggagataattaatccagattcaaaaaaaaaagattgctagggttatgctatatatatatatatatacatacataaatttcaataataagaagaaatcatttcctaattataaaaaacaagggttagaaaaataaactaccttgatcgaattgctttggggacaatttcagcccacttgcatatattgttttaagtcatagttactgacaattatgaaactatatgtgtggaacatgttcactcatcac

SEQ ID NO: 7523 - DNA, 795 bp, Glycine max
  Clone ID: 700669753_FLI
catggaggccatggaggctgaactggatctcgtcgtctgcatcacagagggcattccccagcacgacatggttagggttaaagcagcacttaacaggcagtccaagactcgtttgataggaccaaactgccctggcattatcaagccgggggaatgcaaaattggaatcatgccaggttatattcataagcctggtcgcataggaatcgtctctcgttctggtaccttgacatatgaagcggttttccaaacgactgctgttggccttggacaatccacttgtgtgggtataggaggagatccctttaatggaacaaacttcgttgactgccttcagaagttcctaactgatcctcaaacagaaggtatcattcttataggagagataggaggaactgccgaagaggatgctgctgcactaattaaggagagtggaactgagaagcctgttgttgcttttattgctggtttaactgctccccctggtcgtcgtatgggtcatgctggagctattgtgtcgggtggcaagggcactgcacaagacaaaattaaaaccctcagggaagctggggtcacagttgtggagtcccctgccaaaattggagctgccatgctagatgttttcaagcagaggggcttggttcaatagtttgggttcatttaacttcaaatcattttggtttcgattgtttacatgctcaaaatttcttgattcccattggtaatgatgggctatttttccattttctttttggagttacgagaggtgcattaaaataaaattcaagatgcttt

SEQ ID NO: 7524 - DNA, 1236 bp, Glycine max
  Clone ID: 700669924_FLI
actcagtgaaagagaatccgaggcgaagagaagagaaaaattaagatggaggggaaggagcaggatgtgtcgctgggagcgaacaagttcccggagagacagccgattgggacggcggcgcagagccaagacgacggcaaggactaccaggagccggcgccggcgccactggttgacccgacggagtttacgtcatggtccttttacagagcagggatagcagagtttgtggccacttttctgtttctatacatcactgtcttaaccgtcatgggagtcgccggggctaagtctaagtgcagtaccgttgggattcaaggaatcgcttgggccttcggtggcatgatcttcgccctcgtttactgcaccgctggcatctcagggggacacataaacccggcggtgacatttgggctgtttttggcgaggaagttgtcgttgcccagggcgattttctacattgtaatgcaatgcttgggtgctatttgtggcgctggcgtggtgaagggtttcgaggggaaaacaaaatacggtacgttgaatggtggtgccaactttgttgcccctggttacaccaagggtgatggtcttggtgctgagattgttggcactttcgtccttgtttacaccgttttctccgccaccgatgccaaacgtaacgccagagactctcacgtccccattttggcacctttgcctattgggttcgcggtgttcttggttcacttggcaaccatccctatcaccggcactggtatcaaccctgctcgtagtcttggtgctgctatcatcttcaacaaggaccttggttgggatgatcactggatcttctgggtgggacctttcattggtgctgcacttgcagcactctaccaccaggtcgtaatcagggccattcccttcaagtccaagtgattcaatcaaaccgttcatgcttaatcaagttgggaacaacaaaaaaaatcaaaacaatgtttctgggtttcggtttcatttcatcaagatgatctgtttatctttttttttttaattttaatttaaagtctttgtattttgtatgtaaagatgtaaaattatgattattaggtggtgcatgtgttgcgtcatgggccaatgttatcctctgcttttaagttggaagaggcccagctcacgtgtgatgtacggctgtgattgtgtaatttgcaaaatcaaaaataacccccgagtcatatatgcatctttttattttatttt

SEQ ID NO: 7525 - DNA, 421 bp, Glycine max
  Clone ID: 700669955_FLI
aaagatttggagaaaaaattgacctttatgaaaaggctagaggcaagtacattgtgaatcagggtattctcaatgtgatgcagagacatgctgtggttatgcaccctcttccaagacttgatgaaatcaccttggaagttgatgctgatccaagggcagcttactttagacaagccaaatatggtctatatattcggatggcacttttgaaactcttgcttgttgggtggtagaactgcattcatcttcaaaacgtatggaagatgctgcacatcaaaacttcttttgcttttctttgtcttttcatgctgaacatcaaaacttctttttgcttttggtttccctttcctctcttttaaattttctctttttgttttttattgcactctctaatcttataaaagattgtcttcaacttact

SEQ ID NO: 7526 - DNA, 1116 bp, Glycine max
  Clone ID: 700670024_FLI
aagatattgaggttctttatttggtcgaacctattgatgaggttgccattcagaacctacagacatacaaagaaaataaatttgttgatatcagcaaggaggatttggaattaggtttgtacagttttctatcttactttcatttgctcaaatactattttgtttcctgaaaatcgggatttgaatgtggtgctcaacatttatttaattaggtgatgaggacgaggtcaaagagagggaaaacaagcaagaatacaacctactctgtgattggataaaacaacaacttggtgacaaggtggccaaagttcaaatctcaaagcgcttgagttcatctccctgtgtgcttgtatcagggaagtttggttggtctgcaaacatggagagactaatgaaggcgcaagcccttggggacactgcaagtttggagtttatgagggggaggagaatattggaaattaatacagatcaccctattatcaaagacttgagtgctgcctgcaagaatgcacctgacagcagcgaagctaagcgagcagttgacctcttatatgacacagcactaatttctagtggattttctcctgacagccctgctgagttgggaaataagatttatgaaatgatggccttggccttgggaggaagatggggtagatcagaagaagaggagggagatgcacctgttgaagctgctgattcaagcacaagtgaagaaagttcagagccagaagtttatgaaccttctgaagtcattgcagagagtgatccatggacaactgattaggcatactatgccctcatagaataagttacaaatttttggcattatataatgcataccaaaaaggtgagaaaggaaagggagagactgatttttccaatgatttcatggtgctgaaggaagtttctaatatcattatagaactgtgagtgaatgtcctaaggggcaaatcctatggggcctttgcgaatggaattgagtttagtgttcgtaggtgggcaaattttttatacttcatggtcttgtggcattgtgtcattcttttgggtttaagattttcacgtgtttgagtacaaatttgaaagctgaaatgacaagatttttccttgttc

SEQ ID NO: 7527 - DNA, 705 bp, Glycine max
  Clone ID: 700670135_FLI
tgctgtgttggtctagggatccggcacagctgagaagaatggctaatagaaaggaagaaatctaccaagctttgctgggtgggatatatagtttcttgtctgggtccaaggagtttgtgagtgttttgatgcattataagataccaatggcattggtttccacgcggcctagaaaggctcttgagtctgctatgggggagattgggattgaggacactttcagtgttattgtagcagcagaggatgttcataggggaaagcctgatccagaaatgtttgtgtatgctgcacagcttttgaacttcatacctgagagggtcattgtgtttggtaactccaatctaacagtggaggctgctcatgaagcccggatgaagtgtgtggctgttgctagcaggcatcctgtatatgagcttggggctgcagacttggttgtcaggcgccttgacgagctttcagtggttgatttgaagaatcttgcagacattgaaatgactgaatttgggtctgtggagcctgagatggagctggaggtggaaaaagatcatgatacatcatcacttgatgacaatttctggtaaatcctataaatgtacagttgattgaactcatctgattgttgatgatattagttacaggttagttacttgtgtatatggtaaacagaataaatggggaaaaaatgataagtggtatgcattgaac

SEQ ID NO: 7528 - DNA, 888 bp, Glycine max
  Clone ID: 700670156_FLI
gttgggtttcgattcgtgaacgaacaaaagctctcattccagaccggtgaacgacacgctcttgaaaggagaaattgtatgaatggattctcaggcaacaacaagaaggatcaaaggtggccaccattgatgttgttacccatttgcaggtatggacttaaaagatgatgctgttaagggcatagtcccttgggatgggactctctcttcatttgatttttccctttctgctcatacattttctgacaagtggaaaaggttcaatccttcatttcctgcttggcagtggatcacatgtccaaaacaacatcatttggttgcttctcataaggtggaaggatacttatccctggagaacatgtgccatatcaaatcaagtcaggaacaagagagtgatagaagtctcacatggaaagaagagtccaacatctcacagagagaagagccctttgataaagcaactttagtatgtccagagcatgaagtaaaccactatgattttcatattgtctacagtgcttcatatagagttccagtcttgtacttccgttcgtaccgtagtgatgggcaacttttgccgtttaatgaaattgaaaaggaccttcctggtcactctgcaaagttacggtcagaatccaaatggacatttataactcacgaggaacatccatatttgaacaggccatggtacaaattacatccatgtgggacaagtgactggatgaagcttctctttcatagtgactcatctttgaacaaaaatggttttgttattgaacagtatttgatttcctggttctcggtcattggacaagttgttggtcttaaaattcctttggaaatgctggatactgtagtttctaatgattcttagacgcttattcaatt

SEQ ID NO: 7529 - DNA, 1562 bp, Glycine max
  Clone ID: 700670224_FLI
ggatcatactgaaataatgcaaagcgtagccaataaaagctcttctcagttttttcatcttccacctgttctcaacaagtcttctgagaaaagcagagataaacattcacagaatgggggaattcatacagataaaattttgttggataagtttggaagatcaagtgaagatccagcactgattttgtacactagtgggacaacgggtaaacctaagggagttgttcatacacacagaagcatcatttcccaggtacaaactttgacaaaagcttgggagtactcatctgctgaccagtttctgcattgtctaccactacatcatgttcatgggcttttcaatggtttaatggcccctctctatgcaggttccacggttgagtttttgccaaaatttagtgtgagaggagtttggcagagatggcgtgagtcatatccaaccgatggttctaaggctgaagaggctataactgtgttcactggagttccaactatctatgcccgattgatacaaggttatcatgcaatggatcctgagctacaagctgcttcagtatctgctgcaaagaacttgcgtcttatgatgtgtgggtcctctgcacttccactgcctgttatgcaagaatgggaagccatcactgggcatcgcttattggaacgatatggcatgactgaatttgttatggcattgtcgaatccattgaaaggtgagcgcaagcctggaaccgttggcaaaccatttcctggtatacaggtcaagattattgcagatgaagagagtgtgaatggaaatactggaatgggtgagctttgcattaaaagcccttcattgtttaaagaatattggaaacttcctgaggtaacgaaggaatcatttactgatgatggattctttaagactggagatgcagttactacagatgaagatggatatttcatcattctaggacgtactaatgctgatataatcaaggctggtggatataagctgtctgcattagaaattgaatcggttataatagagcatccagctgtctcagaatgttgcgttttaggcctaccagacaaagactatggagagattgttagtgcaatcgttgtgccagaggccgatgttaaacgaaaacaagatcaagaatcaaagcctgttctaagcctagaagaattatccaactgggccaaagacaaaattgcaccttacaagattccaactcagctaatcgtgtgggataaactccctcgcaatgccatggggaaggtaaataaaaaagagctgaagaagctgcttgtttcagaacagtgaacaccatttgatcatttattcatattcactaggcaaagttaatttattgaaaccagtttaagatggtggcaatctcaaataaaattgcaccaattattgagtgaaatagaaacctttatattatgacatttataagttgaataagttttagcatattattagggggaagataaaggagaaagtatagcataattttagcattttagctgtatgaaggcgattgattgaatgtgtttaataagaagtatttattgtattg

SEQ ID NO: 7530 - DNA, 2524 bp, Glycine max
  Clone ID: 700670315_FLI
ggtttggagaagatagaatctctgcttcactctcttcactgctgtgggtggtaactgagccaaaccctattggttttggcaccatggaaaacgaacacactttggcggttgctgagagagagatgtggctgaacagtgaccaagacgagttcctaggagtcaatgatgcttccatgttctacgccgatttccctcctctccctgatttcccttgcatgtcatcatcatcatcttcttcttcagcactaccatttcctgtgaagaccatgacatgttccaccagaaccacaacaacaaccaccacttcctcttcttcctcttcctcatcctgggccgtgttgaagtcagatgctgaggaagatgcagagaaaaatcattgcaaccgctacatgcatgaccaacttgatgcaactttgtcttccactgcttccatggaggtttctcaacagaaaaacctcgatcctgggcttggtggccctgttggtgagtgcatggatgatgttatggacacttttgggtacatggagcttttggaggccaatgatttcttcgaccctgcctctatctttcagaacgaggataacgaaaaccctttagtagatttcggcacactggagcagcatgtgccgttgcatgatgagcaacatgaaatgttgcatcatcagcaagggagaacagaagaggttgatcatcaggttcctgtgtgtgaagagatccaaggagatgaagaaggtggtgatggtgttggagtagacgatgagatgagtaatgtgttcttggagtggctcaagtctaacaaggatagtgtctctgctaatgatttgaggaatgtgaagctcaagaaggcgacgattgaaagtgctgcgaggcggctagggggaggaaaagaagccatgaagcagttgctgaagctgattcttgagtgggttcaaaccagccatcttcagaataagcggcgtaaggagaataacggtagcagtattagcagtgcacttcaggcacagtttccggatcctagtgtccagaacaaccagaatacacaaagtggttcattttcacctgaatcaaacgcttgtttcaacaaccagacaccgtggttgagtcctcaaacttttgcaacagatcaggctcctctcatggtgcctccacagcaatttcaacaacccatggttgggtatgtgggtgacccttacactagtggtgctgcttcaaataacatcacaacttctcataatcataacagcaacaacccctatcaacctggtgcagaacaatatcacatgttggagtcggcacattcatggcctcattctcagttcaatgttgcttgtcactatagccagtcttttggggacaataatgttattttcccacaggggggttttggtggtggctatggcaataaccagtacccttaccagttttttcatggccctggtgatacgttgatgaggttggggccctcggcgacgaaggaagcgaggaagaagagaatggcgaggcagagaaggtttctgtctcatcacaggcatcataatggtaatcaccagaattcagggtcagacccacatgcaagattggggggtggtgataattgcaccactggtttggctgcacctcatcatgcaaatcctacagccaattggatgtactggcaggctatgacgggcggtgcggcgggtcctttggctcccccggccgagccgccagctgtggaccggtctgccttgcagacacagaattgtcatcagagtcgagttgcatcagataggagacagggttggaagcctgagaaaaacttgaggttccttctgcagaaggtgttgaaacaaagcgatgtgggaagtttggggagaatagttttgccaaaaaaagaggcagaaacccatttgccagagctggaggcaagagatggaatttccataacaatggaagacattggaacttcacgtgtttggaacatgcgctatagatactggccgaacaacaaaagcagaatgtatttgctcgagaacactggtgactttgtgagagccaatggactccaagagggagatttcatagtgatatactcagatgtgaagtgtggcaaatatatgataagaggagtgaaagtgagacaacaaggtgtgaaaccagagaccaagaaagtaggaaaatcgcagaaaaaccagcatgggacagggacaaatgcatcaactacagcttgtactgctgctaataatggcacgccatcgtcaccgaaaaccaaagctgaaaaaagtagtaaattaatataatacatagaatatgtatgtacaatatatattatattatattatatataataaaataagagactctgaagtctgaacacggtgctcacataatgttgaggagttttagcatgccctgcaatggaggctgtcaaggatttgtataacagtattttgggtatatttcttttcataatttattttgcgattgttatgtgaaaatgttgtatgtgtttaacttggatgtacatgttacgttattagtggtc

SEQ ID NO: 7531 - DNA, 1128 bp, Glycine max
  Clone ID: 700670423_FLI
gaatttatgccttttggatctttggaggaccaccttcatgatcttcccccggacaaggaaccattagattggaacaccaggatgaaaatagctgctggggcagcaaaaggattggaataccttcacgacaaagcaaaccctcctgtcatttatagagacttcaaatcatctaatatattacttgatgaaggttatcatccaaagctttcagactttggtcttgcaaagcttggtccagttggtgacaaatcacacgtttcaacccgtgtcatgggaacttatggttactgtgccccagaatatgctatgactggacagctgactgtgaagtctgatgtatatagttttggggtagtcttcttggagctgattactggccgtaaagccattgacagcactcgaccccatggagaacaaaaccttgtcacatgggcacgtccactgttcagtgaccgcaggaagtttccaaagttagcagatccacagctgcagggacggtatcccatgcggggtctttaccaagctctagctgtggcatcaatgtgcattcaagaacaggctgcagcacgtccactcattggggatgtggtgacagccctttcttttctggccaaccaggcatatgaccataggggagctggtgatgataaaaagaacagggatgataaaggtggaagaatattgaaaaatgatgtaggtggaggatctggacgcagatgggatttggaaggatctgagaaagatgactccccacgtgaaactgcaaggatgttaaacaacagggatcttgatagagaacgtgccgtggctgaagccaagatatggggagagaattggagagaaaaaagacgacaaagtgcgcagggcagttttgatggttctaacgcttagtctcgattgtacaattcccatacgcgtcttctgtatctcagctgtgccccaggtggagctttttgggagctcatctttcataaagctggtgtaggacaagtctgaaaggccgttttggccatttactaggttctgttttgtttagaatttgtcttgtggccatttcttgcagtggctgcaaccaaacataatgaaccgggtaccaaaatcttttctacatcagccttttatgcactt

SEQ ID NO: 7532 - DNA, 1066 bp, Glycine max
  Clone ID: 700670424_FLI
acacctttttctttttggttcagttcagctagctgcagcctgcagaatttataacaacttctgactatgaccatgtcgggtcctgaagaacacggaagcatgagcttaatgggttcgttacgtgtgatagagctgcagctagtggcattcgcgttggttttctcagcaagtggtcttgtccctctactcgatttagcttattcggcccttatctccatctacctaatgctacttgggcgttttgcgtttccgtcgcatgggtgtgcgccgggcccgatgttccacgaaagtgggcttttccaagtgtacgtggttgtgggcacgacggtgggcctgttcttgccgctggcctacgtgcttggtgggtttgggagaggggacaagcaggcggtgcggtcggcgagcccacacttgttcttgctggcgttccaaatactgacggagaatgtgataagtagcttctcgctgttctcgccaccagtgagggccatggtgcccttgatgtacactgtgcggaggatctttgtggatattggttggatacatgatgtgtgcctcaacaagactttgcccccatatgcaaacctcaaggataaggcgtggttttggtttggcagggttttggcagtggctaacctggtatatttctccatcaatctctttgggttcttgataccaaggttcctgccaagggcttttatgagatatttccaagagaggggagagatttatgccaagctagttgaagagaagcgatatgtgaatgtggtcaacaataaatcccatccaccggacaagaagtaacattaactaaggatttttgtcaatatctgttactattttaaacgtgtgaatcgtaattcgagtctctctccccaaaaaggaaatcatctgaaaagtcaatgttctcatgaagtagttctggtacctttcagcttggataaagttcatcaagttattaacagatgtcttgtttctcccgaaaagatttgctttctgtttaacaatgactcaacatgtataataaataattttccacgataagggacaagccaagttgaagatt

SEQ ID NO: 7533 - DNA, 1434 bp, Glycine max
  Clone ID: 700670457_FLI
accttgctctatactacacagtacacacactagaagaataatggcttccatcctccactactttttagccctctctctttcttgctcttttcttttcttcttatccgactcagtcacccctacaaaaccaataaaccttgttgttctacccgttcaaaatgatggttccacagggctccattgggccaacctccaaaaaagaacccctctaatgcaagtaccagtcctggtggacctcaatggaaatcacttgtgggttaactgtgagcagcagtactcatccaaaacgtaccaagcacccttctgccactccacccaatgctctagagccaacacccaccaatgcctcagttgccccgcggcatcaaggccagggtgccacaaaaacacgtgtggcctcatgtccactaatcccatcacccaacaaaccggtttaggtgaactaggagaagacgttcttgcaatccacgccacacaagggtcgacccaacaacttggcccattggtcacagtcccacaattcctcttttcttgtgcaccttccttccttgttcaaaagggtcttcctagaaacactcaaggtgtggctgggttaggccatgcaccaatttctcttccaaaccaactcgcttcccactttggcctacaacgccaattcaccacttgcctttctcgctaccctacttcaaagggtgctataatattcggggatgcacctaacaacatgcgacagtttcaaaaccaagatattttccacgatttggccttcaccccattaaccatcaccctgcagggagagtacaacgtgagagtcaactcaataagaatcaaccagcacagtgtgttcccactgaacaagatatcatccaccatcgtagggtcgacctctggaggaaccatgattagcacctcaactcctcacatggttctccagcaatccgtgtaccaggctttcactcaggtgtttgctcagcagctaccaaagcaagcacaggtgaaatctgtggcaccatttgggttatgcttcaactccaacaagatcaatgcatatcctagcgtggaccttgtgatggacaagcccaatggtcctgtttggagaatctctggtgaggacttgatggtgcaggcacaacctggggtcacgtgtttgggtgttatgaatggaggaatgcaacctagagctgaaattaccttaggggcacgtcagttggaagagaacctggtggtgttcgatcttgcaaggtcaagggttgggtttagcacctcatcactgcactcgcatggagtcaaatgtgctgacctcttcaactttgccaatgcatgatgagccaagatcgcgagactttttataatatgcttatttataattaagcaagcatctactacatgttatggttaataaaagtaataatgtaagaataaagactttgaact

SEQ ID NO: 7534 - DNA, 1483 bp, Glycine max
  Clone ID: 700670512_FLI
aatattcaaaccttgctctatactacacagtacacacactagaagaataatggcttccatcctccactactttttagccctctctctttcttgctcttttcttttcttcttatccgactcagtcacccctacaaaaccaataaaccttgttgttctacccgttcaaaatgatggttccacagggctccattgggccaacctccaaaaaagaacccctctaatgcaagtaccagtcctggtggacctcaatggaaatcacttgtgggttaactgtgagcagcagtactcatccaaaacgtaccaagcacccttctgccactccacccaatgctctagagccaacacccaccaatgcctcagttgccccgcggcatcaaggccagggtgccacaaaaacacgtgtggcctcatgtccactaatcccatcacccaacaaaccggtttaggtgaactaggagaagacgttcttgcaatccacgccacacaagggtcgacccaacaacttggcccattggtcacagtcccacaattcctcttttcttgtgcaccttccttccttgttcaaaagggtcttcctagaaacactcaaggtgtggctgggttaggccatgcaccaatttctcttccaaaccaactcgcttcccactttggcctacaacgccaattcaccacttgcctttctcgctaccctacttcaaagggtgctataatattcggggatgcacctaacaacatgcgacagtttcaaaaccaagatattttccacgatttggccttcaccccattaaccatcaccctgcagggagagtacaacgtgagagtcaactcaataagaatcaaccagcacagtgtgttcccactgaacaagatatcatccaccatcgtagggtcgacctctggaggaaccatgattagcacctcaactcctcacatggttctccagcaatccgtgtaccaggctttcactcaggtgtttgctcagcagctaccaaagcaagcacaggtgaaatctgtggcaccatttgggttatgcttcaactccaacaagatcaatgcatatcctagcgtggaccttgtgatggacaagcccaatggtcctgtttggagaatctctggtgaggacttgatggtgcaggcacaacctggggtcacgtgtttgggtgttatgaatggaggaatgcaacctagagctgaaattaccttaggggcacgtcagttggaagagaacctggtggtgttcgatcttgcaaggtcaagggttgggtttagcacctcatcactgcactcgcatggagtcaaatgtgctgacctcttcaactttgccaatgcatgatgagccaagatcgcgagactttttataatatgcttatttataattaagcaagcatctactacatgttatggttaataaaagtaataatgtaagaataaagactttgaactaaataataatatgaacgattctctttcgttgttcaatgag

SEQ ID NO: 7535 - DNA, 2461 bp, Glycine max
  Clone ID: 700670519_FLI
catcgcagctcgtctcctgcggaatcgatcccttccatcgcgcctcctctccttccccgcgccaccgccgccacagcaacctcctcctcctacgccgtcgctccagccgtgtcttcgccgtctccgccgagccgaaacccgccgtcaacggagcaaactcgaggccgcctccgaccagagccgtcaatggcggcgtctccacgagaattggagatgtttcgaaggagattaagagagtgagggcgcaaatggaagaggatgaacagttagcgacgctcatgaggggtcttcgaggccagaatttgagggactcgctcttcgctgaggacgatgttgaacttcgtcttgttgaggtagacgagagtagtgagtttttgccattggtgtatgatcctgccagcatttctgcatattggggaaaacgtccacgcgcggttgcaacgcgcattgtgcagttgctatcagttgcaggaggttttctttctcgcattgccggggatgtgattaacaagaaggttaaagagaatgaagttgctagggccattgagttacgtgaaattgtgacatctttgggtccagcgtacataaaactcgggcaagcattgagcattcgacctgatatactgtcacccgtagcaatgacggagctgcagaagctatgtgataaagttccttcatttgcagatgatgtggctatggctctaattgaggaggagcttggtcagccatggcaaaacatctattctgaactatcatcttctcccattgcagctgcatctcttggacaggtatacaagggtcgcctaatggaaaatggggatttggtagctgttaaagtgcaaagacctttcgttcttgagacagttacaattgatttatttattattaggaacctgggtttggctcttcgaaagtttcctcaggtctccattgatgtggttgggttggttgatgagtgggctgctcgattttttgaggagttagactatgtgaatgaaggtgaaaatggaaaccgttttgcagaaatgatgaggaaagacctaccacaggttgtcataccaagaacctaccataaatatacatcaaggagggttcttacgacagaatggattgatggagagaagctgtcacagagcacagaaagtgatgttggagaattggttaatgttggagtcatctgctatctaaaacagcttctagatactggattttttcatgctgatccacacccgggaaatttgatccgcactcctgatggaaaacttgccatacttgactttgggcttgttacaaaactgactgatgatcaaaagtatggaatgatcgaagcaattgctcatctcatccatcgggattatccagccatagtaaaagactttgttaaacttggttttattcccgatggagtcaatttggagcctatcttaccagttcttgccaaggtttttgatcaggccttagaaggtggaggggcaaaaaacatcaattttcaggagctggcatcagatttagctcaaattacctttgattatccttttaggatacccccatactttgcccttataattagagctattggggttctggaagggatagctttagtaggaaattctgaatttgccattgttgacgaggcttatccttatattgcacagaggctcctcacagatgaatctcctcggctaagggatgctctgcgttacactatatatgggaaatctggggtttttgatgctgaaagatttattgatgtcatgcaagcctttgagaattttattactgctgccaaaagtggcggtggagagaacatgaatgggaatatggctgaacttgggattctttctactagtcagtcagaatatttgttgccaggattccaatctgtcattcctctatcacagcagccagtgcaaacaagggcagctttagcgtttttgttgtctgacagggggaatttttttccgagaatttcttttggacgagatcgtcaagggcatcgatgcagtaacaagggaacaactggtgagagtaatgtccttgctaggagttcagaatgtaacccctgttttcagcatggtacctacagtgggaccctttaagcctgcggctcttatacccaccataactgaagaggatgaagttatattgaacaatgtccagatggtggtggagttcttgactgctggaagttccctatcaagaacatctggtcaggcactgaatattcctcagattatccaagagcttctcccagtgttaccaggcatctctgttaaagtgcttccggaggttgttagcagattatcttctcgggttttagcacgattaattcgtgatacatttttgtaagagaattctgtctaccttactgcacacaattgtgtatattttgacagttgttcaaaaattgtatatatgaccattattttacatattttcatgttgcagaaaattcttaatt

SEQ ID NO: 7536 - DNA, 1360 bp, Glycine max
  Clone ID: 700670756_FLI
attgtttaaacctaattctcatttcttcatcgttcgattcttctcctcctaaagatgcagatcttcgtgaaaactttgaccggtaagaccatcacccttgaggtggagtcctccgacaccatcgataacgtgaaagctaagattcaagacaaggaagggatcccacctgaccagcagagacttatctttgcgggtaaacagcttgaggatggtcgaacccttgccgactacaacatccaaaaggaatccactctccacctcgtgcttcgcctcaggggtggcatgcaaatctttgtcaagactttgactggcaagaccatcaccctcgaggtcgaatcctcggacaccattgataatgtcaaggccaagatccaggacaaggagggtatccctccagatcagcagaggttgatatttgctggtaaacaacttgaggatggaagaacccttgctgattacaatattcagaaggagtctaccttacacttggttcttcgtttaagaggtggcatgcagattttcgtcaagactttgacgggaaagaccatcaccttggaggtggagagttcagataccatagacaatgtgaaagccaagattcaagataaggagggtatccccccagaccagcagaggcttatctttgctggtaaacagcttgaagatggacgaacccttgcagattataacatccagaaggaatctaccctgcacttggttttgaggcttcgtggtggcatgcaaatctttgttaagactttgaccggaaaaacaataactttagaagttgaaagttctgataccatcgataacgtgaaggcaaagatacaggacaaagaggggattccaccagaccagcagaggcttatctttgctgggaagcagctggaagatggtcgtactcttgctgattataatatccagaaggagtccactctgcatttggtgttgaggcttcgtggaggtatgcagatatttgtgaagactctgacagggaagaccattaccttggaggtggaaagctctgatactattgacaatgtgaaagctaagattcaggacaaggaaggtatccctccagatcagcagaggctcatttttgctgggaagcaattggaagatggtcgtaccttggcagattacaatattcagaaggaatccactttgcatcttgtccttcgccttcgtggtggttgctaaggggaatcccttttatgaagtgttctcatatgtcttatctgtttgttcagtgtctcccttgaacttgtgctttgcatctctggtttaagtgctgctgtttattatgttttaaaatgatgtattgaactcgtttcagcgaaagtatgttgtttatgttttt

SEQ ID NO: 7537 - DNA, 2740 bp, Glycine max
  Clone ID: 700670947_FLI
acgggatagctttaccaaagatgaactagttttagcatttgccaggagtagagtccaacaaatcattggtgctacaaataatttgcatcggcgttcagggaatgttttacctccaccagtagatgatcctaaacatatgtcatcagccaccaaattagtgtccaaaagtcctttagataaatgtgagaaccagattaaaggatttgcttcaggtattggggctgccaattcaactgtgcttcctgcgatgtcctcttgggttaggtgtgtatccggcaatcttccacaggatacaatttcatcgtgttctggtaatctggcaaatagaaaggttgaggcatctaatgatccgcaagcccttgtatcaggagttgcttgcactgaaaggtctattagtacaagatcaggggaagctgaaaatagctctgacgtttgttccaatggtgccttcgtaccttcagagacgaacaaccataatatcggtggaaattctaaaacatcttttatgggcaatgatcaagatactgcagcaccttctgtgaacacaggcttcctggagctctccagacaacatgatttcaatattgacactgcagttggcattaattcaaatggggatgtgcatggcttatgtttagggttatcatctattagcattaatgatcatctagaagattcatacttcactcctgattcagacagattaccttttactcttaactcaatcaattcctctctagggcagcatttgcagcaagataatgagtattcaacagaacagtcatccacaccagcattttgggaagatatcattgtggatgacatactaaacatagactctgaacaacaaaaattcagcaaagacatcaattgtttgtcatcatctgggctccattctacttgtctacctcagaatgtaaaccaatcaagccatcaaccatttaagcaagatcaaatttgtagccagaatcatttcagaaaaccttctactgagtcttttaatgaactcttggagacaggacatgttaagcatgtggagagtaaagataatggtacaggtgttgataatatggttgcttcagacatgggagagaacaatattatatctgatattttgtctttggaattagatgcatgggaaggttcattagttaatttgttgggtgagagggatgaactgtacagaccctttaaagcagctactttgcggaaagtccaagacaaaaatcagtcaaggttttcctttgcaagacaggatgatttcatgaatgaggcatctaatttgcagcaaccatttgcggttactgggcatggtcctgaagggaacttttcatcaggtggtttaataggaaacaaagatacagtcactggaaaatacccacatgtcttcccatctggcaattctgtatcatcagataaatttgttggaagtcagtcttttgtgccatctaatttttccatgtcaaaagctcactcatcagggccgccaggattttcattgtccagcagaatacctccagggttttcgtgtgggagagtagaacaggatagtaatacttctgtgaaacatttgcagcagcagtatgtttcttcaactggaaatattggcagcatgggagatgaatttaacaatcttgcagtattgaactttggtaagggcatgttggctgaaaggctgaataatgcttcttttgacatgaggcaaacttcgcttccacagtttattcctggtgaagatgatcctagacttaagctgttaatgcaacaatccacacctacccagaatttaagatttccagatcatgttggaaataggtttctcccccaaaatgattcttatagaatttcctcaaggtttcttgatcaatttccgcctaacagtccatcaatttacgaacaattacattctcaacagttcagtagtaatactcttccatcaaataaccagtggggtggttggaatgatgccaagaatttcagtgacctgtccatatcagaagtattgaataatgagagagtgggatttagtaatttcatgcctaattatgagaatatcaagttttaaccacctgcagtcactgatctactactagatcagtgatggtggcagttttgtctgatctactagattagtgatggtggcagttttgtctcaactgaaattcctcgtcaatgcactatgagcctcagatgacagtcgatgtgaaccaaaccttgtctaaaaaatcggagattccttgatttgtctgaaattatgttctagtaatgtcatgtaagggtatcttgagacccgtttcaaatcagtttagaatttgaatactctgaattccatacacaattctgctatcaaatggccagtagtatcaaccaccctgtgcttagcttcattgccaagctctagaatctgtggtttccctcgttatggtaggcggacattactggcaaacggtgtcaatttttctctgggttacacatctggcttggcctcggaggattttatgttgggtcacaattagtttatgccatcaaactgcagaaattgacagagctaagatgataagcgttaatgaatggggaaattcctgcttagaatggtgaaagagcccatagatttgatgttttcatcatgcctgaaacagtttgtcctgaatttgttaccaatgtcgaacttggaattatacactggtaatgtacttaatgtatatgtgtgaatatatataaatatagattttaatttctt

SEQ ID NO: 7538 - DNA, 955 bp, Glycine max
  Clone ID: 700670974_FLI
gtctttcttcctttgtaatagaaagcacgcgtttctctctctccctctctcaacgaatatttgtgtacttcctcttttgtgggtagattcaatttaccatgtcgagttcatcggaatactctcaattttccggccagaaaccggcgaggtcgccggagaaatcgagcttctctcagacttgtagcctgttgagtcaatacatcaaggagaagggtagcttcggagatcttaccctcggaatgacatcatgtgggtcacctgagacatcttgtcaatctgctacaaccatgaacttgtttcctaccaaggaaaacaacgtgacaccaaaggacctgacagctatggatttgttctctccacaagcttcctcctatcgtccttcagaggagattccaaccttgattaattccagtgcaattaaatctgtgagcaagagtgctaaaactgcacagatgacaatcttttatggtggacaagttgttgtctttgatgattttcctgctgacaaagcaagtgagatcatgtcctatgccaccaaagggatcccccaaagccagaacaattctgttttcacctacacaccgagccagccttcatttcctgctaatttggtcagaacttcagctgattcaagtgctccaattattcctagtgtgaacattaccaactccattcatgaacaccctcaagcatcatccagacctgttgtttgtgatctgccaattgctagaaaagcttcactccaccggtttctggagaagagaaaggatagaattgcttccaaagcaccatatcaactagcaaatgggtcttctaaccagccagctgagtccatgccatggcttgggctgagtgcttcttcacctcgaatctgagagcagctatagtttatatgtaatttttaagcattatttttgttgtgaaaatgctaactagtcagaagcttttttgccag

SEQ ID NO: 7539 - DNA, 1447 bp, Glycine max
  Clone ID: 700670980_FLI
tccactcacccaaccatgagccgattcaggcgatttgagctcatcgaacagccacctttcttcccctcatgctactcttctcccttcctcgtccaagactcactttctctcgacctcgacctgttgccacttcccagccccttcgacgctttcgcagatctgctccacgcgccgtcgttggcttaccggcgcctggagaggcagctcgataatgagttgcgcttgcagagcctctctgaccgcgtcgccgagctggaatcgcggttccaccgtgtgctcggcggagatcggaagtacacgtggacggcggagatcaagggagcggagaagaatgggttcgataggaagtacaagtgggtagcggagatcgctgaggaagaagagaagaagaagaagaagatgaagaagcaggtgaaggtgccgaaggataggaacgtgacgtgggatgctgaggaagaggaggaaaacaagaagaggttgctgaagggtgttgccaagaacgtgaaatggacggctgagatcacgggaaaaggggagaagagtgggagctcgagaaagtacacgtttcaggtgcagagtggggatgctgagaagaaaaaggagaaggagaaggagaaggagaagaagaagggaaatggatcgcgcattgtggagattcacgagccaagtggtcatagagatgtggttttgagacaggcatttgccaagaggttcggagctgttcaaaatgagaggggcaaaaagaaggacttgtctcctcaagatgctgcattgttgatccagatcagctttagagcttacttgatccgtaggtcaaaggctcttcgtgcccttagagaactggccattgcaaaatctaaattaaaggaaatcagagcccagttcaataacttttcctaccgacgtcatgtagcttgtaatgcggaggaacgccagcgattttctgagaaaataattgtcttgctccttactgttgatgccattgagggagctgatattatggtaagatctgccaagaggtcaatggtggatgagctggaagcaatgcttgatgtggtagatccccagcctggtggaagatcagcatcactctcctccttcaaaagaaggacatttgatatgcctgatggagtcatccggaaggaaattgaagaaggggttgcacaggttgtgcaaatgcttgaagaagcagagaatagcagcgaagcatgactttgagatcaagaaagtaatattttatatgtttatttcgagctttccttctgctgttgtagtttgttggtagagacgtattttaatctaggatttcgagactcctaaattaggcttttcctccaatgctgtttgttttgctgaacttttggcacattctggacgaaaagattggcttgtgttggagctgtgttattttactatgacgatttagagaaccttgttcatttgtatc

SEQ ID NO: 7540 - DNA, 1042 bp, Glycine max
  Clone ID: 700671142_FLI
atgaagagccggtggttcgtgtggcttttggcggtactaggcatcatcggagccacactcttcatagtgagcttgatccaaacctcggagaacaacttcctatgttccataacaagaacgatgcagcagcagcagcagcagttcaccgatggccccacatcgatgcaactcaaagccatcctccactacgcgacctctcagattgtccctcaacaatctctttccgagattacaataaccttcgacgtgctccaaagcctccaccgccccgccaacttcctcgtgtttgggctgggccgcgattctctcatgtgggccagcctcaacccccacggcaccacgctgttcctcgaggaggaccctaaatggttcgggatcgtcaccaaggaggcgccctacctccgggcccacacggtccgttaccggacacagctccgagaagccgacagcctcatgtcctcgtaccgatccgaacccgcgtgttttccggccaccgccacgctccgcggcaacgagcggtgcaaacttgccctacataacctccctgacgaggtttatgagaaggagtgggatttgatcatgatcgacgcgccgaaggggtactttgcggaggcgccggggcgcatggcggcgatattctcggcggcggtgatggcgagggacaggaagggatccggtgtgacgcacgtgttcttgcacgatgtggatcggaaggtggagaaggtttacgcggaggagtttctgtgtaggaagcacttggtcaaaggtgttgggaggctctggcatttcgagattcctccaatgggtaataacactcgtgactacgcacgtttctgttagggttcaggattattacagtattagtattcttttttttaccggtgtagtgaaatacattactggagaagaatagtgagaggagcatatatatctatatgttactacagctttattaaaagaaaaactctagattgcttttgcttttccaatttatgttgtcggttatggatacaaaaaaaaaaggaggaatgggattgtttgt

SEQ ID NO: 7541 - DNA, 819 bp, Glycine max
  Clone ID: 700671210_FLI
cgacgtgagagagattgtgaagtagaaatcggtgcaagaaattctccactttatctaaaaaaattcggtgagtttgtgaagacaaaaaatcactagctactcaaaaatggccacagtaggaaggaacgttgcagctcctttgctgtttcttaacttgatcatgtattttattgttcttggctttgctagttggtgcctcaacaggttcatcaatggccaaacttaccaccctagttttggtggaaatggtgcaaccatgtttttcttaaccttctccatactagcagctgttctgggcatcgtgtccaaacttttgggtgggaatcacatgaggacatggaggagtgacagtttagcatctgcaggagccacatcaatggttgcttgggcagtcacagctctagcatttgggttggcttgcaagcaaatacacttaggagggcatagagggtggaggctgagggtagtggaggcattcataataatactaacattcacacagttgttgtacctgatactgatccacgcggggctatatagcagcagatatggtcccgggtaccatgacactgactatggtcatggacatggtgtgggagggactacaggagatccaatgcacaagcctgctactgcaggaactcgtgtctaagtgccactgcactgcaccacctttgttaatttcttctcttcaatcatgttctactttaccttttgttggaactttctttttttcattgtctttggtttagatcacttggattgtgtaatgtctttgttggcttgttgttttcttacacatgatagtcactttgtagc

SEQ ID NO: 7542 - DNA, 321 bp, Glycine max
  Clone ID: 700671214_FLI
gcaaacttttgatagtagagatgcacgatatcgtctgaagaggtcggtagtttaaactgctttgtttacactgccatcatcaccgcaggctgaatgaaagcaagcagatttattatccatctgccatgagtcttgtatagagggaggaagggtgatggcttccacatggtaaaataactacatatacatatataatttttctcattgcctacattttgtaaatttacgtagatgtaaatgctggtgtgcgggtgaaaccactacccagctactgttgtaagatcgcttggtaaaataaggagagaaacaaacatctggcct

SEQ ID NO: 7543 - DNA, 1147 bp, Glycine max
  Clone ID: 700671225_FLI
gccatttgcagtcttcacttcttgtcctaagcctcaacacaaacacaaactcaaacacacacactctttcttctatcttctcccaatttgagttgagattctgagagtaacaatcaaagtttggaaaaaaaaaaagttttgagggaagaaaagaccaatatgctgggtgtggccactcttactttgggttcatccaccacaatggtggctcagaaccatgctcaacaacatgccaccactcttgcctcagccaatggaaacagaaggcacagtgtttccaacaggactcactccttgcctatgagtttggtgtctcccaccaaccaaagtttcacctttctctcttcctttaaagaaccaacacatgcacgccccttcaccactgctgttgcatctgttgattctgaccagcttgattcatctgatcctcccaccaagaatgaagccaccaagtattattttcttgttgcaaatgcaaagtttatgttggacgaggaggagcatttccaagagcaattgttcgagcggcttcgtctctttggagagcgtaatcaagaacaggatttctggcttgtcattgagcctaagttcttggataagttttctaacattaccaagagattaaagagacctgctgttgctcttgtgtcaaccaatggtccctggatcacattcatgaagttgagactggaccgagttttatctgactgttttgaagctgagagtctagaagaagcattagctttcaatcctactgatctgaagtttgagaagcctgaaaaatgggtggcaccctatcctaaatatgaatctggatggtggaaacccttcttgccccctgttcagacagaggtgaagccttaagatattatttatccactgtttcagtgcttggtattcttaaatcttctttttccaatggttcttgttcaagtgcaactggatggtagttaaagttggctaaatttgcatccagttttgtttttttgggagttagtatgattatttaaagttgaggtgttgtccttaggatctaagttgtaggagttgtattttatgtctcacaaatgagttaagtataatagataattgttatgagattgatgttctcggtttctagaaatgtatgtgaactgtgaaggcccgc

SEQ ID NO: 7544 - DNA, 1534 bp, Glycine max
  Clone ID: 700671273_FLI
ggagaagggaaggtgagtagtaatggtcatggatgttgcaaatcagggccaggctatgcttccccactggaagccatttctggtcccagagagtctctcatttatgtaacctctgtctacacagggaccggaatagagaagccagactatttggcgacagtggatgtggatccaaactctccaacttattccaaagtcatccataggcttcctgttccttatttaggtgacgaattgcatcacacaggctggaattcatgcagctcttgccatggagacccctcagcagaccgacgatttctcatcgtacctgcactcgtatcaggtcgagtatatgtggttgatgtgaaaacaaatccaagggctccatctttgcacaaagttgtcgagcctgccgatatcatacagaagactggattagcttatccacacacatctcactgccttgcttctggtgatataatgatctcgtgtcttggagataaagatggaaatgctgcaggaaatggatttcttcttcttgattctgagtttaatgtgaagggaaggtgggagaaaccgggtcacagcccactatttgggtatgacttttggtaccaaccacgtcacaataccatgattagcacatcatggggtgctcctagtgcttttacaaaaggttttaacttacagcatctctctgatggattatacgggaggcatctccatgtatatagctggcctgggggcgaactgagacaaacaatggaccttggtgattcagggcttatacccttagagataaggtttttgcatgatcctgctaaagatacaggttttgtcggcagtgcattgacaagtaacatgatacgattttttaagacccaagatgaatcatggagccatgaggttgccatatcagtgaaaccattgaaagtgcaaaactggattcttcctgaaatgcctgggcttataactgattttctgatttctcttgatgatcggtttctgtattttgtaaactggcttcatggggatataaggcagtataacatcgaggacgttaaaaatcctaaactgactggacaagtatgggttggtggacttatccagaaaggaagccctgtagtagctataactgatgatggtgaaacatggcaagctgaagttccagagattcagggaaacaagttgagagggggccctcagatgattcaattgagtttagatgggaagcggctctatgctaccaactcactatttagtacttgggacaaacaattttatccagagcttgtccagaaaggctcccacataatacagattgatgttgatactgagaaaggtggactgaaaatcaaccccaacttctttgtggactttggaactgagcctgatggtccttctcttgcccatgagatgagatatcctggtggtgactgtacttcagatatatggatttaaacatacgtgtcattatttccctttaataaacggatctgtcatatggttgtaatgagctactatgctataaataatgctcttgtgaatcttc

SEQ ID NO: 7545 - DNA, 678 bp, Glycine max
  Clone ID: 700671479_FLI
attgaattctccagagagaagaagaaacttaatcgatcatcacttcacttcactaatacatcatggcagacgagacccagaacaagtatgagagctctgaggttgaggtccaggatcgtggtgtttttgactttctcggtaagaaaaaggatgaagaagacaagcctcatcctcaggaggaggtcatcgccaccgagtttcaaaaagtcactgtctcagaccaaggagagaacaagcacagcctcttagaaaagcttcaccgatctgacagcagctctagctcttcaagtgaggaggaaggagaagatggagagaaaaggaagaagaagaagaaggaaaagaaagggctgaaagagaagatcgaggagaaaatagagggtgatcatcatcatcacaaggatgaggacacaagtgtccctgttgagaaagttgaggttgttgaaacagcacatgctgaggaaaagaaggggctcctcgacaagattaaggagaagctaccagggcacaagaagacagaggaggccacagctactactcctcctccaccaccacctgttgcatcattggagcatggtgaaggtgctcatcatgaaggagaggccaaggagaagaaaggtatattagaaaagataaaagagaagcttcctggttatcactccaagacagaggaggaaaagg

SEQ ID NO: 7546 - DNA, 1023 bp, Glycine max
  Clone ID: 700671501_FLI
gtgagactattgggattttgcttggagggacaagagaagatccttatctatgaatacataccaaacaaaagccttgatcgctttttatttgaccctgtaaagcaaagagagttagattggtcaagacgctacaagattattgttggcattgctcgaggaattcagtatttacacgaagattcccagcttagaattatacaccgtgatctcaaagctagtaatgttctattagatgaaaatatgaacccgaagatttcagattttggcatggcaaaaattttccaggcagatcagactcaagtaaatacaggaaggatagttgggacttatggttacatgtctccagaatatgcaatgcgtggacagttctctgtgaaatcagatgtgttcagctttggtgtcttagttttggagattgtgagtggcaagaagaacactgagttttatcaatcgaatcatgctgatgaccttttaagccatgcttggaagaattggacagagaaaacacctttggagttgctggatccaacactgagaggttcttattctagaaatgaagtcaacagatgcatccatattggtttattgtgtgttcaggaaaatccatctgacaggccttcgatggccactattgcacttatgctgaacagttattcagttaccatgtcaatgccacgacaaccagcatctcttctgcgcgggagaggtcctaacaggttaaaccgagggatggactctgattcgtctacctccaatcagtctaccacttgttcaattgcatggtctgtgaatgaagtatccattactgatttataccctcgctaaaggattgtttttcatgtttccttcaatcaatccagtgtatgtccaaatcttttcaaactttgatgttactcttaaacatacctaaaggatatatgttctaaatattaatggctaaaagaattctgtccctacttcattctggatgaacatgtagagtagataaagcacgatgccccaggagagaccataataatttgc

SEQ ID NO: 7547 - DNA, 878 bp, Glycine max
  Clone ID: 700671753_FLI
aatgagggggtgtggacccaccttgaagattaattactagagtgatgaacatgagaatctaaagcaccaaaaccgaaggatcaatttacatccatttgctaagcctaacatgttggaaatctctaggctaatatatatggtcaaccatggtgtgatttttcgtaacgttcctctaattgtggttgtctttttgttcagtgatatcgtcaagcgatatgatgaagccatgaaaaagctagtgggaaagctgatgtggctgatgttggattctctgggtattacaaaggaagacctgaaatgggccgggtccaaaggccaattcaaaaagacatgcgcagccttgcaattgaactcttacccgacttgtccggatccggatcgggccatgggtctggccgcccacaccgactccacccttctcacaatcctttaccaaaacaacataagcgggttgcaggttcaccgaaaaggcggcgggtgggtgacggtggcaccagtccccgaagggcttgtgatcaatgtaggcgacctcctccacatattgtcgaacgggttgtacccgagtgtgctccaccgggtcttagtgaaccggatccagcaaaggctttcagttgcgtatttatgtgggccccctccgaatgtggagatatgtccacatgcgaagctagtgggcccaaataagcctcccctttataaggcagtgacttggaatgagtaccttggcactaaagcaaagcatttcaacaaggcactctcaaccgttcggctttgtgcacctagctagctattagcggttcgtttgatgtaaaccagcctcacacaattgcttcgatccttccctcttgcatggtctattttctaccaaacatgaatgaaac

SEQ ID NO: 7548 - DNA, 2307 bp, Glycine max
  Clone ID: 700671992_FLI
actgaattaattggcaaaactccattggtatatctcaaccgcatcgtggatggctgtgttgccaaagttgctgcgaagctagaaatgatggaaccttgctccagtgtcaaagacaggatagggtatagcatgattgtagatgctgaggagaaaggactcatcacaccgggtgaaagtgtcctcattgagcctactagtggaaacactggcataggtttggcattcatggcagctgctaagggttataaacttattataaccatgccttcttcgatgagtctcgaaagaagaaccattcttcgagcttttggagctgagttagtcctcactgatcccgccaaaggtatgaaaggagctgttcagaaggcagaagagattcgggataagactccaaattcttatattcttcagcaatttgaaaatcctgccaacccaaagatccattatgaaaccactggaccggagatctggaagggctctagtgggaaggttgatgctcttgtctctgggattgggactggaggtacaataacaggtgctggaaaatatctgaaagatcagaaccctgatataaagctatatggcattgaaccagtagaaagtccaatactgtctggaggaaaacctggtgagtattgatttttttgtgttttcagggcaactgtctctgattattacacctgttagaataactagaaaatatctcgtaatcttattgttgtatcctagaatattttaaattaacttagatgatatcttatgagtggtttccaacttccatatttcatgatttgtttgcttgtttaattaggatttagagtctaatactagtacaaacaggggatagttctttgtattttgttatacattattactcaccatatatgtagtgatgttttaattccatgattctttgcttccttgtcgtgcacaaatttcagctactgaaactcaatactatcattactttctccgtcttttgcaaatgtggatgggataataaacttgagagaaccacatctcaaaagttagccgtcgtagttggagaacctaagaccttaaaaactcccccacacttgcccatacttccaatgtgagactcaagtattgtaccttgcaattggatcctaaaattccaccacactctgcagtcctgacacccatgcgagttggctgtgcactagtcctttgactagtcttggtgaacactacaatgttgacgtcactgccacgccacttgtttgctgctgagagacatgatggaaaactctgatacctatagataataaccttgggataagtggataaccacaccacaaaagctatctgttgtaattggaaagcccaaagctttataaacctcatactagaatcttatattttcaatgcaagacttaagtctcataccttgcaattggatcctaacagggtgtcagatctacccacatctgaacatctttttaccttgaaggcgctgccatcagatctcccattgtctgtcaagtttgttgtctctcctctttctccatgctctgaaattttcttggagaatccaatcatatgaaacaaagttggtattattcaagggtatataaaattcattttacaagatcatttggtttctcatacttacggaaactgttgttgaattcaatttcctgtattttaaggaatatgtgctttgtcatttaccattattgcactggtgatattattcctgcacgttcttaatgagaattcgtgtgtgcttttgtgtacgtttatcaaatgcctgcctcttgttgtgtacctttctcctgacaaatgcatggttgttaaatggatataaggccctcataagatccaaggaattggtgctggcttcatccctggtgttctggatgtcgatttacttgatgaagttgttcaaatttcaagtgaagaagccattgaaactgctaaacttcttgctttgaaagaaggtttgctggtgggaatatcatctggtgcagctgcagctgctgcaattaagatagcaaagaggccagaaaatgctggaaaactcattattgcggtcttcccaagctttggagagcgttatttatcatctgtgctctttgaatccgtgaagcgagaagcagagagcatggtcttcgagccttgaatatgaagttatacgagccatttgctgcttttcaagttgcattctctccttgggttgtgtatctattttttctcttatggatctgaaaaataaaaaatggtttatgtttggttgttaattgactacgatttaataaaaaatataagatgtttgctggaatgttc

SEQ ID NO: 7549 - DNA, 981 bp, Glycine max
  Clone ID: 700672004_FLI
gcgacctaccatggattggcccacaagattaagaattgctttaggatctgctaagggactggcgtatcttcatgaagattgtcatcctaagatcatccatcgtgatatcaaagctgccaacatccttctggattttaagtttgaagcaaaggttgcagatttcggtcttgcaaagttttcttctgatgtcaatactcatgtttctactcgagtgatggggacttttgggtatttggctccagaatatgcttctagtggaaaactgacagacaaatcagatgttttctcctacggagtcatgctcctcgagttaataaccggacgacggcctgtcgataaaaatcaaactttcatggaggatagtttggtagactgggctaggcctttgctcacacgagctttggaagaggatgattttgattctattattgacccaaggctccagaatgactatgatcctaatgagatggcacgaatggtggcttctgctgcggcttgcattcgtcattcggcaaagcgtcgaccaaggatgagccaggttgttcgcgctctggaaggagatgtctctctagcagatcttaacgaaggaattagacctggacacagcactatgtacagttctcatgaaagctcagattatgacactgcacagtacaaggaagacatgaaaaagttcagaaaaatggcattgggaactcaggaatatggtgcaagcagtgagtacagtgcagctacaagtgagtatggtttaaacccatctggctcaagcagtgaagcacagagccgccaaacgacaagggaaatggaaatgagaaagatgaagaacagtcaaggtttcagtggaagctcttgatccttggcaactatttcttcctttatcttttgtataaatctatatatgcttcatttcttaccaatgtcacagttgattgctttactgacatctttggagagacttgccaattacaatgattttttccc

SEQ ID NO: 7550 - DNA, 1843 bp, Glycine max
  Clone ID: 700672157_FLI
ttttgtaattatttggtgtagggattgcgggaaacaagtctatttgggtggatttgacacggctcatgctgctgccagagcctatgatcgagccgctattaagttcaggggagttgatgctgatatcaatttcaatctgagtgattatgaggatgaccttaaacagatgcagaatttgtccaaggaggaattcgtacatatactgcgtcgccaaagtactggtttctcaagaggaagctctaaataccgaggagtaacactccacaagtgtggccggtgggaagctcgaatgggacaatttcttggcaaaaagtgaggacatatttttatatatcaacttacgtagtgatctactgtggttatgaaatattatgaatttaagcacctattgggctgcaaagtgaaattggtttcagcttaattctcaatgcatctttatgcttttttccatgtttggagaaacatgtctaagatagtaatatagagatgcgttttggttatagagattgcaatgctttcatgcaggtatatatatcttggactattcgacagcgaagtagaagctgcaaggtcctagtgatacatgaattacattctacccgcactgaatttatttacatgaattatcaaagctcattaggctccatccaacacgtatctcccttttgattttctggaaatcagggcttatgacaaggcagctatcaaatgcaacggaagggaagcagtgaccaactttgagccaagtacttatgaaggagagctgaaatctgcagccattaatgaaggaggcagtcagaatcttgatctcaatttgggcatagcaaccccaggacctcccaaagaaaattgggggcaacttcagttcccctccttcccttacaatacacatggtggaagaagttcaatggtataattgaaactcatcttcatttattttaagtttcttgtaaattaagctgaatgaggtggatagcactttttatgctctcatgttagggtgcgcttgattgatcgttaatcgttcagttctatttaacagcaatgaccatagagatatggattgacgttagaagtgcattagaaagtgggagacgaataaaacaatgacacttaatttataacataactcttcatatcatgataactgttgagaatgcttgtctggctgtaacatttttgtagctttcgtgggttttccttgtagctaattacaacctgtattcctttgatttccttgattttttgtggaacttttggtttttggtattgttttatcaactctagatgtcatatattaacatggttctctttatctgcagatggaaaccaatgttagttctggaattggtaatccatctttgaaaaggatggttgcaactgaagatcgtccttcattatggaatggcatgtctcctaatttctttcccaatggggaaagagcagagagaatcggcgttgatccttcaaacggactccccaactgggcgtggcaaacacatggccaggtcaatgctaccccagtaccaacgttctctgctgcagcatcatcaggattctcaatttcagctacctttccatcggctgccatctttccaacaagttctatgaactcaattccccagagtctctgttttacttcatccagcatgcctacccgcaatgcatctgaatattattactaggttaagcccccacaggcaccaccatagctgattttgcagtacagattaaagacaaactaaaacaaaagtgttttcggtccaaattctttttataattcagccactgattggtgtatactgagattcgacaccttattgctgtctcttgcttaaactat

SEQ ID NO: 7551 - DNA, 741 bp, Glycine max
  Clone ID: 700672175_FLI
aatccttgtgcaccgtaagggttgtgaagcaggcagagaagagccatggtgcacgtttccttctaccgaaactatgggaaaaccttcaagaagcctcgtcgtccgtacgagaaggagcgtttggacgccgagttgaagctggtcggtgagtacggacttcgctgcaagagggagttgtggagggttcagtacgctctcagccgcatccgtaacaacgccagaaatcttttgaccctcgacgagaagaacccgcgccgtatcttcgagggagaagcccttctccgaagaatgttccgttacggacttctcgatgagactcagaacaagcttgattacgtgttggctctcaccgtcgagaactttctcgaacgccgcctccaaaccctcgttttcaagtctggcatggccaagtccatccaccacgccagagtcctcatcaggcagaggcacatcagggttgggagacaggtggtgaacatcccatcattcatggttagggttgattcgcagaagcacattgacttctcactgaccagtccacttggtggtggtcgtccaggacgtgtgaagagaaagaaccaaagggctgctgctaagaaggctgctggtggagatggagatgaggaggacgaagattaaattattaatggctactgatatttaggccttgcggttgttattttttttatattatctgtgttggtagacattttagatttttgaaatggtctgacttgttat

SEQ ID NO: 7552 - DNA, 921 bp, Glycine max
  Clone ID: 700672177_FLI
ctttggtgggcgagggcgcggaggtgacaggggccgaggccggcgccgaggtccccgccgcgaggaagaggagaaatgggtcccagtgaccaaactgggccgcctggtgaaggagggaagaatccgaagccttgaacagatctacctccactcgctcccgatcaaggagcaccagatcatcgacacgctcgtgggtcccaccctcaaggacgaggtgatgaagatcacgccggtccagaagcagacccgggccgggcagaggacccggttcaaggccttcgtcgtcgtcggagacaacaacggccacgtcgggctgggcgtgaagtgcagcaaggaagtggcgacagctattcgtggcgcgattattctggcgaagctgtctgttatccccgtgaggagggggtactgggggaacaagatcgggaagccccacaccgtcccgtgcaaggttacggggaagtgcggctccgttaccgttaggatggttcccgcgccgagaggttcggggatcgtggcggctagggttcccaagaaggtgctgcagttcgcggggattgatgatgttttcacctcctccagaggatccaccaagaccctcggcaacttcgttaaggctacttttgattgcttgatgaaaacctatggattcctgacaccagaattctggaaggagactcgcttctccaaatctccattccaagagtacacagatctactggcaaaaccaacaggaaagactctaatcttggaggaggaaagggtggatgcttgatttgctagttttgctttatggatgttttaggaacttcattactttacatactttgttggttctgtgctttacttttggttttgatagacggtatgtctctgtatgcattttgattgtttccaagttttaattgactgcagttgagtacc

SEQ ID NO: 7553 - DNA, 3114 bp, Glycine max
  Clone ID: 700672216_FLI
ggcaacttgtccaatcttgacaccttggacttgtcctctaacaacatgcttcctccttcgaagttgcacggtgactggacccggttgaacaagttgaaggtttttttcatgtttcagtccaacttggttggggagatcccacaaaccattggaaacatggtggctttggagagattagatctatcgcaaaacaatttgagtggaccaattcctagcggtttgttcatgctggagaatctgagcataatgtttctatctagaaacaatctttctggggaaatacctgatgtggttgaagcattgaatttgaccatcattgatctcacacggaatgttatctcaggaaaaataccagatggttttggaaagctccaaaagctaaccggtttggctttgtctatgaataacttgcaaggggagataccagcaagcataggacttcttccatctctggtagattttaaagtatttttcaacaatttatcaggtattctccctcctgattttggtcgctactcaaagcttgaaacatttttggttgcaaataatagttttagaggaaacctaccagagaacttatgctataatggtcaccttcttaacatctctgcctatataaattatctgagtggggagttgccacaatcacttgggaattgtagtagcctgatggaactgaaaatctatagcaatgagttttctggtagcattcctagtggtctttggactttaagcttgtcaaatttcatggtgagttataataagttcactggtgagcttcctgagagattgtccccaagtatttcgcgcttggagataagtcacaatcggttttttggtaggattccaactgatgtatcttcatggactaatgtggttgtttttatagcaagtgagaacaaccttaatgggagtgttccaaaaggtttaacatctcttcccaagctaacaactctattgcttgatcataaccagctcacagggccacttccatcagatatcatatcatggcaatcccttgtaactctaaatttgagccaaaacaaactctctggacatatcccagattcaattggtctgttacccgtccttggcgtactcgacctgtcagaaaatcaattctctggtgaagttccttctaaacttcccagaatcaccaatctcaatctatcctccaattatttgacagggagggttccaagtcaatttgaaaatcttgcttataacacaagctttttggacaattctggcctatgtgctgataccccagcactgaacctcaggttgtgtaattctagccctcaaaggcaaagcaaggactcatctttgtctcttgctttgattataagccttgtggcagtggcctgcttcctggctttgttgacatcactcttgatcatcagattttatagaaaaagaaagcaaggattggatagatcatggaagctcatttccttccaaaggctgagtttcactgaatcaaacatagtgtcatcactgacagaaaatagtattattggcagtggtggatatggcacagtataccgtgttgcagttgatggtttaggctatgttgctgtgaagaagatttgggaacacaagaagttggacaagaatcttgagagctcatttcatacagaagttaagatattgagcaacattcgtcacaaaaacattgtcaaattgatgtgctgtatctctaatgaggactctatgctccttgtctatgagtatgtggaaaaccatagccttgacaggtggctgcaccggaaaaataagtcatcaaccgtgtcaggttcagtccatcatattgtccttgattggccaaagagattgcatatagccattggagctgcacaaggtttgagctacatgcatcatgattgctcaccgcctattgttcatcgagatgtgaaaacaagcaacattcttttggattctcaattcaatgcaaaagttgctgattttggtctggctaggatgttaatgaagccaggggaacttgccaccatgtcatccgtgattggctcatttggctatatggctccaggtgaatgacttgccaaaatttttgtttccttcaaaataaatataggacaaaacttacatacgttacttttaagtactatttatgccaatattctctaaccaaaattgatgatttatcagtaatcattgttaattttagttaccaagatgatgaagtgctaattttgattggaaatcaacaacaattatacctttaattagtattgtatctaagatttgtccacgaatatgttgctaatgattagttgaattatgtctcattttcccttggtataactcataagtctaatatgaattgtttttgacatacttgaattgcagaatatgttcaaacaactcgagtcagtgaaaagattgatgtcttcagctttggagttatgctattggaactgacaactggtaaggaagctaattatggtgatgagcactcatctcttgcagagtgggcgtggcgacatcagcagttaggaagcaacatagaagagctgctagataaggatgtcatggaaaccagttacttggatggaatgtgtaaggttttcaaactcgggatcatgtgcaccgcaacacttccttctagtagaccttccatgaaggaggttctacgagtattgctttcttgtgaagattcattttctaaaggagagagtattattggccactatgatgatgttccccttcttaaaaattcaaaaagagagcataagttggatattgataatgatagctagctaggttggtatcatgttgaggttgtaaattgctgatttgtgtgtgactaaccaactgagcttccatggagattattgccaattctggaattgaagtcagtgaaacagccactggatagcagatttagaacatcagcgctatagaatgcatggaaagtgacaccaaatagaagtactttttggtatgtgagattaattaatcctcaggggtggtgattagttatcaggattccaattaatttctaaattgtagctactcttttgatgagtagtccttaatactttttttggatcacaatctcccaatggaaattgtgtgtcatatttaaagttt

SEQ ID NO: 7554 - DNA, 1234 bp, Glycine max
  Clone ID: 700672217_FLI
ataagcagccttacaactcttcttaatcccatcaaatcgaaccctttttaaacgctcaaatacaaatttctggcaccaaatccttcccactctcctcaattccattcatttcaactcaacaatctctcagatccgtcaaacaaaatataaaagatagaaaaccctagttctgtaaatatataaaggaaaaaaggtctgatagatacccattgtcaataagatctaattcttcacacacggatttccccacaatttcttaacgattataacctgattgcgggaaaaaaaaattgcccttttgttgatttttttttgtcaaaaacaattttgtgtgtgtataaaaccatccgtgatctgggttcttttaaaaattggttcttttgtgtattttgttacttttgtaaggaaaattgagggttttggtactgatcactgtggaacatggtggttttcgttgatgggcagctttttgctggttttgaggcatagcattaaattggattttgattattcatggctgaacaagcattggaaggtagccaacctgtggatttaacaaagcacccttctgggattgtgcctacccttcaaaatattgtgtcaacggtcaatttggactgtaagttggagcttaaatcaattgcacttcaagctcgaaatgcagaatacaatcccaagcgttttgctgctgttattatgaggatcagggaaccaaaaactactgcactcatttttgcatctggcaagatggtctgtactggagccaagagtgagcaacagtctaaattggcggcaaggaagtatgctagaattattcaaaagcttggtttcccagctaaatttaaggattttaagattcagaacattgttggctcttgtgatgtcaagttccccattcgacttgagggtcttgcctattcccatggtgctttctcaagttatgaaccagagctgtttccaggactaatctatcgcatgaagcaacccaagatagtcttgcttatatttgtctctggaaaaattgttctgacaggagccaaggttagagatgagacttacacagcttttgagaacatatatccagtgcttactgagttcaggaaaaaccaacaatgattactactgtcaagagagcaggagcaaggcttgattgaactgtaaatatgaagaccagagatagaaatatctgtaatctggattgagttttaataagacacctgtgtttgttctgtct

SEQ ID NO: 7555 - DNA, 2420 bp, Glycine max
  Clone ID: 700672271_FLI
gtaaaattgttaacaagtgtggaggattgcctttagctataagaacagtgggaaatatcttgcgagcgaaattctcccagcatgaatgggttaagatattggaaagtgatatgtggaacttatcagacaatgatagcagcattaaccccgctctgagattgagttaccataatcttccttcctatctgaagcgttgttttgcttattgctccttatttcccaaaggttatgagttttacaaggatcagttaatccagttgtggatggcagaaggtttgttgaatttctgccagataaataagagtgaagaagagttaggtactgagttcttcaatgatctagtggcaaggtctttcttccaacaatcaagacgccatggttcttgcttcactatgcatgatcttcttaatgacttagcaaaatctgtctcaggagatttttgtttacaaatagacagcagttttgacaaagagataacaaagagaactcgtcacatttcatgctctcataaatttaaccttgatgataaatttttggagcatatttctaagtgtaacagactgcattgtcttatggcactaacatgggaaattggcagaggagttttgatgaacagcaatgaccaacgtgctttgttttccagaataaaatatttgcgcgtattatcattcaataattgtcttctcacagagttagttgatgatataagcaatttaaagcttttacgttatctagacctttcctacaccaaggttaaaagattgcctgactccatttgtgtgctgcataatttgcagacactattattaacatggtgctatcatttgacagagctccccttagatttccacaaacttgtcaacttgcgtaaccttgatgttcgtatgagcggaataaatatgatgccaaaccacataggaaacctgaaacatcttcagaccctgactagttttttcatcaggaagcatagtgggtttgatgttaaggagttggggaatctcaacaatctccaaggaacactttcaattttcaggttagaaaatgttactgatcctgcagatgccatggaagctaatatgaaacagaaaaagcatttagaaggattagtgttggattggggtgacaaatttggaaggcgcaatgaaaatgaggactcaataatagaaaggaatgtgttggaggctcttcaaccaaatggtaacatgaaaaggcttactgttttgcgttatgatggaactagctttccaagttggtttggaggtactcatttacccaatttagtatctattaccctgactgaaagtaaattctgttttatcttgccaccgtttgggcagctcccctctctgaaggagctttacatatcatccttttatgggatagaggtcattggtcctgagttttgtggtaatgattcctcaaatcttccattcagatctcttgaagttttgaaatttgaggaaatgagtgcatggaaagaatggtgcagttttgaaggtgaaggtttgtcttgtcttaaagatctttctataaaacgctgtccttggttgagaaggaccctgcctcaacaccttccttctctgaataaattggtaatttctgattgccaacacttagaggattcagttcccaaggctgctagcattcatgaactagagttgcgtggatgtgaaaaaattttgctgaaagatttgccatccagcttgaaaaaggccagaattcatggaactcgcctcattgagtcctgcctcgagcaaattctgttcaacaatgcctttctggaagaactgaaaatgcatgacttccgtggtccaaatctaaaatggtcctctttggatttacaaacacatgattctcttggcactctatctataacaagctgaaactcgaaattgagggttgccccaagctggttgcttctagggaggactggggattcttcaaactccattctctcaaagagttcagagttagtgatgagcttgccaacgtggtgtctttcccagagtatctgttgctaccatcctctctcagtgtgctcgagttaattggatgttcaaagctaacaacaacaaactatatgggttttctccacctcaaatctctgaagtccttccatatttctggttgccctcgtctccagtgcttgccagaagagagtctccctaactctctttctgttctgtggattcatgattgccctttacttaagcagcggtaccaaaagaatggagaacattggcataaaattcaccacatcccttcagtgatgattacttggcagatgaaacatgcagcacattcatccgtatgttcatatccagtgttttatgtcaaatatttgtgttttatcttttggtggaattgaaaaaagatattatcccaccataaatcataatgaaatctttcaaacccaacct

SEQ ID NO: 7556 - DNA, 1150 bp, Glycine max
  Clone ID: 700672302_FLI
ggagcttcgtgaaattgttagtgaatgagatgagatctgctggttgggatattgatgcatcagtcaaggccattatggagcagaatgtggtttactggaaagaagatcacaagtgttttgcaattgagtcctttgtgtgtagggagatgtttgattcattcaacttccccaacttctccctaccaaatgagtccctaccagataggaacaggaggcaactgttctttgggaggttcaacgagctaaaaccagagaaagcaaaggactttcttgcagggaaaccaagatcaccctttgcaaaattctgcaggatcaagtacttgaggcttgttcatcccaagatggaggcatccttcttcggcaacctgaatcagagaagcctgctgaatgccggagagtttcccaacacaaatttcttcacctcgtttgctgagatggcaaagagggtatggctcctacattgcttggccttctcctttgagcctcctcaagcttcaatctttcaagtggggaagtggtgcagattctctgatgtgtacatggagagtgtgaatgaaaatgatgaagaaatgccagtggagtccgagacacaaattgctttcactgtggttccagggtttaggattggtaaaactgtgatacagtgccaagtctacctctcacagcgccaagtaaaaaatttcacatccacaaagcaaaggtagtagtaactagtaagtggtgcttttgatcagagactgaccccaccatgcaacaggttttgtgttgaagtggaagacaatgttttgagttgaaacttttggggagggacatggcttgtggtgcagtgcatggctgtgccttgtggggactcaccttctgccatggttcaacggggcattttttttcttgtccatttgtattttggccattttgaaaaggaagcgcgtgaaccgttgcattgggaagtgcccctcttgttcggaatgttttttttaaaaaaaaaattatttgttatgcagtttaatcaaatgcttgcccccaaattttgttgatattaggccggtggcagggatggtctagctggaatgcatcttttccagacattgcatatgttatgtacataataatgttgttggcgataattttattctgctctttttagttcttt

SEQ ID NO: 7557 - DNA, 522 bp, Glycine max
  Clone ID: 700672319_FLI
gcttcagtacttgctacctttctataaaggtagagagaagagaggacccttctcttgcatagttcaagtgagtgagagtgccaaaaaatgggaagggctccttgttgttccaaagtggggttgcacaaaggtccatggactcctaaagaagatgcattgcttaccaagtatatccaagctcatggagaaggccaatggaaatcactacccaaaaaagcagggcttcttagatgtggaaaaagttgtagattgagatggatgaactatctgagaccagacataaagagagggaacatagcaccagaagaagatgatcttataatcagaatgcattcacttttgggaaacagatggtccctcatagcaggaaggttaccagggagaacagacaatgaaataaagaactactggaacacccatctaagcaaaaagctgaaaattcaaggaacagaagacacagacacacacaaaatgttagagaatcctcaagaagaggctgcaagtgatggtggcaacaacaac

SEQ ID NO: 7558 - DNA, 996 bp, Glycine max
  Clone ID: 700672322_FLI
gaaagaacttccttataaccaaaaccaacaacaactatggcaagttatcagaagcactacgatgatcagggtcgcaaggtcgacgagtatggcaatgttgagaggcaaactgacgaatatggcaacccggttcatgccactagtgtcacttatgtagccaccaaaagtgttggtggctacaatgatgacgctaataagcaacatgatattactggtgtctatcccgagaaagacaccggtagacatcattttggtcgtggttacgacggtgacactaacaagcaacatgatgctactggtgtttatcccggaatagacattggtagagatcatgggactaccggtgtttatggcctaaacaccgacagacatcatggaacttctggggtgaatcccgggatagacacccataaccaacaacatgggactaccgttggttatgctggtgacactggaaggcagcatgggaatacaggtggcctttactatggaaccgacaccgcggacacaggaaccggtcctagaagtggaaacaccggtggcaccggttatggaggcactggtggtactgattatggaacagctggtggcactggttatggaagtggaactggctatggaatcaacactgggggtgcgcacactgaagcagggtatgggaaggagcatcgtcagcatgagcaatctcatggtggtcagcacgagaagaaagggatactggacaagattaaggagaagcttcctggaggacacagtgacaagtagatgcatcgtgcatgcatgcatatagtatatatataatattgttgtctttgaataaatttgctgcatatgtacttggaggatatagcatatggttatagtatattatatagaggaataaaaaatgtatgcctgtaatgtaagggttctcatatacatggctgaaatataaagcataataaaggcattgatgttgtgccaatacatatgttgagagttattgggcttaagcct

SEQ ID NO: 7559 - DNA, 1460 bp, Glycine max
  Clone ID: 700672387_FLI
ctgtctcctccatggccatctccttcagtcccaaacaccctccttacgatgagatgatatacacagcaatcggagctctgaaggagagggatggttcgagcaagcgagccataggaaagtacatagaacaagtctacaaggaccttccacccactcaccctgctttgttgactcaccatctcaaccgattgaaatcctctgccctcctcgtcctcgtcaagaaatcctacaagcttcctggatctcatcatctgcctgcgctccagccccaaaagacccgtggtcgtcctcccaagcccaagccccaccccgtctggcctgctgcagccctcaccgacagccctgctcttctatccgccaaaagaggccccggtcgtcctaaaaagattggtgtcagcccgccaggcccaaggggtcgtccacccgggactgggagatctaagctgcccaagaggcctggccgtccccccaagcccaaatccgtctcggcgatctccagtggtctcaaacgacgtcctggacgcccacccaaagcccaatccaacgtaaacgtcatccccttcgcagccccagttgctcccggcctgcctactgtgcagcccatccttcctactgcttccgtgcccaatggatctcccaggccccgaggaaggcctaaaaagagttttactgctgcgggggctccggcgctatctgccgttgccggtgcagcgcgtggtcgtggccgcggacgtccacgtggggtcttcccggtggttaggcccggccggcctcagaagctcgccgtaggaaggtccaagaatcctgtaagaaggcccgtgggccgccccaagggatcgacagctgctgcaatcacagcacataaggctgctaatgaagatctaaggaagaagcttgaacactttcaatcaaaagtgaaggagtcccttggcacgcttaagccttattttaaccatgaaagcccagtcactgcaattgcggcaattcaagagttggaagtactgtcaactttggaccttaaagcgccattgagggatgagacccagcaacagccaccgccactgccacagacacagacacaggtgtatgaacagcaatatccccagccacagtcacagcagctgccgcaattttttcaaccacatacatcagccccgagctaggcctgaacatgatgaaggacaacttgtacaagtgttattaacaaggcacaagaggtaaaagatctgtaaagcggttaggaagtagtggtactgatttttctgagggtgaaatgactctgtctattttagtttgttgttgtgcaacatttagtttgacccctgaagtgattagcgggtactcatgattctgttgttctttaagtaatatttatttgacttttacagtttactttagtcacattaatgtgtatgtttgtatcagcctcttttgttgtttaatatttttaattaatggtt

SEQ ID NO: 7560 - DNA, 942 bp, Glycine max
  Clone ID: 700672423_FLI
gttcaatggtgttgtgggagataacgctcggaactgcgtatttcttgggtctgaagcgaacttacaggctcgctctcaggattcaacgcaggatcgtaagccctaagtaccctaagctcctccaatttcttcacagacggacccgtgctgtgtttgatgtagctatcagagtgcatcgtaacattcaagttagggacatagaagtgggacggaattttgggaactttatattgcgatggctggatcgaatgaagccatcggctcagattcgcggtcccccaccttctaatggtattacatcaagagaaagtgttggaaaacgtttatcagcaggtagaagttccaatcagaagggttctggaacgtcaaggagggactctgataggcatttgtttacctcatcaaggataatgcattttcctacagtagcgaggatgatgcgaccgccgaatcctgctgggattaccatccatggcaggcacttcagtacctctacgcctcaaactgttggatcaatttacagggtaaattggtcagagggtgttattaggaaggatattatgcagtggttgaggcataactaatcctctctctgctggcagatgttggaaattgatggtgatagagtaagcaaatctgtcgtatctgattttgtctctttggattttgtatagttcgtcaagcttccttttggataaccagcggttatgcaattgctttcagtcttggtttaaagaactagttgttaatatcaaggataatctttctgttgaatgaataatgacagtagagtttttgcattgctctattttatagttctcagcaagtttggtttatgcaacttgcagcttgattttttccatacttccactggattgaccataccatgtttattcatacatgtatgccataatatgttctaattatatacgatattgtgat

SEQ ID NO: 7561 - DNA, 991 bp, Glycine max
  Clone ID: 700672484_FLI
ggcgaggcagaggaagcgataatggcaataagaggcataggaatgtcgttctctgctccatcaacaacaagacccatactttccctcaacccacgattcctttcagcgtcatccacaatcccattatttctcgttcccagcagaagcagttatctgttattatcgttctctttcagcaggcccgaaacagagtgccctgttccgcacgagcagcagcccatcaacgagtaccagtccctctcgacttcgttcccgttctcgtgggccgccggcgacgtggtggagtacgcctcgcgcctcttcgtgacgggggcgtccttcgcgctgctgctgggcctccccgtggcctggttcgggtccgccggggcccaggccgagcccgccaagcgcctcctctgcgccgcctccagcggcctctttgctgtcacgctcgctgtcgttaggatgtatcttggctgggcttatgtcgggaatcgcttgctcagtgccaccgttgaatatgaggagactgggtggtatgatggtcagatttgggtgaagactgctgaagttttggcccgcgatagactccttggatcattttttgtcaagcctgtactgggcagattgaaaattactctagtgagtcttgcaacttcattacttgtatgtgcacttatcctcattaacattgatggggaccaaaacctgacatcaaaagaacctagagttcgagttgtacctggagtttacaatgatgattctgcaagattatttgaaccagatgcctttcgtgatgaacttgatcttcaataatacatgttgaccgcttatactaaagaattatcaacgctggaccctccattcaatgacagcatgtagttatttgggaggaacgggtgctccatatgttcagtatcaaattctataatgtacatatcttatatttgcctttttacacaccatatgtttactgtaaagttgaaaataaaatgaacatatgtacattttc

SEQ ID NO: 7562 - DNA, 622 bp, Glycine max
  Clone ID: 700672582_FLI
gttcctgacgtcgggggccttcgggctcacggcgctgtcttccttctcctggatcctgaactacatccgggagacccagccagcctcggagaacctcgccgccgccgcgaagcatcacctcgccgaggcggcggagtacgtggggcagaagacgaaggaagtggggcagaagaccaaggaggttgggcaggatattcagagcaaggcacaggatacaagggaggcagctgcaagggatgcaagggaggcagctgcaagggatgcaagggaagctgctgcaagggatgcaaaggtggaggcaagggatgtaaagagaacaacagtgacagcaacaaccgcaaccgcatgatgagtaattctgatattagagggagcattaatgtgttgttgtgatgtggtttatatggggaaattaaataaatgatgtatgtacctcttgcctatgtaggtttgtgtgttttgttttgttgtctagctttggttattaagtagtagggacgttcgttcgtgtctcaaaaaaaggggtactaccactctgtagtgtatatggatgctggaaatcaatgtgttttgtatttgttcacttccattgttgaattcaatgtcaaatgtgttttgcgtt

SEQ ID NO: 7563 - DNA, 2694 bp, Glycine max
  Clone ID: 700672612_FLI
gttttgttctcttcgcttccgtcgcatgttgcttttcacacccttctctcctcggtatacaccctctagatgagaaatattacaactctgaggtgatcaagtgcagggatggatcaaaatccttctccagagaccgtctcaatgacaatttctgtgattgtcctgatggcactgatgagcctggaacttcagcttgccccaacggaaaattttattgcagaaacctaggtagcaagccgcagtttatagtttcttctcatgttaatgatcatttttgtgattgttgtgatgggagtgatgaatatgatggaatcatttgttgcccaaacacatgtgtcatgggtgggaatgctgagtccacgtttagcaattgcaagtcagaagcaagtcaaaatggagtgaagtcagaggaatcagttcatactggtttgaagttggtgattattctacaagtggttctggttatttttctggtatttctctggagttttcgttgccgcaccagatctagaaggagacattaccgttgaattgaaagagactttgctttttacctgacattgaatggtggtaatattttaaaatattttcttcattttccctttctgagttctttgtgatcgtaatttaatatacttttgaattagttgatgtcagggttcatttcataagaactttccatagtatttgatgaacaacagaaacagtgagaattaggagaaagcatcttggaatttatcatctttttaatttgttttcattcaggaaagatacttaagaaaccatatattgcatgcagtacaacttaagatataaaacctttttccaaatatatttttaaattgactggttgttgctgtatcattgaggcatcaggattaagttgaagaatatagatataataagtttattctacaatatgatgcttccctttgaccatggcaactatttgtggtagcttaacaccttttgtttttttacacattgatgtcttattctcttaaactttcaacatataattaatggttctttagtatgctattcatgccatggatattagtttttttttttttttgttatggtagatttggcttaaaagatcattatgctataaggcaagcttagcaaacatgcttatctattacttgttgctatttaatatgaacttgactaatttaatttagagtggtgtatttcaatgttcagtatattggttctgttcatatattttacattgtaatatttaaatagttatatgtttgttattgttaaattagacataagtggctgtacatttttgtgtacatatcatatcacgacttttgttattgatgtaccaaatgagttgttactttattgtgattttataattatgtgataatttttcaccagtggtaatgttccattctttataacatgatggagaaaaaattgatattttatgtgataaatgagagggtggctgacatgggtgagttagttattggcactgctgagttcagaatgggaacaaaaggcataataggtcttgctaggcgtaggagactaggagtaaccaactgaggaagcctaaacaactcttgtaggactatgttcattagtacggaaatgagaatataagctagggaatggatgagaattgggggcactgagaattgttgtaatctcattttctaccttctgtctctttccctttttaactttcatcttctaactcatatactattgttgatgtttatctctatagtactggtaaactggttatagtgtgaatcaaataatacattactccattctgatactctactgttgttttctgtttacactgcaatcttccattacattttctcaatccctggccttatcttttcacatatttatactgtctctttagtctctaggtgccatattgatcagatctaagtatctttctgacaaacctctgcagggtttcatgtttgttatggtacaagtccagtactgaattaatttatcaacagctatgattagatcaacaatgcaccaatttcttcttcatttatgcccttttatgaaccaatgcacttcaattagtccatggtcatcattataaaacctagagcaggttactggagcacaacggactcaatgttctggttgcattccagttcctcaaatcctagtttctctcatctgcaccacgaattcaatgtctgtcacacagtcattttgtatctaatattttacttgaggtgcaatcaattggataacatcttgactgtgggacttgtaatatatctactatcatatcttcgtacagttgatcagttggagttgaagtcctgaaggttatggatttagagtcacaacattgttatgagtgcagtttgcgagttcaagagtttccaaggcactgaatttaatgaatagtgaaatatggatcatccggcacaaggaacattggtgaaattgttggcagcactacggtcaaacagggaaatatataaagctgttgagattattgatttcctggagacagttatgccctactagatttgaagattatatttagcagtgactgaatttagttgtatttggcaagtacatcaaattacaacgatagtacaataactgtggtgcactattgatacacacacccaccgggaaacaatttaagaaattaattgaaatggaaagttaatcaaatttgaagat

SEQ ID NO: 7564 - DNA, 692 bp, Glycine max
  Clone ID: 700672743_FLI
cattaatgaaagcattgcagattgctgaaaaggctagggatgctattcttagcgggaaatttgatcaggtacgcgtcaaccttccaaatggtgacatggtggggcatacaggtgacattgaagcaacagttgtggcatgcaaggcagctgatgctgctgtgaagatgattcttgatgcaatagagcaagtgggtggaatttatgttgtcacagctgaccacgggaatgctgaggatatggtcaagagggataaatctggaaaaccacttctaggcaaggatggaaaaatccagattcttacttcccatactcttgagcctgtgccaattgctattggaggtcctggattggcccctggtgtcagattccgcaacaatgttccaactggtggacttgccaacgttgctgcaactgtgatgaatcttcatggatttgaggctcccagcgactacgagacaactctgatagaagtagttgataactaggaaccaatagatgattttttttttttaatttgcaaaaactcagggtaagcattgcagcccacaaaataattgaaagttttcatccttccacatgtgtggtggttttgttcttatgagttaccaaatttcagtctggagttgacagaacagtataaccaattaatggcattttgacactttctcctataactttctttcattgtgctg

SEQ ID NO: 7565 - DNA, 1570 bp, Glycine max
  Clone ID: 700672815_FLI
cctcaacattttttgtttttctctccatcccaattatcgccacctcctctttcttcaaatttcaatctcagaggatgggtggtgaggaattgtgtttgatggagaactcagggaaagggaagaggctgtggaagaaggtgaagtaccagctggtggagtaccactccttgcccggttatttgagagacaacgagtacattctcggtcactatcgatccgaatggcccatcaggcaggttttgttgagcgcattcaccatccacaacgaaactctcaacgtttggacgcatttgatcgggttcttcatatttctggcattgaccatatacactgccatgaatcttaattcgctacagcagtttcctgacatgctcaagaaggccgacctgcacaaattacaatcagaaatcttgacgtgtctcccttccatgcctgatttgcacatactcagggagggaatctcaagttggcatattaaagaatatctgtacaattgtttgccacatagtgtaaaagatgacttggcgaacataatagcaccactcatgattagaccaattacaaggtggccttttttcgcatttttagggggtgccatgttttgcttgctagctagcagtatttgccatctcctctcttgtcactctgcacgcatggcatacattatgctcaggctcgactatgctggaattgcagccctgatatctacctctttctatcctccagtatattactcttttatgtgttacccatttttctgcaacctttacttgggatttatcactgtattgggcatctccaccatcttgttttctctactcccagtgttccaaaatccagaattccgcaccatccgagcatctctcttctttggaatgggtttatctggcgcagcacctattctgcacaagctttatctattttggggccagcctgaagtgtttcacacgaccggttacgagattctgatgggtgttctctatggaatcggagcactggtttatgccactaggattccagaacgatggatgcctgggaaatttgacattgccggacacagtcaccaattgtttcatatattggtggtggctggggcatacgctcattatcgggcagggttagtttatctcaggtggcgtgaccttcaaggttgttgatttgatatgcatctatgaacgaacagtggttgaatactctgctgttatgtaactagtaagtatgtgctagtatacactcctccaactgatgtgaatttgtgattccggtaggggatgtttatgcagccatagggattatgtacgcacttagaacccttagcacacaagtcactagtcagcaataaaaattttatttggtctatcgtgacatactagaaacatttttcttctgcctgcatgtatcttgttattcaagttgtattattagccttgtgttttgctctggaagtcgggatactattttggaagccgaagtggcttctcaagattatagtcccaagggttgccctctcattcctgcaacaaaattgtgtattttttatttttaattaaaaatcatgtggatgttatgc

SEQ ID NO: 7566 - DNA, 2170 bp, Glycine max
  Clone ID: 700672974_FLI
caataatcacaatcactgtgttccagatttcgatattcaaatggaccacgaccacgaataccctattctcacgccttcagccttacctcgccaaaagaaaccctccatacgacgatatcatggagctgctatggcacaacggccaggtcgtggtgcagagtcagaaccaacgttctctgagaaaacttccgccggtgaccaactcccacgacgcctctcccgccggtccttcaatgacgagagagattcgaccgctggtggagaatttcaatcagcatctcttcatgcacgaaggcgaaatggcttcgtggcttcactatcctatcgacgacgacgagcctgcgttggatcaaagcttcggcgccgattttctctattctccgccgacgacggctaacaacagcagcttcatgcaaaccctcggccacacgtctcagctcacggagctccggccgatgtcggcgaatccacggcctccgattccgcccccgagaaggccggaacagaggacgccgaacttcgcgtacttctcgaggcacaacacgagagccgcggagccgagcgtgaaggccgccgcgagggaatccacggtggtggattcgtgcgatacggaggcggcggcttcgagagtttcggagacagtaaggagcgcggcggaaggaggtgccggcgttgcggcgccttcgacgagtgccggcggtggaaggagcacgatgatgtacgatttgacgatgacgtcatcgcctggcggttcgagtagctgcgacgagccggttcaggtagcggcggcggaggaggatcggaagcggaagggacgggaggcggaggaatgggagtgtcagagcgaggatgttgattttgaatcagaagcaaagaagcaagtttgtggatcaacatctacaaagagatcccgtgctgccgaggtccataatctctctgagaggaggcgtcgcgatcggattaatgaaaagatgaaagctctgcaagaacttatacctcgttgcaataagtcggacaaagcttcaatgctggatgaagcaatttcgtacttgaagtcattgcagttacaagtgcagatgatgtccatgggatgtggaatggtacctgtgatgtttcctggaatccagcagtacatgccagcaatgggaatgggggttggaatgggtatgggtatggaaatgggaatgaacagacctgtaatgccgtttcccaatatgttacctggttcggctttgccagcggcaactgcagctgctgctcatttgggaccaaggttttccatgcctcctttccacatgccccatgttcctgctcctgattcatctagaatgcaagcagcaaatcagtcagataataatatggtcacgtcagctggtccacctgatccaaatcagtcacgtatcccaaacttcactgatccttatcaacaatatcttggtccccaccagatgcagttccaattaattcagaatcaggcaatgaaccaaccaaatgttagcaagccaagtaacaatgggggccctgcgaatccagaaaaccattagtcgggttagattttccggctcctatactacagctgcaaagttttgtagtgttaagagaacgaactttttagctgttctcagtagcaagctaatcgatacacggctatcatgttaattattgcaacgaagttttctccctcttttatcatccttttttcccgttttaaaatttctcttttcgagattctttgatgtgggaagaggaactcgatagatggcacaatagatgaacgtgcattctacaccaaacgtggaggccacttacgtttagtccaattcctgcttcagattcttgttatgttcttcatttaccatcaattttctcctattaggcgttacagcagcctgtgaacctcatcgctgttatttatggagtgaaattgaagcagttcttgatctacatgcccagatggctctgttacaatgcacgatgtgcttagtcaattaaagaaaggaaattgaattattaaaaatttaaaatttatagtactacacatagcagaatttgtacaatagactgtgggattaagagattaccataaaagttatagctatttgtatggcgggtgcgcctcagggaccttgcaatctcttaatttaaagttaaaataatgatgtattggtat

SEQ ID NO: 7567 - DNA, 1558 bp, Glycine max
  Clone ID: 700673043_FLI
aaaaaaataaggcaataacttttgttgcttgtactttttgggtttagggttttgcaccccctttagctaaaacacacaagtggcaagcctatgttcaacttcaactccatgcctctccaattctgaacattctaaatttccgattatataaatccaaacataaaaacaatgtcttcttcgtgtctgagtggagccgggggaagaacctatggattcgatttcgaattcgttaaatctccgtcttcatctactttcacatcacacacatcttcttcaccttcctcaacgatctccgaatcgagcaattcgccgctggcaatctcaacgaagaagcccagaacgccgcggaagcgacccaaccaaacatacaacgaagccgcggcgcttctctccacggcgtacccgaatttgttctccacgaagaacttgaaaactcagggcaaaggcaaaggcaaattctcgaggcccacatcggagaatttcgattacgattcttcggagctgttattgccgttcagagtcttcgacggaacggcgtcgtgttttcttttggaccaaacgggcccgaagcccatggagaggcccaaagtggtgagcgtgcaggagaaggataataataataaggcgtgtgagagccccggcgagataagctccatcgtgaatttcaattcagttgaattgaacgatgacggcgaagagagcctcgacgcggaatcgattctcgatgaggaaatcgaagaagggatcgatagcatcatggggagcagtattcaagaggtctcaaacgacgccgttagtaacttgccctggattttgccttttggcgggaaattggagttcccgagaccccgtgttagggctctccgccacgtcgacgacggtaactggtggaattttcctgccgtcgatattctttcaatatcgcccaaaattaacaccaagcctccgccggtggccgccgagaagaagatgaagaagaagaaggttgcggcggcgccgtcgccggtcgtcctggagttgaagaacacggaattgcccaaaccgaaacagggtttgatgttgaaattggattacgacggcgttcgaaacgcttggtctgacagcggaacaccgttcaccgacgatagccccctcgccgacgtcccggaaaatgacgtcactgcgcggttgtcgcaaattgatttgttgtgggacaatggaggagtgagagaagctagcgtgctgcgctacaaggagaagcggcgaacgcgcctcttctcgaaaaagatcaggtaccaggtgaggaaagtcaacgcagatcgacggcccagaatgaaggtacgagtcagttcacagttgagttgaggacacttgaagaaatttgatttatgtcagataaagaaaaagaaaagaaaaaggcaaatctgctttatgatttggtgatgataattggataatgaggtgcgtgcgtgggtgcgtcacagtttattatttttgttatggagagtggaccccgtttatggtggttggtcactttgtccaacttttgaggatctatctattttttcaccttagtttg

SEQ ID NO: 7568 - DNA, 2511 bp, Glycine max
  Clone ID: 700673077_FLI
cacacctgatgatgggttggatttcattactgatgagcgtgaatggggggctcgcatgacgaaagcaagtttggttcctcctgttactcggaagtatgatgtcattgatcaatatatcattgtagctgatgaagaggatgtgcgaaggaagatgcgggtttcattaccagatggctatgcagagaagctgagtgtgcaaaagaatggcattgatgagtctgacatggaactgcctgaagtcaaggattacaaacctagaaaacagcttgaaaatgaggttgttgagcaagaagtttatggaattgatccctatacccacaatctcttactagattctatgccgaaggagttggattggtctctacaagagaagcatttgtttgtagaagacaagctccttcggatgttgaataagcaggttaatcattttactggaactggaaacactccaatgagctaccctttgcagcctgctattgaagaaattgaaaggtatgcagaggagcagtgcgatgtgagaacagtaagaatgtgtcaaggtatcttaaaagccatagcaagtcgtccggatgacaaatatgtagcttatagaaaggggcttggtgttgtttgcaacaaggaagaaggctttggtgaagatgattttgttgttgagtttttaggagaggtgtatcctgtgtggaagtggtttgagaaacaagatgggattcgatctctgcagaagaatagtaatgatcctgcaccagagttctataacatctaccttgaaaggccaaagggtgacgcttatgggtacgacttagttgtcgttgatgccatgcataaggctaactatgccagtcggatatgtcattcatgccgaccgaattgtgaagcaaaagttactgctgttgatggtcattatcaaattggtatttatagtgttcgtgaaattcaacatggcgaggagatcacttttgattacaattctgttacagagagcaaggaggaatatgaagcttcagtttgtttgtgtggaagccaagtttgccgtgggagctatctgaatctgaccggcgaaggggctttcgaaaaggtactgaaggagtggcatggaattcttgatcgtcattatttgatgctagaagcttgtgaattaaactctgtttctgaagaggactataatgacctgggaagagctggtttaggcagctgtttgcttggaggccttccagattggctagtttcctatgcagctcgccttgtgagatttatcaattttgaacgaacaaaacttcctgaggaaattttaaagcataatcttgaagagaaaagaaaatatttttcagatatctgtcttgaagttgaaaggagtgatgcagaggttcaggctgaaggtgtatacaatcagaggcttcaaaatctcgctgtcactcttgataaggtaaggtatgttatgcgatgtatttttggtgatccactgaaagctccacctcctcttgagaagctcagtcctgaagcagttgtttccttcctctggaaaggagaggattcatttgttgaagagcttcttcagtgcctggcccctcatgttgaagagtctaccttgaatgatctcaagaccaaaattcatgctcgtgatccttcaagttctggagatattcaaaaggcggttcaaaaatctcttttgtggttgagggatgaggttcgaaaccttccttgtacatacaaatgtcggcatgatgctgctgctgacttaattcatatttatgcttataccaagtacttctttagaatacaggattatcaaactattacttcgccacctgtctatattagtccacttgacttaggtcctaagtatgctgacaaattgggagcaggatttcaggagtatcgaaagatatatggtgaaaattattgtttagggcaactggttttttggcataatcagagtaatgcggagccagattgtaccctggctagaataagccggggttgtttgtcattaccagacatcagttccttttatgccaaagctcagaagccttcacgacatcgtgtttatggtccaaggactgtcagatctatgctggcaagaatggagaagcagccccagaaaccttggcccaaagaccggatttggtcattcaaaaattctccgaaattttttggtagcccaatgttagacgctgtaattaataactctccacttgacagagagatggttcattggttgaagcacagacctgcaatattccaggccatgtgggaccagtgaagttttgcttgctgaatggtttggggaaaacccttgttagagattagagagtggttcatcattcagaactgcctgcctcttttagcgtggggagtctaattattaatccatagcataagttcttgtttcgctttgtccttcattcttgtgtatagttttcttgacctttgatttgtaattcatttggttgtagggcattgttttactcttgtctaatgtgaaaagaaatgaagggaaaataggtttaattc

SEQ ID NO: 7569 - DNA, 964 bp, Glycine max
  Clone ID: 700673168_FLI
aagaaagaacttccttataaccaaaaccaacaacaactatggcaagttatcagaagcactacgatgatcagggtcgcaaggtcgacgagtatggcaatgttgagaggcaaactgacgaatatggcaacccggttcatgccactagtgtcacttatgtagccaccaaaagtgttggtggctacaatgatgacgctaataagcaacatgatattactggtgtctatcccgagaaagacaccggtagacatcattttggtcgtggttacgacggtgacactaacaagcaacatgatgctactggtgtttatcccggaatagacattggtagagatcatgggactaccggtgtttatggcctaaacaccgacagacatcatggaacttctggggtgaatcccgggatagacacccataaccaacaacatgggactaccgttggttatgctggtgacactggaaggcagcatgggaatacaggtggcctttactatggaaccgacaccgcggacacaggaaccggtcctagaagtggaaacaccggtggcaccggttatggaggcactggtggtactgattatggaacagctggtggcactggttatggaagtggaactggctatggaatcaacactgggggtgcgcacactgaagcagggtatgggaaggagcatcgtcagcatgagcaatctcatggtggtcagcacgagaagaaagggatactggacaagattaaggagaagcttcctggaggacacagtgacaagtagatgcatcgtgcatgcatgcatatagtatatatataatattgttgtctttgaataaatttgctgcatatgtacttggaggatatagcatatggttatagtatattatatagaggaataaaaaatgtatgcctgtaatgtaagggttctcatatacatggctgaaatataaagcataataaaggcattgatgttgtgcc

SEQ ID NO: 7570 - DNA, 1385 bp, Glycine max
  Clone ID: 700673225_FLI
gactttgttcaatccttcgacatgagtatgacccaattcgccatggttgaggaattggcttttcttgtcaaggacaatcttccttgcaagcatctagttctcacaatggaagaatcccttgttaactttcttcaggatgatgacactagttcagatgggatcttggaattggagccaatgaactcttacaatcgtcttctattgcatcgccttgctgaaatatttgggtttgcacatgaatctgttggcgaaggagatgatcgccatttgattctggaaagatgtccagatacgtccatacctccagtccttgttagtgatatcctatggaagtatgatgatgaacctcaatctttggttacatcccaccaaatattaaggagaagtgaatcctctccagtattgcagaaaaacacagcatccctttcacagtcactagaggagagaaaagcagcttatttaattgctcgtgagcgaattttctctatgaagttggaagaggtaaaagagcctggtgaacaaaagccacggagtgtgcctgtggttgcccgcagaatgattgcccatgccctaggtcaaagaatccatacaaagaatcagaatgacttggctagtgatagtatgaaggatggagtcctcacagatgaattgaatgctcatgataagaatatggaagagtccactctcaagaaagtttctgaagagtcttcacacctaagagggaattcaaacaacagcataagaaacacgagcagttctaatgcagcctcacttaataaaaggaatgatcaaacaacagttgacaaagatttgccagaattctctcaagaaagaaaacaagggcttagtgtaagtaaagactacataaaaaaggagcacttaggagctgcaaagagaatgtttgctcatgctttaggagtgcattctgggaaggatggttctgttcctagaagtagaagtggagaaataaagaagaattagatgaaaaggttgtgaaatatttaaaagcagaatggtattctgttgctccaaatggacctggataggtgctccccaagtttcaatcaagcacgaagatgagtaacgagcatgctttactcaggagattcatgcgaaagactatcgtagtataaagtgaaagggaattcttgaaaaaaactatccagaatcaagtttgacctgatttggagtgaacaggttatggtgttttggcccctcgtctatatgttgttgtaagacatgtagttccagtttcattctactgtgtttagtctattctgtcaacgtgatggtttttgttatggctgttcccaggggatgatttcccgtcatggtgggtgttatgtatataatatgtaaaatcacaaatttcttgtgtcgtgttt

SEQ ID NO: 7571 - DNA, 1522 bp, Glycine max
  Clone ID: 700673240_FLI
tgataaaaaagtgattctgctcacagtcgtttcggggtagcattcttgcgcactcagttattctctctctctctctagagcgtcgtcgtttagttagggcagaaaaccccttttcggatcggtggagcgaagcctcgccggcgagacccccgaggctgttcaatcggcgatcgagcaacggcgaaaagcgacgaagatgaaggttttcgtgaagactctcaagggcacgcacttcgaaattgaagtgaacccttcggacacgctttctgaagtgaagaaaaatatagaaactgttcagggtgcagatgtctatcctgctgcacagcaaatgcttattcatcaaggaaaagttctaaaagatggtactactttggaggaaaataaagtagctgaaagtagttttattgtaattatgctatcaaagactaagagttcatctggtgaaggatctactacttcaactgcaccttcagctaagccaagtgcaactcctacttcaacttctgtgtctactgcacctcaagctcctgcttcaactggagcatcggctacacctgttactgccccaacagctgctcctgcacctgcacctgcaccagctgctccagctccagctcctgctcctatattttcaggctcttctgtgccagagtctgatatatatgggcaggcagcatccaatcttgttgctggaagtaacttggagggaacaattcagcaaatccttgacatgggtggaggaagctgggacagggatactgttgttcgcacccttcgtgctgcttataacaaccccgagagagctgttgaatatttgtattctggcataccagagcaagccgaagctccaccagttaccggagtgcctgcaagtgctcaaccttcaaatcctccagctgatactccacaggcagcacaaccagcatctgttccttctagtggacctaatgctaatcctttagacctctttccccagggccttcctaatgttgggtctggtgctgctggtgctggttccttagactttcttcgcaacagtcaacagttccaagccttacgcgctatggtacaggctaatccacaaatattgcagcctatgctacaagagcttggcaaacaaaatcctcatcttatgcgattgattcaagagcatcaagttgacttccttcgcctaattaatgaacctgttgaagggggtgagggaaatatactgggacagctggctggtgccatgccgcaagcagtgactgtcacccctgaggagcggcaagcaattgagcgtctcgaagcaatgggttttgatcgtgcaactgtattggaggtgtactttgcttgtaacaaaaatgaggagctggctgccaactaccttttagatcacatgcatgagtttgatgaataattagatctcctttacaatttgtcaaaatatttgttttatgtttccttttgaatggtctttgttatgtaatgaaggtaatatttgataatgacaagtctcgaatggacaaggaatattttaatc

SEQ ID NO: 7572 - DNA, 527 bp, Glycine max
  Clone ID: 700673310_FLI
atctgctagtcttgattgatgacatctacaaatatgttgacgatgttgtggaaggacgagtggcaccagacaacaaaatcgggagatttatatcagaagctgtaggttcccttcccaaattgtccccatcagtttttgataagcttgtgaatgacagtttgcaggatcacttgcttttgctgtatttatctagtatcacaagaacgcagcttagcttggctgaaaaattgaacacagctgctcagattctgtgattcttccgcttgtttatcgccgaagtcaaatttttctgagtttcttttcttgtcttatttccagaaacgtggaatgtcagcgttttatacttcacttttacttcgcttatttttttatttatgttttgtgctggtctttgctaggtaagttcacttattgtccaaggtatgcagtgtagcgttcacttgttatttttcatgtaatctgtatttgaaagaaaatgagcaaaaagctttctctccattatctatttatttcttatttattgagat

SEQ ID NO: 7573 - DNA, 1137 bp, Glycine max
  Clone ID: 700673353_FLI
gggacttaaacaaagactttgacatcacatggggagatggccgctccaagatactaaaccatggagagttactcactctttcattggacaaagcatctggctcaggttttcaatcaaagaatgagtatctctttgggaagattgacatgcagctcaagcttgtccctggaaactctgctggcaccgtcactgcctattatgtaagttcttcctttaactttattactattatattattgtagaataataaaaatactaataacccattaatggggtttacttttttttatccctttattataaacactgtcattcaaagttaataatagaaaacatgccttttgtttgcatttgcatttgcagttatcttcaaaaggatcaacttgggatgaaatagactatgaatttcttggaaatctgagtggtgatccatacatccttcacacaaacgttttcagccaaggcaagggggacagggaacaacaattctatctatggtttgacccaactgctgatttccacacttactccatcatgtggaacccccagaggattatattctcagttgatggcactcccattagagagttcaagaactcggaggctattggggttcccttcccaaagaatcagccaatgaggatatattctagtttgtggaatgctgatgactgggcaacaagaggtggacttgtgaagacagattggacacaagctccgttcacagcttcctacagaaacttcaatgctgaggcttgcatatggtcttctggagcatcttcttgcgctaaaacttcttctacacccaccagtggcagtggttcatggctttcacaggaattggacgctacaggccatcagaggttgaagtgggtgcagaagaactacatgatttacaattattgcacagacactaagcgcttcccacagggtcttcctccagaatgcaacatctcttgagagaaaaacattgcaacgcattccttatattttctatgatcagaatgtcataccactaccagtattagttttattgttgtagctactgtagttaaattctttcatttgttcccctgtttggcatcactatgtaaacaaatatggccatttttataataaaataaattcttttgctat

SEQ ID NO: 7574 - DNA, 783 bp, Glycine max
  Clone ID: 700673421_FLI
ttttggctgaggagatgcaagcaataaacaaaggattagaaaaggtggtacaggaactatcaacctctgaaaatgacgggcctatatcagaaactttccgcaagaaattgaaagatttcctcggttctgctgaagctgatgtccgttcattggcttcactatattccagcgtgggtaggaacgtggataaattgattctctattttggtgaagatccagctcgttgcccatttgagcaagttgtgtcaactttgctcaactttactaggatgttcaacaaagcccatgaagaaaaccacaagcagctagagcttgaaatgaagaaaacagcagaaaatgagaaaaagaaatgtgaatcagaaagaattttacctacagctatccgtactggcaatgccaaatagatgctactagctttgagaatcagtatatactctaacatgactaggatttgatgggacaaaaatgggtctggtgtatggtgtttttgaagagcatgtatagttacacaagtagtagtagctgacattgataaccaaaacgaagagaactgcattacactgcaaagtttagaaatggtgtagtttgcacgagttgtgttatttaccggtcaacctgtatatatcttcctcttccctcttcgctcagcaactgtatgattgtaagtattttcaggaaacctgggcaatttgctattaattttttatcactccctcaggcttgattctctctgttagcaacattgatttcacatctgtaatgcaatgcttgatttcttcttgt

SEQ ID NO: 7575 - DNA, 491 bp, Glycine max
  Clone ID: 700673478_FLI
ccaagaccaacttccctccggcgccgcccctctgcctcgacctcaacgtcccttcctccgatcaccgctggccccaccacgtccccccccgcagcctcgtcctcagcgacttcctccacaccgccgttctcagagatatcgacccgccccaacaacctttcccacccgccgccgcagtagctcaccgaaatccccacggcggagctatgcccgttggcggcggggttcaggtgatggagggttctccaacggcgtcgtttttggggttcgttaggcgcggcatccccatcgacttgaacgaacctccacccatgtggctatgaacgaatgaaagccctgactagagtcaaactatatatagagatatctctgcctacggatgtgacggaagcaaatgaaggattcctgatggggggtgacttgaagcccattgattgttcctttccttgcgtctccaaaggtaacagtccctttactaatcttatatattg

SEQ ID NO: 7576 - DNA, 1411 bp, Glycine max
  Clone ID: 700673606_FLI
aacctacctctttttcttctctctcaacaacttcaccttcttcctcctcgatcatgtctcacttcaagggcaagtaccatgatgagcttatcgccaatgctgcgtacattggcactcctggaaagggtattcttgctgctgatgagtcaacagggacaattggcaagcgtttggccagcatcagtgtagagaacattgaatccaacaggcgagctcttagggagctgcttttcactgctcctggtgttcttcaatatctcagtggtgtcatcctctttgaggaaaccctctaccagagcacagctgcaggcaagccctttgtgaatgtcttgaaggaagctggtgtgcttcctggcatcaaggttgacaagggcacagtcgagcttgctggaactaatggagaaaccaccactcagggtctagatggccttggtcagcgttgtgccaagtactacgaagctggtgcacgttttgccaaatggcgtgcagtgctgaagattggtcccaacgagccatctgagctgtctatccatgagaacgcctatggcttggctagatacgctgtcatatgccaggagaatggcctggttcccattgttgagcctgagatccttgttgatggacctcatgacattcacaagtgtgccgccgtcaccgagcgtgtccttgcagcatgctacaaggctttgaatgatcaccatgtccttcttgagggtaccctattgaagccaaacatggtcacccctggatcccaatctgctaaggtttcccctcaggtggttgccgagcacactgtcagagcccttcagagaaccgtgcctgctgcagttcctgctgtcgttttcttgtctggtggccagagtgaggaggaggcatccgtcaacctcaacgccattaaccaggtcaatgggaagaagccatggtcactctctttctcctttggaagggcacttcaacagagcacccttaaggcatggggcggaaaagaagagaatgtgaagaaggctcaggaagcccttttggtaagagccaaggctaactcagaggcaactctgggaacctacaagggtaactcacagcttgctgatggtgcctcagagagcctccatgtttcgaactacagctactgatcaatcgaagttggtgttgtttgaagagactagtgcgagtaggaatcggtattatgggtacaacaaccgaatttcttgttgataagtattattgtggtttgactcttcccagaataatcgtttggaattttgctttttgttttcctagtgttccttttatgtcaattttagtaattcagtgtatttggtcaaacctgtgcaacagggaagggaatgtaactttgttttcttgaaagacaccaccgtgctgtgaatgaggctttgtgtttatttttgcgatt

SEQ ID NO: 7577 - DNA, 464 bp, Glycine max
  Clone ID: 700673634_FLI
gtccccgccgtaatcaccgttgcgctcctgagcctggggttcctcgcctcgagtgggttcggtgtggcggcgatcacggtgctggcgtggatctacaggtacgtcaccggcaagcaaccacctggcgcggatcagttagacagcgcgcgtcacaagatcatggacaaggcgcgtgagatcaaggactacggacagcaacaaatcagcggggtccaggcttcttaattctgcactcgcacgcacatgatcgtatccatctcgtggaatatttctctctttgtctagttagtttatatttaccatttatgaatgaatgaatgcatgattgagcgttaaagttgaatttgaatctctcttttctttgtattttcgtttattgtgggtgttcgctcatcatcacttgttgtaatgtcttaattttgtgtgcatgctgcgactattcaaggacgatccatttgtgtttt

SEQ ID NO: 7578 - DNA, 1880 bp, Glycine max
  Clone ID: 700673717_FLI
tgaggagggagacagtggaaggaaggaacactcaaatcactgaaccagccatggctaccttctccaaggaacgcgagaactttgtatacgttgccaagttagctgaacaagctgaacgctatgatggttctctctctctctctctcgattttcactgtgaagtgaacactcgttctggttccttcattttagctgcattccactttcaatcacgtttccatcatctcctgcagctacccattttctctttttccttataacagacatttgttctgataaagtttcaatttttccataaaagtccactgctttttcacttctgcatagaactgctattctacttttacatgcccatttcaccatctaaattattatgaaagaaaaagagtaaaatttggatttgtagtaggatatttccattgcatgctaagtttttaaaagtcatacctggacatgatttctgaaagagtgtggaaattaaactttgtattttatttgttacgtgttttggaatttgattcaagagtgttgagtggtggagtataataactatttaaaagtcatacctgagatgatttctgaatgagtgagtgtgaaaattgaactatatttgtttgttatgtgttttggaatttgattcaagagtgctgtgtggtggagtatgataattactttaaaagtcatacattcctcatgatttttgagtggatgagaccgtgaaaattaaactatatttatttgttatgtgttttggattttggttcaagagtgttgaggggtggagtatgataattactttaaaagtcatacctgacatgatttctgagtggatgagggtgtgaaaattaaactctatgtttatttgttgtgttttggaatttgattcaagatgtgtttgagtggtggagtgtggtgtgcagaaatggtggaggccatgaagaaggtggcgaagctggacgttgagttgagtgtggaagagaggaacctgttctctgttgggtacaagaatgtggtggggtcacggagagcttcatggagaatcttgtcatcgatagagcagaaagaggattccaaagggaatgagttgcatgttaagcatatcagggattacaggaacaaggtggagttggagctgtccaacatttgcagtgacattatgataattttagatgagcatcttattccatccactaatattgcggagtccacagtgttttattataagatgaaaggagactattaccggtatttggcagaatttaaagctggcaatgaaaagaaagaggtggcagatcagtcacttaaagcatatcagacagcttctaccactgctgagagtgaactacaacctacacatcctattcgtttgggtctggctctaaatttctcagtgttttattatgagatattaaattcacctgaaagggcctgccatcttgcaaagcaagcctttgatgatgctgtctcggagctggataccctgaatgaggattcttacaaggacagtaccttgattatgcagctgttgagggataaccttactttatggacttctgatatccccgaagagggtgaggacctaaaaatggaaagcgcagccagggttgatcaaggagaagatgagttaggccgctaacccatcattctgtcatatgtctaagatttgatgcattaatttttctcaatcatattttctccattgtagtgaagcctctatctgaatggtgcactgcacctcatcaactttgagtcattcttatttttgagtgatggcctatttgagtcatctacttcatttttatgctattgttgagtagttttattcatgtgtttgtgacacaaaaacaccattggtttgcaatgcataatttccctatttg

SEQ ID NO: 7579 - DNA, 824 bp, Glycine max
  Clone ID: 700673721_FLI
ccgaaacttcataaagaaagtcactaaaaaaccgcgggtggggacaccggctcgaccgggttcggctcttccgtcttttttattcgccctcttcaatgagaatcagaaaccgggtccgagtacggagcggcatttcgggttgttgcacccgaacgggtcgagggtttacgacgtggatttgtccggggaaacgccggaggcggagttccggccgcttccggtgccggagaataatgaaaagtttaaggggaggatatggtgcgtggcggcgcgccgggataacgcgacggcgctgacggcggcgcttgcgtacgcgtgctcgcaggggaatggcacgtgcgacccgatccaatcgaaggggaagtgttttaaacccgattcggttttctggcacgcgagctatgcgtttagtgcttattgggcgcagtttaggaaggttggcggaacttgttacttcaatgggcttgcaactcaaaccgcaaaggatccaagttatggatcctgcaagttccctagcgtgacactttgaagaaggaggaatcaaacaaaccaagcaaaatagagctttcgttacgcgatcatataatgattatttaatttcactatgtcgacattgggaattttgaattagggggatcgtttttactgtaggggatagtgtttctttcatttcatgaacgtatgttcctcctatagatagagcatccgaacccactaagaaggaacatacattggtgaatgattttgaatactccaaccaccggatcgccattatttaacaccatgttggtagaataagtgatgaggtgcaatgttttctgctt

SEQ ID NO: 7580 - DNA, 1681 bp, Glycine max
  Clone ID: 700673748_FLI
tgttgatcagattttcgggtaccatagttggagtggaagatatttctcctcattgggtaaattcaaaatggcgatcactcaaggttcaatgggatgaacctgcagctgttcccagacctgatagggtctcaccatgggagatagaaccctttgttgcttctgcttctacaccctcagttcaacctactatggtaaagactaaaaggccccggccacccagcgaaactccagatgttgacacaacatctgttgcttctgttttctgggatgctggtctgcaacaggctgacatggcacaaaaaaatgttttggcggaaagcaaatggaatgacaatactggtacgtggcatcatatgcaaactgacatgaatagtaaaagcaacagtggcaacactatgttaaggaatcagacagaaggaagttggctatcttctccgcattctagttgtccctctcatttgtttcaggacgtaacagatgatagcaagattgtctcagcttggccggtttcaaagcctcactcatccaaattgaacaatgatcatgtgctcgaccaagttgacaaggagagcaaagttgagactgctacaagttatcggttgtttggaattgaccttattgatccttctaggaactctccttctgtagagaaggcatctgcacaagcagtaaatgtacccaaagttactactgaaggctgtaccagcaccttgtcccgaaccgatgctggccataagtcagatgtatcaatggcttcttccatggagaggaaacaagaacagctgcaagtatcaccaaaggatactcagagcaagcaaatttgtagaagtcgaaccaaggttcaaatgcagggagttgcagtgggtcgtgctgtggatttgaccatgttggatgggtacggtcaacttataaatgaattggaggatatgtttaacatcaagggacagcttcaacacaggaataagtgggaaattgtcttcactgatgatgaaggtgacatgatgcttgtgggagatgatccatggcccgaattctgtaatatggtgagaagaatcttcatttgttccagccaggatgtgaagaagatgagttgtggaagcaaactgccaatctcctcagtggaagacgggaccgtaataagctcagacacgaccgaaacctgaaactttgacatctttcttgtggttttgcgtttgtttgtcagcatccaaatgctgatccttcttcttgttgcttcaaattgtttgtgggaaggaagttggtctatttgggctgggtaagtttcatgttattaaatgtgaaacgcactagctaattgtaaacttaatttgtagagacaccaccaggcattaattgtgctagaaaaaaaagagaccaaaacagatttctttaataaattagtagtgggagatggcaaatttaggcttagtatatgtgaatattcatgttaagttggaagaagaatgttgggggttgatgttttgaaaagacttgccttttctagtcaagggggcttattcattggagctttgtatgcgtataatgtgcactttgttgttatcctctaaaatttctaatctgggtgagtcaatgtctgttgctgtcatcagtgaatgtaaattatggcattaaattgcttcaattgtagtgttcagaaatacagtggtcccctgtgccagtc

SEQ ID NO: 7581 - DNA, 994 bp, Glycine max
  Clone ID: 700673793_FLI
aattccttcacttgcagaacttagttctctgttgcatcatcatcatcttcattagtgttagccctaaacttcaccttcaaccatgaccacagtgccaccacacagtgtccaagtgcacacaacaacacaccgctacgaagccggcgtcgtcccgccggctcgttttgaggcgccgcgttacgaagccggcatcaaggcgccctcttccatttaccattccgagagaggtccgacgacctctcaggttctcgcagttgtcgccggccttccggtcggcggcatcctcctgctcctggcaggactgaccctggctggaactctcaccgggctggtggtggcaacaccgctcttcatcatcttcagcccggtgctgattccggccacggtcgcaattggcctggccgtggccgggttcctgacgtcgggagtctttgggctcacggcgctgtcgtccttctcctggatcctgaactacatccgggagacccagccggcgtcggagaatctggccgctgcggcgaagcaccatctggcggaggcggcggagtacgtggggcagaagaccaaagaagtagggcagaaaaccaaggaagttgggcaggatattcagagcaaggcacaagatacaagggaagcagctgcaagagatgcaagagatgcaagggaagcagctgcaagagatgcaagggatgcaaaggtggaggcgagagatgtaaagagaacaacagtgacagcaacaaccgcaaccgcatgaacgtgatgactattaatgtgttgttatgaacttatgatgttggtttatgtggggaaataaatgatgtatgtacctcttcttgcctatgtagtaggtttgggtgttttgttgtctagctttgcttatttagtaattagtagaagggacgttcgttcgtgtctcataaaaaggggtactaccactctggcaatgtgatttgtatttgatgaattcaatgtgaaatgtgttttgcgttggtgt

SEQ ID NO: 7582 - DNA, 1623 bp, Glycine max
  Clone ID: 700673810_FLI
caacttttcacacatgaccatgctacctcattcattaactatgattgcaacactaataatcatttttcttgcacaaacacttgtgggggtgagttcacttcctgaagctgataaaataaccaatttgccggggcagccacgggtcgaatttcagcaatattctggttatgtcaccgtggatgatcaaaatcaaagagctttgttttactactttgttgaggctgaagaaaacccttcttccaagccattagtcctatggttgaatggagggcccggttgttcatcgattggagttggagcttttgctgagcatggtcctttcagaccaagtgacaacaatgttcttgagataaatgataaaagttggaacaaagtggcaaatgtgctatacttggaatcaccagctggtgttggattctcttactctagcaatgaatctttttatgccttagtgacagatgaaatcacagctagggataatcttgttttcctacagcgttggttcactaaattccctgagtactcaaataacgacttcttcatttcaggggagagctatggaggtcactatgttccacaacttgcacaacttattgttcaaaccaagaccaacttcaatctcaagggaatagcaatagggaatcctcttcttgagtttaatactgatttcaactcaagatctgagtacctttggtcccacggactgatatcagattcaacatacgaagtcttaactagagtctgcaacttttcctcaattaggagacaaatgcaaaatgggaatcttagaggggtttgtggaaaagcaaataagctattggatagtgagattagcaactatgtagatgaatatgatgtcactcttgatgtttgtttgtcatcagtaaatcaacaggcttatgtgctgaatcaactgcaagagacacagaagatagatgtttgtatcggtgataaaacaactacatacttgaacactaaagaagtccaagaagctctgcatgctaatcttgttggagtcgccaaatggtcaacttgcagctcagttctgcattatgattatcagaatctagaaataccaacaattcctattctagggtcacttgttaactctggcatcagggtcctagtgtacagtggagatcaagattcagtgcttccattattaggttcgcgatctctagttaacggattagccaaggaaattggacttgatacaaccgtggcctatagagcctggtttgagggaaaacaggtggcaggatggacacaagtatatgggaacatcttatcatatgccaccataagaggagcatctcatgaagctcccttttctcaaccacagagatcactcgggctacttaaagcctttttggaaggaaagccactacctggtgttaaataaaatacgaatagatttaattaacgctaggcgttcttatttgctgcaataaatagaaatgcttccaaaatccacacagaagcttattattgctataggattacgattatcttatgattgttatgttcgtgctctacatttctatgctttgctttctttccgaacaatgtgctaaaggtgcacaggatgaagggaagtacaaggattaaaaattacaatcagcc

SEQ ID NO: 7583 - DNA, 1697 bp, Glycine max
  Clone ID: 700673875_FLI
attctctccatttgtccttgaatataatactcagcatggctaagcttgttctttccctttgttttctgcttttcagtggctgctgcttcgctttcagtttcagagagcagccacagcaaaacgagtgccagatccaacgcctcaatgccctcaaaccggataaccgtatagagtcagaaggtggcttcattgagacatggaaccctaacaacaagccattccagtgtgccggtgttgccctctctcgctgcaccctcaaccgcaacgcccttcgcagaccttcctacaccaacgctccccaggagatctacatccaacaaggtagtggtatttttggcatgatattcccgggttgtcctagcacatttgaagagcctcaacaaaaaggacaaagcagcaggccccaagaccgtcaccagaagatctatcacttcagagagggtgatttgattgcagtgccaaccggttttgcatactggatgtacaacaatgaagacactcctgttgttgccgtttctcttattgacaccaacagcttccagaaccagctcgaccagatgcctaggagattctatcttgctgggaaccaagagcaagagtttctacagtatcagccacagaagcagcaaggaggtactcaaagccagaaaggaaagcgtcagcaagaagaagaaaacgaaggaggcagcatattgagtggcttcgccccggaattcttggaacatgcgttcgtcgtggacaggcagatagtgagaaagctacaaggtgagaacgaagaggaagagaagggtgccattgtgacagtgaaaggaggtctcagcgtgataagcccacccacggaagagcagcaacaaagacccgaggaagaggagaagccagattgtgacgagaaagacaaacattgccaaagccaaagcagaaatggcattgacgagaccatttgcacaatgagacttcgccacaacattggccagacttcatcacctgacatcttcaaccctcaagctggtagcatcacaaccgctaccagcctcgacttcccagccctctcgtggctcaaactcagtgcccagtttggatcactccgcaagaatgctatgttcgtgccacactacaacctgaacgcaaacagcataatatacgcattgaatggacgggcattggtacaagtggtgaattgcaatggtgagagagtgtttgatggagagctgcaagagggacaggtgttaattgtgccacaaaactttgcggtggctgcaagatcacagagcgacaacttcgagtatgtttcattcaagaccaatgatagaccctcgatcggcaaccttgcaggtgcaaactcattgttgaacgcattgccggaggaagtgattcagcaaacttttaacctaaggaggcagcaggccaggcaggtcaagaacaacaaccctttcagcttcctggttccacctaaggagtctcagaggagagttgtggcttagagccctttttgcatgtgctaccacactttcgtccttttgggcactagttagtgtgcgtagcaataaataagaacgaataaaacaacaaaggctttgctgccctttgttaagtataaaataacgggtaatgtaattgtacccttgtgtaatgagtcactcaagtacctatgcgggaaaatcataaattaaaagagaaattccaatgaattttctgtc

SEQ ID NO: 7584 - DNA, 821 bp, Glycine max
  Clone ID: 700673883_FLI
atccttggtagtcaaaggatattgataatcaaggatattgataatcaacttcagctggttgagacactctgaaccagctgaagttgattatcaatatccttggtagtcaaagggaggaggatattgaattcattgataacccaaaggcaaagaagtatatcaaatcacttccttattctcctggaacccccctttcgcaactttatcctaatgcgcatccattggcaattgatcttctggcaaagatgcttgttttcgatccaacaaagaggatcagtgtcactcaagcacttcaacacccttacatggcccctctgtatgatcctaactgtgaccctccagccgtcattccaattgatcttgacattgatgaggatctaggggaagagatgataagggacatgatgtggaaagaaatgcttcattaccatcctgaatctgctatggagagtgcagggttgtgctaatgatatttacttcctttcatagttatgttcccttttgttggtgccaggatagttctaatatcataacttgcttcaaataattaggagggctttgtcatcagtgagctccttatatgttctgttttctatttattgaaagcagagagaaacagcaaaaagatgaccatcttaaaaaaaaatgtgttattgctgatgatgcattgtagtctttaaacgccatgttgagagattgattttgtactgaactttgtattgtagttgccttgttttgttgtacataattatgtttctgtgtctttcataaaccattttgtaaattaagtctaatgtttatcaataatgtgttattgtttg

SEQ ID NO: 7585 - DNA, 1379 bp, Glycine max
  Clone ID: 700673904_FLI
tgcagaccgagctagctagctagcaagcaagcacagagatggaggcaaagcgaggccatgccctcatgtgcttggcacgtgtttcactcttcctctgcgctctaaccctatccgctgctcacggaagcaccacggttcaagacatcgcgagaaagttgaaactcggggacaacgagcttctgcgcacggagaagaagttcaaggttttcatggagaattacgggaggagctactccacagaggaggagtatttgcgccgtttggggattttcgcccagaacatggtcagagcggcggagcatcaggcgctggaccccaccgccgtccacggcgtcacgcagttctccgatctcaccgaggacgagtttgagaagctctacactggcgtcaatggcggcttcccgtcatcgaataatgccgccggcggtattgcgccgccgttggaggtggacgggctgccggagaattttgattggagagagaaaggagctgtcaccgaagttaagttacagggtagatgtggatcatgctgggctttcagcaccacaggatctatagaaggagccaattttcttgccaccggaaagctcgtcagtcttagtgaacaacagctccttgactgtgacaacaagtgtgacataacagaaaagacttcatgtgacaatgggtgtaatggaggtcttatgacaaatgcctacaattatttgctcgagtctggtgggttggaggaggagtcttcatatccctacactggggagagaggtgaatgcaagtttgatccagagaaaatagcagttaagatcacaaatttcaccaatatccctgctgatgagaaccaaattgccgcatatttagtaaaaaatggtccacttgctatgggcgtgaatgcaattttcatgcaaacatacattggtggtgtctcatgccctctcatatgtagcaagaaaaggctgaaccatggtgtgttacttgtgggatatggtgcaaaaggcttctcaattcttaggcttggcaacaaaccatactggatcatcaagaattcgtggggggagaaatggggagaagatggctattacaagctctgcagagggcatggcatgtgtggaataaacactatggtttctgctgcaatggtgcctcaaccacaaacaacacctacaaagaattatgcttcttattagctatgcacttaaggaaatctaaataaatatttttcattctaggtgatgtatcatgtatgtaccaaaatattttggtacgtaagtcttttaaaaagtttgcatctcctctttggttttccttagttctgaaagttatctcctaagaagacaatcatatgtactgtacgtagtgtgaagatatagtattgtatgctgcag

SEQ ID NO: 7586 - DNA, 754 bp, Glycine max
  Clone ID: 700674030_FLI
aagaaatgaagagtactatcttctttgctctctttctagtttgtgccttcaccatctcatacctgccttcagccaccgctcagttcgtgctcgacactgatgatgatcctcttcaaaacggtggcacatactatatgttgccagttatgagaggaaagggcggtggaatagaagtagattcaactggaaaagaaatatgccctctcactgttgtgcaatcacccaatgagctcgataaggggattggactagtctttacatctccattacatgccctttttatcgccgaaggctatcctttgagcattaagtttggttcatttgcagttataacgctgtgtgccggcatgcctactgagtgggctattgtggagagagagggtctacaagctgttaaacttgctgcacgcgatacagtagatggttggtttaatattgagagagtttcccgtgaatacaatgactataagcttgtgttctgtccacagcaagctgaagataacaaatgcgaggatattgggattcagatcgacgatgatggaatcaggcgtttagtgctgtctaagaacaaaccattagtggttcagtttcagaaatttagatcatcaactgcatgaagcgtgaaaaatcacgtgctttcttgttaagagagacaagtgtacgtaagactaaataaatgctttggctaataataaattggttacagactaaataaaataatcaaagcttatgccttcccccaaaggctgaatgc

SEQ ID NO: 7587 - DNA, 903 bp, Glycine max
  Clone ID: 700674206_FLI
caaccttgtcatcacatataacatgcacagatgttgctggaacctttggttacttggctcctgaatacttcatgtacggcaaagtaaatgataagattgatgtctatgcattcggtgtcgtgctccttgagcttctttcagggagaaagcccataagccgtgattatccaaaaggccaagagagtcttgttatgtgggcaagtccgattctaaatagtggaaaggtgttgcaattgttagatcctagtttaggtgataattatgatcatgaggagatggaaaagatcgtattggcagccactctctgtataaaacgtgctccaagggctaggcctcaaatgaaccttatctcaaagctccttcaaggtgacgccgaggcaatcaagtgggcaaggttacaagttaatgctttggacccaccagaaatgcttgacgatgaagcgtgtccacctagtaatctacagtcacatataaatcttgcactgcttgatgtggaggatgacttgctctccatgtgcagtgttgagcagggtctcactttggaggactacttgagaggccggtggagccgtgcatcaagctttgactgagcaaactgctagcaaatcgctagaagaagctcaaccctttgaccttaatctcttttgtagatacagttttcttgtgcctcttccattaacaatggcatcttctatgggtttaaaatggatttagggtgacaggatgtttgtgtgtgccctcctcctttccttaataatgaggaaactaggccttataagttgttaggctagttaccccttttcattctatacttgaaatggtttctatttttgtccatgatctcaattcgatcgagttttgtaatttgtattgataaaaagatgaagaagttgtatttagagc

SEQ ID NO: 7588 - DNA, 738 bp, Glycine max
  Clone ID: 700674289_FLI
tgatgatattaggaaaaagcactatagaggagttaggcagagaccatggggcaaatgggcagcagaaataagagaccctaagaaagcagctagagtgtggcttggcacctttgacacggcagaggctgcagctatggcttatgatgctgctgcattgaggttcaaaggaaacaaagccaaactcaattttcctgaacgtgttgttatgccaatacaaccacaaacaaataacaataattccacttcttcatcagctcctactacacaatcatcttcttctcttccaccaccacaatctctacataataatagttctctttcagcagaagggtttccaaatcttgaggagtatgcaaggttgctgagttgtagcgatgatgatgattttcaacgtgttgcattggggctctaccagcatcacaataatgaggattttatttgtggttcatcacaaccaccaccagtgccgttttttgtgtcctcttcttcttcttcttctgcaatgacatcgtcatattctgattttttgggccaaggagggagtactggttttgatgaagggaacaagagggggtcgtagttttatgtctctgaattttgagcactgcatgcaggttgcttccacaacaattaaggaagttcaaatctctcatctcttatatgttcttttgtttttattattccaattacaaaataacacctgaggtataaaatctataatactcatctttcgtcttt

SEQ ID NO: 7589 - DNA, 905 bp, Glycine max
  Clone ID: 700674328_FLI
ggctgggaaacctgctgtgcttacacgtgttgtggatagcatgactgacaacttgagaccaactcgtgctgaagccacagatgttgccaatgctgttttagatggaagtgatgccatacttctgggtgctgagactttacgtgggttgtaccctattgagactatttctactgttggcagaatttgttctgaggctgagaaagttttcaatcaagacctttattttaagaggacagtcaagtatgttggagaacccatgacccacttggaatctattgcatcctctgcggtacgggctgcaattaaggtgaaagcatctattataatttgtttcacttcatcaggaagggctgcaagattgatcgcaaagtataggccaacaatgccagtactatctgttgtgatcccccgactcaagacaaatcagctaaagtggagctttagtggagcttttgaggcaagacaatcacttatcgtgagaggtctctttcctatgcttgcagatccacgacatcctgctgagtcaacaagtgcaacaaatgagtctattcttaaggttgcccttgatcatggaaaatcattgggagttattaagtcacatgaccgggtagttgtttgccagaaacttggtgatgcatctgtggttaagattattgagcttgaagattaaactattaaagagcactcaaccaactacagttttagtgttatttatttatttttacaactttggttatttttcttgaagatgcgggtcattctgccacaagtagaagttatctctacttggttttgatgaaacaaattttgatgcaaattattactggctgtcaaacataaaatcaaggcaatgtgcccttgatgccaatttttttagtttaagattcatactagaacacagttcg

SEQ ID NO: 7590 - DNA, 863 bp, Glycine max
  Clone ID: 700674336_FLI
gaggaagggcagcagcaaggggagcagaggctgcaagagagcgtgattgtggaaatctcgaaggaacagattcgggcactgagcaaacgtgccaaatctagttcaaggaaaaccatttcttctgaagataaaccttttaacttgagaagccgcgaccccatctactccaacaagcttggcaagttctttgagatcaccccagagaaaaacccccagcttcgggacttggatatcttcctcagtattgtggatatgaacgagggagctcttcttctaccacacttcaattcaaaggcgatagtgatactggtaattaatgaaggagatgcaaacattgaacttgttggcctaaaagaacaacaacaggagcagcaacaggaagagcaacctttggaagtgcggaaatatagagccgaattgtctgaacaagatatatttgtaatcccagcaggttatccagttgtggtcaacgctacctcaaatctgaatttctttgctattggtattaatgccgagaacaaccagaggaacttcctcgcaggttcgcaagacaatgtgataagccagatacctagtcaagtgcaggagcttgcattccctgggtctgcacaagctgttgagaagctattaaagaaccaaagagaatcctactttgtggatgctcagcctaagaagaaagaggaggggaataagggaagaaagggtcctttgtcttcaattttgagggctttttactgaataagtatgtactaaaatgtatgctgtaatagctcatagtgagcgaggaaagtatcgggctatgtaactatgactagagcttcaactatgaataaataaatcgacagcatatgatgcttttgttt

SEQ ID NO: 7591 - DNA, 536 bp, Glycine max
  Clone ID: 700674385_FLI
gcaaacattgaacttgttggcctaaaagaacaacaacaggagcagcaacaggaagagcaacctttggaagtgcggaaatatagagccgaattgtctgaacaagatatatttgtaatcccagcaggttatccagttgtggtcaacgctacctcaaatctgaatttctttgctattggtattaatgccgagaacaaccagaggaacttcctcgcaggttcgcaagacaatgtgataagccagatacctagtcaagtgcaggagcttgcattccctgggtctgcacaagctgttgagaagctattaaagaaccaaagagaatcctactttgtggatgctcagcctaagaagaaagaggaggggaataagggaagaaagggtcctttgtcttcaattttgagggctttttactgaataagtatgtactaaaatgtatgctgtaatagctcatagtgagcgaggaaagtatcgggctatgtaactatgactagagcttcaactatgaataaataaatcgacagcatatgatgcttttgttt

SEQ ID NO: 7592 - DNA, 648 bp, Glycine max
  Clone ID: 700674436_FLI
ctctctttgatacccttttgttctttttggtgctttaatttgcactagcaagggggttggttttatttctgtttgcttgcaacaatggctgtggctaataagttactttctgttttgatcattgccctcattgccatttccatgcttcaaacagtggttatggcatctcatggacatggaggccaccactacaatgacaagaaaaaatatggacctggcagtctcaaaagcttccaatgcccatcacaatgctcaaggaggtgtggcaagacccagtaccacaagccctgcatgtttttctgtcagaagtgttgtaggaagtgcctatgtgtgccaccggggtattatgggaacaaagcagtgtgcccttgctacaacaactggaagaccaaggaaggaggacccaaatgcccttaataaccttatgctatgttcttcatcaaattaacaaagatataatatagctttaatttattatatccatatcatataattttcttggtcctttctatgtcttaattaaccaaaaaatgtatgtccattttggtcttagtaatactttgttgtattgaagatgccttttggagatagtgtgtgtgtgggctcctctgcatcataccactccttattatggcattgttggctttt

SEQ ID NO: 7593 - DNA, 749 bp, Glycine max
  Clone ID: 700674452_FLI
gcaagagaaaaaataccaaccatggcaaccatttctactgatcaaccaagaggatcctactcctatggaacctcctatggagcaccctatggaaccacctatgagaccaacagcagcattaacaaccctccttcacgccaaaccgtgaagttcataactgctgcaactattggcatcacactcttactcctgtctgggttgaccctcacaggcactgtcataggtttgatcattgcaacccctcttcttgttatcttcagccccatccttgtccctgctgcgtttgtgctgttcctggttgcttctggctttttgttctctgggggctgtggtgtggctgccattgctgctttatcttggatttacaactacgtttctgggaaccagcctgcgggttctgacacccttgactatgcaaaagggtaccttactgataaggcaagggatgtgaaggagagggcaaaggattatggaagttatgctcagggtagaattaatgaggccacacaaggaacttattagtcatgcatgcatgaatatatgcatgtgtgtatgaggttgaattgaaggtggtgatggtggtggtacccttgtggatttgcatgttcaagttctgctgtttattttgaatcttgtttgcattgtgctgtgttgttctggtttttgtaatctctcgttcgtttttttaagctaaatctttcgccttatttgtgtaacaaccatcatgttaataaatctcttttgtagct

SEQ ID NO: 7594 - DNA, 1671 bp, Glycine max
  Clone ID: 700674461_FLI
ttgtccttgaatataatactcagcatggctaagcttgttctttccctttgttttctgcttttcagtggctgctgcttcgctttcagtttcagagagcagccacagcaaaacgagtgccagatccaacgcctcaatgccctcaaaccggataaccgtatagagtcagaaggtggcttcattgagacatggaaccctaacaacaagccattccagtgtgccggtgttgccctctctcgctgcaccctcaaccgcaacgcccttcgcagaccttcctacaccaacgctccccaggagatctacatccaacaaggtagtggtatttttggcatgatattcccgggttgtcctagcacatttgaagagcctcaacaaaaaggacaaagcagcaggccccaagaccgtcaccagaagatctatcacttcagagagggtgatttgattgcagtgccaaccggttttgcatactggatgtacaacaatgaagacactcctgttgttgccgtttctcttattgacaccaacagcttccagaaccagctcgaccagatgcctaggagattctatcttgctgggaaccaagagcaagagtttctacagtatcagccacagaagcagcaaggaggtactcaaagccagaaaggaaagcgtcagcaagaagaagaaaacgaaggaggcagcatattgagtggcttcgccccggaattcttggaacatgcgttcgtcgtggacaggcagatagtgagaaagctacaaggtgagaacgaagaggaagagaagggtgccattgtgacagtgaaaggaggtctcagcgtgataagcccacccacggaagagcagcaacaaagacccgaggaagaggagaagccagattgtgacgagaaagacaaacattgccaaagccaaagcagaaatggcattgacgagaccatttgcacaatgagacttcgccacaacattggccagacttcatcacctgacatcttcaaccctcaagctggtagcatcacaaccgctaccagcctcgacttcccagccctctcgtggctcaaactcagtgcccagtttggatcactccgcaagaatgctatgttcgtgccacactacaacctgaacgcaaacagcataatatacgcattgaatggacgggcattggtacaagtggtgaattgcaatggtgagagagtgtttgatggagagctgcaagagggacaggtgttaattgtgccacaaaactttgcggtggctgcaagatcacagagcgacaacttcgagtatgtttcattcaagaccaatgatagaccctcgatcggcaaccttgcaggtgcaaactcattgttgaacgcattgccggaggaagtgattcagcaaacttttaacctaaggaggcagcaggccaggcaggtcaagaacaacaaccctttcagcttcctggttccacctaaggggtctcagaggagagttgtggcttagagccctttttgcatgtgctaccacactttcgtccttttgggcactagttagtgtgcgtagcaataaataagaacgaataaaacaacaaaggctttgctgccctttgttaagtataaaataacgggtaatgtaattgtacccttgtgtaatgagtcactcaagtacctatgcgggaaaatcataaattaaaagagaaattcc

SEQ ID NO: 7595 - DNA, 1088 bp, Glycine max
  Clone ID: 700674464_FLI
ctcttcccgcaggagcagttttctcaacactatttttctgtttgtgggaatggggttgacaacactgttttgcaagatgtgacagatacaggtggtgacttccctcttgatgaatcatatggacaagatcctgataatgatattggaggatatccaaacaccagtgaaagccatctgccttgtacttcaacagaagatactaaatttgtcaatggattgaattctttagacacaccatgttcagacatcaatgttgaaaaaatagagtctgttaaaaatgacacatcaagcaacaatttctgtcaaaatgatgatcatttggagactcaatatgggagtgctgtgtgggacatattccggaggcaggatgtacccaagctaacagagtacctaaagaaacaccacagagagtttcgccacataaataatcttccagtaaactctgtgattcatcccattcatgatcagatcctttatttaaatgagaagcataaaaagcaattaaagcaggagtttggtgttgaaccttggacatttgagcaacaccttggggatgctgttttcgtacctgctggatgcccacatcaagtgagaaatagaaagtcttgcatcaaagtggctctggacttcgtttcacctgagaatgttcaagaatgcattcgattgacagaagaatttcggttacttcccaaaggccatagatccaaggaagataaattggagataaagaagatggcactatatgctgcggatgttgcaataaccgaagccactaaactgatgagaggaaatgatatgtcagatgaagccaaggaagtcccccagcaacacatttttactaaatgactctcaacgaaaggcttctagtttatttactcttgatttacaaagagcatagcttgtattctgttctgttttgcactgtatccttggcaactccatggaagtttgaaatgaatgttggttgttgcactagcactacacaccagcgagatatagattaatgctaagtacttgtaacaacaatggaaaatactaggtagtcgctataatattggcataataaattgacatgcattttgactttc

SEQ ID NO: 7596 - DNA, 1718 bp, Glycine max
  Clone ID: 700674467_FLI
aaataggaaaaaatgaaggagtatatggttgtgcttcggcgtcgtcactacatttctaattcataataaacggtggttggagtttgtttaattgtttctccctctttctttctcttttgacggctcctactaatcccacttctccatcgccgcctcagagtctttcgtcgaatacgatgctgttttctcggatatcgagaaacctcagaggcagcttcaactcatgtcggtggtttctgtccatcggagaccacaaccaccgcttcctttcgctgcacaattttcattcacgtggtggagactctactcaacaggttatgagaagtttaattatttcaaagggcctgccagcattgcatagtagtagatatctgatccatcatcaaagcagctccatagttgaggatgaacatgatccattttcactggttgcagatgaactgtcacttcttggtaacaagttgcgagcaatggtagttgctgaggttcctaagcttgcctcagctgccgaatacttcttcaaaattggagtggaaggaaaaagatttcgccctacagttttattgttaatgtcaactgcattaaatctatcaatacacgaagcacctcctcctgttgaggtaggaggtactttgacaactgatgtacgttcaagacaacaacgcatagctgaaataacagagatgattcatgtggcaagccttcttcacgatgatgtactggatgatgcagattctagacgtggtattggttcattgaattttgtaatgggcaataagttggcagtgttggctggagattttttgctttctcgggcttgtgttgctcttgcctctttgaaaaacacagaggttgtatctttattggcaaaagttgtagagcatcttgtaactggggagaccatgcaaatgactacaacatctgatcaacggtgtagcatggaatattatatgcaaaagacctactacaagactgcatctttaatatcaaatagttgcaaggcaatagccatccttgcagggcaaacagcagaagttgcaatgcttgcttttgagtatggaaaaaatctgggtttggcatttcaattgatagatgatgtgcttgatttcacaggcacatcagcttcccttggaaagggttctttatcagacattcgtcatggaattgttacagctccaatattgtttgccatggaggagttccctcagttgcgtacaattgttgatgagggcttcgaaaaccctgcaaatgttgatcttgctctggagtatctaggaaaaagccgaggtatacagaggacacgggagctagccgtggagcatgctaaccttgcagcagcagcaattgattccttaccggagagtgacgacgaggatgtaagaaaatcaaggaaagccctgatagatctaactcacagagtcattacacgaacaaagtgaaaggaagactctcccctccctttttttgtttttgtgggtagctaaaggataaaagatcttagtaaaatcaagactaaaaattgttttgttaccatcaatttttctataatggtccccccaagcccgaatgtgtgggggaaaataagctgtttctaggattaatgtcgtcattcgcttttcttatttatttagattaaatctccttccctctgtttgttctccattgttgtaataatgactttgggctagttttgcctcccttgattttcttactagttt

SEQ ID NO: 7597 - DNA, 1588 bp, Glycine max
  Clone ID: 700674780_FLI
actcaatgccctcaaaccggataaccgtatagagtcagaaggagggctcattgagacatggaaccctaacaacaagccattccagtgtgccggtgttgccctctctcgctgcaccctcaaccgcaacgcccttcgtagaccttcctacaccaacggtccccaggaaatctacatccaacaaggtaagggtatttttggcatgatatacccgggttgtcctagcacatttgaagagcctcaacaacctcaacaaagaggacaaagcagcagaccacaagaccgtcaccagaagatctataacttcagagagggtgatttgatcgcagtgcctactggtgttgcatggtggatgtacaacaatgaagacactcctgttgttgccgtttctattattgacaccaacagcttggagaaccagctcgaccagatgcctaggagattctatcttgctgggaaccaagagcaagagtttctaaaatatcagcaagagcaaggaggtcatcaaagccagaaaggaaagcatcagcaagaagaagaaaacgaaggaggcagcatattgagtggcttcaccctggaattcttggaacatgcattcagcgtggacaagcagatagcgaaaaacctacaaggagagaacgaaggggaagacaagggagccattgtgacagtgaaaggaggtctgagcgtgataaaaccacccacggacgagcagcaacaaagaccccaggaagaggaagaagaagaagaggatgagaagccacagtgcaagggtaaagacaaacactgccaacgcccccgaggaagccaaagcaaaagcagaagaaatggcattgacgagaccatatgcaccatgagacttcgccacaacattggccagacttcatcacctgacatctacaaccctcaagccggtagcgtcacaaccgccaccagccttgacttcccagccctctcgtggctcagactcagtgctgagtttggatctctccgcaagaatgcaatgttcgtgccacactacaacctgaacgcgaacagcataatatacgcattgaatggacgggcattgatacaagtggtgaattgcaacggtgagagagtgtttgatggagagctgcaagagggacgggtgctgatcgtgccacaaaactttgtggtggctgcaagatcacagagtgacaacttcgagtatgtgtcattcaagaccaatgatacacccatgatcggcactcttgcaggggcaaactcattgttgaacgcattaccagaggaagtgattcagcacactttcaacctaaaaagccagcaggccaggcagataaagaacaacaaccctttcaagttcctggttccacctcaggagtctcagaagagagctgtggcttagagccctttttgtatgtgctaccccacttttgtctttttggcaatagtgctagcaaccaataaataataataataataatgaataagaaaacaaaggctttagcttgccttttgttcactgtaaaataataatgtaagtactctctataatgagtcacgaaacttttgcgggaataaaaggagaaattccaatgagttttctgtc

SEQ ID NO: 7598 - DNA, 1303 bp, Glycine max
  Clone ID: 700674863_FLI
ataaaattcttccaccaagttatgggtttccttgtgttgcttcttttctccctcttaggtctctcttctagttccagcatatcaactcatcgttccatattggaccttgacctaaccaagtttaccacacagaaacaggtgtcttcactgttccaactatggaagagtgagcatggacgtgtctaccataaccacgaagaagaggcaaagagacttgagattttcaagaataacttgaactatatcagggacatgaatgcaaacagaaaatcaccccattctcatcgtttaggattgaacaagtttgctgacatcactcctcaagagttcagcaaaaagtacttgcaagctcccaaggatgtgtcgcagcaaatcaaaatggccaacaagaaaatgaagaaggaacaatattcttgtgaccatccacctgcatcatgggattggaggaaaaaaggtgtcatcacccaagtaaagtaccaagggggctgtggaagcggttgggcgttttctgccacgggagccatagaagcagcacatgcaatagcaacaggagaccttgttagcctttctgaacaagaactcgtagactgtgtggaagaaagcgaaggttgttacaatggatggcactatcaatcgttcgaatgggttttagaacatggtgggattgccactgatgatgattatccttacagagctaaagagggtagatgcaaagccaataagatacaagacaaggttacaattgacggatatgaaactctaataatgtcagatgagagtacagaatcagagacagagcaagcgttcttaagcgccatccttgagcaaccaattagtgtctccattgatgcaaaagattttcatttatacaccgggggaatttatgatggagaaaactgtacaagtccgtatgggattaatcactttgttttacttgtgggttatggttcagcggatggtgtagattactggatagcgaaaaattcatggggagaagattggggagaagatggttacatttggatccaaagaaacacgggtaatttattaggagtgtgtgggatgaattatttcgcttcatacccaaccaaagaggaatcagaaacactggtgtctgctcgcgttaaaggtcatcgaagagttgatcactctcctctttgagccgtaaaggttcaatacaacgagtgcttgttttcttagggacaagcattgtacttatgtatgattctgtgtaaccatgagtcttccacgttgtactaatgtgaagggcaaaaataaaacacagaacaagttcgtttttctc

SEQ ID NO: 7599 - DNA, 1044 bp, Glycine max
  Clone ID: 700674904_FLI
catctttctccgccaccctagtccaagactcgttaagattagccactgatgttatccccaactactccttcggctgcgtcaacgccatcaccggcgcctctgtcccggcccaagggcttttgggcctgggccgtggcccgctgtccttgctctcccaatccgggtcaaattactcgggcatcttctcttactgtctccccagcttcaagtcctactacttctctgggtcgctcaagctcgggcccgtgggccagcccaagagcattcgcaccaccccgcttcttcgcagccctcaccgtccttctctttactacgtgaacttcaccggaatcagcgtgggacgtgtcctggtaccctttcccagcgagtatcttgggtttaacccgaatacaggatccggaaccataattgattcgggcacggttataacccggttcgtggagcccgtttacaacgcggtgagggaggagttcaggaagcaggtgggaggcactacattcacgagcattggagccttcgatacgtgttttgtgaaaacctacgaaactctggcgccgccaattacgctgcacttcgaggggttggacctgaaactgccgttggaaaacagcttgatccacagcagcgcgggttcgctggcgtgtcttgcaatggcggcggcacccgacaatgtgaactcggtgttgaacgtcatcgccaactttcagcaacagaaccttaggattttgtttgataccgtcaataataaggttggcatagcccgtgaggtttgtaactagctggttggctacatttttatttatttatttattaatatgtaccagtggctttcttgattagctaactaggtttggatctttcgttgggttcaaaaacgtgatggtgtgggtgtgtggccacggtgaataagcttgccttgtgtgcctttggaagatatgcaatgtgaaataggacctagctagtactattttatcttagatcgatcgttgtcgatcattgtaatgatgtttgattaaattaataatgtaagatcaattaagtagc

SEQ ID NO: 7600 - DNA, 1240 bp, Glycine max
  Clone ID: 700674932_FLI
ggatccttttccgatgtacggaaccgagaatgaccgagatgattcggaacgaacggcgttcagaagagcagagaagaagtacaagctctactacgacaacaatgcttcttccaagaacaaaaggaaaaagctacctaaacccgtggatttaacggaggtccttgacttcagatctattctagaatgctatctccaaaacgatgtgcttcctccgggtgttatcgttcttcacgacaacttcacttctccagttttttctttgcaaaatcgcccaggcttttattttattcctggggcattaagcatagagagacaatgtagtttgatcagggagagtttgactgattttccgcagccaccgaacagaacaaatcacaatgccatgtatggtcctattcaggatgtgtttgttgcggctaaagaagggaaagttttggttgaagacaactctccaattacttcatctgaaactgatactgatatagatcataaagatggtaaggaatggaagtttactactgaaaaggacgcgctgtcaagaaagtgcagatcagcttctgcttctgtgttacttcgaaagttgcgatggagcacccttggcctacaatttgattggtccaagcggaattatgatgtgtctctcccacataacaaaatccctgaagcattgtgcgagcttgccaaacaattggcaaaacctgctttgcctactggtgttgaattcagacctgaagctgcaatagtgaattacttcggcttaggggacacattgggtggccaccttgatgacatggaagcagattggagcaagcctatagttagtctaagtctgggctgcaaagctatatttcttttaggaggaaaatccagagaggatactcccctggcaatgttccttcaaagtggcgatgttgtacttatggctggagatgcaagggaatgctttcatggggtccctcggatcttcacagataaagaaaatgctgaaataggccatcttgagacacagctgacgcgtgaagatgatctttgtttcttacaatacattcaaacttctagaatcaacatcaatatcagacaagttttttgagttgtatattttattttctttcaaagtgaaattttgttttattagcacaagaaacaaaaaatgacgtatcgtttgcatttaacgtgattattgcttcattattgttttatatgacaagtgagtcccaacaaacctcaggctcacattcct

SEQ ID NO: 7601 - DNA, 756 bp, Glycine max
  Clone ID: 700675070_FLI
catatctcttggagcatttgcttgctatttatgctgccatgatcatgggtgtgcgtgtacttggttacctgttctggactatttctgataactgggagtgggctgatggatatggtcccaagtttggacttgttgcggttgaccgggcaaataatcttgcacggacccctcgcccctcttaccatctattttctaagattgtgaatacaggcaaagttacacatgaagatcgtgaaagagcatgggatgaacttcaaagagttgcaaaagagaagaaaacaagaccattttatcgggctgtggataaacaccgtttaatgtatgcaggtggacttgacaaacctgaacagcgaccttatatagaacgagattggcggtttggtcattatcagatggatggactccaggatcccttgagccgcttctcaagatccatttttcgaccattctccctcttctcccttaaaaggaaaccaaaatctcaaaagaagaatgccaaattgattctccagcctcttgaaacttagcaattgatttgtcttgtcccagattctatatttttgagtgatgagcactttccatttcaatattcaaccccagacacatctgtctaactttcattatatgtgtaatattgtactgggtgtattatggtgcattcttgttgtaaagcttatttgtctcatttttaccaagaagtcaacgtattaatataatcactggacggtaatatgtgatgcctgtccctgttagcgg

SEQ ID NO: 7602 - DNA, 1740 bp, Glycine max
  Clone ID: 700675120_FLI
ttattaacactttccttagttcaatatggggaagcccttcttcactctctctctttcttccctttgcttgctactcttgtcgagtgcatgctttgctattacctccagcaagttcaacgagtgccaactcaacaacctcaacgcgttggaacccgaccaccgcgttgagtccgaaggtggtcttattgaaacatggaactctcaacaccctgagctgcaatgcgccggtgtcactgtttccaaacgcaccctcaaccgcaacggcctccacttgccatcttactcaccttatccccaaatgatcattgtcgttcaagggaagggagcaattggatttgcatttccgggatgtcctgagacgtttgagaagccacaacagcaatcaagcagaagaggctcaaggtcgcagcagcaactacaagacagtcaccagaagattcgtcacttcaatgaaggagacgtactagtgattcctcctggtgttccttactggacctataacactggcgatgaaccagttgttgccatcagtcttcttgacacctccaacttcaacaatcagcttgatcaaaaccccagagtattttaccttgctgggaacccagatatagagcacccagagaccatgcaacaacagcagcagcagaagagtcatggtggacgcaagcaggggcaacaccagcagcaggaggaagaaggtggcagtgtgctcagtggcttcagcaaacatttcttagcacaatccttcaacaccaacgaggacacagctgagaaacttcggtctccagatgacgaaaggaagcagatcgtgacagtggagggaggcctcagcgttatcagccccaagtggcaagaacaagaagacgaagacgaagatgaagacgaagaatatgaacaaactccctcttatcctccacgacgaccaagccatggaaagcatgaagatgacgaggacgaggacgaagaagaagatcaacctcgtcctgatcaccctccacagcgaccaagcaggcccgaacaacaagaaccacgtggaagaggatgtcagactagaaatggggttgaggaaaatatttgcaccatgaagcttcacgagaacattgctcgcccttcacgtgctgacttctacaacccaaaagctggtcgcattagcaccctcaacagtctcaccctcccagccctccgccaattcggactcagtgcccaatatgttgtcctctacaggaatggaatttactctccacattggaacttgaacgcgaacagtgtgatctatgtgactcgagggaaaggaagagttagagtggtgaactgccaagggaatgcagtgttcgacggtgagctaaggaggggacaattgctagtggtgccgcagaactttgtggtggctgagcaagggggagaacaaggattggaatacgtagtgttcaagacacaccacaacgccgtgagcagctacattaaggatgtgtttagggcaatcccttcggaggttctttccaattcttacaaccttggccagagtcaagtgcgtcagctcaagtatcaaggaaactccggccctttggtcaacccataaataacaacaagcatatatgaaggtgtggtgaggccatcttatatgaaataatatcaaaatatattttgtgtaataataaaactatggcctatgtatttaccaccctccgacccagcctatgttaatatctgagtggcgttgtacctttgaatcgccttaat

SEQ ID NO: 7603 - DNA, 1727 bp, Glycine max
  Clone ID: 700675231_FLI
ctccattggtccttaaacactcatcagtcatcaccatggccaagctagttttttccctttgttttctgcttttcagtggctgctgcttcgctttcagttccagagagcagcctcagcaaaacgagtgccagatccaaaaactcaatgccctcaaaccggataaccgtatagagtcagaaggagggctcattgagacatggaaccctaacaacaagccattccagtgtgccggtgttgccctctctcgctgcaccctcaaccgcaacgcccttcgtagaccttcctacaccaacggtccccaggaaatctacatccaacaaggtaagggtatttttggcatgatatacccgggttgtcctagcacatttgaagagcctcaacaacctcaacaaagaggacaaagcagcagaccacaagaccgtcaccagaagatctataacttcagagagggtgatttgatcgcagtgcctactggtgttgcatggtggatgtacaacaatgaagacactcctgttgttgccgtttctattattgacaccaacagcttggagaaccagctcgaccagatgcctaggagattctatcttgctgggaaccaagagcaagagtttctaaaatatcagcaagagcaaggaggtcatcaaagccagaaaggaaagcatcagcaagaagaagaaaacgaaggaggcagcatattgagtggcttcaccctggaattcttggaacatgcattcagcgtggacaagcagatagcgaaaaacctacaaggagagaacgaaggggaagacaagggagccattgtgacagtgaaaggaggtctgagcgtgataaaaccacccacggacgagcagcaacaaagaccccaggaagaggaagaagaagaagaggatgagaagccacagtgcaaggttaaagacaaacactgccaacgcccccgaggaagccaaagcaaaagcagaagaaatggcattgacgagaccatatgcaccatgagacttcgccacaacattggccagacttcatcacctgacatctacaaccctcaagccggtagcgtcacaaccgccaccagccttgacttcccagccctctcgtggctcagactcagtgctgagtttggatctctccgcaagaatgcaatgttcgtgccacactacaacctgaacgcgaacagcataatatacgcattgaatggacgggcattgatacaagtggtgaattgcaacggtgagagagtgtttgatggagagctgcaagagggacgggtgctgatcgtgccacaaaactttgtggtggctgcaagatcacagagtgacaacttcgagtatgtgtcattcaagaccaatgatacacccatgatcggcactcttgcaggggcaaactcattgttgaacgcattaccagaggaagtgattcagcacactttcaacctaaaaagccagcaggccaggcagataaagaacaacaaccctttcaagttcctggttccacctcaggagtctcagaagagagctgtggcttagagccctttttgtatgtgctaccccacttttgtctttttggcaatagtgctagcaaccaataaataataataataataatgaataagaaaacaaaggctttagcttgccttttgttcactgtaaaataataatgtaagtactctctataatgagtcacgaaacttttgcgggaataaaaggagaaattccaatgagttttctgtc

SEQ ID NO: 7604 - DNA, 1754 bp, Glycine max
  Clone ID: 700675281_FLI
cactttccttagttcaatatggggaagcccttcttcactctctctctttcttccctttgcttgctactcttgtcgagtgcatgctttgctattacctccagcaagttcaacgagtgccaactcaacaacctcaacgcgttggaacccgaccaccgcgttgagtccgaaggtggtcttattgaaacatggaactctcaacaccctgagctgcaatgcgccggtgtcactgtttccaaacgcaccctcaaccgcaacggcctccacttgccatcttactcaccttatccccaaatgatcattgtcgttcaagggaagggagcaattggatttgcatttccgggatgtcctgagacgtttgagaagccacaacagcaatcaagcagaagaggctcaaggtcgcagcagcaactacaagacagtcaccagaagattcgtcacttcaatgaaggagacgtactagtgattcctcctggtgttccttactggacctataacactggcgatgaaccagttgttgccatcagtcttcttgacacctccaacttcaacaatcagcttgatcaaaaccccagagtattttaccttgctgggaacccagatatagagcacccagagaccatgcaacaacagcagcagcagaagagtcatggtggacgcaagcaggggcaacaccagcagcaggaggaagaaggtggcagtgtgctcagtggcttcagcaaacatttcttagcacaatccttcaacaccaacgaggacacagctgagaaacttcggtctccagatgacgaaaggaagcagatcgtgacagtggagggaggcctcagcgttatcagccccaagtggcaagaacaagaagacgaagacgaagatgaagacgaagaatatgaacaaactccctcttatcctccacgacgaccaagccatggaaagcatgaagatgacgaggacgaggacgaagaagaagatcaacctcgtcctgatcaccctccacagcgaccaagcaggcccgaacaacaagaaccacgtggaagaggatgtcagactagaaatggggttgaggaaaatatttgcaccatgaagcttcacgagaacattgctcgcccttcacgtgctgacttctacaacccaaaagctggtcgcattagcaccctcaacagtctcaccctcccagccctccgccaattcggactcagtgcccaatatgttgtcctctacaggaatggaatttactctccacattggaacttgaacgcgaacagtgtgatctatgtgactcgagggaaaggaagagttagagtggtgaactgccaagggaatgcagtgttcgacggtgagctaaggaggggacaattgctagtggtgccgcagaactttgtggtggctgagcaagggggagaacaaggattggaatacgtagtgttcaagacacaccacaacgccgtgagcagctacattaaggatgtgtttagggcaatcccttcggaggttctttccaattcttacaaccttggccagagtcaagtgcgtcagctcaagtatcaaggaaactccggccctttggtcaacccataaataacaacaagcatatatgaaggtgtggtgaggccatcttatatgaaataatatcaaaatatattttgtgtaataataaaactatggcctatgtatttaccaccctccgacccagcctatgttaatatctgagtggcgttgtacctttgaatcgccttaataaaatgtcagtcttcaagttt

SEQ ID NO: 7605 - DNA, 1019 bp, Glycine max
  Clone ID: 700675327_FLI
tgaagacgaagatgatgaagatgaacaaattccctctcaccctcctcgccgaccaagccatggaaagcgtgaacaagacgaggacgaggacgaagatgaagataaacctcgtcctagtcgaccaagccaaggaaagcgtgaacaagaccaggaccaggacgaggacgaagatgaagatgaagatcaacctcgcaagagccgcgaatggagatcgaaaaagacacaacccagaagacctagacaagaagaaccacgtgaaagaggatgcgagacaagaaacggggttgaggaaaatatctgcaccttgaagcttcacgagaacattgctcgcccttcacgcgctgacttctacaaccctaaagctggtcgcattagtaccctcaacagcctcaccctcccagccctccgccaattccaactcagtgcccaatatgttgtcctctacaagaatggaatttactctccacattggaatctgaatgcaaacagtgtgatctatgtgactcgaggacaaggaaaggttagagttgtgaactgccaagggaatgcagtgttcgacggtgagcttaggaggggacaattgctggtggtaccacagaacttcgtggtggcggagcaagccggagaacaaggattcgaatacatagtattcaagacacaccacaacgcagtcactagctacttgaaggatgtgtttagggcaattccctcagaggttcttgcccattcttacaaccttcgacagagtcaagtgtctgagcttaagtatgaaggaaattggggtcctttggtcaaccctgagtctcaacaaggctcaccccgtgttaaagtcgcataaatgacaagcatgatggtgtgaggatgaggccatcttatgaaataataacaaataaataaattttgtatgataataaaaagtatggcccatgtaccatcccagcgagcctatgtttatatctgagtggcgttgtacctttcaatcgccttaataaaatgtcagtcttcacgttttgtctttt

SEQ ID NO: 7606 - DNA, 1184 bp, Glycine max
  Clone ID: 700675341_FLI
ttcggagatgcgcacgtggcaggtcacatgactggaccgagtgtccgtacgcccaccccggggagaaggctcgccgccgtgatccccggaagtaccattactccggcacggcgtgccccgatttccgcaaggggagttgcaagaagggtgacgcgtgcgagtacgcgcatggggttttcgagtgctggctccaccccgcacgttaccgtactcagccctgcaaggacggcaccagttgtcgccggcgcgtgtgtttcttcgcgcacacgccggagcaactcagggtgttgccacagcagagtccgcggagtgctgattcatacgacgggtctcctttgaggcatgcaattgagtcttcgtgcgccaagactctggcaccggcaccgtttgtgtcttctcctgggtcggtgtcgccgcctctggagtctccgccgatgtcgccgatgactgtgagtgttaatgagatggtggcgtctttaaggaacttgcaactggggaaggtgaagtctttgccttcttcttggaatgtcatggggccttccgggttcggatctccgagaggacccatgatccgacccggattcttcagccttccgacaaccccgacccaggcaccgactcgcggtggggtcaactactttgacaagtgggatcagagttgcgaggaggagcctgttatggagagggtggagtctggacgaaacataagggcgaggatgtttgcaaaattgagcaaagagaatcatctggacgggtcggattctggatcgggtcaaattggggatccggatgttggatgggtttcggagcttgtcagtcgctgatttcattttgttgcacttctctcggtgtgtatagaatgcgggggagaaaaaaaaaagtaagatttattttggaagaaggatatcatcaacttgtgttttctgtaaatatctcattctcaaggtatggtatgggtgaagaacaagttaattaagtgaaagagtagaatctttttttttggggggattttcttggacgatcaagaagtgatttgcaagaatcaggatcctaagcttttgtataggtagcagcggatgatgaaattatattattcccacgtgttaactactgtgtttattattatcactaatctcatctcattcatgtataaatttgaaatatttctcggatatgttatgaag

SEQ ID NO: 7607 - DNA, 1595 bp, Glycine max
  Clone ID: 700675384_FLI
tttctttctctctcaaatttctttcccttctgttcactcaaaagagcagaaagagacaagatcccggaaaggcgtgccggcgtcagagactcatcagttctcactcgtacggcgttgtgctttgctttctcaccttcttcttcatttctttcatcatcatcatcatcacaatataaagttcgctcctttctcagttttcacccatacccagatgggtaacagcaccatctcggatctgtgtccctcctttaagtgaaaaaggttcaatctttggtctctgaggctgttgggttttcgtcattgaagaagaagaagggtattattatcatgtactcgaggctcatacacccccacgatgggattgtgacgcaggatgacttgcagggtgctgcttccaatctctctcacgctcacaagggagatccttgtctcgttctgacggctgatcccaagcctcgtcttcgttggactcaggacttgcatgaacggttcgttgatgcggtaacgcagcttgggggagcaagtaaagctacaccaaaagcaatcatgcggaccatgaatgtcaagggtttgactctgtttcatttgaagagtcatcttcagaaatacaggcttggtaagcaatctgggaaggatgtgggtgaaggatgcaaagatggttcatatcttttagaaagccctggcgctgataactcatctccaaagttgccaacttcagatacaaatgagtaagaatttgcattaattcataaaaaaatatttttttcttctggctgatgtctcaatggatttgaattaccaaattgagtgagtgattaattttatgcctaggggttatgaaatcaaggaggcattgagagcacagatggaagtgcaaagtaaattacatttgcaagtggaggcagagaagcacttgcagattcgccaggatgcagaaaggagatacatggccatgctcgaaagagcttgcaagatgctggctgatcaatttattggtgccacagtcatagacacagacagccaaaagtttcaaggaattggaagcaaagcacctagaggtaccttggttgatcctcttggtttttactccatgccatccactgaggtggctggagtgaatgtcccagaagaagaaataccgctgagtctcccaccccaaagggctgattgttcaaccgaaagttgtttaacctcacatgagagttctggaggattggctttagaaggatctcctggcgagggaaaaaggaggatgcttggcatggactcgatggcagcacctttgatatggagtgaagctaagatgagaactcaagccatcaatgtagcccaaggtaatcttcctcaaggaataactaggtatggcatgtagggatggaaggtctacttgatggtttatcccggcatgatatataaacctttgggctttcattcattcctttttttataggtacttgaactcttcatgtcttgtaagttagtgagacataggtggaatcaattttacccctttgtaaattcaatctactctgtgactttaaaaattgcaaaaaactagctttgactatacaaaatttgtgtgttttggtgacttc

SEQ ID NO: 7608 - DNA, 2228 bp, Glycine max
  Clone ID: 700675638_FLI
aaaaagataagcaacaatcaaagcgtgtcgaatcgcaaaatatcaaatcacaatcaacagtgactacgtttcgttcctctccttcgtttcgtcttcgatcttcggtttcattctgcgtttgttcacatcatggccaccgcttcagtggcatttaagtccagggaggaccaccgcaagcagattgagttggaggaggcgcgtaaagcagggcttgcgccggctgaactcgatgaagatggaaaggaaatcaatcctcacattccccagtatatgtcttctgcaccttggtatcttaatgctgagagacctagtttgaaacatcaaaggaaatggaaatccgaccccaattacaccaaatcatggtatgatagaggtgctaaaatctttcaggcagacaagtatcggaaaggtgcatgtgagaattgtggagctatgacacatgattctaagtcatgcatggaaagacctcggagagtgggagcaaaatggacaaacaaacacattgctcctgatgaaaagatagaaacttttgagcttgactatgatggaaaacgggacagatggaatggctatgatgcatcaacatatgctcgagtcattgagaggtatgaagctagagatgaagctcgaaagaagtacctgaaagaacagcaactgaagaaattggagaagagcaaccaaaatggtgaggatgctgcaagtgatgaggaggaagaggaagatgaagatgaagatgaagatgatttaagggtagatgaggcaaaggttgatgagagcaaacaaatggactttgcaaaggttgagaagcgtgtgcgtacaacaggtggtgggagtacaggaactgtgaggaatctacgtattcgagaggatactgcaaaatatcttcttaatcttgatgtcaattctgcacactatgatcccaagaccagatccatgcgtgaggatccacttccagatgcagatccgaatgaaaagttttatttgggtgataaccaatatagaaatagtgggcaagctttagaattcaaggaattaaacatccatgcttgggaagcatttgacaagggacaagatgtccacatgcaagcagctccatcccaggctgagttactctataagaatttcaaggtcatgaaggagaagttgaagtatcaaacaaaggaaaccattatcgagaagtatggcaatgcggccgatgaggacaaacttccaagagaacttctgctgggccaaagtgaaaggcaagtcgagtatgaccgtgctggtagaattattaagggccaggaagtagctctccccaggagcaagtatgaagaagatgtttacattaacaaccacacgactgtttggggctcatggtggaaggatcatcaatggggctataaatgctgcaagcagacaatacgcaatagctattgcactggtgctgctggtattgaggcggcagaggctgcaagcgatcttatgaaagcgaatattgctcgtaaggaggctgctacagaggatcctacacctgtggaggagaaaaagcttgctacatggggtactgatgtcccagatgatctagttctagatgaaaaattgcttgctgaagcactcaagaaggaggatcaaagaaagagagaagagaaagatgagaggaaacgcaagtataatgttagatggaacgatgaggttacagcagaggacatggaggcatacaggatgaagaaagtacatcatgatgatccaatgaaggattttctgcattaagcttggaaaggataaaatggcctgcatctctttccttagaattaaagggcaatctttctttgctagtccacgagcctttctgttatgttactgccagcagctggattgggcagaatggattatcagtttggcatccttgatcctttgacctgtagtgagaaggaggaactagggtggaactatcaaaaatgtttgtacagcttttgtgtgcttcatttaatcacttttgacttggttcaacttgaaaatgtttgctttaatagcaagtttacattttctcgacccttaaaagaggttagtttccttttttgaggggtgatgtgtaaaagaaacagcaactttaaggggttagattgaaaaatgttaactcgctgtggatgatgttagaataaatagtattagattattgtaatagagttgcaattattcaagtgcactcttggggagttcaatctagttgatattagtattatgtt

SEQ ID NO: 7609 - DNA, 1388 bp, Glycine max
  Clone ID: 700675662_FLI
caaccgtttcgacggtcccattccctccctctccaacctcaccgctctcaagctcctcttcctctcccacaacaaattctccggcaagtttcccgccaccgtcacttccctcccccacctctaccgccttgacctctcctacaacaacctctccggtcagattccggcaactctcaacaacttaaccccacggcgaagaagataaagagaacaacttcgataccggagtttgcaagcgacaaggagatgggatttgctacggtggggtgcacggggtctctggtgaggacgtgttcgcttccgacggagaccgaggaggagtggcggaagaggaaggagttgcagacgctgcggcggatggaggcgcggaggaagcgctccgagaagcagaggaacatgaaagccttgagagaacaacaacagagggttgttggtgttgttgggtcccaagggagcaatccggtggatcaaggtgcaggggagtacggtgaggttgcagttgcaccacccttggcgagaactgtgtcgttgaccacacgtgtttgtggactcggcttgaatggggacagtgaaaaagagaagaagagtggaatagtgttgccacctccctcgccttctcagggttccattggttcttccggaatctctgaagctgagtctcaacagggtcaaggaacaacacctatggatgttagaagccctactagtgctaacttgttgccagacagtgaactgaaatcaccagcaggtgttgctgagaacaacacaggcaagaatgctgctgctgctgtagtgacaatgagaagtcaatctaacaaacattcaccaccacagagcagaaccaaagacattgtgaggaacttgttggaagacatgccctgtgtctccaccaaaggagagggccctaatgggaaaagaatagaaggctttctttaccggtatggaaaaggtgaggaagtgaggatagtttgcgtttgccatggcagttttctcaccccttctgagtttgtcaagcatgccggtggcggtgacgtggcaaaccccttgaaacatattgttgttagtccgagcttgttgtgaggccaagagaaagaaccagccaattatatgagtgatcagattttactctattgactcctatgttcactcttgaactcacctctacttcttcttctaatctgcatgttatgttcaagttctgttcatcttttgaaatcatagataatattctgaaagaatctgattttcttattcaggtattcttcccctttgttcctatttgacagtagaacaggagggacaatgatacctgttagagtttgttagctagttttctgttatctgttagtttccatcaacttaatttagtacttcagtttttgtttttc

SEQ ID NO: 7610 - DNA, 1527 bp, Glycine max
  Clone ID: 700675665_FLI
caagaacaatcaaacagaagaggctcaaggtcgcagaagcagcagctacaggacagtcaccagaagattcgtcacttcaatgaaggagacgtactcgtgattcctcctggtgttccttactggacctataacactggcgatgaaccagttgttgccatcagtcttcttgacacctctaacttcaataaccagcttgatcaaacccctagggtattttaccttgctgggaacccagatatagagtacccagagaccatgcaacaacaacaacagcagaaaagtcatggtggacgcaagcaggggcaacaccagcaggaggaagaggaagaaggtggcagcgtgctcagtggcttcagcaaacacttcttggcacaatccttcaacaccaacgaggacatagctgagaaacttcagtctccagacgacgaaaggaagcagatcgtgacagtggaaggaggtctcagcgttatcagccccaagtggcaagaacaacaagatgaagatgaagatgaagacgaagatgatgaagatgaacaaattccctctcaccctcctcgccgaccaagccatggaaagcgtgaacaagacgaggacgaggacgaagatgaagataaacctcgtcctagtcgaccaagccaaggaaagcgtgaacaagaccaggaccaggacgaggacgaagatgaagatgaagatcaacctcgcaagagccgcgaatggagatcgaaaaagacacaacccagaagacctagacaagaagaaccacgtgaaagaggatgcgagacaagaaacggggttgaggaaaatatctgcaccttgaagcttcacgagaacattgctcgcccttcacgcgctgacttctacaaccctaaagctggtcgcattagtaccctcaacagcctcaccctcccagccctccgccaattccaactcagtgcccaatatgttgtcctctacaagaatggaatttactctccacattggaatctgaatgcaaacagtgtgatctatgtgactcgaggacaaggaaaggttagagttgtgaactgccaagggaatgcagtgttcgacggtgagcttaggaggggacaattgctggtggtaccacagaacttcgtggtggcggagcaagccggagaacaaggattcgaatacatagtattcaagacacaccacaacgcagtcactagctacttgaaggatgtgtttagggcaattccctcagaggttcttgcccattcttacaaccttcgacagagtcaagtgtctgagcttaagtatgaaggaaattggggtcctttggtcaaccctgagtctcaacaaggctcaccccgtgttaaagtcgcataaatgacaagcatgatggtgtgaggatgaggccatcttatgaaataataacaaataaataaattttgtatgataataaaaagtatggcccatgtaccatcccagcgagcctatgtttatatctgagtggcgttgtacctttcaatcgccttaataaaatgtcagtcttcacgttttgtcttt

SEQ ID NO: 7611 - DNA, 1068 bp, Glycine max
  Clone ID: 700675684_FLI
ggtggtggcttcttctttgaatccgctttctccaaacttttcaatgaccattttctcaagttggtccctcaagccaacattatagtggtttccgttgagtacagactcgctccagaacaccctctccctgcagcttacgatgattgttgggacgctctcaaatgggtcgcatcccattctactaaagacaccacccccaacaacactgaatcttggttgactgagcacggtgacttcaacagagtgttcataggaggagacagtgctggtgccaatattgttcacaacattctctcctttcgtgttgggcctgagcccttgcctggggatgttcaaatattgggctctattttggcccatccttatttctacggctcagagcctgttgggtctgagcctgttactgggctggaacagaatttcttcaatctggtttggaaattggtgtatccttcagcacccggtgggattgacaaccctttcattaaccctttgggtgctggggcacctagcttggctgaacttgcttgttctagaatgctggtgtgtgttgctgagaaggatggcttaagggacagaggggtttggtactatgaggctgtcaagaaaagtgggtggaaaggggaaatacaactctttgaagagaaggatgaggatcatgtttatcatttgctcaaacctgcactcaatcaagattctcataaggctgatgcattgatcaagctcatggcttcttttctcgtcaattagattgacttttcctagccctggaatggaacggtttttaacaataagctctgttgttttgcttttaataatgtggagggataaaatttggttctagtttttttattttctttgtcaaatgtttgtggtttaactaaatgtgatgcttttaggatcgcagacaatgttcttgcaggtctatttaggagagcaatatgtggtaaacaacgatgctatagtttaatgtgtcggtgacgttatttggtccacattgcttcattcttaattaaaatgttgcttgagtcctcataaatatataatgccaaatctcatgggccaaag

SEQ ID NO: 7612 - DNA, 2782 bp, Glycine max
  Clone ID: 700675903_FLI
gggttgcaaagatgcttgggggtcttctccataggggtcataagataaaagggacagtggtgttgatgcgcaagaatgtgttggacgtgaatagcgtaaccagcgttgggggaattattggtcaaggtctcgacttagttggctcaacactcgatactcttactgccttcttgggccgatccgtgtctctccagcttattagtgctaccaaagctgatgccaacggaaaagggaaacttggaaaggctacctttttggaaggtatcattacttcattgccaactttgggagcaggccaatctgcattcaaaattaattttgaatgggatgatgggagtggaattcctggagcattttatatcaagaattttatgcaaactgagtttttccttgtgagtttgactcttgaagacattccaaaccatggaagcatccactttgtttgcaattcgtggatttacaatgccaaactcttcaaaagtgaccgcattttctttgccaaccagacatatcttccaagtgagacaccagctccactagtcaaatatagagaagaagagttgcataatttaagaggagatggaactggagaacgcaaagagtgggaaaggatctatgattatgatgtctacaatgatttaggtgatccggataaaggtgaaaatcatgcccgtcctgttcttggaggaaatgacacctttccttatcctcgtagggggagaactggtagaaaaccaacaaggaaagatcctaatagtgagagtaggagcaatgatgtttatcttccaagagatgaggcttttggacacttgaagtcatctgactttcttacttatggactaaaatccgtatctcaaaatgttcttccattattgcaatctgcttttgatttgaatttcacaccccgtgagtttgatagctttgatgaagttcatggactctattcaggcggaattaagctgccaacagatataatcagcaagattagtccactacccgtgcttaaggaaatcttccgaactgatggtgaacaggcccttaagtttcctcctcctaaagtaattcaagtgagtaagtctgcatggatgactgatgaagaatttgcaagagaaatgcttgctggtgtaaatccaaacttgattcgttgtcttaaggatttccctccacgaagcaagctagatagccaagtctatggtgatcatactagtcaaataaccaaagaacacctagagcccaacttagaagggctcactgtagatgaggcaattcaaaacaagagattgttcctactagatcatcatgacccaatcatgccatatttgaggcgaataaatgcaacctccacaaaggcttatgctaccagaaccatccttttcctgaaaaatgacggaactttaaggccacttgccatagagttgagtttgccacatcctcagggagatcaatctggtgcttttagtcaagtttttctgcctgcagatgaaggtgttgaaagttctatttggctgctagcaaaggcttatgtagttgtgaatgactcgtgctatcatcaacttgtcagccattggttaaacactcatgcagttgttgagccattcatcatagcaacaaacaggcatctcagtgttgttcaccctatttataaactccttcaccctcactatcgtgacaccatgaacataaatggccttgctcggttatcactggtcaacgacggtggcgttatagaacaaacatttttgtggggaaggtattctgtggaaatgtctgctgtagtttacaaggattgggtttttacagatcaagcattgcctgctgatcttataaaaagaggaatggcaattgaggatccatcgtgccctcatggcattcgccttgtgatagaggactacccttatgctgttgatggacttgagatatgggatgctatcaagacatgggtccatgaatacgttttcttgtactacaaatcagatgacacacttagagaagatcctgaactccaagcctgctggaaagaactcgtagaggtgggtcatggagacaagaaaaatgagccatggtggcctaagatgcaaactcgtgaagagctagttgaagcttgcgctatcatcatatggactgcttcagcacttcatgcagctgttaattttggacagtatccctatggaggtttaatcttaaaccgtccaactcttagtaggcgattcatgcctgagaaaggttctgctgagtatgaggagctgaggaagaatccccagaaggcttacttgaagactattacaccaaagtttcagacccttattgacctttctgttatagaaatcttgtcaaggcatgcatctgatgaggtgtaccttggggagagggacaatccaaattggacatctgatacaagagcattagaggcttttaaaaggtttggaaataaactggcacaaattgagaataaactctcagagagaaacaacgatgagaaactgagaaaccgttgtggaccagttcaaatgccttatactctgcttttgccttctagtaaggaaggattaactttcagaggaattcccaacagtatctctatctgaagaggtttgtggttccttaagttttgtggctttgaataaaagatagaagagaaggaatctgaattttttcatccaacctgcacatggtaatctagtgtgtttgagtgctttcatgtttggctttaataaaataaaagcagttgttttgtaaaatgttcagaatcaataaaagcatttactgctttgctttgtgcgct

SEQ ID NO: 7613 - DNA, 1724 bp, Glycine max
  Clone ID: 700675966_FLI
cattggtccttaaacactcatcagtcatcaccatggccaagctagttttttccctttgttttctgcttttcagtggctgctgcttcgctttcagttccagagagcagcctcagcaaaacgagtgccagatccaaaaactcaatgccctcaaaccggataaccgtatagagtcagaaggagggctcattgagacatggaaccctaacaacaagccattccagtgtgccggtgttgccctctctcgctgcaccctcaaccgcaacgcccttcgtagaccttcctacaccaacggtccccaggaaatctacatccaacaaggtaagggtatttttggcatgatatacccgggttgtcctagcacatttgaagagcctcaacaacctcaacaaagaggacaaagcagcagaccacaagaccgtcaccagaagatctataacttcagagagggtgatttgatcgcagtgcctactggtgttgcatggtggatgtacaacaatgaagacactcctgttgttgccgtttctattattgacaccaacagcttggagaaccagctcgaccagatgcctaggagattctatcttgctgggaaccaagagcaagagtttctaaaatatcagcaagagcaaggaggtcatcaaagccagaaaggaaagcatcagcaagaagaagaaaacgaaggaggcagcatattgagtggcttcaccctggaattcttggaacatgcattcagcgtggacaagcagatagcgaaaaacctacaaggagagaacgaaggggaagacaagggagccattgtgacagtgaaaggaggtctgagcgtgataaaaccacccacggacgagcagcaacaaagaccccaggaagaggaagaagaagaagaggatgagaagccacagtgcaagggtaaagacaaacactgccaacgcccccgaggaagccaaagcaaaagcagaagaaatggcattgacgagaccatatgcaccatgagacttcgccacaacattggccagacttcatcacctgacatctacaaccctcaagccggtagcgtcacaaccgccaccagccttgacttcccagccctctcgtggctcagactcagtgctgagtttggatctctccgcaagaatgcaatgttcgtgccacactacaacctgaacgcgaacagcataatatacgcattgaatggacgggcattgatacaagtggtgaattgcaacggtgagagagtgtttgatggagagctgcaagagggacgggtgctgatcgtgccacaaaactttgtggtggctgcaagatcacagagtgacaacttcgagtatgtgtcattcaagaccaatgatacacccatgatcggcactcttgcaggggcaaactcattgttgaacgcattaccagaggaagtgattcagcacactttcaacctaaaaagccagcaggccaggcagataaagaacaacaaccctttcaagttcctggttccacctcaggagtctcagaagagagctgtggcttagagccctttttgtatgtgctaccccacttttgtctttttggcaatagtgctagcaaccaataaataataataataataatgaataagaaaacaaaggctttagcttgccttttgttcactgtaaaataataatgtaagtactctctataatgagtcacgaaacttttgcgggaataaaaggagaaattccaatgagttttctgtc

SEQ ID NO: 7614 - DNA, 1481 bp, Glycine max
  Clone ID: 700676019_FLI
taaattgtgaccctcgtcacgccaacgctttcgttgttcccctttctctcgttttttctcagaaccttctgaggttaaagcaaaaaacaaagagagagagagagagaaaatgatgaagccatcgatgctcagatctctccactccgccgccacccgcggcgcctctcatctcttccgccgtgggtacgcctccgagccggtgccggagcgcaaggtagccgttctcggcgccgccggcgggatcgggcagcctctctcccttctcatgaagctcaatcccctcgtttcgagcctctccctttacgatatcgccggaactcccggcgtcgccgccgatatcagccacataaacaccagatctgaggtagtggggtaccaaggtgatgaagagcttggaaaagctttggagggtgccgatgttgttataattcctgctggtgtgcccagaaagcctggaatgactcgtgatgatctttttaacatcaatgctggcattgttaagacgctgtgtactgctattgctaagtattgcccccatgcccttgttaacatgataagcaatcctgtgaactccactgttcctattgctgctgaagttttcaagaaggcaggaacttatgatgagaagagattgtttggtgttaccacccttgatgttgttagggcaaaaactttctatgctgggaaagccaatgttccagttgctggtgttaatgtacctgttgtgggcggccatgcaggcattactattctgccactattttctcaagccacaccaaaagccaatcttgatgatgatgtcattaaggctcttacaaagaggacacaagatggaggaacagaagttgtagaagctaaggctggaaagggttctgcaactttgtcaatggcctatgctggtgccctttttgctgatgcttgcctcaagggcctcaatggagtcccagatgttgtcgagtgctctttcgtgcaatccactgttactgaacttcccttctttgcttccaaggtgaggcttgggacggttggtgtggaggaagttctgggcttggggcacctctcagattttgagcaacaaggcctcgaaagccttaagcctgaactcaaatcatcaattgagaagggaatcaaatttgccaaccagtaattgaacatgttatcacatacatgtctggtaggttactggatattcctttaagaaccaaatcaaattttgcattctcagaaccattgatgtattgttgtcggcagtggtgtggcggttttgttgttttatttagtgtaggtatacgccatggtttaataattaaagtctgagagctgtttgttgccaaagggattgaacgatcttaaaaccaggtttaggatttggcattccattaataatggtcccttttaactgtatggtttcacttaatgtaattgcagggtgttgtaccctttattcacattttttctcacttaaatatgtttttgatttc

SEQ ID NO: 7615 - DNA, 922 bp, Glycine max
  Clone ID: 700676049_FLI
ctggtctgaggccagttgttgagggcatgaacatgggatttctacttctggcatttaaccagatctctaataattgtggcatgctgcattacacatctggaggccagttcaaaataccaattgtcattcgtggacctggtggagttgggcggcaacttggagcagagcactcacagcgattggagtcatattttcaatcaatccctggaatccagatggtggcttgctcaaccccttacaatgccaagggcttgatgaaagctgcaatccgaagtgagaatcccgtgattctttttgagcatgttttgctttataacctcaaggagagaattccagatgaagagtatgtattgtcactcgaagaagctgagatggttaggcctggggagcatgtcacaatattaacctattccaggatgaggtatcatgtcatgcaagctgctaagacactggtgaacaaggggtatgaccccgaagtgatcgatatcaggtctttgaaaccgttcgatcttcacacaatcgggaattcagtgaagaagacacaccgtgtgctaattgtggaagagtgcatgcggacaggtggaattggtgctagtttgacagctgcaattaccgaaaatttccatgactatttggatgcccctatagtatgtttatcctctcaggatgtaccaactccttatgctggaacattggaggaatggacagtagttcaacctgctcagattgtcactgcagttgagaaactctgccagtgattgctacaaaacactagcaattgtgcttgttaaattaagctagaattttcatcatggctttctctttaccttttatttcttaagtctcccataacgtaaattgttatttaacttttgttaatctttgcattttttttcttaaaagaagaatatttagaaccctc

SEQ ID NO: 7616 - DNA, 294 bp, Glycine max
  Clone ID: 700676090_FLI
agaaaaatgatctttgctccttggtgtgacgaggaggaggtggaggctgatgtcaaagccaggacaaagggtgagatgggagcagctaagactctttgcagcccctttgatcagccagaactcccagaaggcaccaagtgctttgcatcaggaaagcccgcaacaaagtggacatactggggcagaagttactagactactggctgttgattttggtattttctggatttaatttggtatttaatgatgccttgtacgaatttgtggatcacacaaacattagttttcttttct

SEQ ID NO: 7617 - DNA, 1353 bp, Glycine max
  Clone ID: 700676116_FLI
ataaaattcttccaccaagttatgggtttccttgtgttgcttcttttctccctcttaggtctctcttctagttccagcatatcaactcatcgttccatattggaccttgacctaaccaagtttaccacacagaaacaggtgtcttcactgttccaactatggaagagtgagcatggacgtgtctaccataaccacgaagaagaggcaaagagacttgagattttcaagaataacttgaactatatcagggacatgaatgcaaacagaaaatcaccccattctcaatcgtttaggattgaacaagtttgctgacatcactcctcaagagttcagcaaaaagtacttgcaagctcccaaggatgtgtcgcagcaaatcaaaatggccaacaagaaaatgaagaaggaacaatattcttgtgaccatccacctgcatcatgggattggaggaaaaaaggtgtcatcacccaagtaaagtaccaagggggctgtggaagcggttgggcgttttctgccacgggagccatagaagcagcacatgcaatagcaacaggagaccttgttagcctttctgaacaagaactcgtagactgtgtggaagaaagcgaaggttgttacaatggatggcactatcaatcgttcgaatgggttttagaacatggtgggattgccactgatgatgattatccttacagagctaaagagggtagatgcaaagccaataagatacaagacaaggttacaattgacggatatgaaactctaataatgtcagatgagagtacagaatcagagacagagcaagcgttcttaagcgccatccttgagcaaccaattagtgtctccattgatgcaaaagattttcatttatacaccgggggaatttatgatggagaaaactgtacaagtccgtatgggattaatcactttgttttacttgtgggttatggttcagcggatggtgtagattactggatagcgaaaaattcatggggagaagattggggagaagatggttacatttggatccaaagaaacacgggtaatttattaggagtgtgtgggatgaattatttcgcttcatacccaaccaaagaggaatcagaaacactggtgtctgctcgcgttaaaggtcatcgaagagttgatcactctcctctttgagccgtaaaggttcaatacaacgagtgcttgttttcttagggacaagcattgtacttatgtatgattctgtgtaaccatgagtcttccacgttgtactaatgtgaagggcaaaaataaaacacagaacaagttcgtttttctcaaataatgtgaaggtagaaaatggaaccatgcctcctctcttgcatgtg

SEQ ID NO: 7618 - DNA, 1306 bp, Glycine max
  Clone ID: 700676128_FLI
gtttttatctaacttcttattgaggaaggcatttgccaagaggtttggagctgttcaaaatgagaggggcaaaaagaaggacctgtctcctcaagatgctgccttgttgatccagatcagctttagagcttacttgatccgtaggtcaaaggctctccgtgcccttagagaactggccattgcaaagtctaaattaaaggaaatcagagcccagttcaataacttttcctaccgacgtcatgtagctcgtgatgcggaggaacgccagcggttttctgagaaaatcattgtcttgctcctcactgttgatgccattgaggtagtgatctccatttttggatctttctttgtggaacagattgaactttttccacaatttttgaactgctaaacgtcatatcaaatgttaatatattagtaagtctgtaatttacttttatagtccagacagcacaatataacctagtagaaaacatgtatatatagatgagtttgaatattcataggtagctgacgtcgtttttatcgttatctttactaccttatttaacagttatgcaagcatcccggacactgtttctaatatacatttctctatatttggttcaggaattaggcatggaagttctcttatttctatagaattttaacagtgattctgatgatgtgaatgaaaatacagttattaaaaattcgagtcactaaaaatcaactcattctaaaccaaatgggcatttatactttatctatttagtcatgttttactagccaaagaaacgggaaggaactgcataccagtcagagtaaggagaaatacttgacagttgcctaacaccataaaggaacagaataccaccatttattggtttttctaacagagttgctcatttcctgtttcctagggatctgatattatggtaagatctgcgaagaggtcaatggtggatgagctggaagcaatgcttgatgtggtagatccccagcctggtggaagatcagcatcgctctacttcaaaagaaggacatttgatatgcctgatggagtcatcaggaaggaaatagaagaaggggttgcacaggttgtgcaaatgcttgaagaagcagagaatagtagtgaagcatgaccgtgagatcaagaaagtaatatctatctgtttatttcgtgttttccttctgctgttgtagtttgtttgcagagacgtattttagtctaagatttcaagacttctaaattaggctttccatccaatggtatttgttttgctgaacttttggcactttctgaacgaaaagattggcttgtgtt

SEQ ID NO: 7619 - DNA, 2725 bp, Glycine max
  Clone ID: 700676135_FLI
ctaatttctggaaaaagaaccagttgcggggatgaagatcctgattactttggagtttctaaaggaaaaattccttttggtgaacaatcttctagaacactttttgttagaaacatcaatagcaatgtagaagattctgagctaaaggctctctttgagcaatatggagatatccgaaccatatatactgcctgcaagcatcgtggatttgttatgatttcttattatgatataagggcagcacaaaatgcaatgaaagcacttcaaaataggtcattgagatctaggaaacttgatatacattattcaattccaaagggcaattctccagagaaggatattggccatggtacactgatgatatccaatcttgattcatctgttttggatgatgaactaaaacagatttttgggttttatggagaaattagagaaatctatgaatatccacaattgaatcatgtcaaatttattgaattttatgatgtccgggctgcagaagcttctcttcgtgcattaaacgggatctgctttgctgggaagcacattaagcttgagcctggtcttcccaagattgcaacatgtatgatgcatcagtcacacaaaggaaaagatgaacctgatgttggtcatagtctgagtgacaacatatccttaagacataaagcaggagtgtcatctggatttattgcatctggtagcagcttggaaaatggatataatcagggatttcattctgcgacacagctacctgcttttattgataactcaccgtttcatgtgaattctagcattcacaagatcacaagaggggcatctgcgggaaaagtatctggtgtttttgaggccagtaatgcttttgatgctatgaaatttgcatccatttcgaggttccatcctcattctttacctgaatatcgtgaaagtttagctactggcagtccttacaacttttcaagtaccattaacacggcttccaatattggaactggatcgacggaatcatctgaaagcaggcacattcagggaatgagttcaactgggaacctagctgagtttaatgcaggaggaaacggaaaccacccccatcatggactttatcatatgtggaatgggtccaacttgcatcagcaaccttcttcaaatgccatgctttggcaaaaaacaccatcctttgttaatggtgcatgttctccaggtcttccacagatacccagctttcctagaacaccacctcatgttcttagagcatcacatatagaccaccaagtgggatcagcaccagttgttacagcctcaccctgggatagacaacattctttcttgggagagtcacctgatgcttctggttttagattgggttctgttggaagtccaggctttaatggtagctggcagttgcatcctcctgcttctcacaatatgtttcctcatgttggtgggaatggtacagaattgacgtcaaatgctgggcagggctctcctaagcagttgtcacatgttttccctgggaaacttcccatgactttggtttctaaatttgatactaccaatgaacgaatgagaaacctctattctcgtagaagtgaaccaaacactaacaacaatgctgataaaaaacaatatgaacttgacctaggccgcattttacgtggggatgacaaccggacaacactcatgataaaaaatattcccaataagtatacttcaaagatgcttcttgttgccatagatgagcaatgtcgaggaacttatgattttctgtatttgccaattgatttcaagaacaaatgtaatgttggctatgcattcatcaatatgatcgatcctggacaaattattccattccacaaggcttttcatgggaaaaaatgggagaagttcaacagtgaaaaggtagcagtactcgcctatgcccgaattcaaggaaaatctgctcttattgctcatttccagaattcaagcctgatgaatgaagataaacggtgccgtcctattctcttccatacagatggcccaaatgctggtgatccggagcctttccccttgggtaacaatattagagtgaggcctggaaaaattcgcattaatggtaatgaggagaatcgcagccaagggaatccttcatctttggcaagtggagaagagtccgggaatgcaatagaatctacatcgagctcttcaaaaaattctgactgatttagcatcatgatctaacagttcaatgttgcatgtgatatcaactccaagactgtatatttacattatctttttgttcgatcgagcaagaggagttggagctggtaggaaagggggctcaaaattttttcctatagaggagccttgcaagagtttttggaagttgaggtacataacccgaatgaagtcactgattctattgttttccgttattttcctaaaattttgcatggagtactgctaccatcctacaactttagagaatggcctaactgaagcttaaaattttggctagctgtgaatggacaatgtgacactttgcagtttccttgtgataatgtgcatcattgtgggtttcaagggttctttgctgattttgttttcatggtcatctttgttgttcatatgtaattttgttcccttatattcccgggcattggtatccttatgggttttgttgtctatataatggatttttgaggaaaaacatttaaatgaaacattttcttcggtggtggtagtattc

SEQ ID NO: 7620 - DNA, 1267 bp, Glycine max
  Clone ID: 700676165_FLI
gacaatcttataggtttaggcatgctggggagtgtgtatagggcagagcttccagatggaaagatacttgctgtgaagaaactagacaagagagtttctgatcaacaaacagatgatgagtttctcgaattgataaacagtattgacagaatccggcatccaaatattgttgagcttattgggtactgtgcagagcatggccaaaggcttcttatttatgagtattgcagtaatgggtcgttgcaggatgcactccattcagatgatgaattcaaaacaagattgtcatggaatgctcgcattcggatagcactcggggcagctagagccttagagtacttgcatgagcagtttcagccatctgttgtgcacagaaatttcaagtctgctaacattctcctcgatgatgatgtttctgtgcgcgtatctgattgtggtttggctccactaataactaaaggttctgtaagtcagctctcaggacaactgctaacagcatatggctatggggctcctgagtttgagtcaggaatttacacatatcagagtgatatttacagctttggagtagttatgttagaacttttgacaggccgtcagtcctacgacaggacacgccctcgaggggagcagtttctggtgaggtgggctattcctcagcttcatgacattgatgcattatcaaagatggttgatccttctctaaaaggaaattaccctgccaaatcattgtcaaattttgcagacattatttctagatgtgttcagtcagagccagaatttaggccagcaatgtcagaagtggtcttgtacttaataaatatgataaggaaggaatctcagcaaagtgaatcaaatgaataaacaatggaaatggtaatgatatttgaacatgcataaatgtgcaaagaataagaattacatgcactgattgctgaatctctactagttgagatatgcttgattgcatttcacccaaggaggggcccaattagatgcccccatattccgaagtactgacccatccaacattcacatgccaggggttttgaccaatcatcttcagagaaattatagctaccgacactcctcgcactcgtgtagtttatattttattttgttattatacatatatgatcatttaatggttcattgaaccatgccatgttgcagtgccctggaaatgatttgaacccatttgtttgatgattacttccttattgttgatttagaaatataatttcattgtgcatcctagtgatttttt

SEQ ID NO: 7621 - DNA, 1759 bp, Glycine max
  Clone ID: 700676275_FLI
ggggaaggcacgggagcaacaatgtctgatgacgaagatgagcaagtaggtagtgatgccaatctgtttgatggtgctttggatggtcctgatagcatgggattcggtcctcttattcccacagagaatgagaggtccctcacggaacgtgtaagacctgaagtaaagcacgaattgaaacagggttataaagagaaaattgtggacataagagaggaaattttacgcaagagatgagttgggaaacttcctggtgacacgacctctgtccttaaagctttgtggcaatcacattccaagtggccttaccctacagtggctacgaagactgagtcaaataaagttgcagggaatgccattttatatgaatgtgttcaaacaataatgagcattgaagataatggtggcttacatgtacttgccattaatatcctgggaagattcttgtcaaaccatgacaacaatatcaggtttatttctgctcattgcttctcttaaataatgagcattgaagataatggtgggttacatgtacttgccattaatatcctgggaagattcttgtcaaaccatgacaacaatatcagaatatccagattttgccagatgcccgcaaatcagtattttgactgatattaactcaatatgaagagagtaatctctttttgtagttgtgtttcgtgcgtttttactggctgctggaatccccaacaaggatgttctcctacggaagaaaagggctaggattctaaagccagctttcacagttatacgggataaagaatcaaaatgtttgcttgtgttcatccgtggaactcaaagcttaaaagacacactgacagaagcaatcggtgctcccgtgtccttcaatcatttcatttgaacgatgatggtgagctgaagaggaacaacagggttgcaggacatggacactggtatggttgccgcagctcgttggattaagaagcactgcaccactatactacttgaagatctttgtcgacaccccgatttccaaatcaagctgcctccgtatcattggagttagcagaattcgggaagccctttatcacttccattataaatgattcagacatagtgcctacattgtcagcttattctattcatgatttcatttctgaggtggagttccaaatctggccatggttgagagtgtggacaatcagaagaactgcaggtagcaaatcatcttgaccgtatggtgtcaacccttcgaagaaatcctctgaaggttttggtgcaagtaaatacgagtggagaagaatccaaatctggtattgatccttccaactgtgttgacttaatcaatacaaaaagatgcgagacacaaaaagaaaagaagaaaataattgaaaagtacttcaagaagttcatgatttactctttaacccaaccaatccagaagctagtaggaatttcaacaaagcacaacaacatcaggaccctactggtcttgcatgcagccaaggaaggtacttacaggtgatcgttattgtgccacatgaactaaacagatctcgtagttatttatcagtagcatcatcatcaaagttctttacatgaaagtttgatgatgatgttaccgataaagagctacgagagtgtttttagccgacgctgcaaattttctcaactccagaattgcttccctttgatctgaacctttccaatttcagaatcatcattttctgaacaccaattgataccaagaaagaaaaaaagaaagaaagaaagaaag

SEQ ID NO: 7622 - DNA, 1769 bp, Glycine max; identical to SEQ ID NO: 7277
  Clone ID: 700676283_FLI

SEQ ID NO: 7623 - DNA, 1691 bp, Glycine max
  Clone ID: 700676331_FLI
attgtctttgaacactcatcaccatggccaagcttgttctttccctttgtttccttcttttcagtggctgcttcgctctgagagagcaggcacagcaaaatgagtgccagatccaaaagctgaatgccctcaaaccggataaccgtatagagtcggaaggtgggttcattgagacctggaaccctaacaacaagccattccagtgtgccggtgttgccctctctcgctgcacccttaaccgcaatgcccttcgtagaccttcctacaccaacggtccccagggaaatctacatacaacaaggtaatggtatttttggcatgatattcccgggttgtcctagcacttatcaagagccgcaagaatctcagcaacgaggacgaagccagaggccccaagaccgtcaccaaaaggtacatcgcttcagagagggtgatttgatcgcagtgcctactggtgttgcatggtggatgtacaacaatgaagacactcctgttgttgccgtttctattattgacaccaacagcttggagaaccagctcgaccagatgcctaggagattctatcttgctgggaaccaagagcaagagtttctaaaatatcagcagcagcagcaaggaggttcccaaagccagaaaggaaagcaacaagaagaagaaaacgaaggaagcaacatattgagtggcttcgcccctgaattcttgaaagaagcgttcggcgtgaacatgcagatagtgagaaacctacaaggtgagaacgaagaggaggatagtggagccattgtgacagtgaaaggaggtctaagagtcacagctccagccatgaggaagccacagcaagaagaagatgatgatgatgaggaagagcagccacagtgcgtggagacagacaaaggttgccaacgccaaagcaaaaggagcagaaatggcattgatgagaccatttgcacaatgagacttcgccaaaacattggtcagaattcatcacctgacatctacaaccctcaagctggtagcatcacaaccgccaccagccttgacttcccagccctctggcttctcaaactcagtgcccagtatggatcactccgcaagaatgctatgttcgtgccacactacaccctgaacgcgaacagcataatatacgcattgaatgggcgggcattggtacaagtggtgaattgcaatggtgagagagtgtttgatggagagctgcaagagggaggggtgctgatcgttccacaaaactttgcggtggctgcaaaatcccagagcgataactttgagtatgtgtcattcaagaccaatgatagaccctcgatcggaaaccttgcaggggcaaactcattgttgaacgcattgccagaggaagtgattcagcacacttttaacctaaagagccagcaggccaggcaggtgaagaacaacaaccctttcagcttcctggttccacctcaggagtctcagaggagagctgtggcttagagagccctttttgcatgtgctaccacacttttgtccttttgggctctagctagtgctggtagcagtaaataagaatgaataaaagaaacaaaggcttagatgccctttgttaagtgtagaataacgggtatagtaactatgtacccttgtgtaatgagtcactcaagtacctatgcgggaaaagcataaataaaagaagaaattccaat

SEQ ID NO: 7624 - DNA, 1727 bp, Glycine max
  Clone ID: 700676443_FLI
ctccattggtccttaaacactcatcagtcatcaccatggccaagctagttttttccctttgttttctgcttttcagtggctgctgcttcgctttcagttccagagagcagcctcagcaaaacgagtgccagatccaaaaactcaatgccctcaaaccggataaccgtatagagtcagaaggagggctcattgagacatggaaccctaacaacaagccattccagtgtgccggtgttgccctctctcgctgcaccctcaaccgcaacgcccttcgtagaccttcctacaccaacggtccccaggaaatctacatccaacaaggtaagggtatttttggcatgatatacccgggttgtcctagcacatttgaagagcctcaacaacctcaacaaagaggacaaagcagcagaccacaagaccgtcaccagaagatctataacttcagagagggtgatttgatcgcagtgcctactggtgttgcatggtggatgtacaacaatgaagacactcctgttgttgccgtttctattattgacaccaacagcttggagaaccagctcgaccagatgcctaggagattctatcttgctgggaaccaagagcaagagtttctaaaatatcagcaagagcaaggaggtcatcaaagccagaaaggaaagcatcagcaagaagaagaaaacgaaggaggcagcatattgagtggcttcaccctggaattcttggaacatgcattcagcgtggacaagcagatagcgaaaaacctacaaggagagaacgaaggggaagacaagggagccattgtgacagtgaaaggaggtctgagcgtgataaaaccacccacggacgagcagcaacaaagaccccaggaagaggaagaagaagaagaggatgagaagccacagtgcaagggtaaagacaaacactgccaacgcccccgaggaagccaaagcaaaagcagaagaaatggcattgacgagaccatatgcaccatgagacttcgccacaacattggccagacttcatcacctgacatctacaaccctcaagccggtagcgtcacaaccgccaccagccttgacttcccagccctctcgtggctcagactcagtgctgagtttggatctctccgcaagaatgcaatgttcgtgccacactacaacctgaacgcgaacagcataatatacgcattgaatggacgggcattgatacaagtggtgaattgcaacggtgagagagtgtttgatggagagctgcaagagggacgggtgctgatcgtgccacaaaactttgtggtggctgcaagatcacagagtgacaacttcgagtatgtgtcattcaagaccaatgatacacccatgatcggcactcttgcaggggcaaactcattgttgaacgcattaccagaggaagtgattcagcacactttcaacctaaaaagccagcaggccaggcagataaagaacaacaaccctttcaagttcctggttccacctcaggagtctcagaagagagctgtggcttagagccctttttgtatgtgctaccccacttttgtctttttggcaatagtgctagcaaccaataaataataataataataatgaataagaaaacaaaggctttagcttgccttttgttcactgtaaaataataatgtaagtactctctataatgagtcacgaaacttttgcgggaataaaaggagaaattccaatgagttttctgtc

SEQ ID NO: 7625 - DNA, 2377 bp, Glycine max
  Clone ID: 700676494_FLI
gacagtggctgcagcgggtctatatgtgcatctccgcattggtccatacgtgtgtgccgaatggaactatggtggtttccctctttggctacacttcattccgggaatcaagttccgaactgacaatgaacccttcaaggcagaaatgaagcgattcactgccaaaattgtggatatgatcaaggaagagaatctatatgcctcacagggaggacctgttatattatctcagattgaaaatgaatatggaaacattgattcggcctatggtgctgcgggtaaatcctacatcaagtgggcagcaactatggctacatctcttgatacaggggttccatgggtcatgtgtcagcaagctgatgctcctgatccaattattaatacatgcaatggattttactgcgatcaatttacaccaaactctaacacaaaaccaaaaatgtggactgagaattggagtggatggtttcttccgttcggtggtgctgttccttaccggcctgtggaagatcttgcatttgccgtggcacgatttttccagcgaggaggaacatttcaaaattactatatgtaccatggagggaccaactttgaccgaacttctggtggacctttcattgctacaagttatgattatgatgcaccaattgatgagtatggaattattagacagcctaagtggggccaccttaaagaagttcataaggccataaagctttgtgaagaagcattgatagctactgatccaacaattacatcccttggtccaaacctagaggcggcagtttacaagacaggatctgtatgtgcggccttccttgctaacgtagacaccaaatctgatgtaacagtaaactttagtggcaattcatatcacttgcctgcatggtctgtgagcatcttaccagactgcaagaatgtagtgcttaatactgcaaagattaattctgcatctgcaatttcaagcttcacaactgaatctttaaaagaagatatcggttcttcagaagcttctagtacaggatggagttggataagtgaaccagtgggtatttcaaaggctgattcattcccacaaactggattactggagcaaataaatacaacagctgataaaagtgattacttgtggtactcattaagcattgattataagggtgatgctggttctcaaactgtccttcacattgaatcacttggtcatgcccttcatgcttttattaatgggaagcttgcagggagtcaaacaggcaatagtggcaaatataagttcactgtggacatccctgtcacactagtggccggaaagaacacaattgatctcttgagtttaaccgtgggacttcagaactatggagccttttttgacacatggggagcggggatcactggtccagtgatattgaaaggtttggcaaatggcaacacacttgatctctcctaccagaagtggacttatcaggttggcctcaaaggggaagacttaggtctgtctagtggaagttctggacagtggaattcacaatctaccttccctaagaaccaaccattgatttggtacaagacaacctttgctgctccatccggcagtgatccagttgcaattgacttcacggggatgggaaaaggtgaggcttgggtgaatgggcaaagcatcggacgatactggcctacatatgtggcttcagatgctggttgcacggactcatgcaattatagaggaccttacagtgcatccaaatgtcgcaggaattgtggaaagccatcacagacactataccatgtaccgcgatcgtggttaaaaccaagtggcaacattcttgtattgtttgaggaaaagggaggtgatccaacacaaatatcttttgtcacaaaacagacagaaagtttgtgtgcacatgtatccgattctcacccaccacccgtagacttgtggaactcagatacagaatcaggaagaaaagtaggtcctgtgctatcactcacttgccctcatgataaccaagtcatctcttccattaaatttgctagctatggaacaccccttggaacctgtggtaacttctaccacggacgctgcagcagcaacaaggctctttctattgtgcagaaggcctgcattggatcaagcagttgtagtgttggagtatcaagtgagacattcggaaacccttgtagaggagtggcaaaaagtttagcagttgaagctacttgtgcgtagacagacatgtttcttcaataacacttcccaattttctgaagatgattccttctaataagcaaaagtagatttgtaattttaggaacatccaagaaaatatagtcaactaaaacagtttagtctcacatgcaataaaaaagaaaagtctctaagctg

SEQ ID NO: 7626 - DNA, 870 bp, Glycine max
  Clone ID: 700676535_FLI
cgtgaaggagcacgaaacggtggctgtgaactgcgttttgcagcttcacaagacactctacgacggaagcggaggagccttgagggacttcttgggtctaatccgcagcacaaatcccagcgttgtcgtggtggcagagcaagaagcagaacataacgaaaacaggttggagggaagggtgtgtaactcgttgaaatactactcggcattgtttgattccattgacgagagtgggcttccgcaagagagtgcggtgagggtgaaaatagaagagatgtatgctaaggagataaggaacattgttgcttgcgaaggaagggagagggtggagaggcacgagagtttcgggaactggaggaggatgatggtggagcaaggagggttcagatgcatgggtgttactgaaagagaattgagccagagccagatgctgttgaagatgtattcttgcgagagttacagtgtgaagaaacaagagaaggaaggagcaacaggagttacacttagttggttagagcaacctttgtacactgtctctgcttgggggcctgttgatgctgctgcgggtacctcgtcctcgttttctcagccaagttgattttgattggtgattggtgattctttcttcataattcattccttcagagtatgaaatacagacacaagaaaggtaaggggtcaggggagagtcgagagtacaagagtattattctttgtaggtagggaaaattgtcattattattattctttcattctttgttgcagataagaatttgcctagcccaaagattagttggtgcaatttgtatcaatacagtaattgccttctgttctttatttttattattatttatagtcctgatgatgtct

SEQ ID NO: 7627 - DNA, 1521 bp, Glycine max
  Clone ID: 700676565_FLI
caaccacaagtgttcttcctctgtaaacacacaaactctgttcctatttcagagtactgtccctttacctcgtacacatcaaacaatggaaggagatgggtattgtgggagtttctttcagaggtgcaagccttacatagccatgatttctctgcaattcgggtttgcgggtatgaacataatcaccaaggtttccctcaaccgtgggatgagccactatgtgcttgtggtttatagacacgcctttgctactgcagctattgctccttttgctattgttctagagaggaaagtgaggcccaagattacatttctcatgttcatgcaaatattcgtgttgggtctccttgggcctgtgattgatcagaacttatattatgcggggttgaaatttacttcccctacctactcatgtgcgataagcaacatgctccctgctatgacatttgtgatggctgctattttcaggatggagaagttaaacgtgagaaaagtaagatgccaagcaaaggtgattggaactgtagtaacagttgctggggccatgttgatgacattgtacaaagggcaagtaatcagtttcttggggtctaagtacatgcatcacccaagaaactatgtacctgaaaacaacactgattctggtgaaaaggattggttcaagggttctgttcttctcgtacttgccaccctttcatgggcttctttcttcatccttcaggcagtgacattaaggaaataccctgctcagctctccctcacagcacttgtgtgtgccttaggtacactgcaatcaattgcagttacctttgtcatggagcacaaaccatctgtttggaccattggctgggacatgaaccttcttgctgcagcctatgctggaataatatcatcaggtatcacctactatgttcaagggattgtcatgcagaaaaaagggcctgttttcgttactgctttcagccctttgatgatgattatcgtagccatcatgggtaccttcatccttgcagaaaaaatatatcttggaggggtcattggagctattctcatagtaatgggactttactcggttctgtggggcaagcacaaggagaacaaagagaaagaggcagagataaccattgaggtattgaagtgttgttcagaaaatgggatgaggttggagactgtggtagaagatgctgaaacaaacaacgacattgagatgcaaaagggtgaagcctcaagagagttaagggtagccattggagttccaaaagtttaaagtggttaagattagaaaggaaagggatgaataataatagaggctgcaatgaaaaaaggggtctttaattgagagcagagaaattgaaaggggttttgttttgtgtactcaccatctttcttcggaaaattaactaaggcttatttttttctttcttttttgtattttgattaggaccttatgtgtggaccttactgtccataatgtaacttaaattttgcacactttggtgaaaggaaaattgacatttgcag

SEQ ID NO: 7628 - DNA, 1036 bp, Glycine max
  Clone ID: 700676594_FLI
cttggagaaaatgccattatggcaaaaagcaattttgtgtggaatgggacattgtttgtctcggaaaagcaaagaaacatggtatcatgggattggaggaaaaaaggtgtcatcacccaagtaaagtaccaagggggctgtggaagcggttgggcgttttctgccacgggagccatagaagcagcacatgcaatagcaacaggagaccttgttagcctttctgaacaagaactcgtagactgtgtggaagaaagcgaaggttgttacaatggatggcactatcaatcgttcgaatgggttttagaacatggtgggattgccactgatgatgattatccttacagagctaaagagggtagatgcaaagccaataagatacaagacaaggttacaattgacggatatgaaactctaataatgtcagatgagagtacagaatcagagacagagcaagcgttcttaagcgccatccttgagcaaccaattagtgtctccattgatgcaaaagattttcatttatacaccgggggaatttatgatggagaaaactgtacaagtccgtatgggattaatcactttgttttacttgtgggttatggttcagcggatggtgtagattactggatagcgaaaaattcatggggagaagattggggagaagatggttacatttggatccaaagaaacacgggtaatttattaggagtgtgtgggatgaattatttcgcttcatacccaaccaaagaggaatcagaaacactggtgtctgctcgcgttaaaggtcatcgaagagttgatcactctcctctttgagccgtaaaggttcaatacaacgagtgcttgttttcttagggacaagcattgtacttatgtatgattctgtgtaaccatgagtcttccacgttgtactaatgtgaagggcaaaaataaaacacagaacaagttcgtttttctcaaataatgtgaaggtagaaaatggaaccatgcctcctctcttgcatgtgatttaaaatattaagcagatggttttttcttt

SEQ ID NO: 7629 - DNA, 607 bp, Glycine max
  Clone ID: 700676705_FLI
gttaatttacttgaacaaaactttggaaatgaacgcaaacttgagtccgaaagaaaggataggctggcaatggagcttggtttggaccctcgacaagttgctgtgtggtttcaaaacagaagagcccgttggaagaacaaaaagttggaagaagagtactccagccttaaaaaaaatcatgaagccaccttgcttgagaaatgttgcctggagagtgaggtgttgaagctcaaagagcaactttctgaggcagagaaagagattcagaggctgctagagagtgccgagagagtcccaagcaacagttctagttcgtcacagtcacaatcaatggaagcggtggacccaccattctttggggaatttggagttgatggatatgaggatgatgtgttttacgtgcctgagacccattacatcaacggcatggaatggattaatctgtatatgtaaaactaccaataggaatttagaattttgtagataatgtgaatggtccaatgtatattaattgttcctagctagctaggtagctaagtgtgtttgtttcactatggtttggaaattggaaagtatccattaacataataatttgcaatttgacccg

SEQ ID NO: 7630 - DNA, 217 bp, Glycine max
  Clone ID: 700676765_FLI
caaccattgactttgtcatgctcaaaaatttagtttaatttacaaattatggcaagggttacacctggctagcttccgcgtttagatcatttgtttatagtgctatggccacgacaagagtgttatgggtgcatgaatgtaaaacgaaaaaaaaaaaaattgtgtttattttgtacttcaagttatgaataaaagaatttcactgtttgtttgtatc

SEQ ID NO: 7631 - DNA, 1693 bp, Glycine max
  Clone ID: 700676766_FLI
tccattgtctttgaacactcatcaccatggccaagcttgttctttccctttgtttccttcttttcagtggctgcttcgctctgagagagcaggcacagcaaaatgagtgccagatccaaaagctgaatgccctcaaaccggataaccgtatagagtcggaaggtgggttcattgagacctggaaccctaacaacaagccattccagtgtgccggtgttgccctctctcgctgcacccttaaccgcaatgcccttcgtagaccttcctacaccaacggtccccaggaaatctacatacaacaaggtaatggtatttttggcatgatattcccgggttgtcctagcacttatcaagagccgcaagaatctcagcaacgaggacgaagccagaggccccaagaccgtcaccaaaaggtacatcgcttcagagagggtgatttgatcgcagtgcctactggtgttgcatggtggatgtacaacaatgaagacactcctgttgttgccgtttctattattgacaccaacagcttggagaaccagctcgaccagatgcctaggagattctatcttgctgggaaccaagagcaagagtttctaaaatatcagcagcagcagcaaggaggttcccaaagccagaaaggaaagcaacaagaagaagaaaacgaaggaagcaacatattgagtggcttcgcccctgaattcttgaaagaagcgttcggcgtgaacatgcagatagtgagaaacctacaaggtgagaacgaagaggaggatagtggagccattgtgacagtgaaaggaggtctaagagtcacagctccagccatgaggaagccacagcaagaagaagatgatgatgatgaggaagagcagccacagtgcgtggagacagacaaaggttgccaacgccaaagcaaaaggagcagaaatggcattgatgagaccatttgcacaatgagacttcgccaaaacattggtcagaattcatcacctgacatctacaaccctcaagctggtagcatcacaaccgccaccagccttgacttcccagccctctggcttctcaaactcagtgcccagtatggatcactccgcaagaatgctatgttcgtgccacactacaccctgaacgcgaacagcataatatacgcattgaatgggcgggcattggtacaagtggtgaattgcaatggtgagagagtgtttgatggagagctgcaagagggaggggtgctgatcgttccacaaaactttgcggtggctgcaaaatcccagagcgataactttgagtatgtgtcattcaagaccaatgatagaccctcgatcggaaaccttgcaggggcaaactcattgttgaacgcattgccagaggaagtgattcagcacacttttaacctaaagagccagcaggccaggcaggtgaagaacaacaaccctttcagcttcctggttccacctcaggagtctcagaggagagctgtggcttagagagccctttttgcatgtgctaccacacttttgtccttttgggctctagctagtgctggtagcagtaaataagaatgaataaaagaaacaaaggcttagatgccctttgttaagtgtagaataacgggtatagtaactatgtacccttgtgtaatgagtcactcaagtacctatgcgggaaaagcataaataaaagaagaaattccaat

SEQ ID NO: 7632 - DNA, 1335 bp, Glycine max
  Clone ID: 700676858_FLI
agaggacaaagcagcagaccacaagaccgtcaccagaagatctataacttcagagagggtgatttgatcgcagtgcctactggtgttgcatggtggatgtacaacaatgaagacactcctgttgttgccgtttctattattgacaccaacagcttggagaaccagctcgaccagatgcctaggagattctatcttgctgggaaccaagagcaagagtttctaaaatatcagcaagagcaaggaggtcatcaaagccagaaaggaaagcatcagcaagaagaagaaaacgaaggaggcagcatattgagtggcttcaccctggaattcttggaacatgcattcagcgtggacaagcagatagcgaaaaacctacaaggagagaacgaaggggaagacaagggagccattgtgacagtgaaaggaggtctgagcgtgataaaaccacccacggacgagcagcaacaaagaccccaggaagaggaagaagaagaagaggatgagaagccacagtgcaagggtaaagacaaacactgccaacgcccccgaggaagccaaagcaaaagcagaagaaatggcattgacgagaccatatgcaccatgagacttcgccacaacattggccagacttcatcacctgacatctacaaccctcaagccggtagcgtcacaaccgccaccagccttgacttcccagccctctcgtggctcagactcagtgctgagtttggatctctccgcaagaatgcaatgttcgtgccacactacaacctgaacgcgaacagcataatatacgcattgaatggacgggcattgatacaagtggtgaattgcaacggtgagagagtgtttgatggagagctgcaagagggacgggtgctgatcgtgccacaaaactttgtggtggctgcaagatcacagagtgacaacttcgagtatgtgtcattcaagaccaatgatacacccatgatcggcactcttgcaggggcaaactcattgttgaacgcattaccagaggaagtgattcagcacactttcaacctaaaaagccagcaggccaggcagataaagaacaacaaccctttcaagttcctggttccacctcaggagtctcagaagagagctgtggcttagagccctttttgtatgtgctaccccacttttgtctttttggcaatagtgctagcaaccaataaataataataataataatgaataagaaaacaaaggctttagcttgccttttgttcactgtaaaataataatgtaagtactctctataatgagtcacgaaacttttgcgggaataaaaggagaaattccaatgagttttctgtc

SEQ ID NO: 7633 - DNA, 1901 bp, Glycine max
  Clone ID: 700676932_FLI
cttaattattaacacttccttagttcaatatggggaagcccttcactctctctctttcttccctttgcttgctactcttgtcgagtgcatgctttgctattagctccagcaagctcaacgagtgccaactcaacaacctcaacgcgttggaacccgaccaccgcgttgagtccgaaggtggtttgattcaaacatggaactctcaacaccctgagctgaaatgcgccggtgtcactgtttccaaactcaccctcaaccgcaatggcctccacttgccatcttactcaccttatccccggatgatcatcatcgcccaagggaaaggagcacttggagttgcaattccaggatgtcctgagacgtttgaggagccacaagaacaatcaaacagaagaggctcaaggtcgcagaagcagcagctacaggacagtcaccagaagattcgtcacttcaatgaaggagacgtactcgtgattcctcctggtgttccttactggacctataacactggcgatgaaccagttgttgccatcagtcttcttgacacctctaacttcaataaccagcttgatcaaacccctagggtattttaccttgctgggaacccagatatagagtacccagagaccatgcaacaacaacaacagcagaaaagtcatggtggacgcaagcaggggcaacaccagcaggaggaagaggaagaaggtggcagcgtgctcagtggcttcagcaaacacttcttggcacaatccttcaacaccaacgaggacatagctgagaaacttcagtctccagacgacgaaaggaagcagatcgtgacagtggaaggaggtctcagcgttatcagccccaagtggcaagaacaacaagatgaagatgaagatgaagacgaagatgatgaagatgaacaaattccctctcaccctcctcgccgaccaagccatggaaagcgtgaacaagacgaggacgaggacgaagatgaagataaacctcgtcctagtcgaccaagccaaggaaagcgtgaacaagaccaggaccaggacgaggacgaagatgaagatgaagatcaacctcgcaagagccgcgaatggagatcgaaaaagacacaacccagaagacctagacaagaagaaccacgtgaaagaggatgcgagacaagaaacggggttgaggaaaatatctgcaccttgaagcttcacgagaacattgctcgcccttcacgcgctgacttctacaaccctaaagctggtcgcattagtaccctcaacagcctcaccctcccagccctccgccaattccaactcagtgcccaatatgttgtcctctacaagaatggaatttactctccacattggaatctgaatgcaaacagtgtgatctatgtgactcgaggacaaggaaaggttagagttgtgaactgccaagggaatgcagtgttcgacggtgagcttaggaggggacaattgctggtggtaccacagaacttcgtggtggcggagcaagccggagaacaaggattcgaatacatagtattcaagacacaccacaacgcagtcactagctacttgaaggatgtgtttagggcaattccctcagaggttcttgcccattcttacaaccttcgacagagtcaagtgtctgagcttaagtatgaaggaaattggggtcctttggtcaaccctgagtctcaacaaggctcaccccgtgttaaagtcgcataaatgacaagcatgatggtgtgaggatgaggccatcttatgaaataataacaaataaataaattttgtatgataataaaaagtatggcccatgtaccatcccagcgagcctatgtttatatctgagtggcgttgtacctttcaatcgccttaataaaatgtcagtcttcacgttttgtcttt

SEQ ID NO: 7634 - DNA, 1859 bp, Glycine max
  Clone ID: 700676958_FLI
actaaggatcccttcttcccttggtgacttggaacatcttctgaagttgaatctaagcagaaacaatttaacaggaattattccagcagaatttggaaatcttagaagtgttatggaaattgatctttcaaataatcaactctctggcttgattcctgatgaacttagtcagcttcaaaacatgatatccttgagacttgaaaataacaaattgactggcgatgtggcatcactttcaaattgcattagtctctctctacttaatgtgtcctataacaaactatttggtgttatcccaacgagtaacaactttaccaggtttccccctgacagtttcattggaaaccctggtctttgtggtaattggctgaatttgccgtgtcatggtgctcgcccttcagagcgagttacattatctaaggctgccattcttggaattactcttggtgcccttgtgattcttcttatggtattgctggcagcttgccgaccacatagtccctctccttttcctgatggatcatttgacaaaccagttaatttctcccccccaaagctagtgattcttcatatgaatatggcactacatgtgtatgaagatatcatgaggatgactgaaaacctgagtgagaagtatataattggatatggagcatcaagtacagtttataaatgtgttcttaagaattgcaagccggtggctatcaagaggatctattctcactatccccaatgtattaaagaatttgaaactgaacttgagacggttggcagcatcaagcaccggaatctggtcagtctccaaggttattccttgtccccatatgggcatctcctgttttatgactacatggaaaatggcagtctatgggatcttcttcatggacctaccaagaagaaaaagcttgactgggagctgcgtctaaaaatagcacttggagcagcacaagggcttgcttatctacaccatgattgctgtcctagaatcatccacagagatgtgaaatcatctaacattctattggatgcagactttgagcctcatctcactgattttggcattgccaaaagtctctgcccctcaaagtcccatacttctacttacataatgggcacaattggctatatagaccctgagtatgctagaacttcacgtctcactgagaagtctgatgtgtacagttacggtattgttttacttgagttgctaactggaaggaaagctgttgacaatgaatccaacctccaccatctgattttgtccaaggcagcaaccaatgcagtgatggaaacagttgatccagacattactgccacatgcaaggacctaggagctgtaaaaaaggtttatcagcttgctctattatgcacaaagaggcagccagctgataggccgacaatgcacgaagtgacacgtgtactcggaagccttgtgctgtcaaacaccccaccaaagcaactagctgcactaccacctgcttcaaatccatctgccaaagtgccatgctacgtggatgagtatgcaaacctcaagactccacacttggtgaactgcccctcaatgagcacctcagatgctcaactcttcctcaagtttggagaagtaatctctcaaaacagtgagtgaaagagtgagcggggattttgaaatgaaaatcaagtccaagaatcatgtatattatttaaaaaccaaaaaagagaagcgaaaaaatggatgaggggtaatagttaatgaaaatgtttataaaaagttttagtactagttttttttttttagtgttggttgatttgaacaaaaagaaagatattatgtatcatcatcatcacaatttgaaaggtgaagtaaatccaattcttgt

SEQ ID NO: 7635 - DNA, 1610 bp, Glycine max
  Clone ID: 700676992_FLI
agagagcaggcacagcaaaatgagtgccagatccaaaagctgaatgccctcaaaccggataaccgtatagagtcggaaggtgggttcattgagacctggaaccctaacaacaagccattccagtgtgccggtgttgccctctctcgctgcacccttaaccgcaatgcccttcgtagaccttcctacaccaacggtccccaggaaatctacatacaacaaggtaatggtatttttggcatgatattcccgggttgtcctagcacttatcaagagccgcaagaatctcagcaacgaggacgaagccagaggccccaagaccgtcaccaaaaggtacatcgcttcagagagggtgatttgatcgcagtgcctactggtgttgcatggtggatgtacaacaatgaagacactcctgttgttgccgtttctattattgacaccaacagcttggagaaccagctcgaccagatgcctaggagattctatcttgctgggaaccaagagcaagagtttctaaaatatcagcagcagcagcaaggaggttcccaaagccagaaaggaaagcaacaagaagaagaaaacgaaggaagcaacatattgagtggcttcgcccctgaattcttgaaagaagcgttcggcgtgaacatgcagatagtgagaaacctacaaggtgagaacgaagaggaggatagtggagccattgtgacagtgaaaggaggtctaagagtcacagctccagccatgaggaagccacagcaagaagaagatgatgatgatgaggaagagcagccacagtgcgtggagacagacaaaggttgccaacgccaaagcaaaaggagcagaaatggcattgatgagaccatttgcacaatgagacttcgccaaaacattggtcagaattcatcacctgacatctacaaccctcaagctggtagcatcacaaccgccaccagccttgacttcccagccctctggcttctcaaactcagtgcccagtatggatcactccgcaagaatgctatgttcgtgccacactacaccctgaacgcgaacagcataatatacgcattgaatgggcgggcattggtacaagtggtgaattgcaatggtgagagagtgtttgatggagagctgcaagagggaggggtgctgatcgttccacaaaactttgcggtggctgcaaaatcccagagcgataactttgagtatgtgtcattcaagaccaatgatagaccctcgatcggaaaccttgcaggggcaaactcattgttgaacgcattgccagaggaagtgattcagcacacttttaacctaaagagccagcaggccaggcaggtgaagaacaacaaccctttcagcttcctggttccacctcaggagtctcagaggagagctgtggcttagagagccctttttgcatgtgctaccacacttttgtccttttgggctctagctagtgctggtagcagtaaataagaatgaataaaagaaacaaaggcttagatgccctttgttaagtgtagaataacgggtatagtaactatgtacccttgtgtaatgagtcactcaagtacctatgcgggaaaagcataaataaaagaagaaattccaat

SEQ ID NO: 7636 - DNA, 2091 bp, Glycine max
  Clone ID: 700677051_FLI
agaaggtaatgctcttttgaagttgaggcagagaatagtgagtgacccttttgatgctttgtcaaattgggttgatgatgaggcttctgttgacccttgtaactggtttggagttgagtgctcagatggaagagttgtggtcttgaatttgaaggatctctgccttggaggaactctggcacctgagcttgtgaaacttgtcaacataaagtccattattttgcggaacaactctttctctgggaccatccctgaaggatttgtacagttaaaagaactggaggttttggatttgggatacaacaacttcagtggacatctacctgctgatctagggagtaatatctcactaacaatccttttgctggataacaatgaatttcttgttggtttatctcccgaaataaatgaactgaggatgctttccgaatgtcaagtagatgaaaatcagctgactaatgctgctaaaatgccagcttgtacagaaagagctaccacaaggcatattggtcaaggtaaaggtactcgtggctcacaacattctaatacttctcctgctgctaatcattaccagtttaatcgtgtggctgctccacctcttgagagcccttcttctccttctgcttccccatcaggctcagcaaaaccaccagtgccaaagctagctcctcataggaaaaatgcttctgattcttctcctccccactctacatcaggttctggaacactatctaaaactaaaagcacctcatcaaaggttcatacagttcctattttggctggagttataggtggtgctgtgtttcttattttttcaagcattggcatatatctttgtaaaacaaaggtagctaatgtcagaccttgggccatgggactaagtggacagcttcagaaggcatttgtaactggtgcgcaaaagttaaagagatcagatcttgaagcagcatgtgaagattttagcaatgtaattggtaattcacccattggtatactgtacaaaggaactttgtctggtggcgttgaaatagctgtagcttttgtttccataacatcatccaagaattggtcaaaaactttagaagctcaatttagaagcaagatagataaattgtcgaaagtgaaccacaagaattttgtgaatcttattggatactgtgaagaagaggagcctttcaccagaatgttggtttttgaatatgccccaaacggaacactatttgagcatctacacataaaagaggctgagcacttggattggggaacaagacttagagttgcaacgggtgtggcttattgcctgcaacatatgcaccaattagatcctcctatggccctaatcaagctgaattcttcagccgtttacctcaccgatgactacgctgccaaactctcagatttaagtttctccaatgacatagcctcagctgagacaagagctatggacaagccactagcaactccagaaagtaatgtttatagcttgggtgttctactatttgaaatggtcacgggtcgtcttccttattcagtagaacataaggattcacttgaaaactgggcatcacactatttagaagttgaccaacccctcaaagaaatagtggatccaattctagtatcttaccaagaagatcagctggaacaagttgcatcattgattacatcttgtgtccaccctgatccacagaagagaccaacaatgaaagatgtgagtgagagactgagagagataacaaaaataacacctgaatctgcggttccaaaactttctccactttggtgggcagagattgagattgcatctgcagaagcacgttgagatcagtgtagcagatttttaaaagtctttgagagctcttagcattgtgatcctttttttccttagctgaaggcataaaaaacttcttacttgaagtatctattgttgtaggacatggtcaaaagtgacgtgtgggggaccaaaatggtgtggtgaagttcttttgggtgctgtttttttttaaaaagaaattgtagcctatggaaatgcacctagaaaatagctttttgtatatcacttaatcaagatatttccaaatcttctcatcc

SEQ ID NO: 7637 - DNA, 1610 bp, Glycine max; identical to SEQ ID NO: 7635
  Clone ID: 700677092_FLI

SEQ ID NO: 7638 - DNA, 1382 bp, Glycine max
  Clone ID: 700677096_FLI
catggccaagctagttttttccctttgttttctgcttttcagtggctgctgcttcgctttcagttccagagagcagcctcagcaaaacgagtgcaagatctataacttcagagagggtgatttgatcgcagtgcctactggtgttgcatggtggatgtacaacaatgaagacactcctgttgttgccgtttctattattgacaccaacagcttggagaaccagctcgaccagatgcctaggagattctatcttgctgggaaccaagagcaagagtttctaaaatatcagcaagagcaaggaggtcatcaaagccagaaaggaaagcatcagcaagaagaagaaaacgaaggaggcagcatattgagtggcttcaccctggaattcttggaacatgcattcagcgtggacaagcagatagcgaaaaacctacaaggagagaacgaaggggaagacaagggagccattgtgacagtgaaaggaggtctgagcgtgataaaaccacccacggacgagcagcaacaaagaccccaggaagaggaagaagaagaagaggatgagaagccacagtgcaagggtaaagacaaacactgccaacgcccccgaggaagccaaagcaaaagcagaagaaatggcattgacgagaccatatgcaccatgagacttcgccacaacattggccagacttcatcacctgacatctacaaccctcaagccggtagcgtcacaaccgccaccagccttgacttcccagccctctcgtggctcagactcagtgctgagtttggatctctccgcaagaatgcaatgttcgtgccacactacaacctgaacgcgaacagcataatatacgcattgaatggacgggcattgatacaagtggtgaattgcaacggtgagagagtgtttgatggagagctgcaagagggacgggtgctgatcgtgccacaaaactttgtggtggctgcaagatcacagagtgacaacttcgagtatgtgtcattcaagaccaatgatacacccatgatcggcactcttgcaggggcaaactcattgttgaacgcattaccagaggaagtgattcagcacactttcaacctaaaaagccagcaggccaggcagataaagaacaacaaccctttcaagttcctggttccacctcaggagtctcagaagagagctgtggcttagagccctttttgtatgtgctaccccacttttgtctttttggcaatagtgctagcaaccaataaataataataataataatgaataagaaaacaaaggctttagcttgccttttgttcactgtaaaataataatgtaagtactctctataatgagtcacgaaacttttgcgggaataaaaggagaaattccaatg

SEQ ID NO: 7639 - DNA, 1079 bp, Glycine max
  Clone ID: 700677130_FLI
ggcccttctttataaaccacaaaatagtctctattcaaaagccatcccaaccccccacaaaccgcatttcatttcaaggcttgaaattgcgtgcagcttaatttcaagaatggccaaagcagcagaacaaagtcctgattctgggaatgtgtacacgctagcttctgtgagagaggatttggttaggcaagaggataccatcatttatggtctcattgagagagccaagttccctagcaattctcacacctatgatgaaaagtatgctcaaatccagggtttttgtggctcattggtggaatttgttgttaagaatacagaggccattcaagctaaggctggaagatacaaaaaccctgaagaaaacgccttcttcccagaaaatttaccaccatcaattgtgccatcttactccttcaaacagtttttgcatcctggtgctgcttcaattaacataaacaagtccatctggaaaatgtatttcaaagagttacttccattgcttgctacttcgggtgatgatggcaactatgcgcaaactgcagctaatgacctttcattattgcagtccatctctagaaggattcactatggaaagtttgtagctgaggtgaaattcagggatgctcctcaagactacgagcctttaattcgagctaaggataaagaaggattgatgaaattgttgacatttacaagcgttgaagagacggtgaggaagagagttgaaaagaaggctgtggtgtttgggcaggaagtgaatcttaacagtgatgacaatgacaatgaaaaccgtaaatttgatccatcagtggcttctagcttgtacaaaaattgggtgatacctctcaccaaggaggttcaggttgagtacctcttgcgccgtctagactgaaggcattacaatgcagttagaatttagaagaatggaagatgaatatgatgttgttgttcaaatgattaagctcttaagtgatcctttattgccaacttcatgtagctgttgattcagaaatattatttgtagctatagattgttacctttattttcatcggctttattaggaaaaggcattatt

SEQ ID NO: 7640 - DNA, 804 bp, Glycine max
  Clone ID: 700677191_FLI
aaggcactggagacagaggttatgaagattgatcctccaccaagaccgccaaattggggtgagctagaccttccattgaatgcatcatcttggagtgaggaggatctccaagatccagataagttctatgaaatgactgttcttcttaatgcccaaagagaaatctctgataagatcttggatgcacagtgggaaactaaatggcgtcaggacaagttgaatgagatgttggaggcaaaagtgaagccgtacatccaggatatagacaacgcagttcttcctgagcctattttattaaagccacaaaatcaggaaaagagacaacggcggaggtggttcttcttttgacaacatggataaagttactatatgcttgaacatgcttgtttgtagtcctaattttttgttataaatctgtaactatttattcactgttggatccccccacaagcacacatgttgtgcctctgttgtggccatcatttttgtggaggaaacaattgtttgtgacacaaaaaatacagcttatgaaaaggaaaatctagagaaacatagtagaacaagcaacacaagtcttcttcacacggccaaacctttgctgatgttacatttggtattatgtcaaatacattccgaagataccctatttagattattcctttttaattccgtgttgctgaaattccctgaaaatcaatccgtatgtgttaactacaaactcctattctgatcaatgaacaatcttcattcttcactgtgatgaataggtgaacgttaaaataatcaagttgctggtttgctttg

SEQ ID NO: 7641 - DNA, 1871 bp, Glycine max
  Clone ID: 700677219_FLI
tggggaagcccttcactctctctctttcttccctttgcttgctactcttgtcgagtgcatgctttgctattagctccagcaagctcaacgagtgccaactcaacaacctcaacgcgttggaacccgaccaccgcgttgagtccgaaggtggtttgattcaaacatggaactctcaacaccctgagctgaaatgcgccggtgtcactgtttccaaactcaccctcaaccgcaatggcctccacttgccatcttactcaccttatccccggatgatcatcatcgcccaagggaaaggagcacttggagttgcaattccaggatgtcctgagacgtttgaggagccacaagaacaatcaaacagaagaggctcaaggtcgcagaagcagcagctacaggacagtcaccagaagattcgtcacttcaatgaaggagacgtactcgtgattcctcctggtgttccttactggacctataacactggcgatgaaccagttgttgccatcagtcttcttgacacctctaacttcaataaccagcttgatcaaacccctagggtattttaccttgctgggaacccagatatagagtacccagagaccatgcaacaacaacaacagcagaaaagtcatggtggacgcaagcaggggcaacaccagcaggaggaagaggaagaaggtggcagcgtgctcagtggcttcagcaaacacttcttggcacaatccttcaacaccaacgaggacatagctgagaaacttcagtctccagacgacgaaaggaagcagatcgtgacagtggaaggaggtctcagcgttatcagccccaagtggcaagaacaacaagatgaagatgaagatgaagacgaagatgatgaagatgaacaaattccctctcaccctcctcgccgaccaagccatggaaagcgtgaacaagacgaggacgaggacgaagatgaagataaacctcgtcctagtcgaccaagccaaggaaagcgtgaacaagaccaggaccaggacgaggacgaagatgaagatgaagatcaacctcgcaagagccgcgaatggagatcgaaaaagacacaacccagaagacctagacaagaagaaccacgtgaaagaggatgcgagacaagaaacggggttgaggaaaatatctgcaccttgaagcttcacgagaacattgctcgcccttcacgcgctgacttctacaaccctaaagctggtcgcattagtaccctcaacagcctcaccctcccagccctccgccaattccaactcagtgcccaatatgttgtcctctacaagaatggaatttactctccacattggaatctgaatgcaaacagtgtgatctatgtgactcgaggacaaggaaaggttagagttgtgaactgccaagggaatgcagtgttcgacggtgagcttaggaggggacaattgctggtggtaccacagaacttcgtggtggcggagcaagccggagaacaaggattcgaatacatagtattcaagacacaccacaacgcagtcactagctacttgaaggatgtgtttagggcaattccctcagaggttcttgcccattcttacaaccttcgacagagtcaagtgtctgagcttaagtatgaaggaaattggggtcctttggtcaaccctgagtctcaacaaggctcaccccgtgttaaagtcgcataaatgacaagcatgatggtgtgaggatgaggccatcttatgaaataataacaaataaataaattttgtatgataataaaaagtatggcccatgtaccatcccagcgagcctatgtttatatctgagtggcgttgtacctttcaatcgccttaataaaatgtcagtcttcacgttttgtcttt

SEQ ID NO: 7642 - DNA, 1718 bp, Glycine max
  Clone ID: 700677249_FLI
gtccttaaacactcatcagtcatcaccatggccaagctagttttttccctttgttttctgcttttcagtggctgctgcttcgcttcagttccagagagcagcctcagcaaaacgagtgccagatccaaaaactcaatgccctcaaaccggataaccgtatagagtcagaaggagggctcattgagacatggaaccctaacaacaagccattccagtgtgccggtgttgccctctctcgctgcaccctcaaccgcaacgcccttcgtagaccttcctacaccaacggtccccaggaaatctacatccaacaaggtaagggtatttttggcatgatatacccgggttgtcctagcacatttgaagagcctcaacaacctcaacaaagaggacaaagcagcagaccacaagaccgtcaccagaagatctataacttcagagagggtgatttgatcgcagtgcctactggtgttgcatggtggatgtacaacaatgaagacactcctgttgttgccgtttctattattgacaccaacagcttggagaaccagctcgaccagatgcctaggagattctatcttgctgggaaccaagagcaagagtttctaaaatatcagcaagagcaaggaggtcatcaaagccagaaaggaaagcatcagcaagaagaagaaaacgaaggaggcagcatattgagtggcttcaccctggaattcttggaacatgcattcagcgtggacaagcagatagcgaaaaacctacaaggagagaacgaaggggaagacaagggagccattgtgacagtgaaaggaggtctgagcgtgataaaaccacccacggacgagcagcaacaaagaccccaggaagaggaagaagaagaagaggatgagaagccacagtgcaagggtaaagacaaacactgccaacgcccccgaggaagccaaagcaaaagcagaagaaatggcattgacgagaccatatgcaccatgagacttcgccacaacattggccagacttcatcacctgacatctacaaccctcaagccggtagcgtcacaaccgccaccagccttgacttcccagccctctcgtggctcagactcagtgctgagtttggatctctccgcaagaatgcaatgttcgtgccacactacaacctgaacgcgaacagcataatatacgcattgaatggacgggcattgatacaagtggtgaattgcaacggtgagagagtgtttgatggagagctgcaagagggacgggtgctgatcgtgccacaaaactttgtggtggctgcaagatcacagagtgacaacttcgagtatgtgtcattcaagaccaatgatacacccatgatcggcactcttgcaggggcaaactcattgttgaacgcattaccagaggaagtgattcagcacactttcaacctaaaaagccagcaggccaggcagataaagaacaacaaccctttcaagttcctggttccacctcaggagtctcagaagagagctgtggcttagagccctttttgtatgtgctaccccacttttgtctttttggcaatagtgctagcaaccaataaataataataataataatgaataagaaaacaaaggctttagcttgccttttgttcactgtaaaataataatgtaagtactctctataatgagtcacgaaacttttgcgggaataaaaggagaaattccaatgagttttctgtc

SEQ ID NO: 7643 - DNA, 2486 bp, Glycine max
  Clone ID: 700677375_FLI
tatgccttgacagaggttgaagatatactttgtgctcattatgttgattgcatgaaatatcatattggagtgttggttgaaaaatctcttagttggtatggtagagttacattacatgacttgattgagcagatgggtaaagaaattgtgaggcaggaatcaccaaaagagccagggaagcgcagtagactatggttaccggaagatataattcaagttttggaagtcaacaaggtgggtgagactaatgagtgatttggtttcatatcttgatttatcttgttttactatcatatgttcaaatcatagttgttgtttttctttataataagtaaattctctaataaaaatgtgtgttgaagtcttacatatacttgtgttgtgttggtggttgattcacgccttttggattaacagggaactagtgaaattgaaatcatgtctggatttaccgggatttgacaaagaagaaataatagaatggaatagaaaggtcttcaaggagatgaaaaacctcaaaacacttattattagaaatggtaatttttccaaaggtcccaaatatcttccaaatagtttgagagtactagaaaggtggaaatatccttcacattgtttaccatctgattttcatccaaaaaaacttaccatatgcaagttaccccatagctgaggcaagcttaaagagtacattttcctcatcttgtgatttaataaattgactttagattattcattctgttcttatttctttctttttccttttttttttctgtatttgcagaagttcgtggatctaagaattttgaatttgatcggtgtaaatgcttaacacagatacctaacgtatctggtctcccaaatttggaggaattttcatttgaacgttgtctgaatttaattacagttcacgattcaatcggttttctggataaacttaaaatattgagtgcttttagatgcaaaaaacttaggagttttccacctatcaagttgacctctcttgaaaaacttgatctttcattttgttacagtcttgagagttttccagaagtattaggaaagatggaaaacataagggaactttatttgttgaaatcctccataaaagaaattccattttcatttcaaaatcttaccggacttccaaaattaccgactatctttttcaagcagtgcaatggttaaggtgccaagtagcattatcatgatgccagaactgactaatacttccgctacgggattgaaagggtggaaatggttaaaacaggaagaggatgaaggtaaaatgggatcaatagtatcttcaaaagtaaaacagcttagcaccttaagttgcaacctggatgatgattttttttcaatagatttcacgtggtttgctcatgtgaaggaattatacatagctgagaataatttcacaatccttcctgaatgcatcaaagaatgtcaatttttaaggttacttgatgtgtgtgattgcaagcatcttcgagaaattagagggattccaccaaacttaaagcatttctttgcaataaactgtaaatcattgacttcctcaagtataagcatgttcctaaatcaggaactgcatgaggcaggaaacactgtgttttgtttgccaggagataggattccagagtggttcaatcagcaaagcaggggggaccttcaatttctttctggtttcgcaataagttccctgacaaggttctttgtcttcttgttgcacctatgcaagaccaaatttttcgtcccatggtgttcatcaatggcaatgaatgttcctcttatagtcaccattacctgataggaatgcaccatgcatatctttctgatctacgagagataaaattcagaaatagtccctatgaggtgcctgtcgaaaatgactggaaccatctgaaggttacaggtccatgtggtttagatacctatatccaccctgtaaaaattggaatccatatattcaaacaggaaaatagcatggaggatgttcaattcactgatccttatagcaagagaaaatcagatgatgatctagaaagtttggaatcacaaaccaccagttgctaaaagaggctaggtttgtggacatggaactttcacaacagtatctgtgcaacagcaacaatgtatagttttatggtcacatctattgagctgggcagtgggcattgtatgatattgtgaagttggattcaaattcaatggagtcaaagtatataaggggcacaattagtgtcaaaggtaaattatcttgtggcttgctacatcacagtaactgattttgattgcccttattattgtgatctgtataaatgtaacaaaagaaaataagtattagaactagagtgcttaattgggaaacatgattcatttttttttcttgaagaataaatttgcttctgttagagaaactgaatgaatatcattagatgtgaattactagtagtaagaaaatactatcataaattttgatt

SEQ ID NO: 7644 - DNA, 747 bp, Glycine max
  Clone ID: 700677410_FLI
gaacaagttatagacgtggaagttggctggggttacatgaggaaatgagactcgacatgcaaagaatttggagaagaaatttagggagagatgatagatgtattgctgataatgggaaggagatttccattcttggatgaggatgttataaggcttttgctcaatattccattgtgggaggtagccaacctcgatcaacctagtggcattggtgataaaaggattttaagagaggttgctgaattgcttggtttatatgaagcagcagttctgccaaaacgagcaatccagtttggttcaagaattgcaagggaatcaaatcggaagaattttggaagcaatcgagcagcaaatcaggcatcggctggcagcgtaacgattcataggaaatccaatttttgttgattttttttttggcatgcggaacacattatcctttctgatccaaaccattaatagacgtagttgtttgaaaccgtgtgtgcctatatatttgatcaagaaattggacagcattttggaactacttgagatgttatgcttggtggtacctttactatatctgaagggttttgatcaataatatctgtaaggaggattcgacccccagagctctccctaacgccaaaatttctgcgagcttgacctcaaacgtgcttgtaaaccacttttgagtcttggctagatactgattttgagattaattgtatgacacgatacaagtttatggtgattttcatgaacaac

SEQ ID NO: 7645 - DNA, 1088 bp, Glycine max
  Clone ID: 700677424_FLI
caggaaccacatactatgtggtcaaccctgacaacaacgaaaatctcagattaataacactcgccatacccgttaacaagcctggtagatttgagagtttcttcctatctagcactgaagctcaacaatcctacttgcaaggattcagcaggaacattttagaggcctcctacgataccaaattcgaggagataaacaaggttctgtttagtagagaggaagggcagcagcaaggggagcagaggctgcaagagagcgtgattgtggaaatctcgaaggaacagattcgggcactgagcaaacgtgccaaatctagttcaaggaaaaccatttcttctgaagataaaccttttaacttgagaagccgcgaccccatctactccaacaagcttggcaagttctttgagatcaccccagagaaaaacccccagcttcgggacttggatatcttcctcagtattgtggatatgaacgagggagctcttcttctaccacacttcaattcaaaggcgatagtgatactggtaattaatgaaggagatgcaaacattgaacttgttggcctaaaagaacaacaacaggagcagcaacaggaagagcaacctttggaagtgcggaaatatagagccgaattgtctgaacaagatatatttgtaatcccagcaggttatccagttgtggtcaacgctacctcaaatctgaatttctttgctattggtattaatgccgagaacaaccagaggaacttcctcgcaggttcgcaagacaatgtgataagccagatacctagtcaagtgcaggagcttgcattccctgggtctgcacaagctgttgagaagctattaaagaaccaaagagaatcctactttgtggatgctcagcctaagaagaaagaggaggggaataagggaagaaagggtcctttgtcttcaattttgagggctttttactgaataagtatgtactaaaatgtatgctgtaatagctcatagtgagcgaggaaagtatcgggctatgtaactatgactagagcttcaactatgaataaataaatcgacagcatatgatgcttttgttttgtgtccttc

SEQ ID NO: 7646 - DNA, 543 bp, Glycine max
  Clone ID: 700677445_FLI
gggaaaagaaaattggccttacaatccccagagtgaccatctcagaagatgatcttctggctgtagcagcagaaaattgcataccgcgaagtattgtggcatctttcactcatgacatattcatcaaaggttgtcaagttaacttcaacatagatggacttggtgatgttgagattagcactctctatcctgatgaagcattcagaagcttggaggattgcttcgagggctttgctcttatgatcgatgacaagattaataaaggggaaaataaaattaccggcacaaaatctgtagtggaagcagtgccattcacagcttcctgtggagaagaatcacctcctcaaaaatgttctaactttgttgttaccaattactaggctttggtgaggtggaaatgtattgagtcattagaaatggaccttttatgttgatgttatttcgaagactgttttatctaaagtgttttattgtattcctagagtatgttcttaggtgcaacaaattcttgttagttgttacctgttactctgctttggtgtc

SEQ ID NO: 7647 - DNA, 460 bp, Glycine max
  Clone ID: 700677523_FLI
tatgaaattgcgttgagccaaataaggagcaaccgcgaggcgattgacaagattgtggaagttctattggagactgagacaatgtctggagatgaattccgagctctcctgtccgagtttgttgaaattcctgctgaaaatcgggtccctccttcaactccctcaccagttgctgtttgaattgcctatatgccactgcaatgtagtgtagctttccacttactgaattttctgaaattgtgaaatatttgtaatatacccctggctccaatttttagtaatgacaagatcctagcttgcttctttatttcttttttcttgtgttggcaacggaaaatgtaagtttcttcacaattagtacataatgtaaccttagtgaatagtaatgatattaactcattgtatcattgtaactggtgagatgtaatgtttagtttgactataaatgtaatgtttacac

SEQ ID NO: 7648 - DNA, 1133 bp, Glycine max
  Clone ID: 700677642_FLI
tgaagatgccatgccagtatctagttcaaagccaagtactagaggtcgaaaagggtcatctggtgcgtctcaaactacaaccagaggaaggggcaggggaagaggaagaggtagaggttccagcaccatgaagcagacaactattgatggagctttagggtttcgcgtttctcagaggtctgcatcagttgctgcagcaactgccatccgaagtggtgctgacgatgataacttggcttctgcttcaagtgatgatgccaataaaaatgatgttgaagagatcgatgatagttcggaaaatgaatccaatctaccaggacagaagagggctgcttcaaagggaagaggtagaggatctacacagtcttctaaacgcggaaggaaatcagataactcttcaatccatagaatgctcgtgaacaatgatgatgacgatgacgatgacgacaccgacatcagaaagagattaaataagtctcaacctcgggttactaaaagctatggagctctaagaaggtgaacaatctgttagatgtgatgttttctaccagccccggtatcaagataaatgctgtcataggctgaattaatagctgtattacattatatagtaaaatattgagtgagtgtgagttcgactagcttagtaacgtcttgcctgagattcggagatacaccggttcagcagaatagagttaagtaatgttatatgtgggcactgacgaaagcaaacccagctcgagaatgggttctgcagcattgcagccaggttgtgttatgctgaatgctttctttgtctggccaactacttaagaagttgttcttgagtttcaatgactacttacaagaattgtgttcaacacaagaagttttagggttgtcggctctagaccagaacccatttagtagtgggccacttcctgatttttctaggctttcatacttaaagacattgagacttcaaaataccaacattgttgggccattatcatttgaccacttgccccatcttgatgttttggatctaagtttaaaccatttgagtggaccaattcctatgttcaaggtcactaaatttgcctcattatactatttggacctttccaacaatgaattgagtgggaagctttcat

SEQ ID NO: 7649 - DNA, 627 bp, Glycine max
  Clone ID: 700677663_FLI
ggctggaaagggttctgcaactttgtcaatggcctatgctggtgccctttttgctgatgcttgcctcaagggcctcaatggagtcccagatgttgtcgagtgctctttcgtgcaatccactgttactgaacttcccttctttgcttccaaggtgaggcttgggacggttggtgtggaggaagttctgggcttggggcacctctcagattttgagcaacaaggcctcgaaagccttaagcctgaactcaaatcatcaattgagaagggaatcaaatttgccaaccagtaattgaacatgttatcacatacatgtctggtaggttactggatattcctttaagaaccaaatcaaattttgcattctcagaaccattgatgtattgttgtcggcagtggtgtggcggttttgttgttttatttagtgtaggtatacgccatggtttaataattaaagtctgagagctgtttgttgccaaagggattgaacgatcttaaaaccaggtttaggatttggcattccattaataatggtcccttttaactgtatggtttcacttaatgtaattgcagggtgttgtaccctttattcacattttttctcacttaaatatgtttttgatttctgtg

SEQ ID NO: 7650 - DNA, 1061 bp, Glycine max
  Clone ID: 700677709_FLI
aggaaattatggacaagaccaccaagcgttgcaacattcttcatcatctgcacctttggtgcgtgatgattgccttacacaggctccacaactggaacttgttggccactcaattggatacgctccttttataggaatgcctcatgccagaatggctttgccccttgagatggctcaagagcctgtttatgtgaatgccaaacaataccaaggaattctgagacgaagacaggctcgtgccaaagcagagcttgaaaagaaattaataaaagtcagaaagccttatcttcatgaatcccggcatcagcatgctataagaagagcacgaggtaatggagggcgttttgcaaagaaaactgaagttgaggcttcaaaccacatgaatgaggaaaaggatatgggtactggccaagtcccattgtcacggtcaattagttcatctggttttggatcactaccctctgattctgccgagacctggaattcgcctagtgtgcaacaaggtgcaagaggatctcaagtgcatgagagatttgaagaacgcaactatgcaaatgttttgcagtcatcatctacttcttgtttgcactcgggtgaaagagcggaggaaggggactgttcaggtcagcaacggggaagcatctcgtcggagcacacctcacagaggcgtcttgctattcagtaaaccattgcatggagtttgatgctgaggttggtatataattagtgtagtagtaggttgagtaccttggttatctatctgtaaacattggcaatttgcatgtcaagcggcaaatcattcttggctgtgtttctgctgttcatgatatggggagaagaatatgattgattggaccatcatacttgtgttgttgaaatcaacccgtccttcattaaattctctttttcattttgtacaaagatagtagtgagcaaagtcaagccaacgaatcagaagacttgatgaaaaaaactctttgctctactgactcgctttcctatggcggctttatttatgtaactcaccggttattaatgttaaataagagacatcttatgag

SEQ ID NO: 7651 - DNA, 1417 bp, Glycine max
  Clone ID: 700677752_FLI
gttggtgtggtttggttttactttaggtacaagaatttccaggactcgaagagggctatcgataagtcgaaatggacgttgatgtcgtttcataagctgggttttagtgaagatgagattttgaactgtcttgatgaggataatgtgattggaagcggatcgtccgggaaggtctacaaggttgtgcttagcagtggggaggttgtggctgtgaagaagatatggggaggggttaagaaggaggtggagagtggggatgttgagaagggtggtagggttcaggacaatgcttttgatgctgaggttgaaactttaggtaaaatcaggcataagaacattgttaagctgtggtgttgctgtaccactagggattgcaagctcttggtttatgaatatatgcctaatggaagtcttggtgatttgcttcatagcagtaagggagggttgttggattggccaacaaggtacaagatagctgtggatgctgcagaaggcctctcttatctgcaccatgactgtgttcccgcaattgttcatagagatgtgaaatctaacaatattctgttggacgtggactttggtgcgagggtggctgattttggagtagctaaggcggttgaaaccacgcccaaaggagctaaatccatgtccgtcattgctggctcttgtggctatattgcaccagaatatgcatatacacttagagtgaacgagaagagcgacatatacagtttcggggttgtcatactcgagttggtcactggaaaacgccccgtggaccctgaatttggggagaaagacttggttaagtgggtgtgcacaaccttggaccagaaaggcgtggaccatttaattgatccaaggcttgatacttgtttcaaagaagagatttgcaaggtcttcaacattggactcatgtgcactagtcctcttcctatccaccggccttcaatgagaagagtggtgaagatgttgcaagaggtgggaacagagaaccaaaccaagtctgcaaagaaagatggaaagttatccccttattactatgacgatgcctcggatcatggaagtgttgtttaatgaaagacttgcaagggttggactatttgatgatcctggaagggggagttcgaagcttttcttttactataagagccaacttccctccatgttttccgcgcatgctttgctttacaaaagttgactaaagaaaagagaaattagaaaatagcattttttttggggttgaaaatagaggcttgaggagttgatgttttgccctataaagtatgtcaatatcaagaatcttccctaccaacgttaaattgatgtttgcatcacaaaattgtattcagaaatgatatttccatcgttaaaaagtttattttttggagtagatttaatagaaagacttttagct

SEQ ID NO: 7652 - DNA, 1078 bp, Glycine max
  Clone ID: 700677756_FLI
tgtctcacttcggacgttcgggtcccccagacatttccgacacttactctcttctcgttctgaacatcaccttccgtaccaccgccgacgacctattccctctcttcgacaagtatgggaaggtcgtcgacatcttcatccccaaggatcgaaggactggtgaatcgaggggttttgcgttcgtgcgttacaagtatgctgatgaggctcagaaggccgttgagaggctcgacgggagaatggttgatggtcgcgaaataacggtccagtttgcgaaatatgggcctaatgctgaaaggattcacaaaggaaggattattgaaacatccccaagatcaaggcgatcaaggagccgtagcccaaggaaaaggcatcgtgatgattacagagacagagattataggagaagaagtcgcagcagaagttatgataggtatgaacgtgacaggcatcgtgggagagacaaagattatcgtcgcagaagtaggagccgtagtgccagtcttgattacaagggtcgtggtagaggacgctatgatgatgagcgtaatagtagaagccggagcagatcagttgatagccgctcccctgcacgacgcagtcctagtcctcgaaggagtccctcccctcagaggagcacttcccctcaaaggagtacttcccctaggaagagtccacggggtgaaagtcctgcaaatcgtagctgtgaggaacgttcccctacccctcgcagtgtctcaccacgcggtcgccctgatgcttcacgaagtccttcccctcgaaattcaaacggggatgaataagctatgtttttcatgaaaaattctggagacgtcggactattgcacctgtagctgttttgccattgttggatcttttagtctatgtgaatggtcttatcagagtcattgaagaattttatgatctaagtgctatttggtagggtcagacttcctgatgtttgaatggtttttatatttggacttgctatgttgtctatttcagtgtttggtaactattagaccttgcagttgataggttattatctcagtttgagggattttgccattttattttc

SEQ ID NO: 7653 - DNA, 673 bp, Glycine max
  Clone ID: 700677771_FLI
cccagagaaaaacccccagcttcgggacttggatatcttcctcagtattgtggatatgaacgagggagctcttcttctaccacacttcaattcaaaggcgatagtgatactggtaattaatgaaggagatgcaaacattgaacttgttggcctaaaagaacaacaacaggagcagcaacaggaagagcaacctttggaagtgcggaaatatagagccgaattgtctgaacaagatatatttgtaatcccagcaggttatccagttgtggtcaacgctacctcaaatctgaatttctttgctattggtattaatgccgagaacaaccagaggaacttcctcgcaggttcgcaagacaatgtgataagccagatacctagtcaagtgcaggagcttgcattccctgggtctgcacaagctgttgagaagctattaaagaaccaaagagaatcctactttgtggatgctcagcctaagaagaaagaggaggggaataagggaagaaagggtcctttgtcttcaattttgagggctttttactgaataagtatgtactaaaatgtatgctgtaatagctcatagtgagcgaggaaagtatcgggctatgtaactatgactagagcttcaactatgaataaataaatcgacagcatatgatgcttttgttttgtgttc

SEQ ID NO: 7654 - DNA, 829 bp, Glycine max
  Clone ID: 700677817_FLI
ctctcgctgcttgcaattagtcctcttccaacaatccgcacctaaactctagggttctgacatggacactggtggaaagatcaagaagggcgccggagaagaaagggcggcggccaaaagaagaagccggtttcaaggtccgtcaaggccggtctccaattccccgtcggaagaattggccgttatttgaagaaaggaaggggcgcccagctgttcggtaccggtgctcccgtttacttggccgcagttctcgagtacctagctgctgaggtaacatatcactaatttgcatcacttaatcttgattgactatgattaattatgtgttgtgaaattgaattgtcttgattggattgtgaaggtgcttgagttggctgggaatgctgcacgtgacaacaagaagaacaggattattccgagacatgtgctattggctgtgaggaacgatgaggagttggggaaattgcttgctggtgtcaccattgctcatggtggtgttcttccgracattaaccctgttttgttgcctaagaagactgagagggcttccaaggagcctaagtctccatccaaggctactaaatctcctaaaaagtcttaactgacttagtttattgtttctctatttagtgtgcacaaaatgtaaatctgtgtttaggttccttcttgtatcaccattatttgtagttctcaagtcgctgtttctttttcacattttcattcaatctgttgagacagcaagctctcagtaatggattgatttaattttcttatattcgtataattgtatcccgccttctctctatcgaaagattgcgcaatttgattt

SEQ ID NO: 7655 - DNA, 1965 bp, Glycine max
  Clone ID: 700677922_FLI
ccaaatggctattccttcactaataaaccagccacaaagaacaccctctctcacattctccttcctcctctttctcgctatctgcaccccattggatgctgctcacaccgacttcgcaggttcagcctgcctcaaagtttcccctagccacttcgccggctcggtcaccgaagtcatcgctgccatacgtcaactcgcttcgatcctctcacgcttcggctctcccttggccaacttccgcctcagcaccgccatcgccgactgcctggacttgctcgacctctcctccgacgtcctctcctgggccctctcggcctctcagaaccccaaagggaagcataacagtacggggaacctgagttcggatttgaggacatggctaagtgcggcgcttgcgcatccagagacgtgcatggagggattcgaagggacaaacagcattgtgaagggtttggtctcggcaggcatcgggcaagttgtgtcgttggtggagcagcttcttgcgcaagttcttcccgcacaggatcaatttgacgccgccagcagcaaggggcaatttccttcttggattaagcccaaggaaaggaagctgctgcaagcaattgcagtcactcctgatgtcactgtagctttagatgggagtgggaactacgctaagatcatggatgcggtgcttgcggctcctgattatagcatgaagcgttttgtgattttggtaaagaagggtgtttatgttgagaacgtggagatcaagaagaagaagtggaatattatgattcttggacaggggatggatgccaccgtcatctccggtaaccggagtgtcgtcgacggctggaccaccttccgctcagctacattcgctgtgagtggcagagggttcatagcaagagacatatcctttcagaacacagcagggcccgagaagcaccaagcagtggcactaagatcagactctgacctttccgtgttcttccgatgtgggattttcggttaccaagacagtctctacacccacacaatgcgccaattcttcagagactgcacaatcagcggcacagttgattacatcttcggtgacgccactgcagtgttccaaaactgcttcctaagagtaaaaaaaggcttaccaaaccaaaagaacacaatcacagcacacggtagaaaagacccaaatgaaccaaccggtttctcattccagttctgcaacataactgcagattctgatcttataccttctgttggaaccgcacaaacgtacctggggagaccctggaagagttactcacgaaccgttttcatgcaatcgtacatgagtgaggtgataggggcagaagggtggttggagtggaatggaaactttgcattggacacattgtactatgctgagtacatgaacactggagcaggtgctggagttgctaaccgtgtgaagtggccagggtaccatgcattgaatgattcgagccaggctagtaacttcaccgtgtctcaatttattgaggggaatctatggttgccttcaactggagtaaccttcactgcgggactcacagtttaacagaaataaactactgccacgccttggcactctcttgtacttaattatataaagttattatatatttatagtttatatcataggaagaaaaaaaaggtattataagaaagaggtgaatgggtccgtgttcactttaattaattggtacttgattattaaagattttccattttttggtataggagtacttggggagttcggtgttttttttcttcttttttttattaaagggaggctatagccattacaaacgaataactctagggaaacaagttcccatacaatcactccaaagcaaacccttacaatctacaggaagtagctcgaaaatgtgcactcctatagggatgtcaagacccttggctgccaaacaatcagctacattatgcaacatttgtttcctg

SEQ ID NO: 7656 - DNA, 824 bp, Glycine max
  Clone ID: 700677948_FLI
gagatgtcggatgcgccaccgagcccgactcatgagagtgggggcgagcagagcccgcgcggttcgtcgtccggcgcgagggagcaggaccggtacctcccgattgccaacatcagccgcattatgaagaaggctctgcctcccaacggcaagattgcaaaggatgccaaagacaccatgcaggaatgcgtttctgagttcatcagcttcattaccagcgaggcgagtgagaaatgccagaaggagaagagaaagacaatcaatggagacgatttgctatgggccatggccactttaggatttgaagactacatagagccgcttaaggtgtacctggctaggtacagagaggcggagggtgacactaaaggatctgctagaagtggtgatggatctgctacaccagatcaagttggccttgcaggtcaaaattctcagcttgttcatcagggttcgctgaactatattggtttgcaggtgcaaccacaacatctggttatgccttcaatgcaaagccatgaatagtttagatgcttctacgcatcttatttatttccctttaatgcttgtacgcatggcatgggtggaaacaattgtctggtgatttaatatttaggttctcgtgtagaagggtgtcagaattttgttacggtactaatgtagatttttattaatacatgtcttatttagctttgtaatacctactcaagggagagatgtgtttagggttatgctagtgattcgccatgtagcttgtcagggtgagaagcacttgcttttagagttttctttagattattatataatatataatatttgcagac

SEQ ID NO: 7657 - DNA, 659 bp, Glycine max
  Clone ID: 700678135_FLI
ttaaaagccggagtaaagactgggaagaccagcttggagcagatatcaagagtttatggcaatcaggcagtggttgttagtatcgatccgcgtagagtgtatgtaaaggatcctaatgatttgcaattgaagaccataagggtttcaagtccaggtccaaatggagaagaatatgcatggtatcaatgtacagttaatgggggacgagagggccggccaattggtgcttatgaactagcaaaagcagttgaagagcttggtgctggtgaaatactacttaattgcatcgattgtgacggtcaagggaaaggatttgatgtagatttaattaagttgatatcagatgctgtaagtatccctgtcatcgcaagtagtggtgccggtgctcctgaacacttctctgaggtgttctataaaacaaatgcatcagcagcacttgctgctggcatttttcacaggaaagaggtgcctattcagtcggtaaaagagcatttgttgaaggaaggcatagaagttcgaatctgatcatatgcatttagtggtaaaatttttgagatgcacttcataataatcaaaccttgtacgttatccctttttgtgtaatctaacgaagctctcaaaatgtcaaccttttggatcatgaaaagattttcccaacg

SEQ ID NO: 7658 - DNA, 1510 bp, Glycine max
  Clone ID: 700678139_FLI
gtccaaagttcttgccgacaagggggtctccgatgtcgagaacggcgctggtcatgctaatggcaactctgcggtcgcagctgtggcggtggggaatggcggtagcaaggcggcggaagggaacgcgaagaagttggtgttttttgggaatgcggcgagggcgtttgatttggaagatttgcttagggcttcggcggaggttttggggaaagggactttcgggacggcgtacaaggcggtgttggaggcggggccggtggtggccgtgaagaggttgaaggacgtgaccatttcggagaaggaatttagggagaagattgaggcggtgggagcgatggatcacgagagtttggtgcctctcagggcttactatttcagcagggatgagaagctcctcgtctatgattacatgtccatgggaagcttgtctgcgcttttacatggaaacaaaggagctggtaggacaccactgaattgggaagtgagatcaggcattgcacttggagctgcccgtggcattgagtacctacattcacgagggcctaatgtttctcatggaaatatcaagtcatcaaacatcctcttaaccaaatcatatgatgccagagtgtctgactttggccttgcacaccttgttagcccctcctctacccctaaccgtgtggccggctaccgtgcaccggaggtgactgatcctcgcaaggtgtctcagaaggtagatgtgtacagttttggtgtgttgctcttggaacttctgactgggaaggcacctacccatgctctcctgaatgaggaaggagtggacctccccagatgggttcaatctgtggttagagaagagtggacttctgaggtctttgatcttgagctccttaggtatcagaatgtggaagaggagatggttcagttgttgcaacttgcagtagattgtgcagcacaataccctgacatgcgcccttcaatgtctgaagtggtaaggcgcatacaagagttgcgaaggtctagcttgaaagaggaggaccaggaccaaatccaacatgacaatgatatacagttatagaagaacatgtatcttctcccatatttttacttgctaaatcctgtgcgtaagttgcttgtattctgttgttagcttgggccggcctcaaatttctttccttggcaccaaacttttgaattttcttcctcctcaaatctccattgtgccatctccccccttttccttcccaatcaatacattggggggaagtggatatctgttccattagttattgttggattctggttgattgtaattattacttctgctttaacatgccttttacttttgttgaaaccttattatgtctgttgaaaatttgtaattgagatgttatagtagctgtcgttggatggttggttgcgatgtctcgtcggtggtgtgttttattattgccaaaaaagattattgtgaacgtgatcgccaccttcgtgaggatgggcgatttatgccccaaaccaacttttgatt

SEQ ID NO: 7659 - DNA, 1432 bp, Glycine max
  Clone ID: 700678168_FLI
tgcagaccgagctagctagctagcaagcaagcacagagatggaggcaaagcgaggccatgccctcatgtgcttggcacgtgtttcactcttcctctgcgctctaaccctatccgctgctcacggaagcaccacggttcaagacatcgcgagaaagttgaaactcggggacaacgagcttctgcgcacggagaagaagttcaaggttttcatggagaattacgggaggagctactccacagaggaggagtatttgcgccgtttggggattttcgcccagaacatggtcagagcggcggagcatcaggcgctggaccccaccgccgtccacggcgtcacgcagttctccgatctcaccgaggacgagtttgagaagctctacactggcgtcaatggcggcttcccgtcatcgaataatgccgccggcggtattgcgccgccgttggaggtggacgggctgccggagaattttgattggagagagaaaggagctgtcaccgaagttaagttacagggtagatgtggatcatgctgggctttcagcaccacaggatctatagaaggagccaattttcttgccaccggaaagctcgtcagtcttagtgaacaacagctccttgactgtgacaacaagtgtgacataacagaaaagacttcatgtgacaatgggtgtaatggaggtcttatgacaaatgcctacaattatttgctcgagtctggtgggttggaggaggagtcttcatatccctacactggggagagaggtgaatgcaagtttgatccagagaaaatagcagttaagatcacaaatttcaccaatatccctgctgatgagaaccaaattgccgcatatttagtaaaaaatggtccacttgctatgggcgtgaatgcaattttcatgcaaacatacattggtggtgtctcatgccctctcatatgtagcaagaaaaggctgaaccatggtgtgttacttgtgggatatggtgcaaaaggcttctcaattcttaggcttggcaacaaaccatactggatcatcaagaattcgtggggggagaaatggggagaagatggctattacaagctctgcagagggcatggcatgtgtggaataaacactatggtttctgctgcaatggtgcctcaaccacaaacaacacctacaaagaattatgcttcttattagctatgcacttaaggaaatctaaataaatatttttcattctaggtgatgtatcatgtatgtaccaaaatattttggtacgtaagtcttttaaaaagtttgcatctcctctttggttttccttagttctgaaagttatctcctaagaagacaatcatatgtactgtacgtagtgtgaagatatagtattgtatgctgcagaatatgattgtctaataaggtggactagctgtaataaaagatatttccaggtt

SEQ ID NO: 7660 - DNA, 1894 bp, Glycine max
  Clone ID: 700678176_FLI
attaacacttccttagttcaatatggggaagcccttcactctctctctttcttccctttgcttgctactcttgtcgagtgcatgctttgctattagctccagcaagctcaacgagtgccaactcaacaacctcaacgcgttggaacccgaccaccgcgttgagtccgaaggtggtttgattcaaacatggaactctcaacaccctgagctgaaatgcgccggtgtcactgtttccaaactcaccctcaaccgcaatggcctccacttgccatcttactcaccttatccccggatgatcatcatcgcccaagggaaaggagcacttggagttgcaattccaggatgtcctgagacgtttgaggagccacaagaacaatcaaacagaagaggctcaaggtcgcagaagcagcagctacaggacagtcaccagaagattcgtcacttcaatgaaggagacgtactcgtgattcctcctggtgttccttactggacctataacactggcgatgaaccagttgttgccatcagtcttcttgacacctctaacttcaataaccagcttgatcaaacccctagggtattttaccttgctgggaacccagatatagagtacccagagaccatgcaacaacaacaacagcagaaaagtcatggtggacgcaagcaggggcaacaccagcaggaggaagaggaagaaggtggcagcgtgctcagtggcttcagcaaacacttcttggcacaatccttcaacaccaacgaggacatagctgagaaacttcagtctccagacgacgaaaggaagcagatcgtgacagtggaaggaggtctcagcgttatcagccccaagtggcaagaacaacaagatgaagatgaagatgaagacgaagatgatgaagatgaacaaattccctctcaccctcctcgccgaccaagccatggaaagcgtgaacaagacgaggacgaggacgaagatgaagataaacctcgtcctagtcgaccaagccaaggaaagcgtgaacaagaccaggaccaggacgaggacgaagatgaagatgaagatcaacctcgcaagagccgcgaatggagatcgaaaaagacacaacccagaagacctagacaagaagaaccacgtgaaagaggatgcgagacaagaaacggggttgaggaaaatatctgcaccttgaagcttcacgagaacattgctcgcccttcacgcgctgacttctacaaccctaaagctggtcgcattagtaccctcaacagcctcaccctcccagccctccgccaattccaactcagtgcccaatatgttgtcctctacaagaatggaatttactctccacattggaatctgaatgcaaacagtgtgatctatgtgactcgaggacaaggaaaggttagagttgtgaactgccaagggaatgcagtgttcgacggtgagcttaggaggggacaattgctggtggtaccacagaacttcgtggtggcggagcaagccggagaacaaggattcgaatacatagtattcaagacacaccacaacgcagtcactagctacttgaaggatgtgtttagggcaattccctcagaggttcttgcccattcttacaaccttcgacagagtcaagtgtctgagcttaagtatgaaggaaattggggtcctttggtcaaccctgagtctcaacaaggctcaccccgtgttaaagtcgcataaatgacaagcatgatggtgtgaggatgaggccatcttatgaaataataacaaataaataaattttgtatgataataaaaagtatggcccatgtaccatcccagcgagcctatgtttatatctgagtggcgttgtacctttcaatcgccttaataaaatgtcagtcttcacgttttgtcttt

SEQ ID NO: 7661 - DNA, 1200 bp, Glycine max
  Clone ID: 700678221_FLI
ccatcattgacacctgttaaagctcttgctctcctttttctttccacttcttcgctggaaacccctttctctctcttaaatcttctcattcttcttcttcttctccctcccgccacctcacttaccctcttcctaaaccctagcctcgccggaccaccaacaccaccgcgtcaatctgacccaaatctccgcgtccttatccaccaacaactccggtgcaccacctagccagcgccgacaacatctgcggcgtaccaccactacgtcgtcaagatcagcacaaccacacctagcaccgaatccagccaacaacctgcggccccgaactttccgcaaacccaaggcccaccacctccgaccaaacaccgcgcgccctcgtcaccatcaaaactccaccaccatagcccacctcaacccaaacacctaagcgcccacatcaaaaccctcgtgctacccttcaccctcacctcgtttggcatcagaatagcaccgcacgtgccggggtcgagccggacgagtgcggcaaagcctccggcgtcgccatgattggagatttctggtttgggggttagggatttcaaatttgggggtggggttctgactttgagtaaaaaatgacacatttataggaatgaaaacatattttaacctttttttgaattcaaaaaaagggaatacagtgaaaattgttgacatccgacttttgttttatcacgcaggttttagagcttgatagtagaaatgtaaaagcactctatcggagggcacaggcatatcttcatcttgtggacttagatctagctgagatggatattaagaaagcccttgagattgagccaaacaacagggatgtgaagatggagtacaaaattttgaagcagaaggtgagagaacacaacaagaaggacgcacagttttacggcagcatatttgcaaaaatgaataaactagaacaagcaagaacagcaacagcaaagcaggagccggtgccaatgactattgacagcaaagcttaaatttaaatttgagagatatctctgtctgtggtcgtctctgcatagtacgatattccaattgttgtgtcgtaagtcttggtaacataaatagctttgctctgtatgtggtcgtctctgcatactagtaccctaatagtacgatattccagttttaagtcttggtaacataaatagctttgttcgt

SEQ ID NO: 7662 - DNA, 1426 bp, Glycine max
  Clone ID: 700678284_FLI
tttctaatctcattctccttctgttcaaacactctctctcatggcatcagataagaagattaggatcggcatcaacgggtttggaaggattggccgtttggtggccagggttgcccttcaaaggaatgatgttgaacttgttgctgtcaacgatcctttcatcaccactgattacatgacatacatgttcaagtacgacaccgttcatggccagtggaagcattttgatgtgaaggtgaaggactctaagacccttctctttggtgagaagcccgtcaccgtttttggaatcaggaaccctgaggaaattccatggggtgaggttggtgctgattatgttgttgagtcaactggtgtattcactgacaaggacaaggctgctgctcacttgaagggtggtgccaagaaggttgtcatctctgccccaagcaaagatgcacccatgtttgttgttggtgttaacgagaaggagtacaagccagagcttgacattgtttccaatgctagctgcactaccaattgtcttgctcccctcgccaaggttatcaacgaccgatttggaattgtggagggtcttatgaccactgttcatgccatcacagctactcagaagactgttgatggtccatcaaacaaggactggaggggtggaagagctgcttccttcaatataattcccagcagcactggagctgctaaggctgtaggaaaagttcttccagcactgaatggtaaattgactggcatgtccttccgagtccccactgtagatgtttcagttgttgacctcactgttaggctagagaagccagcaacctatgagcaaatcaaatctgctatcaaggaggaatcagagggcaaattgaagggtattttgggttacacagaagatgatgttgtgtctactgattttgttggtgataacaggtctagcatatttgacgccaaggccggaatttctttgaatgacaactttgtaaaacttgtttcctggtatgacaacgaatggggttacagttcccgtgtgattgatttgattgtccacattgcatccgtggcttaaagaattgagtctgagcttggatatcatcgctacaccgttccaaatttttatcttaatcgagtttattttagtgtgaattcggaataaacactttgtgttgctgtgagagatatcattgaaaaacagtgcaatatgttgagttggtagacggccttataggtttttcctctcgtaagggacgattgactattctgtttcgttatcataatcatctagtataagcaacattttgttttccacgtctctttgttataattaagttaataatataatattgttaacatattttgatatttattatcttttataatcaaaatagttcttgtggctattttatttagaataaatataagacttttttgg

SEQ ID NO: 7663 - DNA, 894 bp, Glycine max
  Clone ID: 700678327_FLI
cgaggatctttcttctctccaccatcgttgggttgtgtttgcgtgtctctccgtaaattgccttcgactgtgacaacacgcaccgatcgccatgaacatcttcaccaagaaacccaccgccaaagaggctcttcgtgagagtaaacgtgaaatgacaaacgccagtagaggtatagagaaggaaattggagctctacaatcggaagaaaaaaagcttgttgctgagataaagagaactgctaagacgggaaatgaggcagcaactaaaattctagctcgccagttgatcaggcttaggcaacaaattgctaatcttcaaggtagtcgagctcagatgagaggcatagcaactcacactcaggccatgcatgcacattcttctgttgctgttggcttgaaaggtgctactaaggcaatggcagctatgaataagaaaatggaaccggcaaagcaagctaaaattatacaagacttccagaaacaatcagcgcagatggatatgactactgaaatgatgtcagatgccatagatgatgccttggataatgatgaagctgaagaggagactgaagagctgacaaaccaggtgctcgatgaaattggtgtagatgttgcctcacagttatcagcagctcccaaagggagagtcgcaacaaagaatgctgaaaatgatagcagctcgggcattgaagaacttgagaagcgtttggcggctcttagaaacccgtaaattttgcttgggattatgtgattctggaactcattgttttaaactaaaattctttcctgagctatgttttcttgggatttcacaagtttagtgtgtatatacttccttgaaattattatgtatgaataatgatatatccaaaatttctgagatggttatttact

SEQ ID NO: 7664 - DNA, 1723 bp, Glycine max
  Clone ID: 700678437_FLI
aaagtagaaagaagtagagacggagcagaagaaggatccacaccgttctcttcctctcttcttctccttcttcattaccaaacctaaaagtgatttatgatatgatggagtttggtgtgaatttgatttgctgattcaacgattaggatcaactgtcactggttttgtgttgagactaaaatgtcaatgtcaggatttgaagggcaatgtagtaatgatgagattagagagaggaggtctgatattgagaactcggaagatgagaggcggcagtcgagaattggaaccttgaagaagaaggcaatgaatgcgtcgtctagattcactcattctcttaagaaaagagggaaaaggaaaattgattatcgggttccatcagtgtccattgaagatgtaagagatgcacgggaggagactgccgtccatgaattgcgccagaaacttgttgagaggggatctttacctcctaggcatgatgactatcatacattgttaaggtttcttaaagccagggactttaacattgagaagacgattcagatgtgggaagaaatgcttacgtggcgaaaggaatatggaactgataccatccttgaggattttgaatttggagagctggaagaagtattgcagtattatcctcaagggtaccatggagttgataaggaaggtaggccagtttacattgagagacttgggaaagcccatccaagccgcctaatgcacatcaccacaatagatcgatatttgaattaccacgtccaggagtttgagaggaccctgcaggagaaatttccagcatgctccattgcggcaaagagacagatttcttcaacaacaacaatattggatgtacagggcttgggaatgaaaaatttctcacgtactgctgcaaatctcttgtctgctgtgacaaaaatagatagcagttactatcctgagacattacatcaaatgtatattgtcaatgctggttctggctttaagaagatgctttggcctgccacacagaagtttcttgattccaaaaccattgcgaagatacagattcttgattctaagtctttatataaattactggaagtcattgactctagtcagttgccagactttctgggtggttcttgtacatgtgctgcagaaggtggatgtcttcggtctaacaagggtccatggaatgatcctgacatcatgaagctggtacataatgaggaggcaacatttgtgaggcaaatcaccagaatgcccaatggtcaacatacatttgactcctttcaaatgcacccactgaaggaacgatgcagtgatacatcaacaacagctgaatcagggtctgatatgaacgattactcctctcccaacagacacaggagctgtccttatcctcatttagccccagttcatgaagaagtcaatttggaacctttgaatctaatttatttgagatccctcattcttgtctttacttccatgcacattacctgtggttgtgtcttgagattttaatcacacctaacactgtatcttatgtaggttaaagcaccagatctcaatggctactacagttgtgatgatagtgctctagcagttgagaaagtgattgaaagtgatcactttcaccttaatcgagagcagccattgcaaactaataatatagggaatatttcttgtagaacagattcaggaggtacttatgtcaacagttggttcagcattgttaagg

SEQ ID NO: 7665 - DNA, 1302 bp, Glycine max
  Clone ID: 700678487_FLI
taaaattcttccaccaagttatgggtttccttgtgttgcttcttttctccctcttaggtctctcttctagttccagcatatcaactcatcgttccatattggaccttgacctaaccaagtttaccacacagaaacaggtgtcttcactgttccaactatggaagagtgagcatggacgtgtctaccataaccacgaagaagaggcaaagagacttgagattttcaagaataacttgaactatatcagggacatgaatgcaaacagaaaatcaccccattctcatcgtttaggattgaacaagtttgctgacatcactcctcaagagttcagcaaaaagtacttgcaagctcccaaggatgtgtcgcagcaaatcaaaatggccaacaagaaaatgaagaaggaacaatattcttgtgaccatccacctgcatcatgggattggaggaaaaaaggtgtcatcacccaagtaaagtaccaagggggctgtggaagcggttgggcgttttctgccacgggagccatagaagcagcacatgcaatagcaacaggagaccttgttagcctttctgaacaagaactcgtagactgtgtggaagaaagcgaaggttgttacaatggatggcactatcaatcgttcgaatgggttttagaacatggtgggattgccactgatgatgattatccttacagagctaaagagggtagatgcaaagccaataagatacaagacaaggttacaattgacggatatgaaactctaataatgtcagatgagagtacagaatcagagacagagcaagcgttcttaagcgccatccttgagcaaccaattagtgtctccattgatgcaaaagattttcatttatacaccgggggaatttatgatggagaaaactgtacaagtccgtatgggattaatcactttgttttacttgtgggttatggttcagcggatggtgtagattactggatagcgaaaaattcatggggagaagattggggagaagatggttacatttggatccaaagaaacacgggtaatttattaggagtgtgtgggatgaattatttcgcttcatacccaaccaaagaggaatcagaaacactggtgtctgctcgcgttaaaggtcatcgaagagttgatcactctcctctttgagccgtaaaggttcaatacaacgagtgcttgttttcttagggacaagcattgtacttatgtatgattctgtgtaaccatgagtcttccacgttgtactaatgtgaagggcaaaaataaaacacagaacaagttcgtttttctc

SEQ ID NO: 7666 - DNA, 1077 bp, Glycine max
  Clone ID: 700678490_FLI
tgtctcacttcggacgttcgggtccccagacatttccgacacttactctcttctcgttctgaacatcaccttccgtaccaccgccgacgacctattccctctcttcgacaagtatgggaaggtcgtcgacatcttcatccccaaggatcgaaggactggtgaatcgaggggttttgcgttcgtgcgttacaagtatgctgatgaggctcagaaggccgttgagaggctcgacgggagaatggttgatggtcgcgaaataacggtccagtttgcgaaatatgggcctaatgctgaaaggattcacaaaggaaggattattgaaacatccccaagatcaaggcgatcaaggagccgtagcccaaggaaaaggcatcgtgatgattacagagacagagattataggagaagaagtcgcagcagaagttatgataggtatgaacgtgacaggcatcgtgggagagacaaagattatcgtcgcagaagtaggagccgtagtgccagtcttgattacaagggtcgtggtagaggacgctatgatgatgagcgtaatagtagaagccggagcagatcagttgatagccgctcccctgcacgacgcagtcctagtcctcgaaggagtccctcccctcagaggagcacttcccctcaaaggagtacttcccctaggaagagtccacggggtgaaagtcctgcaaatcgtagctgtgaggaacgttcccctacccctcgcagtgtctcaccacgcggtcgccctgatgcttcacgaagtccttcccctcgaaattcaaacggggatgaataagctatgtttttcatgaaaaattctggagacgtcggactattgcacctgtagctgttttgccattgttggatcttttagtctatgtgaatggtcttatcagagtcattgaagaattttatgatctaagtgctatttggtagggtcagacttcctgatgtttgaatggtttttatatttggacttgctatgttgtctatttcagtgtttggtaactattagaccttgcagttgataggttattatctcagtttgagggattttgccattttattttc

SEQ ID NO: 7667 - DNA, 880 bp, Glycine max
  Clone ID: 700678516_FLI
aaacaaggttctgtttagtagagaggaagggcagcagcaaggggagcagaggctgcaagagagcgtgattgtggaaatctcgaaggaacagattcgggcactgagcaaacgtgccaaatctagttcaaggaaaaccatttcttctgaagataaaccttttaacttgagaagccgcgaccccatctactccaacaagcttggcaagttctttgagatcaccccagagaaaaacccccagcttcgggacttggatatcttcctcagtattgtggatatgaacgagggagctcttcttctaccacacttcaattcaaaggcgatagtgatactggtaattaatgaaggagatgcaaacattgaacttgttggcctaaaagaacaacaacaggagcagcaacaggaagagcaacctttggaagtgcggaaatatagagccgaattgtctgaacaagatatatttgtaatcccagcaggttatccagttgtggtcaacgctacctcaaatctgaatttctttgctattggtattaatgccgagaacaaccagaggaacttcctcgcaggttcgcaagacaatgtgataagccagatacctagtcaagtgcaggagcttgcattccctgggtctgcacaagctgttgagaagctattaaagaaccaaagagaatcctactttgtggatgctcagcctaagaagaaagaggaggggaataagggaagaaagggtcctttgtcttcaattttgagggctttttactgaataagtatgtactaaaatgtatgctgtaatagctcatagtgagcgaggaaagtatcgggctatgtaactatgactagagcttcaactatgaataaataaatcgacagcatatgatgcttt

SEQ ID NO: 7668 - DNA, 1213 bp, Glycine max
  Clone ID: 700678542_FLI
gacactcctgttgttgccgtttctattattgacaccaacagcttggagaaccagctcgaccagatgcctaggagattctatcttgctgggaaccaagagcaagagtttctaaaatatcagcaagagcaaggaggtcatcaaagccagaaaggaaagcatcagcaagaagaagaaaacgaaggaggcagcatattgagtggcttcaccctggaattcttggaacatgcattcagcgtggacaagcagatagcgaaaaacctacaaggagagaacgaaggggaagacaagggagccattgtgacagtgaaaggaggtctgagcgtgataaaaccacccacggacgagcagcaacaaagaccccaggaagaggaagaagaagaagaggatgagaagccacagtgcaagggtaaagacaaacactgccaacgcccccgaggaagccaaagcaaaagcagaagaaatggcattgacgagaccatatgcaccatgagacttcgccacaacattggccagacttcatcacctgacatctacaaccctcaagccggtagcgtcacaaccgccaccagccttgacttcccagccctctcgtggctcagactcagtgctgagtttggatctctccgcaagaatgcaatgttcgtgccacactacaacctgaacgcgaacagcataatatacgcattgaatggacgggcattgatacaagtggtgaattgcaacggtgagagagtgtttgatggagagctgcaagagggacgggtgctgatcgtgccacaaaactttgtggtggctgcaagatcacagagtgacaacttcgagtatgtgtcattcaagaccaatgatacacccatgatcggcactcttgcaggggcaaactcattgttgaacgcattaccagaggaagtgattcagcacactttcaacctaaaaagccagcaggccaggcagataaagaacaacaaccctttcaagttcctggttccacctcaggagtctcagaagagagctgtggcttagagccctttttgtatgtgctaccccacttttgtctttttggcaatagtgctagcaaccaataaataataataataataatgaataagaaaacaaaggctttagcttgccttttgttcactgtaaaataataatgtaagtactctctataatgagtcacgaaacttttgcgggaataaaaggagaaattccaatg

SEQ ID NO: 7669 - DNA, 1230 bp, Glycine max
  Clone ID: 700678561_FLI
caggataaagcatttgaaaatgccttggcaattcaccctgaggatgcttcagaccggtgggagaagattgcagctgatgtaccagggaaaaccttggaagagattaaacaccactatgagctcttggttgaagatgttagccagatcgaatccggttatgtgcctttaccatcttataattcttctccagagggctcaacaagccatgctagtgaagaaggagctggcaagaagggaggccactcttggaatagtaataacgaatctaatcatggaactaaggcttcaagatcagatcaggaacgacgaaagggtattgcatggacagaggatgaacacaggttattcctccttggcttggaaaagtatgggaaaggtgactggcgaagtatatcaaggaactttgtggtgacaagaacgcctacacaagtagcaagccatgcccaaaaatacttcattcgtctgaactcgatgaataaagacagaaggcgatccagcatacacgatatcaccagtgtcaacaatggagatgtttcagcacctcaaggaccaattactggtcaaacaaacggttctgcggataattctgctggaaaatcaaccaaaccagccccaccagccccaactgctgccttgggtgtaggaatatatgctggtcctaccattggacaacctataggaggacccctcgtatctgcagttggcaccccagtgatgaaccttcctcccccagcacacatggcatatggtctcggagcaccggttcctggggcagttgttcctggagcaccaatgaacttaggtcctgtgccataccctatgccacatacatctgctcgtagatgaagttatgttcagaggcctaatgtacaaaaagaaaacagcagattagaaggcttatgaatttaatgtaattctttacctattcctatagctgcttatgtgcaacagttttatgctccatcaattatttcaaataagggatactaagaagcattagaatgtatctacattggctgccatggatggaatatctgacagccttgacataccacagcgtgaaagtaatgttgtcgttagtcatataaagtggcccattctgtagatgaaggttctgtggcaggcttatgaatttaatgtaattctttacctattcctatagttgcttatgtgcaagagttttatgctccatcaatttcaaataagggatactaagaagcattagaatgt

SEQ ID NO: 7670 - DNA, 1721 bp, Glycine max
  Clone ID: 700678595_FLI
attctctccattggtccttaaacactcatcagtcatcaccatggccaagctagttttttccctttgttttctgcttttcagtggctgctgcttcgctttcagttccagagagcagcctcagcaaaacgagtgccagatccaaaaactcaatgccctcaaaccggataaccgtatagagtcagaaggagggctcattgagacatggaaccctaacaacaagccattccagtgtgccggtgttgccctctctcgctgcaccctcaaccgcaacgcccttcgtagaccttcctacaccaacggtccccaggaaatctacatccaacaaggtaagggtatttttggcatgatatacccgggttgtcctagcacatttgaagagcctcaacaacctcaacaaagaggacaaagcagcagaccacaagaccgtcaccagaagatctataacttcagagagggtgatttgatcgcagtgcctactggtgttgcatggtggatgtacaacaatgaagacactcctgttgttgccgtttctattattgacaccaacagcttggagaaccagctcgaccagatgcctaggagattctatcttgctgggaaccaagagcaagagtttctaaaatatcagcaagagcaaggaggtcatcaaagccagaaaggaaagcatcagcaagaagaagaaaacgaaggaggcagcatattgagtggcttcaccctggaattcttggaacatgcattcagcgtggacaagcagatagcgaaaaacctacaaggagagaacgaaggggaagacaagggagccattgtgacagtgaaaggaggtctgagcgtgataaaaccacccacggacgagcagcaacaaagaccccaggaagaggaagaagaagaagaggatgagaagccacagtgcaagggtaaagacaaacactgccaacgcccccgaggaagccaaagcaaaagcagaagaaatggcattgacgagaccatatgcaccatgagacttcgccacaacattggccagacttcatcacctgacatctacaaccctcaagccggtagcgtcacaaccgccaccagccttgacttcccagccctctcgtggctcagactcagtgctgagtttggatctctccgcaagaatgcaatgttcgtgccacactacaacctgaacgcgaacagcataatatacgcattgaatggacgggcattgatacaagtggtgaattgcaacggtgagagagtgtttgatggagagctgcaagagggacgggtgctgatcgtgccacaaaactttgtggtggctgcaagatcacagagtgacaacttcgagtatgtgtcattcaagaccaatgatacacccatgatcggcactcttgcaggggcaaactcattgttgaacgcattaccagaggaagtgattcagcacactttcaacctaaaaagccagcaggccaggcagataaagaacaacaaccctttcaagttcctggttccacctcaggagtctcagaagagagctgtggcttagagccctttttgtatgtgctaccccacttttgtctttttggcaatagtgctagcaaccaataaataataataataataatgaataagaaaacaaaggctttagcttgccttttgttcactgtaaaataataatgtaagtactctctataatgagtcacgaaacttttgcgggaataaaaggagaaattccaatg

SEQ ID NO: 7671 - DNA, 1913 bp, Glycine max
  Clone ID: 700678608_FLI
tatcagtttcattcctgaatcaattagtttcttcactttcactttctaactgggaggatcaaagtgtgtgtctttgtcctcttggtgttgtttcttcttcttcttcaagtgtgcttcataaagcagtaggatttggaagcaacaaaagagttgcaaagtgggtagtgatcatggcagctgtaaagcctgaggagataagccacccaccaatggaccaacttcaaggcttagagtattgtatagattcaaacccatcttgggctgagacaatagctttgggtttccagcattacattttggccttgggaactgcagtgatgatcccttcatttctggtgcctgtgatgggtggaagtgatgatgataaagtgagggtggtacaaaccctcctttttgttgaaggaattaatacacttttgcagactctctttggaacgagattaccaacggtggtaggaggatcgtatgcgttcatggtccccgttatatctataattcgtgatccttcttttgcaacgatagaggacccacatttgagatttcttagcacaatgagagcagtccaaggagctctaatagtagcttcaagcatacaaataattttgggatttagtcaaatatgggctatttgttctagatttttcagcccacttggaatggttccagtaattgccttagttggttttggattatttgacagaggcttccttgtggtggggacttgcgttgaaattggaattcccatgctaatcctgtttatagccttctctcagtacttgaaaaattttcagataagacaagtacctatactagagagatttgctctactcatatcaacaacagtgatatgggcatatgcacatttgttaacagcaagtggagcatacaagcaccgaccggacttaacccaacatagttgcaggacagacagggcaaacctcatttcttctgctccatggataaagattccataccctcttgagtggggtgctcctacatttgatgctggccatgcttttggaatgatggctgctgtgttagtctcattagttgagtcaaccggggcatacaaagctgcatcacgtcttgcaagtgccacaccacctcctgctcacgtgctgagccgtggtatcggttggcagggaattggaatcttgctgaatggccttttcggaacactcactggttctactgtttctgtagagaatgtggggcttctaggaagcaatcgtattggtagtagaagggtcattcaagtttcagctggctttatgatattcttctcaatgttaggaaaatttggagctctatttgcatcaataccattccccatgtttgctgctgtgtattgtgttttgtttggtattgtggcttctgtggggctgtcatttttacagttcactaacatgaactcaatgaggaacctctttatttgtggcgtttccctcttcttaggtttgtccattcctgagtatttcagagaatacactatcagggcctttcatggccctgctcatactaatgctggatggttcaatgatttccttaataccatattcttttcttccccaacggttgcattgattgttgctgtgtttttggacaacactcttgactacaaggatagtgccaaagataggggaatgccatggtgggcaaagtttagaacatttaaaggagatagccgaaatgaagaattctacaccctccctttcaacctcaaccgcttcttccctccatcctaagtctgaagtggaaaaccatcatttccaaataagctagaaaaatgttctaaacttatttgttaatgtatgtatttgcaggaaaatgttcatttatttgtcgtatattttatatagttgaattgggttaatttcaatttttcatataatacaagataaacttatttgttc

SEQ ID NO: 7672 - DNA, 1701 bp, Glycine max
  Clone ID: 700678616_FLI
acattctctccattgtctttgaacactcatcaccatggccaagcttgttctttccctttgtttccttcttttcagtggctgcttcgctctgagagagcaggcacagcaaaatgagtgccagatccaaaagctgaatgccctcaaaccggataaccgtatagagtcggaaggtgggttcattgagacctggaaccctaacaacaagccattccagtgtgccggtgttgccctctctcgctgcacccttaaccgcaatgcccttcgtagaccttcctacaccaacggtccccaggaaatctacatacaacaaggtaatggtatttttggcatgatattcccgggttgtcctagcacttatcaagagccgcaagaatctcagcaacgaggacgaagccagaggccccaagaccgtcaccaaaaggtacatcgcttcagagagggtgatttgatcgcagtgcctactggtgttgcatggtggatgtacaacaatgaagacactcctgttgttgccgtttctattattgacaccaacagcttggagaaccagctcgaccagatgcctaggagattctatcttgctgggaaccaagagcaagagtttctaaaatatcagcagcagcagcaaggaggttcccaaagccagaaaggaaagcaacaagaagaagaaaacgaaggaagcaacatattgagtggcttcgcccctgaattcttgaaagaagcgttcggcgtgaacatgcagatagtgagaaacctacaaggtgagaacgaagaggaggatagtggagccattgtgacagtgaaaggaggtctaagagtcacagctccagccatgaggaagccacagcaagaagaagatgatgatgatgaggaagagcagccacagtgcgtggagacagacaaaggttgccaacgccaaagcaaaaggagcagaaatggcattgatgagaccatttgcacaatgagacttcgccaaaacattggtcagaattcatcacctgacatctacaaccctcaagctggtagcatcacaaccgccaccagccttgacttcccagccctctggcttctcaaactcagtgcccagtatggatcactccgcaagaatgctatgttcgtgccacactacaccctgaacgcgaacagcataatatacgcattgaatgggcgggcattggtacaagtggtgaattgcaatggtgagagagtgtttgatggagagctgcaagagggaggggtgctgatcgttccacaaaactttgcggtggctgcaaaatcccagagcgataactttgagtatgtgtcattcaagaccaatgatagaccctcgatcggaaaccttgcaggggcaaactcattgttgaacgcattgccagaggaagtgattcagcacacttttaacctaaagagccagcaggccaggcaggtgaagaacaacaaccctttcagcttcctggttccacctcaggagtctcagaggagagctgtggcttagagagccctttttgcatgtgctaccacacttttgtccttttgggctctagctagtgctggtagcagtaaataagaatgaataaaagaaacaaaggcttagatgccctttgttaagtgtagaataacgggtatagtaactatgtacccttgtgtaatgagtcactcaagtacctatgcgggaaaagcataaataaaagaagaaattccaat

SEQ ID NO: 7673 - DNA, 1023 bp, Glycine max
  Clone ID: 700678725_FLI
caattccttcacttgcagcactgttgcatcatcatcttcattgcaaaaccctaaacttcaccttcaaccatgaccacacaagtaccaccacacagtgtccaagtccacacaacaacacaccgctacgaagctggcgtcgtcccccccggagcccgtttcgaaccgccgcgttatgaagccggcgtcaaagcgccctccatttaccattccgagagaggtccaacgacttcccaggtcctcgccgtcctcgccggcctcccggtcggtggcatcctgctcctcctggcgggattgaccctggcaggaaccctcaccggactggcagttgccacgccgctcttcgtcctcttcagcccggtgctggttccagccacggtcgccatcggcctggccgtggccgggttcctgacgtcgggggccttcgggctcacggcgctgtcttccttctcctggatcctgaactacatccgggagacccagccagcctcggagaacctcgccgccgccgcgaagcatcacctcgccgaggcggcggagtacgtggggcagaagacgaaggaagtggggcagaagaccaaggaggttgggcaggatattcagagcaaggcacaggatacaagggaggcagctgcaagggatgcaagggaggcagctgcaagggatgcaagggaagctgctgcaagggatgcaaaggtggaggcaagggatgtaaagagaacaacagtgacagcaacaaccgcaaccgcatgatgagtaattctgatattagagggagcattaatgtgttgttgtgatgtggtttatatggggaaattaaataaatgatgtatgtacctcttgcctatgtaggtttgtgtgttttgttttgttgtctagctttggttattaagtagtagggacgttcgttcgtgtctcaaaaaaaggggtactaccactctgtagtgtatatggatgctggaaatcaatgtgttttgtatttgttcacttccattgttgaattcaatgtcaaatgtgttttgcgtt

SEQ ID NO: 7674 - DNA, 1694 bp, Glycine max
  Clone ID: 700678738_FLI
ccatggccaagctagttttttccctttgttttctgcttttcagtggctgctgcttcgctttcagttccagagagcagcctcagcaaaacgagtgccagatccaaaaactcaatgccctcaaaccggataaccgtatagagtcagaaggagggctcattgagacatggaaccctaacaacaagccattccagtgtgccggtgttgccctctctcgctgcaccctcaaccgcaacgcccttcgtagaccttcctacaccaacggtccccaggaaatctacatccaacaaggtaagggtatttttggcatgatatacccgggttgtcctagcacatttgaagagcctcaacaacctcaacaaagaggacaaagcagcagaccacaagaccgtcaccagaagatctataacttcagagagggtgatttgatcgcagtgcctactggtgttgcatggtggatgtacaacaatgaagacactcctgttgttgccgtttctattattgacaccaacagcttggagaaccagctcgaccagatgcctaggagattctatcttgctgggaaccaagagcaagagtttctaaaatatcagcaagagcaaggaggtcatcaaagccagaaaggaaagcatcagcaagaagaagaaaacgaaggaggcagcatattgagtggcttcaccctggaattcttggaacatgcattcagcgtggacaagcagatagcgaaaaacctacaaggagagaacgaaggggaagacaagggagccattgtgacagtgaaaggaggtctgagcgtgataaaaccacccacggacgagcagcaacaaagaccccaggaagaggaagaagaagaagaggatgagaagccacagtgcaagggtaaagacaaacactgccaacgcccccgaggaagccaaagcaaaagcagaagaaatggcattgacgagaccatatgcaccatgagacttcgccacaacattggccagacttcatcacctgacatctacaaccctcaagccggtagcgtcacaaccgccaccagccttgacttcccagccctctcgtggctcagactcagtgctgagtttggatctctccgcaagaatgcaatgttcgtgccacactacaacctgaacgcgaacagcataatatacgcattgaatggacgggcattgatacaagtggtgaattgcaacggtgagagagtgtttgatggagagctgcaagagggacgggtgctgatcgtgccacaaaactttgtggtggctgcaagatcacagagtgacaacttcgagtatgtgtcattcaagaccaatgatacacccatgatcggcactcttgcaggggcaaactcattgttgaacgcattaccagaggaagtgattcagcacactttcaacctaaaaagccagcaggccaggcagataaagaacaacaaccctttcaagttcctggttccacctcaggagtctcagaagagagctgtggcttagagccctttttgtatgtgctaccccacttttgtctttttggcaatagtgctagcaaccaataaataataataataataatgaataagaaaacaaaggctttagcttgccttttgttcactgtaaaataataatgtaagtactctctataatgagtcacgaaacttttgcgggaataaaaggagaaattccaatgagttttctgtc

SEQ ID NO: 7675 - DNA, 652 bp, Glycine max
  Clone ID: 700678783_FLI
ctctaccaatctttaagttcaaattgaagaacaatgaaaatggtgatgaccaggatgccaattcagctatagatgaaggtggaattttggctgcagggacagaaaaggagcgaatgatttcaggagaagatgctgtttgttgcatttgcttagcaaaatatgcagatgatgacgagcttagagagttaccttgctctcacgtttttcacgtcgaatgtgttgacaaatggttaaagataaatgcaacctgccctctctgtaaaaatgaagttggtacgagtaatggagggtccccttcagcctgagagagactccagtacgtagccgaagtttatctctgctgaaggcacatatcccccatgaagttgcagcttttcaagtgtacatcatcaaacttttggattctgctttgaaggtgagatccaaagatagatgcaaatcaatatcttaaacatgtgatgcaaatcaaggttgagaatttgtttctacccgccctagtcacctctctttttacgcttttttcaccggttttacatactcaccaagtattgtttgtagaaaataggatgtttcaaatctttcttctgtttatcagttctgtatatataacaaaatttagttaaaatgttgattttttaaaatttaaaactgt

SEQ ID NO: 7676 - DNA, 1476 bp, Glycine max
  Clone ID: 700678787_FLI
gtctgtgactcacctcttcggttccaagtcgccacccaagctttgcgtctttactctcagatgctctgctggcaatggagaaaggccttggaaaacttcaggcgctagacttatgttagaagatggatcaatctggaaagcaaagtcatttggtgcttcaggaacccaagttggagaagttgtttttaatacatcattgactgggtatcaagaaattctaacagatcctagttatgctggtcagtttgtactgatgacaaatccacatattggtaacactggtgtaaattttgatgatgaggaatcaagacagtgcttccttgccggtctagtaattagaagtttgagtatcagtacctcaagctggagatgtgcagaaactctaggtgattacttagcagaaaggaacatcatgggaatttatgacgttgacacacgggctatcacgcgcagattacggcaaaaaggcagccttattggtgtgttgagtactgacaattctaaaacagaggaggaactacttaagatgactcattcttgggacattgttggtattgatctaataagtggagtatcatgtcagtctgtgcatgaatgggttgatacaacaaagcaagaatgggattttagttctaaggggcatggggagactttccatgttgttgcttatgattttggaattaagcataatatacttaggcgcttggcatcctatggctgtaaaatcactgtggtgccatctacatggccggcatcagaaaccttgaagatgaagccagatggggtgctttttagcaacggccctggagatccatctgctgttccttacgctgttgagacagtaaagaacattctgggaaaggtgcctgtttttggaatctgcatgggccaccaattgctgggtcaggctttaggaggcaaaacctttaagatgaaatttggtcatcatggaggaaatcatcctgttcgtaaccttcgaactggccaggttgaaattagtgctcagaaccacaactatgcggttgaccctgccacactgccagaaggagtggaggttactcataggaatcttaatgatggaagctgtgctggccttgcattccctgctcaaagaataatgtctcttcaataccacccagaggcatccccaggaccccatgattctgattacgcttttagggactttgtagaattaatgatgcaagagaaaaacaagaaatccgaaccccaaatatcaacagtgtctagtttggatgcgtaatgcttgaagctgacactgggaggaattgaaattagctaaaattttagggttatagtcaagtactgatcgattgtctcatcacacaagatttcaattcttcaacttctgggacaaaagcaggcatagcatgccttcgaagtgtccatgtgctattttaaagatcaaacccattgttaccgtccaattctgggcctgttaaaagcgtttttatcatg

SEQ ID NO: 7677 - DNA, 1288 bp, Glycine max
  Clone ID: 700678796_FLI
ggtgcgaaccacaacactgcacaaagattagggtttacatttgggaggaagcaagaaagagatgggtgaggcgtgcattccaacagttgatctctctcctttcctgagagaggatgaagatggaaaaaagagagccatagaagcaatcacccaagcctgttctgaatatggcttcttccaaattgtgaaccatggagtttcccttgatttggttaaagaggccatgcagcaatctaagacctttttttgattactctgatgaagaaaagagcaagagtagtccttcctctgatgcaccacttcctgctggctacagtaggcagcctctgcactccccagacaagaatgaatactttctgtttttttccccaggttccagcttcaatgtcatccctcagatccctcccaagttcagggatgtacttgaagaaatgtttgtgcaaatgagcaagatgggtgtgctgttggagagcattataaacgagtgtttgggtctccctaccaacttcttgaaggaattcaatcatgatagaagttgggatttccttgtggccttgcgttactttccagcttctaacaatgagaataatggaatcacagagcatgaagatggcaacatagttacctttgttgtccaggatggagtgggaggcctgcaagtccttaagaatggagattgggtccctgttgttcctgcagagggaactattgtggtcaatgttggtgatgttatacaggtcttgagtaacaacaaattcaagagtgcaactcaccgagttgtgagagcagaaggacgaagccgatactcttacgtgttctttcataacttaagaggagacaagtgggttgaaccactgccacaatttacctcagacattggggagccacccaagtatagaggattcctatataaggagtatcaggaactgagaatgaggaacaagagccatccaccttctcggcctgaggatgagatccacattactcattatgccattgataactagactcttgtgtagatccattactgccaacaaaaataatcaattaatcatgcctagttctagtttcgtagtaggggttgcttggacctatttttggttcattgttgctcccatgttggcttaagggatatggaagaggtcttgatcaaaatttaaatatcagagatttagttgtattctgcaagtgacatgtgtaggaactaacactgtgctgatcttgaagattatgggcatgaaagggctccaaattcacaatacattataataactattgttcagaacct

SEQ ID NO: 7678 - DNA, 1599 bp, Glycine max
  Clone ID: 700678824_FLI
agatgttaaggaatggttgtggtgttggtgggaatttgagtggaagagtaaaagtgagggctgaggatgttgttgaagctgtgactcttgctgctagtaacaaggcttttgaggttgtgtattacccaagagccagtactcctgagttttgtgttaaggcttcttctgtgggggctgctatgaggattcagtggtgttccgggatgaggttcaagatggcctttgagactgaggatgctacaaggataagttggttcatgggaaccattgcttctgttcaggttgttgaccccatctgctggcctaattccccatggaggcttcttcaggttacttgggatgagccagatttactacaaaatgtgaagcgtgttagcccgtggctggttgaattggtatcaaacattccactcatcaattttacacccttctctccaccaagaaagaagcttcggccacaacacccagacttcccccttgatgttcaatttccaataccaatgctttcaggcaaccagcatgggcctaacagccccttgtgtggtttttcggataatgctcctgcagggatacagggagccaggcatgctcaatttggaaaatctctatcagatctccaccttaacaataataaactgcagttggggatgcttccaactaatatccatcaacttggaggagtgtatactgggatttcaagtggtaacatgatgaccaaacatgataagagcaaagaaagcttatcgtgctttctgaccatggggaaatctagtaagagtttggagaaatctgatgatgttaagaaacaccaatttttgcttttcggtcaaccaattctcactgagcaacaaatttctagctgttctagagatgtgttgtctcgcggaaaaagatcgctaggtgatgagaaggacaaagcgaaatgcgttttggatgactcgcaatctactctctcacagcagttttcaccaggaaaagcttcttctgctgagttcttttggcaacttggcttggatactggtcattgcaaagttttcttggaatcagaagatgtaggaaggaccctagacctatcgcagtttggttcttatgaagagctctataggagacttggcaacatgtttgggattgaaaggtctgagattttgaaccatgtgctctattatgatgcagctggtgctgttaagcaaactggagaagaacctttcagtgacttcatgaagacagcaaaaagattgacaattctgacagattcaggcagcaaaaatatcaaaagggcctttattacaggaactcgtaatggtgaacatggactagatccatcaaacaaaacaggccctctgagcatatttgcttaaaatatgctatagatagcatctgagacattgttgagatctgagtagttgaaggacagtcttaactctatttacctctgcaaagactgaacatgaactgaatcttttatcatggttgttacaattgtttactaaaaacaagtattttatcaaggttggcattgttggttattagtgtacaaataataatgatgctattatcatgatcaactaatattgtaatattaaccaagatttggacccc

SEQ ID NO: 7679 - DNA, 1542 bp, Glycine max
  Clone ID: 700678863_FLI
ctcattgagacatggaaccctaacaacaagccattccagtgtgccggtgttgccctctctcgctgcaccctcaaccgcaacgcccttcgtagaccttcctacaccaacggtccccaggaaatctacatccaacaaggtaagggtatttttggcatgatatacccgggttgtcctagcacatttgaagagcctcaacaacctcaacaaagaggacaaagcagcagaccacaagaccgtcaccagaagatctataacttcagagagggtgatttgatcgcagtgcctactggtgttgcatggtggatgtacaacaatgaagacactcctgttgttgccgtttctattattgacaccaacagcttggagaaccagctcgaccagatgcctaggagattctatcttgctgggaaccaagagcaagagtttctaaaatatcagcaagagcaaggaggtcatcaaagccagaaaggaaagcatcagcaagaagaagaaaacgaaggaggcagcatattgagtggcttcaccctggaattcttggaacatgcattcagcgtggacaagcagatagcgaaaaacctacaaggagagaacgaaggggaagacaagggagccattgtgacagtgaaaggaggtctgagcgtgataaaaccacccacggacgagcagcaacaaagaccccaggaagaggaagaagaagaagaggatgagaagccacagtgcaagggtaaagacaaacactgccaacgcccccgaggaagccaaagcaaaagcagaagaaatggcattgacgagaccatatgcaccatgagacttcgccacaacattggccagacttcatcacctgacatctacaaccctcaagccggtagcgtcacaaccgccaccagccttgacttcccagccctctcgtggctcagactcagtgctgagtttggatctctccgcaagaatgcaatgttcgtgccacactacaacctgaacgcgaacagcataatatacgcattgaatggacgggcattgatacaagtggtgaattgcaacggtgagagagtgtttgatggagagctgcaagagggacgggtgctgatcgtgccacaaaactttgtggtggctgcaagatcacagagtgacaacttcgagtatgtgtcattcaagaccaatgatacacccatgatcggcactcttgcaggggcaaactcattgttgaacgcattaccagaggaagtgattcagcacactttcaacctaaaaagccagcaggccaggcagataaagaacaacaaccctttcaagttcctggttccacctcaggagtctcagaagagagctgtggcttagagccctttttgtatgtgctaccccacttttgtctttttggcaatagtgctagcaaccaataaataataataataataatgaataagaaaacaaaggctttagcttgccttttgttcactgtaaaataataatgtaagtactctctataatgagtcacgaaacttttgcgggaataaaaggagaaattccaatgagttttctgtc

SEQ ID NO: 7680 - DNA, 1820 bp, Glycine max
  Clone ID: 700679114_FLI
gattcaaagagatcaaagacaattaccagatcagctaaccgattcctggaccaacgatgaagtgcttgcacttttcagaatcagatctagcatggaaaattggctcccagagctcacatgggaccatgtctcaaggaggctagcagaggttgggtttaagaagagtgctgagaagtgcaaggagaagtttgaagatgagagtagatatttcgacaacatcaataactacggcaagaacaatttccggttccttattagcgagctggaggagctttgtcaaaactctgatcctggtgctcatgatcataatggggttgtagtgaggagtgaaaagactcaccacctaggaggacacgcattggaagaaaattcgagagacattgaaacaactacagcgaccaaacgatgtgatattggaagtgacacagtggtggagaagtcaaattcaaaggtgcgcaagaggaagaggcgtgataggttcgaaatgttcaagggtttttgcgagagtgttgtcaacaagatgatggctcagcaagaagagactcacaacaagctcctcgaggacatggtgaaaagggaccaagagaagttcgccagagaagaagcttggaagaagcaagagttggataggatgaaaaaggagcttgagattatggcacaagagcaagccattgccggggatagacaagccaccataattgaattcttaaagaaatgtgcaacaacaacaataacttcattatcccctccaagccaaaatgccaagtactacatcacaaatgattcaaatcttccaaattgtgcatcgcattcgcaaaaccctaataatccttccaatgaagacaacaatcttgagccaacaccttcttctaaaatgattcaaaatcatggccaaactacgttgggagcagaaaaccctagcacaagtgacacattattacaagttccttcttcctccaactcttccccaacaacccacaaccctagttcttcactcaatagccacaataacattatcccactagagtcaaattcagtttcgacatacaagcccacctcaacaacccctatggccagcagtgagaattcgaaagatgatattgggagaagatggccaagagatgaagtgttagcactgataaacctaaggtgcacaagtctaagcagcaatgaagagaaagaaggaaacaagggtcctctgtgggagagaatctcgcaagggatgtcagcgctgggatacaagagaagtgcaaagaggtgcaaggagaagtgggagaacataaacaagtacttcagaaaaaccaaggataatgttaataagaaaaggtcccttaactctaggacatgtccttatttccatcaactgagttgcttgtatggtcaaggaaaaatcgtgccgcagtcagaaagggaagggaactactgcttgaatccaaccccgaattccggtcaagtgccaccggatgatgatcatcaagtccaagacgatgagtcttctcaagtggggtctgctggtttggttcagtatgcatgttgatcatgcaggtgagaaagctttgaaattaatacccttctttggattgtgattaattagtttcaaattcattaattttgtccatcttatatggcttaataagttccactattttccgttttcttttgattttggtggtgggaggactttcttatatatagcataaattaataattgaatatgtatattttgattttggtgagcatgcaccgacagcttgaggaattgaattagaacaatgtttcctgttttgtggatgattttataatgccagtgcaatttacat

SEQ ID NO: 7681 - DNA, 1206 bp, Glycine max
  Clone ID: 700679170_FLI
cactcctgttgttgccgtttctattattgacaccaacagcttggagaaccagctcgaccagatgcctaggagattctatcttgctgggaaccaagagcaagagtttctaaaatatcagcagcagcagcaaggaggttcccaaagccagaaaggaaagcaacaagaagaagaaaacgaaggaagcaacatattgagtggcttcgcccctgaattcttgaaagaagcgttcggcgtgaacatgcagatagtgagaaacctacaaggtgagaacgaagaggaggatagtggagccattgtgacagtgaaaggaggtctaagagtcacagctccagccatgaggaagccacagcaagaagaagatgatgatgatgaggaagagcagccacagtgcgtggagacagacaaaggttgccaacgccaaagcaaaaggagcagaaatggcattgatgagaccatttgcacaatgagacttcgccaaaacattggtcagaattcatcacctgacatctacaaccctcaagctggtagcatcacaaccgccaccagccttgacttcccagccctctggcttctcaaactcagtgcccagtatggatcactccgcaagaatgctatgttcgtgccacactacaccctgaacgcgaacagcataatatacgcattgaatgggcgggcattggtacaagtggtgaattgcaatggtgagagagtgtttgatggagagctgcaagagggaggggtgctgatcgttccacaaaactttgcggtggctgcaaaatcccagagcgataactttgagtatgtgtcattcaagaccaatgatagaccctcgatcggaaaccttgcaggggcaaactcattgttgaacgcattgccagaggaagtgattcagcacacttttaacctaaagagccagcaggccaggcaggtgaagaacaacaaccctttcagcttcctggttccacctcaggagtctcagaggagagctgtggcttagagagccctttttgcatgtgctaccacacttttgtccttttgggctctagctagtgctggtagcagtaaataagaatgaataaaagaaacaaaggcttagatgccctttgttaagtgtagaataacgggtatagtaactatgtacccttgtgtaatgagtcactcaagtacctatgcgggaaaagcataaataaaagaagaaattccaat

SEQ ID NO: 7682 - DNA, 1696 bp, Glycine max
  Clone ID: 700679184_FLI
ctctccattgtctttgaacactcatcaccatggccaagcttgttctttccctttgtttccttcttttcagtggctgcttcgctctgagagagcaggcacagcaaaatgagtgccagatccaaaagctgaatgccctcaaaccggataaccgtatagagtcggaaggtgggttcattgagacctggaaccctaacaacaagccattccagtgtgccggtgttgccctctctcgctgcacccttaaccgcaatgcccttcgtagaccttcctacaccaacggtccccaggaaatctacatacaacaaggtaatggtatttttggcatgatattcccgggttgtcctagcacttatcaagagccgcaagaatctcagcaacgaggacgaagccagaggccccaagaccgtcaccaaaaggtacatcgcttcagagagggtgatttgatcgcagtgcctactggtgttgcatggtggatgtacaacaatgaagacactcctgttgttgccgtttctattattgacaccaacagcttggagaaccagctcgaccagatgcctaggagattctatcttgctgggaaccaagagcaagagtttctaaaatatcagcagcagcagcaaggaggttcccaaagccagaaaggaaagcaacaagaagaagaaaacgaaggaagcaacatattgagtggcttcgcccctgaattcttgaaagaagcgttcggcgtgaacatgcagatagtgagaaacctacaaggtgagaacgaagaggaggatagtggagccattgtgacagtgaaaggaggtctaagagtcacagctccagccatgaggaagccacagcaagaagaagatgatgatgatgaggaagagcagccacagtgcgtggagacagacaaaggttgccaacgccaaagcaaaaggagcagaaatggcattgatgagaccatttgcacaatgagacttcgccaaaacattggtcagaattcatcacctgacatctacaaccctcaagctggtagcatcacaaccgccaccagccttgacttcccagccctctggcttctcaaactcagtgcccagtatggatcactccgcaagaatgctatgttcgtgccacactacaccctgaacgcgaacagcataatatacgcattgaatgggcgggcattggtacaagtggtgaattgcaatggtgagagagtgtttgatggagagctgcaagagggaggggtgctgatcgttccacaaaactttgcggtggctgcaaaatcccagagcgataactttgagtatgtgtcattcaagaccaatgatagaccctcgatcggaaaccttgcaggggcaaactcattgttgaacgcattgccagaggaagtgattcagcacacttttaacctaaagagccagcaggccaggcaggtgaagaacaacaaccctttcagcttcctggttccacctcaggagtctcagaggagagctgtggcttagagagccctttttgcatgtgctaccacacttttgtccttttgggctctagctagtgctggtagcagtaaataagaatgaataaaagaaacaaaggcttagatgccctttgttaagtgtagaataacgggtatagtaactatgtacccttgtgtaatgagtcactcaagtacctatgcgggaaaagcataaataaaagaagaaattccaat

SEQ ID NO: 7683 - DNA, 2225 bp, Glycine max
  Clone ID: 700679204_FLI
atgagggactcagagcaaccctcagatgccaaaatggcatgatggcgagacagcatccttgcaatggggcggtatccgtctctatcattaaggttgtaatatccagcagtaagctccgcagctcgtctatcaaaagaggaggcaaactcaattgctcagaaacctggtgtggtgtctgttttccctgaccccattctgaagctccacactacacgttcatgggatttcctcaaaagccaaactcgtgtcaatatcgacaccaaaccaaatacgctgtccggttcttctttttcttcatcagacgtcattcttggcgtcttagacacaggcatatggccagaggcggcgagttttagcgacaagggtttcggtcctgttccatcccgatggaaaggcacctgcatgacatcaaaagacttcaattcctcttgttgtaacaggaagataattggcgcgaggttttaccctaacccagaggagaaaacggcaagggatttcaacggacatgggactcacgtttcgtcgacggcagtgggcgtgccggtgagtggcgcatcgttctatggtctggcggcggggacggcaaggggtgggtcccctgagtcaaggttggcggtttacaaagtgtgtggggcttttgggtcatgtcctgggtcggccattcttgcggggtttgacgatgccattcacgacggagtggatatcttgtcgctgtcgctcggtggattcggtggaaccaaaaccgatttgaccaccgacccgattgcgattggagcattccactccgtccagcgcggcatcctggtggtctgcgccgccgggaacgacggagaaccattcaccgttctcaacgacgcaccttggattttaaccgttgcagcttccaccatcgaccgtgatcttcaatccgacgtggtcttgggtaataaccaagtcgtcaagggaagagccataaatttctcccctcttttaaattctcccgattatccaatgatatatgctgagtctgctgccagggcaaatatctccaacataactgatgcaagacaatgccacccagattcattagatccaaaaaaagtcatagggaagattgtggtttgtgatggaaaaaatgacatttattattcaactgatgagaaaattgtcatagtgaaggcgttgggaggaataggtctggttcatattactgatcaatctggatcagtagcattttattatgtggacttcccagtaacagaggtaaaatcaaaacatggcgacgcaatcctccagtacatcaactcaactagccatccagtgggaacaatactagcaacagttacaattcctgattataagcctgctccccgggtgggttatttttcatcaagagggccttcattgattacaagcaatgttctcaagcctgatattgcagccccgggagttaacattctcgctgcatggtttggaaatgacacatcagaggttccaaaaggaagaaagccctcactatatcgcatactctcaggaacttccatggctactccacatgtttcagggcttgcatgcagtgtcaaaagaaaaaaccccacttggagtgcctccgcaatcaaatctgccatcatgacttcagcaattcaaaatgacaatttgaagggtcccataacaacggattcagggttgatagccacaccttatgactatggagcaggggcaattacaacatctgaaccattgcaaccggggctagtttatgaaaccaacaacgttgactacttgaactatttgtgttacaatggacttaacataaccatgataaaggtcatctccggaactgtccccgagaatttcaattgtcccaaggattcgagctctgatctcatctccagcatcaactacccttccatagcagtaaacttcactggcaaagcagacgcggtcgtgagtagaactgtcacaaacgttgacgaagaagatgaaacagtgtacttccccgttgttgaagctcctagtgaagtaattgtcacactctttccatataatcttgagtttacgacaagtattaaaaaacaaagctacaatattactttcagaccgaagacctccttgaagaaagatttgtttggatctatcacttggagtaacgacaaatatatggttcgaattccttttgtattaactaaatagtgaaattaaaaagtagcgatgaataaatgcaagctaagttcttcgtggtgcct

SEQ ID NO: 7684 - DNA, 805 bp, Glycine max
  Clone ID: 700679268_FLI
attttgactgagcgtggttattccttcaccacctcagccgagcgggaaattgtaagggatgtgaaagaaaagctgtcttacattgcccttgactacgagcaagaactggagacagccaggaccagctcatccgtcgagaagagctacgagttgcctgatgggcaggtcatcactattggcgatgagcgtttcagatgtccagaggttctgttccaaccatccatgatcggaatggaagcttcaggcattcatgagacaacatacaactccataatgaagtgcgatgttgatatcaggaaggacctttatggtaacattgttctttcaggaggaacaaccatgttccctggtattgctgacagaatgagcaaggaaatttctgcattggcacccagcagcatgaagatcaaggttgtagcaccacctgagagaaaatacagtgtctggatcggtggttctatcttggcatctcttagcaccttccagcagatgtggattgcaaaggcagaatatgacgaatctggtccatcaattgtgcacagaaagtgcttctaaactgtttcgatagatagggttattgaagggaaagactactatcatcacgatttgtctggaagcaatgcattgcagattgtaaccctttgattctagcttttgttatcctttcattttattctcttgttggagtgatcatttatttgcagaaggtgaggagagttgttttttaaaatggtccagttcttttcttatactttgataagtttttaactggttcattctgagtatgagttagctggattatatc

SEQ ID NO: 7685 - DNA, 1284 bp, Glycine max
  Clone ID: 700679653_FLI
caactgcacccctcctccagtcacttccttttccatggcccaaacactttctccctgcatttattacctaccactgtcactatgaatgctgtcttttgtttttcatcttcaacttcatctaaacctttcacacatatcttcggcttagaacaaccaacaacaagttcacattgtaggaacctttgtcttgtcgtgtcgggtagtggctcatattgatattggtatggtctttctttgaaccccatttgcaaaaaggaagaagaagaacatgaagattcagtgtgatgtgtgtgagaaagcccctgcaaccgtgatttgttgcgcagatgaggcagctttgtgtgccaaatgtgacgttgaagttcatgctgcaaacaagcttgcaagcaagcaccagaggcttctccttcaatgtctatcaaacaagcttcccagatgtgacatatgccaagataagccagctttcatattttgtgttgaggacagagcactcttctgtaaagactgtgatgagccaattcatttagccagtagcctttctgcaaaccaccagcgcttcctcgctactggtatcagggtggctttgggttctaattgcaccaaaggccatgaaaaaggtaacatggaaccatctaatccaaatgcacaagaagttcctgtgaaaactccttctcagcaagtgcctagcttcacatcctcttgggcagttgatgacttgttggaattaacagactttgaatcgccagacaaaaagcaatccctggaatttggagaacttgaatggctagcagatgcaggccttttcagtgaacagtttcctcatgaagctttagtcgcagctgaagttcctcagcttccagtgccacacactagcagtgttgcctcacataaagcccccaaatccttggtgtcttacaaaaagcctaggattgaagtcctggatgaagatgatgatgaacactgcactgtcccggatctcggataaagtacattctcatgtaaacaattgcctgaatcagtaggttgatgagttgtatatgcatactaggtgcagatgttaatgaactcttcagtgtgcctgatctagctgaagctcaggaccatgaggactattgcatgaacctgtagattgatgagttgtatatgcatacttcttaggacagtaagtaatgaagtatgttaactagctgtgtggagttgataaatatctcattttaggagagctttgaatggtttgatttttagaaaatagcataaattaaaactttaggggatttaattttc

SEQ ID NO: 7686 - DNA, 1024 bp, Glycine max
  Clone ID: 700679667_FLI
cgccatacccgttaacaagcctggtagatttgagagtttcttcctatctagcactgaagctcaacaatcctacttgcaaggattcagcaggaacattttagaggcctcctacgataccaaattcgaggagataaacaaggttctgtttagtagagaggaagggcagcagcaaggggagcagaggctgcaagagagcgtgattgtggaaatctcgaaggaacagattcgggcactgagcaaacgtgccaaatctagttcaaggaaaaccatttcttctgaagataaaccttttaacttgagaagccgcgaccccatctactccaacaagcttggcaagttctttgagatcaccccagagaaaaacccccagcttcgggacttggatatcttcctcagtattgtggatatgaacgagggagctcttcttctaccacacttcaattcaaaggcgatagtgatactggtaattaatgaaggagatgcaaacattgaacttgttggcctaaaagaacaacaacaggagcagcaacaggaagagcaacctttggaagtgcggaaatatagagccgaattgtctgaacaagatatatttgtaatcccagcaggttatccagttgtggtcaacgctacctcaaatctgaatttctttgctattggtattaatgccgagaacaaccagaggaacttcctcgcaggttcgcaagacaatgtgataagccagatacctagtcaagtgcaggagcttgcattccctgggtctgcacaagctgttgagaagctattaaagaaccaaagagaatcctactttgtggatgctcagcctaagaagaaagaggaggggaataagggaagaaagggtcctttgtcttcaattttgagggctttttactgaataagtatgtactaaaatgtatgctgtaatagctcatagtgagcgaggaaagtatcgggctatgtaactatgactagagcttcaactatgaataaataaatcgacagcatatgatgcttttgttttgtgttc

SEQ ID NO: 7687 - DNA, 686 bp, Glycine max
  Clone ID: 700679817_FLI
gctggtagcatcacaaccgccaccagccttgacttcccagccctctggcttctcaaactcagtgcccagtatggatcactccgcaagaatgctatgttcgtgccacactacaccctgaacgcgaacagcataatatacgcattgaatgggcgggcattggtacaagtggtgaattgcaatggtgagagagtgtttgatggagagctgcaagagggaggggtgctgatcgttccacaaaactttgcggtggctgcaaaatcccagagcgataactttgagtatgtgtcattcaagaccaatgatagaccctcgatcggaaaccttgcaggggcaaactcattgttgaacgcattgccagaggaagtgattcagcacacttttaacctaaagagccagcaggccaggcaggtgaagaacaacaaccctttcagcttcctggttccacctcaggagtctcagaggagagctgtggcttagagagccctttttgcatgtgctaccacacttttgtccttttgggctctagctagtgctggtagcagtaaataagaatgaataaaagaaacaaaggcttagatgccctttgttaagtgtagaataacgggtatagtaactatgtacccttgtgtaatgagtcactcaagtacctatgcgggaaaagcataaataaaagaagaaattccaat

SEQ ID NO: 7688 - DNA, 1337 bp, Glycine max
  Clone ID: 700679824_FLI
gccaaaaaccacacaaagcacaatagaggaggaacaacaatcacaaagggcatgaggaccaatgtaggagatattgttcaagtagaaggagggcacattgttaggtccacaggtagaaaagatcgccacagcaaggtgtacacatcgaaagggccacgcgatcgtcgcgttagactctcggcacacacagccattgagttctatgatgttcaagacaggcttggctatgacaggccaagcaaggctgtggactggctcatcaaaaaggcaaagacttccattgacaagcttgctgagcttcctccttggcatccacctactaatcatgaggaagaagagcagaatgatgctgcaggatcaagtggagtcatagccattgaacaacaacaacagcaacagcagcagcagcagcaacaacaacaacaacaacaacaacaacaacaacatcaacagcaacaatcagagtcttgtggttacaactttcagctccaaaggcaattgggagccttcatttcaacacatgttgacactgaccacatcaatttccaaaccaacaacaacaactcctcagaagatcttggcctatccctccattgcttccaagaccaccctggccttattcagtggcaatcacaacaagaaggtgcaaatcaaacacctccttcaaatgaacaccaaatccagcaaaccccttttgccggatcaaccccagttgggtttgagaaccattatcaaagaagtgtgacttggaacaatgaagcaacaaccacagatcatgtcaacaggttggggttcttattcaactcacagccttatgcttcagcttatgctcaaagtggggggacccttcagtccagtttttcatttccaatgacttcttcctctgagcttcacaggcctcagccagtgaaccaaccttcttcaatctttggcagcaggtttgtgtctgatggattagctggtttctgcattccagatagaattcaaggtgtggaagagaatcatggagttgcttccaataggccttcttcttctcctagttctatccactgaccccaaactaagcaatgctttagtcttcctttcaggagtgttctctaccagatttgaaaccgagtgaagattcaataggcacattgttatgatctacaaagatttcctttcaatttggctttcctttttttggcttttaaatttaaagttagttcccttgattcaacccttgctatctatatgtataattttatattgatgaaaatgaccttgtgctgaatttggttttgtagtcctctcactgtattgtgaatgttatttcagaataacatatttcatctgat

SEQ ID NO: 7689 - DNA, 1428 bp, Glycine max
  Clone ID: 700679842_FLI
gctagctagctagcaagcaagcacagagatggaggcaaagcgaggccatgccctcatgtgcttggcacgtgtttcactcttcctctgcgctctaaccctatccgctgctcacggaagcaccacggttcaagacatcgcgagaaagttgaaactcggggacaacgagcttctgcgcacggagaagaagttcaaggttttcatggagaattacgggaggagctactccacagaggaggagtatttgcgccgtttggggattttcgcccagaacatggtcagagcggcggagcatcaggcgctggaccccaccgccgtccacggcgtcacgcagttctccgatctcaccgaggacgagtttgagaagctctacactggcgtcaatggcggcttcccgtcatcgaataatgccgccggcggtattgcgccgccgttggaggtggacgggctgccggagaattttgattggagagagaaaggagctgtcaccgaagttaagttacagggtagatgtggatcatgctgggctttcagcaccacaggatctatagaaggagccaattttcttgccaccggaaagctcgtcagtcttagtgaacaacagctccttgactgtgacaacaagtgtgacataacagaaaagacttcatgtgacaatgggtgtaatggaggtcttatgacaaatgcctacaattatttgctcgagtctggtgggttggaggaggagtcttcatatccctacactggggagagaggtgaatgcaagtttgatccagagaaaatagcagttaagatcacaaatttcaccaatatccctgctgatgagaaccaaattgccgcatatttagtaaaaaatggtccacttgctatgggcgtgaatgcaattttcatgcaaacatacattggtggtgtctcatgccctctcatatgtagcaagaaaaggctgaaccatggtgtgttacttgtgggatatggtgcaaaaggcttctcaattcttaggcttggcaacaaaccatactggatcatcaagaattcgtggggggagaaatggggagaagatggctattacaagctctgcagagggcatggcatgtgtggaataaacactatggtttctgctgcaatggtgcctcaaccacaaacaacacctacaaagaattatgcttcttattagctatgcacttaaggaaatctaaataaatatttttcattctaggtgatgtatcatgtatgtaccaaaatattttggtacgtaagtcttttaaaaagtttgcatctcctctttggttttccttagttctgaaagttatctcctaagaagacaatcatatgtactgtacgtagtgtgaagatatagtattgtatgctgcagaatatgattgtctaataaggtggactagctgtaataaaagatatttccaggttgaaaac

SEQ ID NO: 7690 - DNA, 1271 bp, Glycine max
  Clone ID: 700679927_FLI
cgagcttctcttcaccgctccagatgccctccaatacctctctggtgtcatcctctttgaggaaactctttaccagaaaacctccgatgggaagccttttgttgaggtccttcaagagaacaatgtcatcccaggcatcaaagtggacaagggtgttgttgagttggctggcacaaatggtgaaaccaccactcagggattcgactctctcggagctcggtgccaacagtactacaaggctggtgcacgcttcgccaagtggcgtgcagtcctcaaaattggcccaactgagccctctgagctttccatccagcaaaatgcacagggcttggcacgctatgccatcatttgccaggagaatggccttgtgcccattgttgagcctgagattttgactgatggggctcatgacatcgccaaatgtgctgctgttactgaaactgtgcttgcagctgtttacaaggcactcaatgagcagcatgtccttcttgaaggaactcttctcaagcccaacatggttactcccggctctgatagcccaaaggtaccaccagaggtgattgctgagtacacagttcaagcactccgcaggactgtcccagctgcggtgccaggggttgtgtttctgtctggtgggcaaagtgaagaagaagctaccctcaacctgaatgcaatgaacaagttggaggtgttgaagccatggactctctcattctcattcgggcgagcactgcaacaaagcacactcaagacatggggtggaaagaaggagaatgtcgccaaagctcaagaggcatttctggcaagatgcaaggccaattctgatgctactctgggaaagtatgttggtggaagcggaagtggcttgacttctgagagtttgtatgtcaagaactacaagtattaaacttctaaagagtgtgtttgtttctccttttgaaaacgtcaatccatgcttttggttcagtcacgttgaggtctataagaaagtatgacaatggagaaacaagcatactctaaatggacttggggactgattcggggtggtctggcatatgtatgatacagcctaagaagcatttgcttctgattaacatgcttatttttgggttacatatttttacaaatatcagttattatgttataggagccaattttaatgtcaaatggtgatggtgcgtaccactaaaaaataattgttggagtgaggctggtatatattgtcagaaacagtaatattatactttataaaatgtgcaattacttaacac

SEQ ID NO: 7691 - DNA, 1483 bp, Glycine max
  Clone ID: 700680002_FLI
acaactacaaaggttgctgtaggagataagatattgaagtagtgctaagtgcctaacacctgcagtgaacaatggcctctgcatcagcatctcttctcaagtcttcacttgttcttgacaagtctgagtgggtgaagggacaaacacttcgccaaccttctgctgcatcagttgtgagatgcaaccccaccaccccatcaggcctcacaatcagagctggttcctatgctgatgagctcgttaagaccgcgaaaacagtggcttcaccagggaggggtattttggccatggatgagtccaatgctacctgtgggaagcgtttggcttcaattgggctagagaacactgaagctaaccgccaggcgtaccgtaccctccttgtgacagttccaggacttggtcagtacatctctggtgccattctctttgaggaaactctctaccaatccacaactgatggcaggaagattgttgacgtgctcctcgagcaaaacattgttcccggtattaaagtcgacaagggtttggtaccccttgctggttccaacgatgagtcatggtgccaaggtcttgatggtcttgcctctcgctcggctgcatactaccagcaaggtgcccgtttcgccaaatggcgtactgttgtgagcatccccaacggtccctctgctctggcagttaaggaagcagcctggggtctggctcgctatgccgcaattgctcaggacaatggattggtcccaattgtggagccagagatcttgcttgatggggagcatggtattgacagaacttttgaagtagcaaaaaaggtctgggcagaggttttcttctaccttgctgagaacaatgtcctttttgagggtattcttcttaagcctagcatggttacacctggagctgagtccaaggacaaggccagtcctcagacagttgctgattacaccctcaagctccttcacaggagaattccccctgctgtccctggaattatgtttttgtctggtggacagtctgaggttgaagctaccctcaacttgaatgccatgaaccaatctccaaacccgtggcacgtgtcgttctcgtatgccagagccctccaaaacactgccttgaagacatggggaggccgcccagagaatgtgaaggcggcacaagatgcacttcttttccgtgccaagtccaactcgctcgcccagcttgggaagtacaccggtgagggtgaatctgaggaagccaagaaggagttgttcgtcaaaggctactcctactaagatgtttgtagtgaatatgatacatgttaggcagcagcaacaccagcagttgtagtaggtgttgacggaggatgaagtggaagaagactaatttgtctaaaatgtaatgtttttatagtcttggagactatttttgtttatggttacatgtacctttacagcttataaacctttttgctgtgagttgtgtacttgattgattgtctcaatat

SEQ ID NO: 7692 - DNA, 792 bp, Glycine max
  Clone ID: 700680023_FLI
gatgggttctttggcaaagaagggactcaacaattacgtcaaacagctccagcaacaccctttgagaaccaaggtaatcactgcaggggtactatcagcgatcagcgatgttgtgtctcagaaacttaccgggatacagaaaattcaactcaaacgacttcttttcaaagtgatttttggagccgcttatcttggaccctttggacacttttttcatttaatactggataaaattttcaaaggaaagagagattcaaaaactgtggctaagaaggttctgattgaacagttaacatccaatccttggaacaatttgcttttcatgatttactacggattagttgttgaaggacaaccttgggtgaatgtgaaagctaaagttaagaaggattatctatcagtgcagtatacatcatggacggtctggcctgttgtggggtggataaatcacaaattcatgcctcttcatttccgtgttgttttccaaagcttagtagcatttttctggggagtattcttgaaccttcgagcacgatctatggcattgattaaagcctgaagcaaagaagattactaggacactgttactctttccagagtagtttgcatcagttaaaacaaatcaaaagaagatctgctgttcaaattaatgtgttggcaagatcttttagtttgtctgactatttagacatgatcaatttgtagtgctaggaatatggaagtttgtgaatgttaatttgagtatggatgaacgatgatcaaattgattttgaatgaaattaattttgaagc

SEQ ID NO: 7693 - DNA, 1305 bp, Glycine max
  Clone ID: 700680051_FLI
ctcttcaattcaatactcacacacaaagttccctcctctccaaacatggcggcaattttctcttcttcactcttcgcttcctcgcctcttcccaaaccactttcttcctcctattctcgaatccataccgctccacaacttttcagggctcgatcttctctccttcaggataacgagaaaaaagtgatcgtgcatgattccttcccctccaaaacctctcctcttcacaccgctgataaatcaactggtggaaactcaattaacacctctgcgttcgagaaacggattatcaaggtcgaacaatcggtcaatatctttcttacggattccgtgataaagatacttgatactctgtaccatgatagacactatgcaaggttttttgtgcttgaaactattgcgagggttccttactttgcctttatgtcagttctccacatgtatgagagttttggttggtggaggcgggcggactatctgaaagtgcattttgctgagagctggaatgaaatgcatcatttgctcatcatggaagaactaggggggaatgcttggtggtttgatcggtttctcgctcaacatattgcaatattttattatattatgacagttttaatgtatgcagtaagcccaagaatggcatatcacttttctgaatgtgtagagagtcatgcatttgaaacttatgacaaatttatcaaggttcaaggagatgaattgaaaaaaatgccagctcctgaggttgctgtgaattattatacaggagatgacttgtatttatttgatgaatttcaaacttccagagttcctaattcaagaagacctaagatagagaatctgtacgatgtatttgtaaatatcagagatgacgaagctgaacattgtaagacaatgaaggcttgtcaaacccatgggaacctccggtcacctcattcatatgcagaggatgatgacagctcagtctgtgctcttgaagcagattgtgaaggaatagtagactgtataaagaaatctgttgcttctaatccagctaaggtgaagtaagataagtggcccaatacatagtacattcatttaataagattgtaggcagggaataatgattggaggtagtaaatagttgaaatttggaaaaggttgctctccggtgtaattgtctttatagaaagtaaaggtgtattcacccttaaattttctaagatcaagatcatgaaatatcttatagtgacaaccttctgttaggttaaatgttcataccacactctgaggattatcaaagaaaataatattttggagattgtctat

SEQ ID NO: 7694 - DNA, 1846 bp, Glycine max
  Clone ID: 700680093_FLI
ctcacacggttgtgtccaaagcagttcgaggcaatcaagtgggaagagaagtgcatgttgcgctactccaaccgcgcaatttttcacaccatggatgcttctttttcgtatcctatgagcaacataaacaatgcaacggatgcggaagagttcaataaagtgttgggtgagttacttagaaatctgagtgacaaagctgcatcaggtgactctcggcgcaagtatgccgcggatactgcagtctttgcgaatctccaaaccatatacggtcttgtgcagtgtacgcctgatttgtcaaggcaagactgcggtgactgcttgcattggagtttggcagatttcggaaatgttttcaaaaacaaagttggtgctgtagtgcttagaccaagttgtaatgttagatatgaaatctaccccttctacgatgaacctacaccatcagcatcggtaccactttccctaaaagaaaagggcaactcactgcgaactacaatcgccatagttgtgcctaccgttctcgttgttgttgctttgctcattttcattagcatatattttaggaggaggaaattagcaaggaaaaatcttctcgctgatgaagacgatgatgaaattgaattggctgaatcattgcaattcaacttggacacaataaaagttgcaacaaataacttctctgactctaataaactcggagaaggtgggtttggagctgtttaccagggcaggctctctaatggacaagtgattgctgtcaaaaggttgtcaagcgatcctggccaaggtggcgtggaatttaagaatgaagtccttttactggccaagcttcagcaccgaaatttagttaggctacttggttttagtttggaagggaaagaaaagctacttgtttatgaatttgttccaaataaaagccttgattacttcatatttgatccaacaaagaaagcacgactggattgggatagacgatacaaaatcattcgaggtattgctcgaggtcttctttatcttcacgaggattcacgattgcgcattatacatcgtgatctcaaagcaagcaatgttctcttagatgaagagatgattcctaaaatatcagattttggtatggcaagactgattgttgcaggtcaaacacaagaaaatacaagtcgagttgttggaacctatggatatatggcaccagaatatataatgcatggacaattttcaataaaatcagatgtcttcagttttggtgtactagttcttgagattgtaagtggccaaaaaaaccatggtattcgtcatggggagaatgtggaagatctactaaactttgcatggagaagctggcaagaggggacagttacaaatattatagatccaatattaaacaatagttcacagaatgaaatgataagatgcacccacattggtttactctgtgttcaagaaaatctagccaacagaccaaccatggctaacgttgcactcatgctaaatagttgttctatcactctcccagtgcctacaaaacctgctttttttatggatagtgcaactacaagccttccaaacatgtcatgggaagttaattcagggacaacacgatcgaatcagtccacaaccaaatcagctcacgactcagtaagtgaggcttcaatttctgagctataccctcgttagattctggtcatagttaggggtgatatatgcatttgtcgtcaatgttattaatacatgttttggaacttgtaatttatttgtgcaaagtatggttacttaaatagaccatagaacttaattgtttcagtcaactaagacagaaacatgaaatataaatgaatggtgtattggtctt

SEQ ID NO: 7695 - DNA, 624 bp, Glycine max
  Clone ID: 700680182_FLI
tgatgaggtatttacaaactggaaggattctccaagaacagtgctcaatatttatcatgaacttattcagatgggattgaggatatgggtgttcagtggtaatacagacgtggtaatacccgtgacatctactcgctatagcataaaagctctcgaccttcctactgtgagtccttggcgagcatggtatgatgatggggaggtgggaggatggactcaagaatatgctggccttacgtttgtggttgtaaggggtgcggggcacgaagttcctttgcattcaccaaaacttgctttgacactgttcaaagccttcctagcaggaacatcaatgcccaatcttgagctagtcggtgcctcctgaatttacgttaatattctccctttaaataagttctaattgactgtatttgactgtttcacatggggaatccgatgttgatttcttttacgcgttactcaatttgtgttttttttttatgtaccaaacaaaatattagatgtaccgatttatgttttttcttttctttataatctttttaatagtgctgaagtcaaagttgtgtattcatttattgtttttaattttttttaatggaacatcacatgtttttttatcctttt

SEQ ID NO: 7696 - DNA, 2829 bp, Glycine max
  Clone ID: 700680194_FLI
gaaagtagcaaagatgacaggtgggatgtttggaaggaaggggcaaaagataaaggggacagtggtgttgatgccaaagaatgtgttggacttcaacgccataacctccgtcggaaaaggcagtgctaaggacaccgccaccgatttcttgggcaaaggcttggacgcattaggtcatgcagttgatgctctcactgccttcgctggccatagcatctccttgcagcttatcagtgctactcagactgatggtagtggaaaaggaaaagttggaaacgaagcctatttggaaaaacatcttccgaccttgccaacgttgggagcaaggcaggaagcattcgatattaactttgaatgggatgctagttttggaattccaggagcattttacatcaaaaactttatgactgatgagtttttcctcgtcagtgttaaactcgaggacattccaaaccatggaaccattaacttcgtttgtaactcatgggtttataacttcaaaagttacaaaaagaatcgcattttctttgtcaatgatacatatcttccgagtgctacaccaggtccactagttaagtacagacaagaagaattggaggttttaagaggagatggaacagggaagcgcagagactttgacagaatctatgattatgatatctataatgatttgggcaatccagatggtggtgatcctcgcccaatcattggaggctctagcaactatccttaccctcgcagggttagaaccggtagagaaaagaccaggaaagatcccaacagtgagaaaccaggcgagatatatgttccaagagatgaaaacttcggtcacttgaagtcatctgatttccttacatatggaatcaaatccttatctcagaacgtgatacctttgttcaaatctataatatttgacttaagggtcacatcgagtgagttcgatagcttcgacgaagtgcgtggtctctttgaaggtggaatcaagctgccaacaaatatactgagccaaattagccccttaccagtcctcaaggaaatcttccgcactgatggtgaaaatacccttcaatttccaccacctcatgtaatcagagttagtaaatctggatggatgactgatgatgagtttgcaagagagatgattgctggtgtaaatccaaatgtaattcgtcgtcttcaagagttcccaccaaaaagcactcttgatcccgcaacctatggtgatcaaactagtaccataacaaaacaacagttggagattaacttgggtggggtcacagtagaagaggcaattagtgctcacagattattcatattagattaccatgatgcattcttcccgtatttgacgaagataaacagcctacctattgcaaaagcttatgccacaaggacaatcctgttcttgaaagacgatggatctttaaagccacttgctatcgaattaagcaagcctgcaacagtgagtaaagtggtgttgcctgcaacagaaggtgttgagagtacaatttggttgttggccaaggctcatgtcattgtgaatgactctggttatcatcagctcataagccattggttaaatactcatgcagtgatggagccatttgccatagcaacaaacaggcatctcagtgtgcttcaccccatttataaacttctttatcctcactacaaggacacaataaatatcaatggccttgctaggcagtccctgattaacgcaggtggcattattgagcaaacatttttgcctggaaagtactccattgaaatgtcatcagttgtttacaagaattgggttttcactgaccaagcattaccagctgatcttgtcaagagaggattggcagttgaggatccctctgccccacatggtcttcgccttgtgatagaggactacccttatgctgttgatggacttgaaatatgggatgctattaagacatgggtccatgagtatgtctctgtgtattacccaacaaatgcagcaattcaacaagacactgaacttcaagcatggtggaaggaagttgtggagaagggtcatggtgacttaaaagataagccttggtggcctaaactgcagactgtggaggatctcattcaatcctgctctattatcatatggacagcttcggctctccatgcagctgttaattttgggcaatacccttatggaggttatatcgtgaaccgtccaactctagccagaaggtttatcccagaagaaggaaccaaagaatatgatgagatggtgaaggatcctcaaaaggcatatctgagaacaatcacacccaagttcgagacccttattgacatttcagtgatagagatattgtcaaggcatgcttctgatgaggtctaccttggccaaagggataatccaaattggactacggattcaaaggcattggaagctttcaaaaagtttggaaacaaactggcagaaattgagggaaaaatcacacagaggaacaatgatccaagtctgaaaagccgacatgggccagttcagcttccatacacattgctccatcgttcaagtgaggaagggatgagtttcaaaggaattcccaacagtatctccatctaaaatgtgtgtgtggtttgcttatctattgtgcttttgaataaaatagacaatacttgtctatggttattattggctgtatgtctgtatttggatgctctcgatcggtttgcaagtaataagagtgttttcactgtcactttgtatttcgatcatcttaattatgtttactagtaataatgtggaagctgtacgtttgttaattctaggttaaataatagagcaattgtttttgaact

SEQ ID NO: 7697 - DNA, 875 bp, Glycine max
  Clone ID: 700680238_FLI
ctcctatctggtctgtcatctcgtctaatcttcgtggttacaaaggagacctaactcctgctcaagcccttgatttgatatccacacaaaactacgttttgattgatattaggtcagagaaagataaggacaaggctggtatccctcgccttccctctaatgctaaaaacaggatggttgccattcctttggaagaactgccaagcaagctcagagggcaggtcaagaatgtgaagaaattggaagctgaaatagtcgctttgaagatttcatatctcaagaaaatcaacaaaggcaccaatgttgtgatcttggattcgtactcggacgtagcaaaaacagttggaagaacactaaccagccttggttttaagaacacatggattgttgctgatggattctctgggaacaaagggtggttgcagagtagactaggaacagattcgtataacttctcgttcgcagaggtgctgtcaccgtcaagggtcatccctgcggctgtgagaagttttggcacaaccagccaatctagcacgaagcttcttcctggggctgaataacttttttcttcactaaactcttgtgcaaatagaaattcactcttgtgcatgctcgagtcatcgaatatatttatttgattatttcatcaatgtctaaatgtttatttccaaccttttacctttgtgggtgtttcgagtggctgcggctacatgctcttccctaagttgcaacgaccgaggagaatgccaaaaggttgtagttgttatatatacttgtattggatgctttggccgaggatgtttaggcgtctgtttggtttaatgttggaagacttaaatgatcattgaataaaaaattctaaattcttacttctc

SEQ ID NO: 7698 - DNA, 1168 bp, Glycine max
  Clone ID: 700680249_FLI
ggacaacaaaatggatggattctacattgctccagcttttatggacaagcttgttgttcacatctccaagaacttcatgaccctgcccaacatcaaggttcctctcattcttggtatctggggaggcaagggacaaggaaaatctttccaatgtgagcttgtctttgccaagatgggaatcaaccccatcatgatgagtgctggagagttggaaagtggaaatgcaggagagccagcaaaactgatcaggcagagataccgtgaagctgcagacatgatcaagaagggaaagatgtgcgctctcttcatcaacgatcttgatgcaggagctggtcgtcttggtggaaccacacaatacactgtgaacaaccagatggtgaatgccactctcatgaacattgctgataaccccaccaatgtgcagcttccaggtatgtacaacaaggaagagaacccccgtgttcccatcattgtcaccggtaacgatttctcaacactctatgcacctctcatccgtgatgggcgtatggagaagttctactgggcaccaacaagggaagaccgcattggtgtttgcaccggaattttccgcactgatggtattcctgaacaggacattgtcaagcttgttgacaccttccctggccaatccattgatttctttggtgcactgagggccagagtatatgatgatgaagtgaggaagtggatttctggtgttggtgttgacagtgttgggaagaagcttgtgaactcaaaagatggacctccaacctttgagcagcccaagatgactctggagaagctcttgctgtatggtaacatgcttgtccaagaacaagagaatgtcaagagagtccaattggctgacaagtacttgaacgaggctgctcttggaaatgctaacgaggatgctattcagaggggaactttcttccagtcttgaattggaggcaaagcaaacttggcaagtaaatatttctgttcgtgaaggttgttgtactaatccaagtgctagaagttgtgatggaacttgcgtgtaacattcttagcattctcaatgtcttaggtgcaaagagaagatgctaagtttgagatgatcttactatatttttcatattggaccgtcttcctctataattttgagttacagtgtccacttaaattg

SEQ ID NO: 7699 - DNA, 713 bp, Glycine max
  Clone ID: 700680406_FLI
cttcaactcttaactcatcagtttcaagtcgcagaaatgaacggtggcgcctttgattttatcgaagaaaacggaaacgggagcgactcggactcgaattctgatgacgcgccggagtactaccagccgatctccgccgtggaagacagtgggagttcggacgacgagcacgacggtgaattcggacacctcccgaacggttttgccgcgcacggcgtggtggagaacgggatctcgtctctggatctgaacgacattacagagaagagcagcagcgacgaggaggaagaagaggaggaggagaggatcagagagttgttcgagagatcgtcgagagaagacgagaaccggcggaatgcaccactgacggcggagaacgcgacgagagttatggaggcgatgcgcggagtgtccttcgccggagtggttcccgattgggctggtcgagatgctgatgatcgatggattgatcagcttcgcagattgagacaatcgtcgaacacttgacggaaaattagatactcaattaggtgcgatgtttttttccctccagtttttaacttgttatttggatgaagatttagttagaattttgtgctcgaaatgtgttgaaattcaatgcggctttggataccaagcataatcaattttaggttgctttggcaatgtaaaaaaaataagctaggtgcaatactttgaaaattctttctact

SEQ ID NO: 7700 - DNA, 982 bp, Glycine max
  Clone ID: 700680464_FLI
ggaaaccatgccgcagcattggctttggctgcaaaactacgggggatcccttcgtatattgttattccaaaaaatgccccaacttgcaaaattgaaaatgtaaagcggtatggtggtcaggttgtctggtctgaagcctctgttcaatcaagggaagaaattgccaacaaagtgtggcaagaaagtggtgctatctttatacatccatataatgatggacgcatattaagtggccagggtaccatatccttggagattctggaacaagcaccacaaatagatacgctagtagtacccataagtggtttgttcacttttttttctgacaaattgtgaaccaaaatgttgtaaaaatcgcataaattccaaaatctgcttcttgattttccaacaaatgaaactgcaggtggtggtttgatatcaggaatagcattggctgccaagtccattaacccagctattcgtatttttgctgctgaacctaaaggtgctgatgatgcagcacaatctaaagcagctgggaggataatacgattgcctgagaccaacactatagctgacgggcttcgagcatttcttggagatttcacatggcctgttgtacgagatcttgttgaggaaattataactgttgaagacagtgaaataataaaagccatgaaactgtgttttgaaattcttaaggttgttgtagaaccaagtggagcaattggccttgctgctgttctatccgatactttccagaaaaatcctgcatggaaggattgcaaccatataggaatagtagtttcaggaggcaatgttgatctggccatgctttgggattctttgaacaaaggaaagtgacttctttttgttttgcttatgtggaccttcattgttctctatgtgagtgtaaatgatccaatttgtatggacaagtctattccattccttttagttaacttgttgggttgaaattcttgtttgtcaagaattattt

SEQ ID NO: 7701 - DNA, 872 bp, Glycine max
  Clone ID: 700680467_FLI
cactcacatatacacatatctgagtgtgaggctgaggtggttggattggaggattaggaatgagggatggatcgaaagagaagaggaagagacgcagcgtcaatccctccaatccaaccacctcagcctcacactcacatatacacatatctgaacgcgtatcgtccctcctatggcttcaaagcgcatcctcaaggagctcaaggacttgcagaaagacccaccaacttcttgcagcgctggtccagtagctgaggacatgttccattggcaagcaacaataatgggtcctgctgatagtccttatgctggaggtgtattcctagtcactattcacttccctccggattatcctttcaagcctcctaaggttgcctttaggactaaggtgtttcacccgaacatcaatagcaatggtagcatttgtcttgatatcctgaaggagcagtggagccctgcactcaccatctctaaggtactgctttctatctgctcattgctgactgatccaaatcctgatgatccacttgttccggaaatcgctcacatgtacaaaactgaccgggccaagtatgaggccactgcacgcagctggacccagaagtatgccatgggctgatttgtgtttggataatgtatattgaaatggattgcatctatgaaaacttttgtgggtttgcttttcacttcctgttttctgggtaagattatgtttctgttatgaggggctagggaagggaggtgtcttaatttgataaaaaaaataactgtgttcaacaaccactgtgatgtttttatcatgatgcaaacgcatgaacaggatgttatttgtgtcattgctgtgttgtaacttcctctatgaagtaatgtag

SEQ ID NO: 7702 - DNA, 836 bp, Glycine max
  Clone ID: 700680580_FLI
aacaaattatcttggtcatttcctcttgacgaaccttcttcttgacaagatgaaacaaaccgcaaaagacactggaattgagggcaggatcgtaaatctgtcatcaattgctcatctctacacttacgaagaaggaattcgatttgataccatcaatgatgaagatggataccatgagaagaaggcctatggacagtccaagttagccaacatattacacacaaacgagctttctcgtcgcttacaggcagaaggtgttaacatcacggccaactcagtccacccaggggtgataatgactcctctcatgagacactcttctttactaatgaattttctgaagatgttctccttcatgatatggaagaacgtccctcagggagcagccacaacgtgctatgtcgctctacacccaagcttgaaaggggtaacggggaagtaccttcaggattgtaatgagtccccaccaagtgcacatgcgtcaaacgaactcttaggaaggaaactgtgggattttagcaacaagatgattaattcactttcaaaagcttgattgattgcactatagtatttgtgccaaaccctcgtcttcctcatatcagtgtatcaaaactcgttaattatgcttaatatacccatccaccctacagttataatcataagttctaaacatatgattcgtggtcattggtccttgactccatttgtattttgtacgcgtaatatagaggtcttatatactcttatttatgtatcaaacgtatcctttaaattaaaattaaggtaaaagaagtatgttaatgatgatttaggcgaatatgctgactagtttaatc

SEQ ID NO: 7703 - DNA, 637 bp, Glycine max
  Clone ID: 700680612_FLI
ggtgtttatgcaattggagatgtaattccaggcccaatgttggcacacaaggcagaagaagacggtgttgcttgtgttgagtacatagctggtaaggtgggccatgtggattatgacaaagtccccggtgttgtctatacaatgcccgaggttgcatctgttgggaagacagaggagcaggtgaaggaacttggagttgaataccgtgttggcaagttcccgttcatggctaatagcagagctaaggcaattgacaatgctgaaggactggtgaagatattggctgaaaaggagacagacaagatattgggagtgcacattatggcacccaatgcaggagagcttattcatgaagcagcaatagcactacagtatgatgcatctagtgaggacattgcacgtgtgtgccatgcacatccaacaatgagcgaggctgtgaaagaagccgcaatggccacttatgacaagcccattcacatttaaaaggagccggttgctacttcttgttttcatttttgtccaagaattttacaatgacttggagatgatacatcctgtgttaaatttagattcaggtttttaaatgcaaattagccccttgtttacttgtttgcataataagaggaatgattgtgtt

SEQ ID NO: 7704 - DNA, 340 bp, Glycine max
  Clone ID: 700680701_FLI
gccaaagggtggtggatttggcacacctagtagcaagcaagtggccaggggcagctaaagcagggagtggagacccattggaggaattctgcgagacaaaccctgctgatgaggaatgcaaagtatatgaatagaggagagcgcctttttctgatttgatgattaccattaccagcagcaaaccatttttactctttgccttgtgttaacgtatcatgtgaaaaagaaggaaattgttcgttcagacggtgtctgaggagagattttcaaagtttaacattatctgcagccaataataaattttggcgtgactgaaattcatgaatatcgcccatatatt

SEQ ID NO: 7705 - DNA, 1158 bp, Glycine max
  Clone ID: 700680718_FLI
caagatggcaggatatcaagcattcgatcatgttacattctatgtgggcaatgcgctccaagcggcgacattctacatcgcgagattcggaatgacccccgtggcatacagtggtttagagaccaactcacgccaagtctgcacacacgtagtcagacagggctcgatcaactttgcattttcctctgctctgaacccagagggcaaggagaccgacgagatcggtcaccatgtctggaaacatggagatggttgcaaagacgtcgcattcaaagtcaatgattgccgtgccatatatgagaaggccatagagagaggcgccacatctgtctccgccccgaaagagttgaaggacgagaatggtaccgtgataatggccaccatacaagcctttggagacaccacacattctttcgtacaacacgtagactataaaggtcctttccttcccggcttccgtgcctacacagacgtagaccctctgacaaaaatgacaccacccatcggtctcgacttcatcgaccacatcgtctctaaccacccagatcaacagatggagaccatcgtccaatggtatgagaagatcctcggctggcacagattctggtccgtggatgacaaacagatccacacagagtactcttctctgagatccatcgtggtggcagatgatactgagaaggtcaaatgtcccgtgaatgagcccgccaaaggaaagaagaagagtcagatacaagagtacgtagagtactatggaggctctggagtccaacacatggccttacataccaacgacatcatacacgccgtacatcacatgaaggagagaggatgcaagttcttaacgatccccgcctcatactatgccaacgttcgcgagagactccagcactcttccacgaaggttaaggaggacatggacaccctacagaagctcaacatcctcatcgacttcgatgagactggctacctcttacagatcttcacgaaaccatcacaagacagacccaccctcttcttcgaggtcatacagagacacggacatcagggtttcggtgccggcaactttaagagtctgttcgaggccatagagagggatcagaacgatagaggcaacctcacagacactgcatgatgatgaaataaagacaatcagtg

SEQ ID NO: 7706 - DNA, 403 bp, Glycine max
  Clone ID: 700680759_FLI
cttatgctggatcccaaggtaaaggaacgtgcaatcgaacttgcaaaggccatggaaaatgaggatggagtgacaggagctgtgaaagcattttttaagcagcttcctcaaaaaaaatcagagttggttgcggatctgcatcagactggttttttctctgtaagaagatgttttggttgttcctgattcaaatgcagtttattaaaccccactttttggtaattaatagtgtaaatcacaaatagttactgcatctataggatgtgctggacttgtcaccctgtcatgtgattgtataatttcatgcatgcttgttttgtactatttaacttgagattcagtttgtatgtaaatttactgttgcttttaattgatattaagtgctcggcatatataaatcctc

SEQ ID NO: 7707 - DNA, 597 bp, Glycine max
  Clone ID: 700680937_FLI
caaagttattaattacttaccaaaagagaccctcttttaagaaaacaatggcagtgaataaggtaacattggttgcttcagtgatggcttgcatgctcataacatgctcttatgctgaatcaaccttgtcatgtgaccaaatcactatatggctcactccatgcataccttatggagtgttaggagggaacgtgtcatccttgtgctgccaaggtgtttactctctcaatgctgcatataagagtgctgaggatcgaagaggtgcatgccaatgcattaaggatagggcggcatgcattcctggcattgactacacgcgtgtcaatcaagttggtccaagatgtggctctaagtgtcccttcaaagtgtacccttccactaactgctcagcggtgccgtaagcattcagcaaagggggtgcaatatcaagtctatgggtcactagtactagtagtggtgtggaaagattaattatactatgagaagtgaagaaatattatacttaattagaaggaaataaagtgtatggattgtgtgttacgatccaacgatcgaaagccttgaagtatatcaacaataaaagatatcccttcaatt

SEQ ID NO: 7708 - DNA, 340 bp, Glycine max
  Clone ID: 700680992_FLI
gtgaaataggggagaagtatgataaaactccaacacaggtatccctgaactggctggtagcacaaggcaatgttgtgccaattccaggagccaagacagcagaacaagctgaggaattcagaggtgcacttggctggagactaactgatgaagaggtagctgagctgcgtagtgtggcttcagaaattaaacctgttataggttttccagttgaaaaactctagaatatagcatacatctttacatttgatttagaaggtgcatgctatattctaaatcaaatgtaaagatgtatctgtttatggatatagctcttgttattattaattatttattttgc

SEQ ID NO: 7709 - DNA, 120 bp, Glycine max
  Clone ID: 700681024_FLI
aatttatcttaagctattttttatattacctgttcatttctgacaaacagtgctttgacaatgccaagggtacatgcgctgataattctcactgaatgaagtaacttttggtacttggtc

SEQ ID NO: 7710 - DNA, 1623 bp, Glycine max
  Clone ID: 700681043_FLI
aaaagccttagccttccctacaactccaaacacaaagacatcatcatccatggctgcctccgtctccactgtcggagctgtcaacagagctcttttgaacctgaatggttctggagctggagcttcagctcccagttcagccttctttgggaccagcttgaagaaggttattgcctcaagggtccccaacagcaaggtttccggtggaagcttcaagattgttgctgtagaagagaagaaagagattgaagagacccagcagaccgacaaggacagatggaagggtcttgcctatgatatctcagacgaccaacaagacatcacaagaggaaagggtttggttgactcccttttccaagctccacaggatgctggaactcactatgcagtcatgagctcctacgagtacctcagcactggacttcgccagtacttggacaacaaaatggatggattctacattgctccagcttttatggacaagcttgttgttcacatctccaagaacttcatgaccctgcccaacatcaaggttcctctcattcttggtatctggggaggcaagggacaaggaaaatctttccaatgtgagcttgtctttgccaagatgggaatcaaccccatcatgatgagtgctggagagttggaaagtggaaatgcaggagagccagcaaaactgatcaggcagagataccgtgaagctgcagacatgatcaagaagggaaagatgtgcgctctcttcatcaacgatcttgatgcaggagctggtcgtcttggtggaaccacacaatacactgtgaacaaccagatggtgaatgccactctcatgaacattgctgataaccccaccaatgtgcagcttccaggtatgcacaacaaggaagagaacccccgtgttcccatcattgtcaccggtaacgatttctcaacactctatgcacctctcatccgtgatgggcgtatggagaagttctactgggcaccaacaagggaagaccgcattggtgtttgcaccggaattttccgcactgatggtattcctgaacaggacattgtcaagcttgttgacaccttccctggccaatccattgatttctttggtgcactgagggccagagtatatgatgatgaagtgaggaagtggatttctggtgttggtgttgacagtgttgggaagaagcttgtgaactcaaaagatggacctccaacctttgagcagcccaagatgactctggagaagctcttgctgtatggtaacatgcttgtccaagaacaagagaatgtcaagagagtccaattggctgacaagtacttgaacgaggctgctcttggaaatgctaacgaggatgctattcagaggggaactttcttccagtcttgaattggaggcaaagcaaacttggcaagtaaatatttctgttcgtgaaggttgttgtactaatccaagtgctagaagttgtgatggaacttgcgtgtaacattcttagcattctcaatgtcttaggtgcaaagagaagatgctaagtttgagatgatcttactatatttttcatattggaccgtcttcctctataattttgagttacagtgtccacttaaattgaatttggtgccttttccttt

SEQ ID NO: 7711 - DNA, 1632 bp, Glycine max
  Clone ID: 700681047_FLI
gttaaaagccttagccttccctacaactccaaacacaaagacatcatcatccatggctgcctccgtctccactgtcggagctgtcaacagagctcttttgaacctgaatggttctggagctggagcttcagctcccagttcagccttctttgggaccagcttgaagaaggttattgcctcaagggtccccaacagcaaggtttccggtggaagcttcaagattgttgctgtagaagagaagaaagagattgaagagacccagcagaccgacaaggacagatggaagggtcttgcctatgatatctcagacgaccaacaagacatcacaagaggaaagggtttggttgactcccttttccaagctccacaggatgctggaactcactatgcagtcatgagctcctacgagtacctcagcactggacttcgccagtacttggacaacaaaatggatggattctacattgctccagcttttatggacaagcttgttgttcacatctccaagaacttcatgaccctgcccaacatcaaggttcctctcattcttggtatctggggaggcaagggacaaggaaaatctttccaatgtgagcttgtctttgccaagatgggaatcaaccccatcatgatgagtgctggagagttggaaagtggaaatgcaggagagccagcaaaactgatcaggcagagataccgtgaagctgcagacatgatcaagaagggaaagatgtgcgctctcttcatcaacgatcttgatgcaggagctggtcgtcttggtggaaccacacaatacactgtgaacaaccagatggtgaatgccactctcatgaacattgctgataaccccaccaatgtgcagcttccaggtatgtacaacaaggaagagaacccccgtgttcccatcattgtcaccggtaacgatttctcaacactctatgcacctctcatccgtgatgggcgtatggagaagttctactgggcaccaacaagggaagaccgcattggtgtttgcaccggaattttccgcactgatggtattcctgaacaggacattgtcaagcttgttgacaccttccctggccaatccattgatttctttggtgcactgagggccagagtatatgatgatgaagtgaggaagtggatttctggtgttggtgttgacagtgttgggaagaagcttgtgaactcaaaagatggacctccaacctttgagcagcccaagatgactctggagaagctcttgctgtatggtaacatgcttgtccaagaacaagagaatgtcaagagagtccaattggctgacaagtacttgaacgaggctgctcttggaaatgctaacgaggatgctattcagaggggaactttcttccagtcttgaattggaggcaaagcaaacttggcaagtaaatatttctgttcgtgaaggttgttgtactaatccaagtgctagaagttgtgatggaacttgcgtgtaacattcttagcattctcaatgtcttaggtgcaaagagaagatgctaagtttgagatgatcttactatatttttcatattggaccgtcttcctctataattttgagttacagtgtccacttaaattgaatttggtgccttttccttttgtcct

SEQ ID NO: 7712 - DNA, 1179 bp, Glycine max
  Clone ID: 700681050_FLI
ggtggcggggaatggtgctgcgacagtgtactcagctttggcgttgaaggccatgtcgagacatttcaggtgtttgaaagatgggattttgtcgcagattcaggcaacaagaaaagccatgggagagaaagacccagttgcaccaggcacaacaaggggcgaaacgccaagacttaaagtcattgaccaaacactgagacaacaaagggcgtttcagcaaatgagcatgatggaaacacatccttggagaccccaacgtggccttccagagcgtgccgtttcagttcttcgggcttggctctttgaacattttctccatccgtacccaagcgatgttgataagcatattttagcacgccaaaccggtctctcgagaggccaggtttcgaattggtttattaatgcaagggtgagactatggaagccaatggtagaagaaatgtacttggaggaagtgaaggatcctgagaacaacatagcttcctcagaaggggctactgatcaagacaatgatataaacccaaataatgttcaataccctccacctcctttatcatcaagatcagaggatcagaagccatcactggttcgaattgactccgagtgtgcgtcctccatcatcaacaaccacagtaccccagataacaaaaacgatccaaagggccaagaacagtgctttgggtcagtggagcttgatttttcatcatacacacaccactcctcgggcatggtttcttacggaagtagtgatcagaatgggaacaacaaccagagtggggtgtctttgacgctagggttacagcaacatggggtgagtctagcgttcccgccagcaacacagagttcactgtactatccaagggaccaaattgaagattgtcaaccagttcatcagtactctcttttggacggtgaaggacaaaacctgccttacaggaatttgatgggagcacagcttctgcatgacttggcaggatagattatatatattaattcttgatttgaggaattgagattaaaatggtgagtataatcaacaacaaattaagattagtctcttttttttttcacttttagctagctacgtacaaaattattatatagtacacaattaatgcttaattccatacataaagctatatatacttggttaattagataaacgtacagtttaatttc

SEQ ID NO: 7713 - DNA, 1174 bp, Glycine max
  Clone ID: 700681054_FLI
aaacggtttgagtgagtgtgacactgccaacaatggtgttggcatatgctgccatgctttcttccactttaccgtttcaaaagtctgttcctttgacttctcaacgttcaggaacagcatttggttcctctttccaattcaatagagagaatggtactgttgttacacctcttgtcgtgtgtcatgctaagaagaaactcagttttatggagcaaattctcgattacattgaagggggtcctaaattaaggaagtggtatggtgcacctgatatccttgaaaaagatggtactgcaatagaagataatgaggatgattatccggaagatgaagtcagggatgcagtgctggtaacagatggagatagtgagatgggtcagatggtgatattgtcattgattgtgaaaaaagctcgagtaaagacactggttaaggataaaagggttgcacttgaagcctttggaagttatgttgaggagatacaagtgacaaacgatttgtcaagaaagctctgagaggagttcgcacaatcatatgcccaaatgagggatttctttctagcgttggtagccttcaaggggtacaacatgtaatcgtcttatctcagtttatggtggtcaaagtggctttcaatccatgatgaaaagcaatgcaaagaaattggctgaacaagatgaatcagtattgaaaacctcaggaattccttacaccataattaggaccggtgcattacaagatacacctggtgggaagcaaggctttacctttgatgagggttgtgcagctagtggaagtattagcaaagaagatgctgcctttgtttgtgtagcagcttttgattgtgtcccacaaactggattcatttttgaggtggccaatggggataacaaagtttcagattggaaagaatgtttggccacattgatggagaaagcaagtcaaaaacttcagtgactattgacagggaatgtgtgtcctccctattgaattcttgatgtgcagaatggtctcaaatgggtttgtttttcatgagaggaaggaaagccttgtgtttttccttaccttaaagtggtcaaaattgctgctttcaggctgtaaccgcatattttgataaccattgttgattagaaggcaagaaattcatgctttctctaatagtaagtgctttcatcct

SEQ ID NO: 7714 - DNA, 492 bp, Glycine max
  Clone ID: 700681121_FLI
aaaggatataaagtgggaagatgatggagtgctagttagctcgattgatatggatattttttgacagtttgcactgtttactcaggatcttaatttggtcagcatcttatctgattcatgctgcaacagtcggagtctaagacaatattcaagtataatagtgtctattgatttggttatagtcaaataccatcatgtgatcttccaatagacaacttcaaacaaaatctaagttgtgtaggaatagcagaaaagtagaatgtacattgaataaggacgttttctgaaagaaacaggcatcctagtcaagcacatcgacaatacatcaataacatatacttttgtagatggcttaaaagaatcgtacatgtaatcaaatttatttattaacagtctaataatcctagtgtagtttgtagggcgtttaagttcacgggcctaatgattttttatgccaatattagtgagaaagagaaaatgggaatatttcgg

SEQ ID NO: 7715 - DNA, 1835 bp, Glycine max
  Clone ID: 700681177_FLI
cttccgttccttctttctttatcatcaccagtgttccatatttcagagaaaatggctttatcatctccctctctagtgttcaccgtacagaggtgtcaaccggagctggtggctcctgctaaacccactcctcgcgaagttaaacccctctccgacatagatgaccaacagggcttgcgtttccaaattccattcatactattctatggtaatgaaccatcaatggcagggaaagaccctgctaaggtcattagagaggcacttgcgcaaactcttgttttttactacccttttgcgggtaggattagggagggacctggtagaaaattggtggtggattgtactggagagggtgtcatgttcattgaggctgatgcagatgcaacacttgatcaattgggtgacacacttcaacctccattcccatgcttcgaacaactcctttatgatgttccaggctcggagggagttattgactgtcccctaatgctctttcaggtgacacgtttcaagtgtggtggttttgccctagccgttcgcttgaaccacactatgagcgacggagccggcatagcactattcatgaacacattagctgaaatggctcagggagcaactgaaccttccgttccacctgtgtggcgccgggagcttctacaggcaagagatccacctcacatcacatgcaaccatcgtgaatacgagcaaatcccaaacaacatggaagggatcatcccttcatacgagaacaagatggttcttcgatctttcttctttggagcctccgacatagctgccctacgtcgcttggttccccactaccatagaaaatgcaccagtttcgatctcatcacggcatgcttctggcgctgtcgcacaaaagcattggagatagatgcagacgaggatgttcgcatgatggtcatagtcaacgcacgtgctaggtttaatcctccattacctgctggttactacggcaatgcctttgcataccccgcggcagttaccaccgcagggaagctttgtgaaaatccatttgggtatgcagtggagttaataaataaactgaaaggtgaggtgacagaagaatacatgcattctgtggcagatctaatggtgactaatggaagatgcttgtttaccaccgtgagatcttttattgtgtcagatttgagacattttggtttcaaacaaattgattttgggtggggtagggcattatatggtggagtggccaaaggtggggctggaccctttcctgcagtattctatctgatggcacataagaatgcaaaaggagaagaaggcatattattaccaatttggttgcccgccaaagctatggacaagtttgcaaacgagttagatcacatgctaattgggaaccaaaaccaacctacggatccacatccaattttttacgcgtctaccttggaaaatattaagtggacacccaaaaagttgattggcacccagtgagagagatacaagagagaaaaaaaaaaatataagtattataaataatataatataattaataagaaggagagaaatggtgagtgtttgaaaaaattgagattcaatatcataacttgtctacctttgtagtttgtagaatgtctgtgttttctaagtatttgaaggactttaagttttcttacgtgtatcttctgtttatataataattattgatattcaaatagttggggtgatagaagtgtacatacctgcgatgctattaatttgaaattaatagtgcatatgctcatcatgaacttattattcaatcgaattaatgccaattacttgggaaagcaaaagtaataagcaccttt

SEQ ID NO: 7716 - DNA, 1542 bp, Glycine max
  Clone ID: 700681206_FLI
tggaattggtcatggccaaagtcagaggtggacctctctcccccgcggcgcacgttagcccctctcccaagcggtgctcccctcctcatccacccacgtcactcattctgccgcacatccctccccactttaacaacaaccatgcccttacccttaccctcaccatttcactctcaccctcacccaacacccccttatcctgcgcccctcccctcctccttatccttcaccctattctctcacccccaccacacccttacctaaaaactaaaaacccaatctttttctctctccaccaccaaccatggcctccccttcttcccccaccgactccaacccaccctctgccgtccccctccctctcccggcgcctcccgccacctcctcccgccgccttcctcctccctgctggaccccggaggaaaccgccgccctcatcgacgcctaccgcgacaaatggtactccctcggccgcaccaacctgaaggctacccactggcaagaggtggccgacgccgtcaccgcgcagtgccccaacgcctcccccacggcgaaaaccgccgtgcagtgccgccacaagatggagaagctccgcaaacgctaccgcaccgaaatccaacgcctccgcaacctccccttcccccgcctcaacaacgccaacaccaattccccttcctcgtgggtccacttcaaatccatggactccatggaaaaaggccccaaccacaaaccccactccgacatcaacaacaacctcaatttccacgatgacgacgacgacgactatctgtacgaggaattcaaaaccgcccccggatccaacaccaacacgagaagcctcaacaagctctacaagaacaacaacggattcaattcgggtggttcgggctccggatccgggtttcggattcggatcccggccggcgtgccacaacaacaacatacggcgtcgtctaataagattttcaacagccatcttcctcccgggatagtgccacgtggcggaggcgtgaagagggagcgtgagagggacgcggtggcggagatggtggaggcgattaaggtccttcgcgacgggttcgtgaggatggagcagatgaagatggagatggcgagggagatcgagagcatgcggatggagatggagatgaagcgcaccgagatgatcctggactcgcagcagaggattgttgaggcttttgcaatggccgtttcgcagaagaggagcaagggcaagtccacgccctcaccttcatcgcaaccgtagaataatcgaaatcgaatttgaaatcggacggtgagggtgattgattaattgtgtttagtggttcggtttcttgattagctaggttctcatattttgcaatagtcttctgttactttttttttttttttttcttttaattgttagctggtgatgtttggatgtgttgaatgctggaaacttgatattgggttttaggatgggtgaatgtgggtttagcatttgatatcggttaattgtaattttctgtctcaataatttcttacttacagatttgg

SEQ ID NO: 7717 - DNA, 2106 bp, Glycine max
  Clone ID: 700681321_FLI
ctttgccctctctctgcacaccgcttcctctcttggtttcgagaggtgaaaatggagtcggaggatagctttagcgaccttattaagatggcaaagaagcttgagtcagacatattagccaagattaacttctcttctgcacatgtcattgatctagacagactcctttgtgatacctttatcagacagtgtccaacaccacttgattatgacaatagaagagatttggttcacatcttcaatacgatgacaaaggaaatatatgggaatggtgatggctcccctgttgtggaggagtatggatcatttgtaatggatatgtttgatggaaaaagtgatattgacttatctctcaatttcaataattcaattgaagtttctcggcagaagaagatttcagccctttacaggtttaataagaaattacagtcaattcaaagtaaaggacatgttactggtttacagttaatatttagtgccagggtaccgattataaaagttactgatagtggaacgggtattgaatgtgatttatcagttgataatagggatggcattaataaatcccatattatccgtgcaatttctgacatagatgaaagatttcgaaagctatgttttctgatgaaatcctgggcaaaagtgcatgatatcaactctcccaaagattcaactttgagttctttttctattgtatcatttgtcgcttttcatttgcagactcgcaatcctcctatattacctccattctctattttactcaaagagggagataatcctgcatatgttgctaaggttgttgaaacttatttcaactatgggaaacagaacaaagagtcgttggctatgcttttcattactcttttagttaagctagcatcagttgaaaatctttggcagaaaggattttgtgccagcttatatgaagggtcgtggattttaaaatcatggaaatgctcttactcaatgagtgtaattaaattcatttccaccaacccctagtgtagttggatattaacctatgtagttccaatttatgttgatgatgttttgttgaacaggttgaagatttcatagaccggtcccaaaatgttgctagagcagttcgaaagaaagttaaattcaatctatggatgtatccataaatctcttgactaccttatgcagtttcgaaatggtcagatccagggaaataatttgatggacgttttgtttgaaaaaaatactgcttctactctggaagttggggttactagccacatagttcaaaataagaataacctccctattttgggaaatccgcatccaccaaaaaagaggaggttagaggaaaatcaggttcggatacctagtggaaaaaaaattgttcaaggcttgcaaggaacagggccaccccagagtgcgggttggatgcagcaagctcttgatgaatctgtgcgtaatgtgcttacttctgcgacttccaccatttcctaccaacctatttcttctgtgacttcccctgtttcctatcaacttcctgttcctatttctagtaccaatgttaaggtgaatccagggacaacttctcatttttccttaaatgcaggagcttttggacatccttataacccaccttccataaagcctcatgttgcacctcaaacttcccaagatttttttgccacagttagtaaaaaagttttagctccatgtccttgtcttccatcaattaattcacaccttcatcaaaatcctccttccatacagcctcgtgttgcacatcaaacttcccaagattttttggccacagttagtcaaaaagttttaactccaagttcttatctatcatcaattaattttcaccttcatcaaaatcctccttccatacagcctcatgttgcacctcagccttcccttgattttttggctacagttagtcaaaaagttttagctccaagttcttatcttccatcaattaattcatactttcctcaagtaggccataatccatacagagagaaggccttctacaatcataggcgctaaaggggttgcttttcatggtatatgcatttgtagaatcaaattaaaattagattaaaataaatcatctatatgcaagcg

SEQ ID NO: 7718 - DNA, 965 bp, Glycine max
  Clone ID: 700681325_FLI
tgcacccggctgttttggtggaaacatatgaaaagggtgaaagtgtctcatattatgttgatgatcttcaaggacatgaacgggttaaatctgctcttgcccacattggtactcatgcacttttgaaaatgcttctggtggacaacttcattcatgcagatatgcatcctggaaatatccttgttcgagtgtctcagaacaagtctcgaaaacggctcttcaaatcaaagcctcatgtagttttccttgatgtaggcatgactgccgaactctctgggtagtgatagagtaaatttactggaattttttaaagctgttgcccgccgagatggccggactgctgcagaatgtgccctgaacttgtcaaatcaacagaactgtccaaatccggaggccttcattgaggaggtggaagagtcatttactttttggggcaccccagaaggtgatattgttcatcctgcagagtgcatggaacaattacttgagaaagttaggcgtcatagagttaatattgatggcaatgtttgtactgtcatggtgacaaccttagttcttgagggttggcagcgaaaacttgatcctgggtacaatgtgatgcagacattgcagacattgctacttagagctgattgggcaaagtctctttcgtacacaattgacggactcatggccccttagggaggaggaagtttctttctttgttgaggctctctcttgagaaacaattttgactaacataaaaacccaaaacaaaaacatctgtcctaagggctctctcacatttgtttttttatttaatttttttaaagatttatcccttgtatttatcttggttaatttccaagttatttttgtgagcgtcacagtttacaacaaaaatggaagtagaaacaataaaacggtgaatatatctcctctcccttctttactcgcaggatgaatgaacgatatagttagaccct

SEQ ID NO: 7719 - DNA, 1066 bp, Glycine max
  Clone ID: 700681333_FLI
cagcagcccaagatatcatgacacaatcatggaagacttctctaagagaattgaatggctctttgaaggatgtaccatggaaggcttttttccaaaatcgtgctgtgtgggctatgatatatgctcatttctgtggcagttggggtcactataactgtctatcatggcttcccacattttttagtgaggagctgaatctaaatctgactgaagctgcatgggtctctattcttccgccactggcttcaatatttgtgactagtcttgcagcgcaattagctgacaacttgatttcaagaggagttgaaaccactgtggttcgaaagatctgccaatcaattgcatttttgtcccctgcaatctgcatgactctttcctcgctggatctagggctaccgccttgggagattgtggggattctcacaagtggtttagccctctcaagctttgccttatcaggactctattgtacccatcaagacatgtcaccagaatatgcaagtatacttctgggtataactaatactgttggggctattcctggaattgtgggtgtagccctcactggttatcttctggattcaactcattcatggagtatatcactatttgcaccatcgatcttcttctatgtgactggtaccatcatatggttggcgtttgccagcagtaagcctcaaagtttttctgagcaaaactgattcatgttccaatcattcattattctgagcatagcctagaaacttaagaaaccttcatgcgaagcagaattttgacacggggggtataatggtatatccgcttgatatatacaaatcatataatttaagtacaaagaaatgatagtataggtacattactgtaagtattctttatttttaactgtagcttattagtatatagcagtattgtatatttttaatagatgaagatggtatggtggttggtcaccaaaaaatgtattgacgtgtttaaatcctttccaccaacttttggtgctctctggtccttctgttgcaagtttcaaccagaaagtgaccgtttcaataatcttacattttaaggc

SEQ ID NO: 7720 - DNA, 2073 bp, Glycine max
  Clone ID: 700682523_FLI
ggcgaagaacggaagaagccaccatagtcgtcgtcgtgagcgaagatccataacaatacagttacaaattgcaacaacacactcctcgttcgatcgtagccagaagaatgggaagtttgggagcgattctgaagaatccagatgacttttaccctctgctgaagctgaaaatggcggcgagaaacgccgagaagcagatcccgccggagccacattgggcgttctgctacacaatgctccacaaggtttctcgaagtttcgccctcgtcattcagcaactcggcaccgagcttcgcaacgccgtttgcatattttatttggttctgcgagctctcgacaccgttgaggatgatactagcatagaaacagatgtcaaggtgccaatactgatagcctttcaccgtcatatttatgatcgtgattggcacttttcatgtggcacaaaggagtacaaagttctaatggaccagtttcatcatgtttcaactgcttttctggaacttgggaagaactaccaggaagcaattgaggacattaccaaaagaatgggtgctggaatggccaaatttatttgcaaggaggtagaaacaattgatgactatgatgaatattgtcactatgtggcgggacttgttgggctgggtttatcaaagcttttccatgcgtctggttcagaagatctggctccagatgacctttccaattcaatgggcttgtttctacaggtatcatatcatggtagtaagtaataaaaaaatacagtatggttgcaattgtttactgataggaatcttcagtttaggaagaaagaaaaagaaaacagagcactttaactgaaagagatgaatctgttttatcgaaaggataaagaaaacacaaaggagcaatcctcctttcacacaagggaatatccctgttccactatggatacaactcgatgcccctccttgtcctagcaaggatccctttatacttctcagctgaactccctctaacagaattagctgtctaacagaagtaactgtctaacagttctaactgaaaggtctaacagaattaacagtattctgtttttagactctttccctcctcctatatactattagaggtcttggttgtggctgaccttgatcctctttcctaacatttactgatatttctggccatcttttgagattgcagaaaacaaacattattcgagattatctggaagacatcaatgagatccccaagtcacgcatgttttggccacgacagatttggagtaaatatgttaacaaacttgaggatttgaaatatgaggagaactctgttaaggcagtgcaatgcttaaatgacatggtcactaatgctctgatgcatgctgaagattgcttaacatacatggctgctttacgtgacccgcctatatttcgcttttgtgctataccccagataatggcaattggaacacttgcattatgctacaataacattgaggtcttcagaggtgtagttaaaatgaggcgaggtttaactgccaaagtgattgaccgaactacgactatggctgatgtctatggtgctttctttgattttgcttctatgttggagtccaaggttgacaaaaatgatcccaatgcaactaaagcattgagcaggctggaagctatacagaaaacttgcagagaatctggtctcttgagtaaaaggaaatcttacattgtgaaggatgaaagtggatatggctcaaccatgattatcgtactggtcatcatggtttccatcattttttcttatctgtctgctagccaccaaaataactagtcaactagccatgccttcttgcctttccgaacattgatatcatgcctcgttcatggaatgcaaatttgcacgcaagcaatattatgatggctgcagttgactatcgtgtattttaatggaaaaatagtcgaatgtagtgtcaagagctccttgtgttagtttggatttaactctacccctacgttcgtcctgaaaattatcattattctgcgtgttattagttgtttgtattcacggataaagttggaataccagatgagttatacc

SEQ ID NO: 7721 - DNA, 1425 bp, Glycine max
  Clone ID: 700682577_FLI
tcagaattctctaaaagagatctttttctgctctttgaagaaagaagggtctttgcttgattttggagatgtctctgctctcagatctcatcaaccttaacctctccgataccaccgagaaggtgatcgcagagtacatatggatcggtggatcaggaatggacctgaggagcaaagcaaggactctcccaggaccagttagcgacccttcagagcttcccaagtggaactatgatggttccagcacaggtcaagctcctggtgaagacagtgaagtgattttatacccacaagccattttcagggatccattcagaaggggtaacaatatcttggttatctgtgatgcctacactcctgctggagaacctattcccactaacaagaggcacgctgctgccaaggttttcagccatcctgatgttgttgctgaagtgccatggtacggtattgaacaagaatacaccttgttgcagaaagatatccaatggcctcttgggtggcctgttggtggtttccctggacctcagggtccatactactgtggtgttggcgctgacaaggcttttggccgtgacattgttgacgcacactacaaagcctgtatttatgctggcatcaacatcagtggaattaatggagaagtgatgcccggtcagtgggaattccaagttggaccttcagttggaatctcagctggtgatgagatttgggcagctcgttacatcttggagaggatcactgagattgctggtgtggtggtttcctttgaccccaagccaattaagggtgattggaatggtgctggtgctcacacaaactacagcaccaagtccatgagagaagatggtggctatgaagtgatcaaagcagcaattgacaagttggggaagaagcacaaggagcacattgctgcttatggagaaggcaacgaacgtcgtttgacaggacgccacgaaaccgctgacatcaacaccttcttatggggagttgcaaaccgtggagcttctgttagggttgggagagacacagagaaagcagggaagggatattttgaggacagaaggccagcttccaacatggacccatacgtggttacttccatgattgcagacacaaccattctgtggaagccatgagcaaaacctgcatgttttctccctttggatggaaaggaacagttatgcttttcttagtaggatttggtctctctctctttttaccttttgattggtactatggttggtgccttgttggttggtgcaactaactggcaagggttgttcattgttttcttctattcctttccctcgttttccgattgttacaatgacaataatttaatggttattatcagtcttgaacaaagaaatgctgattgtgaagtataataataatatatgaaattgtcatgttcattggagt

SEQ ID NO: 7722 - DNA, 1811 bp, Glycine max
  Clone ID: 700684110_FLI
tgcatctgatagctttcttgaacttacggaatatacacgagaagaaattttgggacgaaattgtcggtttcttcaaggaccagaaacagatcaggcaactgtttccaggataagagatgctatcagagaacaaagggaaatcactgtacagttgataaactatactaagagtggaaaaaagttctggaatttgtttcacttgcaacctatgcgtgaccaaaagggtgaacttcaatacttcattggtgttcaactagatggaagtgatcatgtagaacccttaaaaaaccgcctgtctgagacaactgagcaacaaagtgctaagttggtgaaagccacagcagaaaatgttgatgaagctgtccgagaacttccggatgccaacttggtaagagaccagaagatttgtgggcaattcattcccaacccgtctttccacgacctcacaagaaggaaaatccttcttggatagcgatacaaaaggtagctgcaagaggtgaaaaaattggcctgcaacattttgtgcccataaggccgttgggttgtggagacactggcagtgttcatttggtggaactcaaaggtactggtgaactatatgcaatgaaggcaatggaaaagtctgtgatgctaaatcgtaataaggttcaccgctcatgcattgagagagagattatatcattattggatcatccttttcttccaacactatacacctcatttcagactcctacacatgtatgtttgattactgacttctttcctggaggagagttgtttgcattgcttgacaagcaaccaatgaagattttcaaagaagaatcagcgagattctatgcggcagaggttgtcattggtttggaatatctccactgtttaggtataatttaccgtgacttaaagcctgaaaatatcttacttcagaaggatggtcatgttgtattagctgattttgatctatcatatatgacatcttgtaaaccacaggttgtgaagcaagcgatacctggtaaaagaagatcacgaagtgaaccaccaccaacatttgttgcagagccagttacacaatcaaactcattcgttggaactgaagaatacattgctccagaaattataactggagctgggcatactagcggtatagattggtggacccttggtatcttgttgtatgagatgctctatggtcgtacaccattcagaggaaagaatagacagaagacattttccaacatcttacacaaggatcttacctttccaagcagcatcccggctagtcttgcagccaggcagttgattaatgcactactccaaagagacccaacaagtcgtataggttcaaccactggtgccaatgaaatcaagcaacatccttttttccgtggaatcaattggcctcttatccgcaacatgactccacccccattagatgttcctcttaaattgataggaaacgatcccgtggcaaaggatataaagtgggaagatgatggagtgctagttagctctattgatatggatattttttgacggtttgcactgttcactcaggatctttggtcagcatcttatctgatttcatgctgcaacgatcacggggtctaagtcattcaagtgtaatagtgtctgttgatttggttatggtccaatactaccatcatgtgatctgccaatagacaacttcaaacaaattctaagttatgtaggattagcagaaaagtagaatgtacattgaataaagtcattttccgatagaaacaagcatcctagttatatgctcatcgacgatacatcaataatacacttttgta

SEQ ID NO: 7723 - DNA, 1067 bp, Glycine max
  Clone ID: 700685010_FLI
tgcttgacaagcaaccaatgaagattttcaaagaagaatcagcgagattctatgcggcagaggttgtcattggtttggaatatctccactgtttaggtataatttaccgtgacttaaagcctgaaaatatcttacttcagaaggatggtcatgttgtattagctgattttgatctatcatatatgacatcttgtaaaccacaggttgtgaagcaagcgatacctggtaaaagaagatcacgaagtgaaccaccaccaacatttgttgcagagccagttacacaatcaaactcattcgttggaactgaagaatacattgctccagaaattataactggagctgggcatactagcggtatagattggtggacccttggtatcttgttgtatgagatgctctatggtcgtacaccattcagaggaaagaatagacagaagacattttccaacatcttacacaaggatcttacctttccaagcagcatcccggctagtcttgcagccaggcagttgattaatgcactactccaaagagacccaacaagtcgtataggttcaaccactggtgccaatgaaatcaagcaacatccttttttccgtggaatcaattggcctcttatccgcaacatgactccacccccattagatgttcctcttaaattgataggaaacgatcccgtggcaaaggatataaagtgggaagatgatggagtgctagttagctctattgatatggatattttttgacggtttgcactgttcactcaggatctttggtcagcatcttatctgatttcatgctgcaacgatcacggggtctaagtcattcaagtgtaatagtgtctgttgatttggttatggtccaatactaccatcatgtgatctgccaatagacaacttcaaacaaattctaagttatgtaggattagcagaaaagtagaatgtacattgaataaagtcattttccgatagaaacaagcatcctagttatatgctcatcgacgatacatcaataatacacttttgtatatggcttattaaaatatcatacatattactagttatttt

SEQ ID NO: 7724 - DNA, 1187 bp, Glycine max
  Clone ID: 700686452_FLI
caggaagattgtggattggtagagagtttcctgccatcagttgtggattggtagagagtttcctcaaagagaatggcaccagagatgtactgaccaagtcctggaactgatggcaggaagattgttgacgtgctcctcgagcaaaacattgttcccggtattaaagtcgacaagggtttggtaccccttgctggttccaacgatgagtcatggtgccaaggtcttgatggtcttgcctctcgctcggctgcatactaccagcaaggtgcccgtttcgccaaatggcgtactgttgtgagcatccccaacggtccctctgctctggcagttaaggaagcagcctggggtctggctcgctatgccgcaattgctcaggacaatggattggtcccaattgtggagccagagatcttgcttgatggggagcatggtattgacagaacttttgaagtagcaaaaaaggtctgggcagaggttttcttctaccttgctgagaacaatgtcctttttgagggtattcttcttaagcctagcatggttacacctggagctgagtccaaggacaaggccagtcctcagacagttgctgattacaccctcaagctccttcacaggagaattccccctgctgtccctggaattatgtttttgtctggtggacagtctgaggttgaagctaccctcaacttgaatgccatgaaccaatctccaaacccgtggcacgtgtcgttctcgtatgccagagccctccaaaacactgccttgaagacatggggaggccgcccagagaatgtgaaggcggcacaagatgcacttcttttccgtgccaagtccaactcgctcgcccagcttgggaagtacaccggtgagggtgaatctgaggaagccaagaaggagttgttcgtcaaaggctactcctactaagatgtttgtagtgaatatgatacatgttaggcagcagcaacaccagcagttgtagtaggtgttgacggaggatgaagtggaagaagactaatttgtctaaaatgtaatgtttttatagtcttggagactatttttgtttatggttacatgtacctttacagcttataaacctttttgctgtgagttgtgtacttgattgattgtctcaatataacatggttgaatctcggcaatcaatgaaaaaacccattaaaaatgtgtgg

SEQ ID NO: 7725 - DNA, 1486 bp, Glycine max
  Clone ID: 700686490_FLI
cttcaccagatctcactctcactctcactctgttttgctcagtgcagagaagagaagaaaatatggcggtgatggcggttcaccaattcgcgcaatgcatcacttgccacgcttggagccccgatcaatccatggttgctttatgtccaaacaataatgaagtgcacatctataggttggttgaagacaaatgggaaaagttgtatgttcttcaaaagcatgaccaggtaatttctgggatagactggagtgcaagatcaaatagaatagttactgcatcccatgatcggaattcatatgtctggaacctggaaggatcagaatgggtgccaactcttgtgattcttagactaaaccgtgctgctctttgtgttcaatggagtccaaaagaaaacaaatttgcagtgggaagtggagccaaaactgtttgtatatgctactatgagcaggagaacaactggtgggtcagcaaacttatcaggaaaagacatgattcttctgtgacaagtgtttcttggcatcccgataatattcttcttgctacaacatccacagatgggaaatgcagagtattctccacctttataaaaggcgttgatgcaagggattcgaaaaagggtacttcaccagattcaaaatttggagagcaaattgttcagcttgatctctcatcgtcttggacattcggagtcaagtggtcaccaagtggcaatactctagcgtatgtaggtcataattctatgatatattttgttgatgatgttggtccttctcctttggcccaaaatgttgtgttccgtgatttgccgctccgtgatgtgggtattatttgtttctgagagaaaagtgataggtgtgggatttgattgtaacccaatggtttttgctgcagatgaaaggggaatttggagttttgtcagatatttggcagaacggaaagcagtatcttctggatcaagatatggctcacagttctctgaagcatttggaaagttttatggccaatcgaagcatggagtgagcaatgatacagttgaaacttcaagaactcgtggaactgttcacgaaaactgtataaattgtattatgcctcttggggatcatggcacattgctaaggcgtttcagcacatcaggattggatggaagaattgttgtatgggatttggaaaatgagcaagacctgttggaattataagctcatcttcgtggtaaagtgtctgaaactgattgtctcatgcagcattataccttgtaaattaatttggttatgagtgattgaagtgatctctaatcattataatcaaggcttgaaagtgtcagatatcagccccttgaatgtttataaactgtacctggatattaatgttaatgtattctctttctctatattttggctgttttttttcccatgcaacgactctgtcgggaaaagatatataaccaataatatatattctgacaataaaatagaagtgtttatcttt

SEQ ID NO: 7726 - DNA, 812 bp, Glycine max
  Clone ID: 700686555_FLI
ctgaagaagaaggtagcaaaacggttgaaagggaagaagtatctggtagtgcttgatgacatctgggaaacccaaatatgggatgaggttaaaggagcccttccagatgaccacacaggtagtagaatactcataacaagtcgcatcaaagaggtggcatactatgctggaactgcgcttccctactaccttcccatcctcaatgaaaatgaaagctgggaactcttcacaaagaagatttttcgaggtgaagaatgcccgtctgatttagagcctctgggtagatccattgtgaaaacttgtgggggtttaccacttgccattgttggtttagcaggacttgttgccaagaaggagaagtcacaaagagagtggtcaagaatcaaggaagtgagttggcgtcttacacaggataagaatggagtaatggatatgctgaaccttaggtatgacaacttgcctgaaagattaatgccttgctttttgtattttggaatctgtccacgagactatgtggaaagctatgaggagaggaaagcgaaagaattagagactgttgaagttttcatccactaatttcgcacttttataattaactaaataaagaataacggccacttgaccagaactctaattggcgcacaaccacataactctactttcgtgtgttccacgaccacttgaccagatttttctgataggttagcattgaagcctgagagaaattatgcatcatttcatttgcttgttgtacaaccatctttaattttgcattaattaatttaaacttttctcccttgtttttcgattct

SEQ ID NO: 7727 - DNA, 709 bp, Glycine max
  Clone ID: 700725668_FLI
agggattcaagctcggatgtgggtagcactgtctatcttcttcttgactgtattaactctcttacgccaagttgcataccctgtgaccaagaaatttccagcattatcttccaatgatgataagagtacttcaaaaccacctcctgatacaacaaacatggaagttcttcctccttcatcaactccatcatgtacagaggaaaatctccttccctccatgctgaaaaggttaggtgagcttgaagagaaggttgacacactccaatctaagccatctgagatgccttatgagaaagaggaattgttgaatgctgctgtatgccgggtggatgctttggaagctgagttaattgctactaaaaaggctctatatgatgcattaatgaggcaagaagagctgcttgcttacattgacagacaagaagaagccaagttgcggaaaaagaagttttgctggtgagatttatgaatgggaaagagattctgcagaggatgtctcaaagtgcaggttgttcttaaggaatgttaaccttgcgcatgatgtaactctgaccactgattttcagtatacgagtaaacataatggagaattgtttcaacgtgtgtatattcagaatgctatctttgctggcttgtaaaacacgagcctttttgcttttgttatggtcataccttcatctatccttgttacaatttgtttgcctttgtt

SEQ ID NO: 7728 - DNA, 779 bp, Glycine max
  Clone ID: 700725695_FLI
ccgtttccttatttttttcttcaattctcttgtatacagttttggtctgtgatttgttgctttggtgagagagtggatatggacgaacggtacgagactttgaaggagcttggttcagggaacttcggagtggcaaggttggccaaagacaaggagacaggagaacttgttgccatcaaatacatagaaaggggaaaaaagattgatgcgaatgttcaaagggagatagttaaccaccgatctttaaggcatccaaatattatcaggttcaaagagctctcaaaaagcaaaactgtgcagttcattggatgttattgttgattcataaagaaatccaggtgtaactcaatggcttctgcaatgagttattaccgttggcattaatatgtcaaaactcaaaagctatagggtgtgtagtgtagctgtagcctactatcttgtgagattattactacaagaaatatggtcaccataaattgcattttctgttttcatattatgtgttgaggataaactgtccaacatgaatctgttaggtgaacacttagcttttgctcagttggccacaaaggctctaatgccatgtcaagaatcagccattccaaaaacttaagttgtctcgtgaaaactcaccaatggttttgtatctaacactacgcaaacagggttgcaaactatcatgcttattttcttcaggaattattgccagtaatgtactttagttcgaacatgtctgcagaaatcaaatagttctgttccttcgaaaagatagggaaaat

SEQ ID NO: 7729 - DNA, 1432 bp, Glycine max
  Clone ID: 700725705_FLI
gctgaagcttgtaaagtagaatcatcaaccatgctcgtcccagcagactacgtattctttgtggggcccatttcattctctggcccatactgtaaacccagcatcgttttccagcttgatggcaccattgttgcaccaacaagccccaatgcttggggcaaaggactactacagtggttggaattttccaagttagtgggaattaccatccaaggaaatggcatcattgatggaagaggctcagtgtggtggcaagacaatccatatgatgatcctattgatgatgaagaaaagctcattgtccctttgaaccacacaatagggagcccgagccctccactgccgattcaaagtgagatgggaggaaaaatgccatccgtcaagccaactgcattgcggttctatgggagttttaatccaacagttacaggcataacaattcaaaatagtccacaatgccatctcaagtttgacagctgtaatggggtcatggtccataatgtgaccatatcatctcctggggacagtcctaacacagatggaattcaccttcagaactccaaagatgtgttaatatacggcggcaccatggcctgcggagatgactgtatttcgatacaaactggatgctcgaacgtatacgtacacaatgtcaactgtggaccagggcatggaatcagcattggaagtctaggaaaggataacaccagagcctgtgtctcaaacattactgtcagggatgtcaacatgcacaacacaatgaatggtgtcagaatcaaaacatggcagggtggatcaggttctgtacaaggagtgctattctcaaatatacaagtttctgaagttgaactcccaattgtgatcgatcaattctactgtgacaaaagaacctgcaaaaaccaaacgtcagctgtgtctctcgccggaatcaactatgaaaggataagggggacatacaccgttaagccagttcattttgcctgcagtgatagcctaccttgtgtggatgtttctctaacctctgttgagttaaaaccaattcaagaaaaataccatctttacaatcctttctgctggcagacttatggtgaattgaaaactccaacagtcccaccaattgattgtctacaaatcgggaagccaacaaacaatcggattcagacagatcatgatttatgttgatcagatatgaattcaaaattcaaatgcttagcttgctagctaaagtatgtatattgtaaaaatcctactatataggaaattttcttcattagggtgatactgatttatcattgtgagaatataccggccctgctattagcaagaggtcgagaatagtataataggcagccttctagctgtggcatattgcaagagtgagatatttatacaagttttagtagcatctatgaataaaaatttctttatttat

SEQ ID NO: 7730 - DNA, 1990 bp, Glycine max
  Clone ID: 700725769_FLI
gaaaagccctccctcccatcaagcaggtttcttgtcttccggtttctggtagatcaccacttgggttgggagaaaagaacagacaatggaagcgagttgagagctacctcggttgaacatcatcgaatcgaataatcacttttacacatgacttatccttctattccgatttaagcccctaaacgaactatcgaagccacttcaaaaactactcttagattgcttcgatggtcgatcactacaacaagctggttaaactagcggcgagggctttctacgatgatctaacgagtaaaggagagaatcaacccaaatcgggaaggagtgataacagaggaatcgctgtggtgattctcgacgctctcacaaggcgacaatgggtccgagaagaagacttggcaaaagatctcaaattacacacaaaacagcttcgccgaactctccggttttttgaagaggagaagatcattactcgagaatataggagagagacagcaaaaggagcaaaaatgtatagtgctgctacagctgctacagttgatgttcagctgactggaaaagagggagaagaaaaggtcaagttgcacacgcactcttactgttgtctagattatgcacagatatatgatgtggttaggtacagaatacatcgcatgaaaaagctgctgaaagatgaattggacaacaagaacacaattgaggaatatatctgtacaaaatgtggaaaaagatataatgctctggatgcattgcgattagtatcttttgaagatgatgacttccattgtgaaagttgtaatggaaaacttgaggtagaaaatgacaaatttgttgctcaagaagggggtgatggagatgaaaatgcaagaagacggcgccatgaaaagttaaaagacatgcttcagaagatggaggcacagctgaagcctttgatggaccaactcagccgggtgaaagatttgcctgttccagaatttggcagtcttctagcgtgggaagctcgagctagtgctatggggcgtgcagccaacggagatatgtctggtgattctaaaatgtctcagcttggatataatggagcaccaatgccttatagtggagatactaaggttgtggtggacttcaatgggactgaagacataaaggatgttaagtctgaaactggaagtgcatctctaaaggttttgccaccatggatgattaaatcagggatggttcttacaaaggaacaacgtggagaggcgaaggaggaaataaagatggatgggacttcaacttcctcatcagcacagtacttggacgacaagaaatcaacagttgaccatgatgataagaaaaatatacaggatgagtatattaaagcttattatgctgctttgcttaaacaacaacatgaattggaagctgctagtaaacaagaattgccaaatacactcactgcaaatgatccttctagcagtgcttctaatcgtcaagttggcatgaaatcaaaacttgaggaagatgatgatggtactgaatgggaggaggctccagttgcaggtattggaaatgaaaattacaaggtcgatttgaatgttgaagctgatgatactccagctgatgacgatgaagaagtggactgggaggaaggttgatgaaaagaacagtaaggttcacaaaatataatttttgatggcatatacttatattcaacaaatggcagcagttatatgactgatgtctcctcacaataatgctactattcagttatatttccggcggcctcaacggtgggaaactcgattacaatatatattttttctaccagaagtttaatttggggtttctgggggaagtaaaatctaatgctttgttgtactactgaatgcgtgctacaatggctttctttgtaaggcatcacttatccaattgaattagtttaccaatgcaataatcgttgccatacacatttaaataatgcatggtaagattttttattttttttttc

SEQ ID NO: 7731 - DNA, 847 bp, Glycine max
  Clone ID: 700725784_FLI
ggaatgaagtaactaacccaaacctagtccccttacttggctcgctggttggatttgattcgactcgattctcgctgatgaagaagcatttgatgcacagctatggcgttgccgtgattgtggtgttggctttgagtttgagtttgggtgcatcagcggaacaactcagttcacgagaatgcgagaatctcggtttcaccggactcgccttgtgctccgactgcaacactctctccgagtacgtcaaggacaaagagttggtatcggattgtttcaagtgttgcaccgaagactccaatgatgccactaccaagattacgtactctggagctttgctggaagtctgcatgaggaaacttgttttctatcctgaagttgttggctttattgaagatgaaaaagatcaatttccatcagtaaaggttcaatatgtttttaactctccaccaaagctaattatgctggatgaggtgggtcagcaaaaggaaacaatcagaattgataattggaaacgtgagcatatactacagttcctgagagagaaggtgaagcctctagcgtctgattgagaatctttaacccattctctggcatgctctggactcgttcccatttaacagaaaagagtgggagtatatagtgtggcttagacaagtgaattaaacttgccctgggttacaagtgaccttaataacataaaatcatcataatttggtcagtttagataattctgggttttgacaattgatttcaatacgacgttttcctttttccagattttatggcagttgtaagatgatgtataaactgcagtattggagttggagacaagcatgtttcagtgttt

SEQ ID NO: 7732 - DNA, 1555 bp, Glycine max
  Clone ID: 700726746_FLI
aacagttactgctgaaatttcccaaagaagaagccccaaatttttcaaaagctcatcacatcacgccattcaccaccaagtaccaaattattcttctcagccagacttaaaatgcatccttcaacacttcttaattcttatacctcctttccactcctcaactttctcagagcaaaacaaaattcctttccattttcttactaaccaaacatgaagaacaaacccatcatccttgctctcttaatttccttctctctcacaaacgtagtcgtttcagctcgactctttcccaacgtctcctcctggctcgacgcccacgcgcctcttccgagaggcgcgtggggagcctttctcaacttcaccggctgccaccgcggtgacaagtacgacggtctcgccaatttaaagtcttactttgaacgcttcggttacattcctcacgcgccgccgccgtcgaatttctccgatgaattcgacgacgcgctcgaatccgccatcaaaacttaccagaagaacttcaacctcaacgtcacgggcgtcctcgacgatgccacgctccagaagatcgtgctgccgcggtgcggcgtcgccgatataatcaacggcacaaccacgatgaacgctggcaaggagaacgagacggcatcgtttagcaagccgaagtttcacacggtggcgcacttcagtctttttcccggcatgccgcggtggccggagggaacgcaggaactgacgtacgcgttcttccccgggaacgagctgagcgacaccgtgaaaggcgtgttcgccaccgcgttcgcgcgctgggcggaggtgacgtcgctgaagttccgcgaatcggcgtcgtacttcggcgccaacatcaggatcgggttcttcagcggggaccacggcgacggggagccgttcgacgggagcttggggacgctggcgcacgcgttctcgccgacgaacgggaggttccatctggatgccgccgaggactgggtggtttccggcgacgtgacgctgtcggcgctgccgaccgcggtggatttggaatccgtggcggtgcacgagattgggcacttgctagggttaggccactcgtcggtggaagaagcggttatgtttccgacgatttcgtcgcggaagaagaaggtggtgctggcaagggacgatatcgaagggattcaattcctctacggttccaaccctaatttcaatggctccaccgccacgtcagcaccggagagagacgccagtgacggtggtcgttgcctcacttgtgtggggccctcgtccggcgttttcactttgttgacttttgcctttgcacattttgtgttattaatataggatttttattatttatcgtagagtaggggtatgatgctttgcacattttattatttggacctggcttgggttgtccctattcctgcccctcatgatttaatattttttgttcttatagttgtttggttttccagtgacacggtacactttgtatacattcatacagaatttttcttcgtgtatatgatactagtataataataaaatttcgttacat

SEQ ID NO: 7733 - DNA, 1130 bp, Glycine max
  Clone ID: 700726770_FLI
aatttctcaagtgggtatgggtggtgttcttgaggccaccaaagaatctcaaagagtatggttcatgggccataatcactggctccactgatggaattggcaaggccatggcttttgaattggcatctaagggacttaaccttctcttggttggtagaaaccctctaaaacttgaggcaacatccaaggaaataagagatagacttgatgttgaggttaagtttgtggtcatagacatgcaaaaagttgagggagttgaaatagtaaaaaaagtagaggaagcaatagatggattggatataggtttgctagttaatggtgcaggcttggcttacccttatgctagattctttcatgaggttgatttggagcttatggatgctattataaaagtaaacttggagggagcaacttggatcacaaaggcagtgcttcccactatgatcaagaagaaaaagggagcaatagtgaacattggctctggttccactgttgtgcttccttcatatcctctagtcaccctctatgctgctacaaaagcataccttgcaatgttctcgagatgcatcagtttggaatacaagcatcaaggaattgacatccaatgtcaggttccattatttgtatcaacaaagatgaccaaaatgaagacatcaatttttgttccaacgccggctatgtatagtaaaacatgcacaagatggattggatacgaaaaactggttgagccatacttcctccattctgtgcaggggtttctcataagggcaattcctgattcattagtggattcctatatgctgcgctattttctttattggcgtggaagaggactctccaaggactccaacattaaaacatcagcagcatctaattctgaagaagcaaacatcattaatcaagatcatacaaattaagtcctagttcctataacaacatttatggaaagttgtggctgatcatggagacccccagtgaattaattatagttttttttttctctttttcttttctttttagatttgcctttcggtaaagtcgtttacctactttccactattgttagttttatacttataagttttatctgcaattggtcagcctttacttaatctagttattctttgaac

SEQ ID NO: 7734 - DNA, 966 bp, Glycine max
  Clone ID: 700727423_FLI
cggttttggatcgaatttttttttctccgtttgtttgcggaacaacgagtttcgaaatcccgtggagaacgtaacattctttggtttctggatttgaagatgaaggccacaaaggaattgagccagcatgtggaggaaaatgaggtcacggtcttggttgatgaggaggaggacgaagaatacgagtccgaggatgaagtagtagacgacggagaggacgatgaagacgacgacgacgacgatgacgatgacgacgacaatgaagacgaggaagacgacgatgaagatgatgctcccgacggcggtgacgacgacgacgatgaagacgaagaagaagaaagtgatgtccagcgcggtggagagcctgacgacgacgataacgatgacgacgacgaagatgaagacgaggaggatgaggaggagcaaggggaagaggcggatttgggaacagagtaccttatccgccctctagtcactgctgaggaggaggaagcatctagtgatttcgaaccagaggagaatggcgaggaggaggaagaagatgtcgatgatgaggatggtgagaagtctgaggctccaccaaaaagaaagaggtcagataaagatgattcagatgacgatgatggcggtgaagatgatgatgagagaccctctaagaggtagaactgggtccattctttgcttaagggctcagactagtcaacttatctccctttgccctttaaaaacatttcagggacttgtttcattctctcttgtatcattatggtgcgacattatttaggctgaataactttcatgtttggtgcgtagtcaatggattaaaacatttggtagaacaaattttgtaagacttgaatgttttcttaaaagggctttgcagcttggtagatcttatgttatgtattactgtatctgttggtagatttctacgtattgttttttatataacgatcgtattattat

SEQ ID NO: 7735 - DNA, 819 bp, Glycine max
  Clone ID: 700727585_FLI
gtggttgttagcactgagaacattactcagaattggtactttgggaacaagaaatccatgctcattcccaattgcctatttcgtgtgggctgctctgcgctgcttctctctaacaagccggcagatcgaaggagggccaagtaccggcttgtccacgtcgtgaggactcatcgcggggccgacgacaaggcgttccggtgtgtttaccaggagcaggatgatgctgggaaaactggtgtttccttgtctaaggatttgatggcaattgctggtggagcattgaagactaacatcaccacacttggtcctctggtgctgccaattagtgagcagcttctgtttttcgtgactctgctgatgaacaagttatttaaggctggtgtgaagccttacataccggatttcaagcttgcatttgatcatttttgtatccatgctggtggcagggctgtgattgatgagttggagaagaacctgcagctgcttcctgagcatgtggaggcttctaggatgacccttcatagatttgggaacacttcctcaagctccatttggtatgagttggcttacattgaagccaaagggaggatcaagaagggtaacaggatttggcaaattgcgtttggaagtggtttcaagtgtaacagtgcggtttggcaggctctgaggaatgtgaggccttctcctaatggaccatgggaagattgcattcataagtatcctgtggaaatagtcacatagtgatcatagttcagttcagttctcagtcacatactctggctgctacaacttaattcagggtacccttcattagtttcc

SEQ ID NO: 7736 - DNA, 676 bp, Glycine max
  Clone ID: 700727637_FLI
cgggatgaaacacgctgctcgaattatgatcccgaagaagaagggctcaatcatttctttatgcagtgtagcaagtgccataggtggcttaggaccgcatgcatacacagggtccaagtatgctgtattggggctcacaaagaatgttgcagctgaattggggaaacatgctataagagtgaactgtgtgtcaccttatggtgttgcaacaggtttggccttggctcatttgcctgaggatgagagaactgatgatgccttggtcagttttcgtgattttactgggagaatggccaacttgcagggggtagaattaactactcacgatgtggctaatgctgtgctcttccttgcaagtgatgatgctaaatatataagtggagagaatctcatggttgatggaggcttcacaagtgcaaatcactcactccaagtttttagatgattaatggtatttcattgtttgttagtttacataatttgaggcattgcaatcctgatgtctagtacaagggttttcagttaacatacaaaacaaaatgaaaatgctcctctaaagtagtcttttttaatttatccttaaattttagatggttagatcatattacactttaaattaaattcgtgtgaaacttatctcctttcaacgaagggaacaaactgtcttattcttctc

SEQ ID NO: 7737 - DNA, 1744 bp, Glycine max
  Clone ID: 700727643_FLI
atggtgacttctcagggtcccttatggtgcaaattgtggtcctccagtgtatcatttggtacaccttgatgctgttcttgtttgagtttagaggtgccagaatgcttatctctgagcagttccctgacactgctggctccattgtctccatccatgttgactctgatgtcatgtcattggatggaaggcaaccacttgagactgaagctgagatcaaggaagatggtaaactccatgtcactgtgaggaagtccaatgcctcaagatcagacatcttctcaagaaggtctcagggtctctcttccaccactccacgcccttctaacctcactaatgctgagatatattctttgcaatcctctaggaaccctacaccgagaggttccagcttcaaccacactgatttctactctatgatggctgctggtggcaggaactccaactttggtgcctctgatgtttatggcctttcagcctcaagagggccaactccaaggccttctaactatgatgaagatggtgggaagccaaagttccattaccatgctggtggaactggacactaccctgcaccaaaccctggcatgttctctccctcaaatgggtccaaaagtgttgctgctgctaatgctaatgctaatgccaaaaggcctaatgggcaggctcagctgaagcctgaggatgggaatagggaccttcatatgtttgtttggagttcaagtgcttcaccagtctctgacgtgtttggtgcccatgagtatggaggtcatgatcagaaagaagtcaaattgaatgtatctccagggaaagtggagaatcatagggacactcaagaagactacctagagaaagatgagttctgctttgggaatagaggaatggatagggagatgaatcagcttgaaggtgagaaggttggagatgggaagccaaaaaccatgcctccagcaagtgtgatgacaaggcttatattgattatggtgtggagaaaactcatcagaaaccccaacacctactctagcctaattggcctcacttggtctcttgtttcattcaagtggaatgtggagatgcctgccataatagcaaagtctatctccatattgtcagatgcagggcttggcatggccatgttcagtcttggtctcttcatggctttgcaaccgagggtcatagcatgtggaaattccaccgcagcttttgccatggctgtgagattccttacaggtccagctgtcatggcagctgcttccgttgctgttggactcaaaggtgttctcctacatgttgccattgttcaggcagctcttccccaaggaattgtcccatttgtctttgctaaggaatataatgtacatcctgatattctcagcacagctgttatttttgggatgttgattgctttgcccataactctagtgtactacatcttgttggggttgtgaatgaaagaaatgatggatgatacagaagattcacgtgtggcatccatgcaaagctcggttgaggcttgttgagcatcagacaaaaaaaagggggtcataaagcaacaatagaaaagaagcatcacgagaatttggataggaagaaccccaggatcagtttttttttttaaatttatttatttgttttctttttcttttttgaatgaattgccctttgttagtgaaaattagtgtaaaatcatgatgtagctaatttacaaaatgattatctcgttaaatttttatattataatgtcctc

SEQ ID NO: 7738 - DNA, 572 bp, Glycine max
  Clone ID: 700681361_FLI
aattatatccaatcgcttcagcggcaagtagagtttttgtcaatgaagcttgaagcagtaaattcaagactggcccccagaattgaagtgtttcctcctaaagattttgatcagcaaacatttgatacaactggcatgccgtttgcttcccaagctacaagagagtatagccgaggttcatcgccagaatggttacatatgcaggttggaggtggttatgaaagagcaacgtagtctttgaaatcccatcacctgataataaatgcatataggatcattaatctctccatcagagctcccataaatcatatactcaaggtgttgttgtttagtcctatagacacctcattccctgttttctacaagaggcatggagctgtggtttgtttccacaggatcactagttagtactcaagcaactccatttgttagtgtgttggaaaatgaattcatttaccccatatgtagtttagtatgctgatactcttcattcataacctttaaaatgatagttattattcttgtaaaagaatgctgcttgtcctgaatacataaaggcttacatattgtgt

SEQ ID NO: 7739 - DNA, 1257 bp, Glycine max
  Clone ID: 700681379_FLI
gcgattctggaaaataagatggaaggattacaaagagtatagagggaagggagggcaaagccaaaggggatttcgttgtgttgtgttcctccgccagcgttagagatgagttccgccgataccgtcaatgcgagttctgctgagtctgtcaaagaacctgtcatagggtcaagtctggaagcaaaacaggatgatactgaaataaaatctcaagttgatgccatgtgggaacaaatgaataaaggagtatctaataagaccctcaacagatttacaagcaagcctaattctgctccaaaaaaaactgcaaagaagacatcatctaactggatgtcttatttggccttggcaccgaaggcaactgaatcccttgggcaaggtgcttccaagaatggacctggcattctgcagagcagtacaagtgatgaagccaagaagcttgctgctgctgctcttgcagcagtgaaagatgatgctgccatggctgcctcaagcagggggaaacttgtgattactgaggttcgggactttgctggtcaagaaattgaagttaaaaagcttgtagattctgactcaaaggaggcaatggaaagagccaaagctcctccaccttctgcagtggatactgtccttgaacaaatcaagaagaaacagaagctcagtgtactggataagaccaaaaaggactggggtgaatttaaggaagaaaagagactggaagaagagcttgatgcttataagaagagttctaaccagtatttggacaaggtttctttcttacagcgagcagattaccgtgagtttgagcgtgagagagatgcgcgactggctttgcaatccaggaagcgaccagataatatgcaagaggatgactgaaggtagttgaagactggagttactacctttggagaattatgtatggttttgtagtgagttatagttcctgggaaggtcttggtctctcaaaagaggtaaaagacctttgatcacattaaatggggtattgatggattttgaggtttgagatttgaaatgcttttcaatgacatggtactatatgtggggggtaaaaatagggtgctagagagaaacaagtataaattttagactgacattagttcattcccgttccttgagagcctcagaagacattcactactcgctgaaggtagttgcaaagaactcattttgtgtctgtccattatttggctgattgaattctcctctaaagtaaatatcgggacacgattatcttgc

SEQ ID NO: 7740 - DNA, 3377 bp, Glycine max
  Clone ID: 700681408_FLI
accaaacctcactgcttcctcacccttttctcctaatccgttaacgacggcgccatgaaggtccggtcgatgaagctgaaggaggcccacaccgcgaagagcggcggcgcggccttctgctccgtcctgtgggaccagaaagcgaagcacctgatcactgcgtcctcctccgacgtcgccatctgcatccacgactcccttttcccctccctcgctccgaaaaccctccgccaccaccgcgatggcgtcaccgccctggccctcagccctaattctacttgcctcgcctccggatccgtcgaccactccgtcaagctctacaagtatcccggtggagaattcgagagaaatattacaaggtttacacttccaatacgttccctggcatttaacaaatctggaagcatgctggcagcggctggtgatgatgagggtatcaagcttataaacacatttgatggtaccattgcgagggttctcaaaggacataaagggtctatcactggcttggcttttgaccctaatggcgaatacttagcgtccctggattcaactggaactgttattttgtgggagcttcagtctgggaaaatcattcataacctcaaaggcatagctcctgacactgggctggatgtttcaactatgaatgttctttgctggagtcctgatggtgagaccttagctgttcctgggttgaaaaatgatgtagtaatgtatgatagggacactgccgagaaggtgttatctttgagaggtgatcacatacagccaatatgtttcttgtgttggtcacccaatggaaagtacattgcttcctctggtttagataggcaggttctgatttgggatgttgataggaagcaggatattgatagacagaagtttgatgagagagtgtgttgcatggcgtggaagccgactgggaatgcattggctgttattgatattatggggaagtatggtatttgggacaatgttattccttcgtctatgaagtccccaaccgaggatatacctgtgaagagtaaaagcaatggggttgtttattttgatgaggaggatcctgaaaatagtgcaagtgaaaactcgagtgatgtgggtggaaatagtaaccaggagtctgagccaccaagcaggaaaagatcccgtaaacagtctctgagtgaggaaaattctggtgaggatggaggtgaggaaattgtatcatatccaaaggttgatactaacaagaaacgaaatcgaccaagcaaggaaaatttggatagtgtgaatatgggatttagaggcaccatggtaacatccaaggcaaagatgcaggagccatttcaaccaggatctactcctgtgcagcctgggaaaaggcgtttcttatgctacaatatgcttggatgtataacctctattgagcatgatggatactcccatattgagattgattttcatgatactggaagcactccacgagttccttcaatgactgatcattttggatttacaatggcagcattgaatgagagtgggagcatatttgcaaatccttgtaagggggagaataatatgagcacccttatgtatcgtccatttagtagctgggcaaataatagcgaggttagattatgtgtttaacctagttgaaaaattcattgattttttatagaagaaaatatatatgaaagaagatatgtaattacactaattttagttttgtatggttattaatattaagacatacagcatttcagttcttatgagttacagcactctgcatgatgtgaaatcttaccatattctcactgtttaaaattttggcagtggtctatgcgctttgaaggagaagaagtgaaggttgttgcacttggttctgcttgggttgcagcggtaactagttttaactatcttcgcatcttttctgaaggtggtttgcagagagacgtgttttcactagatgggccagtggtgacagcatccggtttcaaggataagcttgcagttgtcactcatgctactgatggccttctctcaaatgatcagaagctagagtttatggtatttaatattcctcgtgggaccctacttcttcaaggtcgcttgccactatcccctggttcatccctaagttggtttgggtttagtgaagaaggccaattgtgttcatacgattcgaagggtgtgctaagatcatatacaagcaaatttgggggcagatggattccactcttcagtgctactaaagagaagtcagatgaaaactattgggtgactgggttgaatgcaagcaaggtattttgcgtggtatgcaaaaagcccgaagacttccctcaggtgatgcctaagccagttctcaccccgttgaatctttcgtttcctcttgcttcctctgacttggggggatctgaagcccatgaaaaggagtttatgatgaacaacttgcgtctctatgagattcagagaacaatggacgaaatggcttctgttggtctggatactacttcacttgatgatgatgctttcaatttcgaagcagcacaagataaatgcatactgaggctcatagcagcatgctgcaacagtgataagcttgtgcgagctactgaacttgtgaagcttttgactctggaaaaatcaatgagaggtgcagtaaaacttgttactgctatgaagcttccaaacttggccgaaaggttcagcagcatattagaggaaaggctacttgaagaagccaaaaaagctatggaaaccaacatcaaagaaaatagtgttgcacctgttacagctgatgctcttcctaacagaagcaaggccccaactcacactgaagcattaaatgcagttaccatgtcatcatctccaaaattatctgctccgtcattcctaaggaaagacaaaacacaagagagagctaaagctggcacaagcaaaactgcaatggtaaatgaaaatttgaaggtaaagcagacaggggaggaaacaagtgacaaggtggggaaggttgtgcaacaaacttctcatccgtatgatccctctacgaagtcctcaaataagaatggacttaacaagtcagagactagtttgggacaatcaaatcgtccttccaatccatttttgaagtcagaaactagtttggaacaatcaaatcgtccgtccaatccatttttgaaggctattatcaagtgaagaaattcgtctactctaatgatgtggaaaacacgatggaggtttcgggtagtttagttaaaatcaattgtcgaaatagggtgttttactgaaaacaggcttgcttctaatttataatgatcaatttataaagaaaaaagagcctagagaaaatggaaaaccctttgtaaattagcataaaatcttgtcgtaattcactt

SEQ ID NO: 7741 - DNA, 1904 bp, Glycine max
  Clone ID: 700681442_FLI
cttttctatcttgaatttagtttggcactgtaagagtatgagtagtgtatatgagtaactaactcagtttactttactactgtaattagttaacagttagctttagttacttatatacactactcatacattctcttagaatgtgggtttgagcctaattcaaccccaaaagttagttcatacaactgagagttgccccccacttatacaccttatcttgatcttatctctagttgatgtgggacttaagttttacctaatacatctcttgatgcccaatacgtttgggcttggtgcatagataatatggtggatgacccttttaatagatctagcatagactctgataccctgtaggaactctagagagtgaaaaaaagagatttgtatatctcattatagattgtacaaaaggcactgagatctctgacaataacagtacttatactgttgagattcagttgagaaactgttgtaactgaaaagaaactgaagctaactgataactaactacaatagtaaactaaagtgagtttgttactcatataccctactcgtatactcttacaggtactaagtgcagtaggaaaatgcatacttttctggaagagaagatgataggttaactgacattttagttgcccttctgttccatggtatatttagggctgcaagtgatgatgatgcaaccttaatacctctagaatttgcaaaagacatgctgagaaaatgcacgatgagagctgaagctttaataccatgttattataggcgaagaaaatgatctttatttttctacatcgatcaaaattacctgagtttatactggaagagattgctaggagagatcctacacacacttattacataataaatacaaagataaggagaaaataaaggagaataaacaaatcaatttgaataatctgatctcgatcttaagtacttaaatcttttagaatccttatttttgagttttgaaataaaaacacaaacatgatacaactgtcaacgtcttttaatctgtatttgaaatttaaaataaaagcacatacaactatcaacacttgttttcaagttggtgcaaagatgtttggcatttccaacgtataaagaattctaaattaggtctaaacagtttttagtaagaatgtttgtgacttgtgaagtaggaacaaatggcatgcagtcttcatgaaccagttgaagctggatcatcacaagtttatgctaaactcagttatatcttaacttgttatttgttttatatttctcggaagaggtaatggagaggtacatgtatagactctgcttgtcaaaacttagtccccagacgagggaaactttcattaattttttaggtgttctgcgaagcaatacaatgttggtggaattcttattttttgttgggtgcattatttctaaagataaccgttacattgcttaatataattccaggtaaaggaacgtgcaattgaacttgctaaggccatggaaaatgaggatggagtgacaggagctgtgaaagcattttttaaacagcttcctcaaaaaaaaccagagcctgatgcagatccgcaacccactagttttttctctgtaggaagatgttttggttgttcctgattcaaatgcagtgggtgaaaccccactttttggttattaatggtgtaaatcacaaatagttctgcatctatgggatgtgccgacttgtcaccctgtcatgtgattgtataatttcatgcatccttctattcgtactatttagcttgagattcaacttgtatgtaaactagcataatacccgtgtgttcgcacgggtaatgttggattttatttgtattttaaaactacttttacatatatacctaaaataatatattattattattattattattatt

SEQ ID NO: 7742 - DNA, 813 bp, Glycine max
  Clone ID: 700681489_FLI
caatttttgagttattgtcagaggctcttggccttaatccatcttatctaaaagaaatgaattgtgctgaaggacttttcattcagggtcattactatccaccttgccctgaacctgaattaactttgggcacgtccaagcacactgatagttccttcatgacaatagttctacaaggccaactgggtggtcttcaagttcttcatgaaaaactatggtttaatgttccacctgtgcatggagctcttgttgtaaacgtaggagatattctacaacttataacgaatgacaattttgtcagcgtttatcatcgggttttatcgaatcatggagggccaagagtttcagtagcaagcttcttttcgaattcgcatgatccagcaaaaggtgcatcaatggtttatagtccaattaaggagttattatcagaagaaaacccagcaatctatagggacactaccataggagagatcatggcacaccattttgctaaggggcttgatgggaactctgccttgcagcctttcaggttgtgaaatgaacagattaagacctagaaaataacgatgctctcctgattctcatggaggtgcttgtaatgtgttatttctgatgccttttattttcttaattttcttcttcacacaacaagcttcaaattaagaaaccttctgggcagacatatgctcatctgtctcatcctaggcttcttagcttgtgttgtaacgaataatttcgtgccattcaagaaaaatatgtaagagattccattagaatggatatgacttaacaaaggatgataggacaagtttt

SEQ ID NO: 7743 - DNA, 922 bp, Glycine max
  Clone ID: 700681568_FLI
caaaaatcaagaaacccttcacacaaaccccaccaccaaccatgtccaccaaactactcctaaccctaatcctcatctcttacaccctctccaatgtcataggagaagaaacgggctttgtgggcacactacaccccaaatccttaggtcttcacaagaaacaaaccctaagccacttcaaattctactggcatgacatagtgagcagtggagccaactccacctcagccacaatcatcccaccactccccaaatacaacacaaccacttccttcggcatggtcaacgtcatggacaaccccttgactctgggccccgagctgggctccaagctcgtgggccgggccgaggggttctatgccctaacctcacagtcccagatcaacttgcttatggtcatgaactttgccttgtttgaagggaagtacaacgggagcaccataactatcgtggggaggaacgctgttagtgaaaatgaaaaggatattcctgtggttggtggaagtggggtttttaagtttgctaaagggtatgctcacgccaagacctacttctttgatcccaagactggggatgctaccactgagtacaacatctatgtcctccattacgagtaaaccattgatttgcattgctctctcaaatatcatcttttctcttaaagattgtttttattaaaataatgaaattgtatcagtagtctctaattaaaatattcaaaatccatcaattttgtccttacggttgtatattttaataatcgtaagcgactcatttgaagaattttttttctatcaataattgagagattatttagtatgatttctaataattaagagattgattggttatgtaatttttttatttaagactaattatgagaggaaataatacttagaaatggagttgatgatttatagtg

SEQ ID NO: 7744 - DNA, 2348 bp, Glycine max
  Clone ID: 700681579_FLI
ctgcttcttctccgctaaacgacgccgtcgaaggcaatcctcttctgcagaacttcgacttcccacccttcgatgtcgtcgagcccaaacacgtgcgacccggcattcgcgccctcctcggcaagctggaaagtgaattggaggagctcgaacggaacgtggaaccgtcgtggccaaagttggtggaaccgttggagaagatcgttgaccggttatctgtagtttggggcatgatcaatcatctaaagtctgttaaggatagttcggagctacgttctgctattgaagatgtacaggcagaaaaagttaagtttcagcttagactgggtcaaagcaaacctatttataatgcattcaaagccattcaggagtctcctgattggcagacactcagtgatgctcgaaaacgtattgttgaaagccaaataaaggaggcggttcttaatggagtttctcttgaagatgataaaagagaaagttttaacaaaattgaacaggagctggaaaagttatcacaaaagtttggggagaatgttctggatgcaacaaagaagtttgaaaagctaatcactgataagaaggaaattgaaggattacctgccactgctcttgggttggctgcacagagtgcagtatccaaggggcatgaaaatgccaccgctgagaatgggccatggataattacattagatgctcctagttttattgctgttatgcaacatgctcgcaaccgttctttgcgtgaggaaatctaccgtgcatatgtaacacgtgcatctagtggagatttggataatacaggaataattgatcaaattttaaagctaaggttggaaaaggccaagcttctaaactacaataactatgccgaggttagcatggcaaccaaaatggcaactgttgataaagcagaagaacttcttgaaaagcttcgcagggcttcctgggatcctgcagtgcaagatattgaagaccttaaggaattctccaaaagtcagggagcattggaagctggtgatttgactcattgggacattaccttttggagtgagaggctacgtgagtcaaaatatgatattaatgaggaagaactgcgtccctttttctctctgccaaaggttatggatggactctttaaccttgcaaaatcactttttggcattgaaattgagccagctgatggtctagctccggtctggaataatgatgttaggttcttctgtgttaaggattcttctggtagtccaattgcgtatttttattttgatccttatagtcgtcctgctgaaaaaaggcaaggtgcatggatggatgaagtctttgctcgtagtcgtgtgttatcgcgcgatggtacctcagcaagattgcctgttgctcacatggtgtgcaatcaaactcctccagtaggaaacaagccaagtctaatgacattccgtgaggttgagactgttttccatgaatttggtcatgcacttcaacatatgcttactaagcaagatgagggtctggttgctggtattagagggatagagtgggatgctgttgagttaccttctcagttcatggaaaactggtgttaccatagagaaactttaatgggtattgcaaagcattttgaaactggggagagtcttcctgaagaagtatatttgaagcttgttgctgctaggacatttcgagctggctctctaagtcttcgacagttaaaattcgcaagtgtagatctggaacttcatacaaaatatgttccagggggacctgagtcaatctatgatgttgaccgcagagtttctgagaaaacccaagtgattcctccattaccagaggataggttcctttgcagctttagccatatatttgcaggtggatatgcagctggatactatagttacaagtgggctgaggtgctgtctgcagatgctttctctgcatttgaggatgctggattggataatgacaaggctgttaaagaaactgggcgaaagttccgggagaccattcttgctcttggaggtggcaagccaccactagatgtttttgtgcaattccgtgggagagaaccaacaccagatgcattgcttaggcacaatggcctattacaagttgcagcttcgtgatagatcgatagagttggccacttttatagtcaataaatgggactcgtacttacctaagaatatggggcctcatacttttttttcatatgtagttttttgtcatgttttttaacttaatttttccatatttaaaggaatctaaattttgaaattcgttattccgtgattaactttttaacatttattcttttatcatttaaaccaacactttatctacccatttttttttat

SEQ ID NO: 7745 - DNA, 1319 bp, Glycine max
  Clone ID: 700681685_FLI
ttggtggaactcaaaggtactggtgaactatatgcaatgaaggcaatggaaaagtctgtgatgctaaatcgtaataaggttcaccgctcatgcattgagagagagattatatcattattggatcatccttttcttccaacactatacacctcatttcagactcctacacatgtatgtttgattactgacttctttcctggaggagagttgtttgcattgcttgacaagcaaccaatgaagattttcaaagaagaatcagcgagattctatgcggcagaggttgtcattggtttggaatatctccactgtttaggtataatttaccgtgacttaaagcctgaaaatatcttacttcagaaggatggtcatgttgtattagctgattttgatctatcatatatgacatcttgtaaaccacaggttgtgaagcaagcgatacctggtaaaagaagatcacgaagtgaaccaccaccaacatttgttgcagagccagttacacaatcaaactcattcgttggaactgaagaatacattgctccagaaattataactggagctgggcatactagcggtatagattggtggacccttggtatcttgttgtatgagatgctctatggtcgtacaccattcagaggaaagaatagacagaagacattttccaacatcttacacaaggatcttacctttccaagcagcatcccggctagtcttgcagccaggcagttgattaatgcactactccaaagagacccaacaagtcgtataggttcaaccactggtgccaatgaaatcaagcaacatccttttttccgtggaatcaattggcctcttatccgcaacatgactccacccccattagatgttcctcttaaattgataggaaacgatcccgtggcaaaggatataaagtgggaagatgatggagtgctagttagctctattgatatggatattttttgacggtttgcactgttcactcaggatctttggtcagcatcttatctgatttcatgctgcaacgatcacggggtctaagtcattcaagtgtaatagtgtctgttgatttggttatggtccaatactaccatcatgtgatctgccaatagacaacttcaaacaaattctaagttatgtaggattagcagaaaagtagaatgtacattgaataaagtcattttccgatagaaacaagcatcctagttatatgctcatcgacgatacatcaataatacacttttgtatatggcttattaaaatatcatacatattactagttattttgattatggtacatgtaatcaaatttatttattgcc

SEQ ID NO: 7746 - DNA, 1713 bp, Glycine max
  Clone ID: 700681729_FLI
caagctcttgcttgatgctggggctgatgctgagtgccttgatgcgagtggcaacaagccggttaatctgattgctcctgcctttgattctttgtccaaatcgcgaaggaaggctttggagatgttcctcaggggtggtggggaaagagatgaactcatgagccaggagatggagctacagatgttttctgttccagagaaaaaagaaggaagtgataataagaaagaataccctgttgatatatcgctgcctgacatcaacaacggtgtatatggaacagatgagtttaggatgtacaacttcaaggtgaagccttgctcaagggcttactcccatgactggactgagtgtccattcgttcatccaggggagaatgcgaggaggagagacccacggaaatacccttacagctgtgttccttgccctgagttccgcaaagggacctgccagaagggtgattcctgcgagtatgctcatggtgtttttgagtcctggctacatcccgcccaataccggacaaggctttgcaaggatgagacgggctgtgctagaaaagtatgcttctttgctcacaaacctgaagagctacgccctgtgtatgcttccactgggtcggctatgccatcaccaaaatcctattcagctagtggacttgacatgacagcgatgagtccattggctcttagttccacatctttgccgatgccaactgtttcaaccccacccatgtctcccttggcagcagcttcatctcccaagagtggaagcatgtggcagaacaaaataaaccttactccaccatcgttgcagctccctggtagccgactgaaggctgctttgagtgccagggatctggagatggagatggaactgctcggtctagaaagccctgctcgtcaacaacagcagcagcagcaacaattgatcgaagagattgccaggatctcttccccatctttccggagcaaggaattcaataggattgttgatttgaatcctactaaccttgatgacctgttagcatctgctgacccttctgtattttctcaactacatggactttctgtgcaaccttcaacacccacacaaagtgggcttcagatgcgccaaaacatgaaccacctccgtgcgagttatccatccaacatcccttcctctcctgtgaggaagccctcagcttttgggtttgactcatcagctgctgtggcaactgcagtgatgaattctaggtctgctgccttcgcaaagcgaagccaaagtttcattgatcgtggagctgcaacccaccatcttgggctgtcttcagcttccaactcttcttgcagggtatcctctaccctttcagattggagttcccctaccgggaaactggattggggtgtaaacggagacaagctgaacaagctgaggaaatctacttcctttggattcagaaacagtggggtaactgcatcccccatagcacagcctgaatttggtgctgagccggatgtctcatgggttcattcattggttaaagatgttccctccgagaggtctgagatatttggtgctgagaagcaacaatatgatctcagtaaagagatgcttccaccatggatggagcagctgtatatagagcaggagcagatggtagcatgagctagggctgccatggcaatgcttcttggttattctgacaaagtttatttatttatttaattattttattc

SEQ ID NO: 7747 - DNA, 778 bp, Glycine max
  Clone ID: 700681809_FLI
ggaatggctgtggcggatccaaatgcaccacatggcctaaagctaacaattgaagattaccctttcgccaatgatggtctccttatatgggatgccatcaaagaatgggtatctgagtatgttaaccattactatccaagctcaagcacaatagagtttgaccaagagctccaagcatggtggacagaaattagaacagttggtcatggagacaaatctgaagaaccatggtggccaaatcttaaaacaccaaaggaccttattgaaatcattacaactatagcatgggtatcatctgctcatcatgcagctgttaactttgcccaatatacttatggaggctatttccctaataggccaacaattgttagaaataacattcctacagaggacccctcgaaggaagagttggaaaaactcataaacaacccggagaaaacatttttggagtctttaccatcacaaattcaagcaactttggtgatggtagttttgaatttattatcgaatcattcgccagatgaagagtacattgggcaatatgtggaacaatcgtgggttgagaatcaaactataaaggcagcctttgaaaggtttagtacgaaattgaaggagattgaaggtattatagactcaaggaatgcaaattgtgatttgaaaaataggaatggagctggggtggtgccttatgaactaatgaagccattctcagggcctggagtcactggaaagggtgttccatatagcatatctatttaaagattgttattttatatac

SEQ ID NO: 7748 - DNA, 783 bp, Glycine max
  Clone ID: 700681839_FLI
gccaagatatcaattattcctcgtggctacagggtcatattcaggcattaaagcacccactagagcatggccagcctcatgataggctactaatttctagtgggtgctttaatgcctgaatatgaccctgtagcaagatatcaattattcctcgtggccaagctggtggtctcacattttttgctcccagtgaagagaggcttgagtctggattgtacagtagaagttaccttgaaaatcagatggctgttgccttgggtggaagggttgccgaagaggttatttttggccaggaaaatgtcaccaccggagcatcaaatgacttcatgcaagtttcacgagtggcaaggcagatggttgagagatttggattcagcaaaaaaattggacaagttgccattggtggacctggtggaaatccattcttgggtcaacagatgtcatcgcaaaaggattactccatggcaactgcggatgtagtggatgcggaagtgagggaactggtagagagagcatattctagggcaacacatattatcacaactcacattgacatccttcacaagcttgctcaacttctcatagaaaaagaaactgtggatggtgaagagttcatgagtctattcattgatggaaaagctgaattatatgttgcataatcatacacgtaagtaacacaattatgattgtactataaaatacgctctgacatgtacactgtaagaatcaataattattttatcaaattcaaggagaaaaaaaaattatcacaacagcttacgc

SEQ ID NO: 7749 - DNA, 781 bp, Glycine max
  Clone ID: 700681890_FLI
ccaaagcttaatgtgtctgatccgcacggtcggatccagatgcagcaacatgtacaggaccctggatatttgttgcaacaacaatttgaacagcaccagcagttgcagtcacaacaaccgcaacagcaatttgaacagcaacatcaccagcaccagcagacactaccgcaacagcagcaacagtttattcatggcacacactttattcaccataaccctgctattcctgcatattatcctgtatatccttcccagcaacatccccagcatccacaggtttactatgtgactgcgagacaggcgcaggcttacaacctgcctgtgcagcaggctaatatgggtgagtctgcagggaacatcgcctctagccgaccacaaactccaccaaatccttctacattggttcaacaacctgctacttacaaccccatcagaaatgctcccatgcctaaaactgaaatgaatgcttacagagctgcaactgcaggcacccctcaacttgttcaagttcctacgagccaacatcagcagcagtatgtcacatactcacagattcaccatccttctcagtccatggctcccaattctgctgcccctgccaattatgcttttgattatgcggatcctgctcatgctcaaatatactactctcaacctatggcacccacaatgccttcacagtaccagactatgatgatgcaggaaggttcagctcagcatccctcagacagcgtgaagcagcagcagataagaacctcacaaccattataagccagtcctt

SEQ ID NO: 7750 - DNA, 1881 bp, Glycine max
  Clone ID: 700681920_FLI
ggacatccattcaattattatttattcgttacgaccttccacctttttcttgtgtgtgcgttcctaacattattgtttcctaccaagttctctgtctggggagttcttagcaccaccaccagcttctgcagtagctttaagctacgaaagattttccttgaccatggggcaaaagcatttagtgacggtgttctgtttatgggctttaacatgttcccttcttccatctttctcctttggaattctgagaattggtttgaagaagagacctctagatcttgatagtattaatgctgctagaaaggcaagagaaggtctaagatctgtaagaccaatgatgggtgcacatgatcagtttattggtaagtcaaaaggtgaagatatagtacctttgaagaattatttggacgctcaatattttggtgagattggaattggcacacccccacagcccttcactgtagtgtttgacactgggagttccaacctttgggttccatcatcaaagtgctactttactcttgcttgctatacccataattggtacacggctaagaaatcaaagacacatgtcaaaaatggaacttcatgtaaaataaactatggaactggatcaatatctggtttcttcagtcaagataatgttaaagttggcagtgctgttgtcaagcatcaggatttcattgaggctacccacgaaggaagtcttacctttctgtcagcaaagttcgatggaatactgggacttggatttcaggagatctcagttgaaaatgctgtgcccgtatggttcaaaatggtggagcaaaaacttatcagtgagaaggtgttctctttttggcttaatggggatccgaatgcgaaaaaaggtggtgaattagtttttggtggtgttgacccaaagcacttcaaaggaaaccacacttatgttccaattactgaaaaaggttactggcagattgaaatgggagattttttcgttggaggtgtttcaacaggtgtttgtgagggtggctgtgctgctattgtggattcaggaacatctttgcttgctggtccaactcctgttgtggctgaaatcaaccatgccattggagctgaaggagttctcagtgtagaatgtaaggaagtcgtttctcaatatggagagttgatatgggatctcttggtatcaggggtgaaaccagatgacatatgttcacaagttggtttatgttcttccaaaaggcatcaatctaagagtgctggaattgaaatggtgactgaaaaggaacaggaagagttggcagcgagagatactcctttgtgttcttcttgtcagatgcttgttctttggatccagaatcaactaaaacaaaaggcaacgaaggacagagtattcaactatgtgaatcaactgtgtgagagcctgccaagtccatctggagagtcagtgataagctgtaatagtctttccaagatgccaaacattacgttcacaattggaaataaaccttttgtcctcacaccagagcagtatattctaagaactggagaaggcattacagaagtctgccttagtgggtttattgcttttgatgttcctcctccaaagggtccattgtggattcttggcgatgttttcatgagggcatatcacaccgtctttgactatggaaatctccaagttggctttgccgaagcagtctaattacgctttctggaggattttctttgtaaatttgttaagcgtgttgtaaataagctgttataattgtagctctggttactttttgaaaccacgaatgtatttatccatttaagacgtagaagtatcccacttgcaagtgttgtgtgctttttatatgaaaaaaccatcctcatttcattccgtgtttgacc

SEQ ID NO: 7751 - DNA, 1141 bp, Glycine max
  Clone ID: 700681962_FLI
ggagttgacaacatatgctcctcttaccattgtttgtgatggttgcttctcaaacttacgccgttctctttgtaatcctaaggtggatattccctcatgttttgttggtttagttttagagaactgtgaacttccatgtgcaaatcatggccatgtcatactgggagacccttcgccgattctattctatcctatcagtagtacagagattcgctgtctggtcgatgtacctggtcagaaggttccttctatatcaaacggtgaaatggaaaagtatttgaagacaatggtggctccacagatccccccccagctttatgatgccttcattgctgctgttgacaaaggcaacataaggacaatgccaaacagaagcatgccagcagatcctcatcctacacccggagcccttctgatgggagatgcattcaacatgcgacatccactaactgggggaggaatgactgtagcattgtctgatattgtggtgctgagaaatcttctaagccctttgtctgacctgaatgatgcacccacactctgtaaataccttgaatcattttataccttgcgtaagcctgtggcatccaccataaatacattggcaggtgctctttacaaagtattttgtgcatcccctgatctggcaaggaaggaaatgcgccaagcttgcttcgattatctcagccttggaggcctattctcggaaggaccagtctctttactttctggattaaaccctcgtcccttgagcttggttctccatttctttgctgttgcaatatacggtgttggccgtctattgttaccatttccttcacctaagagagtatggatcggagcccgattaatctcgggtgcatctgcaatcatccttcccataattaaggccgaagggattcgtcagatgtttttccctgccactgttccagcttattacagaactcctccagttgcacaataaattgagggaaggttgaagttcgtagttctgtaagcattttggcttcttttgtgtgtattctttgtagtctgtagcttgtaatgtttcaattgaatgtatcatctctgtctctctctctctctctcctttttggtacactagaaattaaatccatgatattaaactaaattacaatcc

SEQ ID NO: 7752 - DNA, 2540 bp, Glycine max
  Clone ID: 700681984_FLI
cgcgggttttagacgggagtgcgaatgcgatgatgaagggaaagggaaccgaagacgatcgtccatggcaatcttaccacactgtttacacaaccgccaaagcaggaatggaattggttgacaaggagaaagttcaaagggtagtttatgaaatgagcaaaggatccaaatattttcaaaacgaggaacgcaaggaagcttttattaagcagaaaattgataacctgcgaattcagtgtgcaaacctcacacaagaagacttggcccattatcaaaaggttgctgatagaagaattgttgagctggaagcttcgcgtgacctttcaaggatttggttacatgtagatatggatgctttctatgctgcagttgagactttaagtaaccctacattaaagggcaagccaatggctgttgggagcatgtccatgttatccactgccaactatgaggcccggaaatttggggttcgagctgccatgcctggcttcattgcacgtaagctatgtccagaattaatctttgtcccaacagatttcaaaaagtatacttactacagtgatttgaccagaaaagtttttgggaggtatgatcccaatttcattgctggtagcctggatgaagcataccttgatataactgaagtttgcagagaaaggaatgtcaaaagtgaagaagtaagttggcgcgtgctttggattaattttacaacgaaagacctttaatgtattagatttcttgattttgtaaatttggaatacgtagattgcccaagaactcagagctggggtttatgaagagactggtctcacatgcagtgctggagtggcaccaaatcgcttacttgctaaggttctgggttctatctcccaaacattttccccatagctatgttatcagcccgtttgttgaaggagaagctttaaagcaccttatcattttacatttaagatactaacccctttagtagagatgaaatgattgtttcatcttcctgggaaatttcatgctatggctttataatattgacattttactctcatataggtttgttcagacataaacaagccaaatggacagtatgttttgccaaatgaccgtatggctgttatgacctttgtatcctcccttcctatcagaaagattgggggcattggtaaggtcactgaacatattttgaagggagtttttggaattaacacatgtgagcagatgctggagaagagtagctacatttgtgcatttttctctcagtcaacagcagattttttttgctctgtaggtttaggtcttgggcagacagattctccccaagtaagatttcggaaaagtattagtagtgaaagaacattttctgccaccaaggatgaagtgctgttgcataaaaaattggaggagcttgctgaaatgctatcagctgacatgcaaaaagagggtctgtctgggcgaacattgactcttaaactaaaaactgcttcttttgaggttcgaactagagctgtgacattacagaagtacatcagctcaagtgaggatattttgaagcatgctaaaaagttgctacaagctgaacttcctatttcagtaagattgataggccttcgagtatcacagttcaatggagacaagtgtagtgctaagtctgatcctacacagaagaccattaccaatttcattacttcgggagatgtcaatagaaattgtagttcttttccagatgttgcagatcatgactttgtcagtaatgcagaaactgatatgtccattgacagtaggcagacaggtcaacttgattggagagatccttttgacggtaattatttgtcagatgtagactaccaaagctgcactgtccagaaaagtgatggtgtagaggaggtgcaaacatctagtaatgatgctacaagttctcactacagtggacttacagaagtactgggatcaacttcttacctggggcaggttgaaggcataaatgtgaagaatggatctaatctcctggaggatgagagacttgattcttgctgtcaggagaagacaatgttgtggctgaatgactacaaatgttcactttgtggaatagaactgcctccaagttttgttgaggaaagattggagcactctgattttcatcttgccgaaaagcttcaaaaggaagaatctagtatccaccaaaaatctgttccgagtcaaagtaagggtcagaaggatggagtcactagacaaagcaaatccaagaagcaaaagttgtcgcagaaagaaggcagttatacacccattgattatttttttgttaaaaagtaatcaaagctgtcaatttattataatgtacagaataactcaatttgttagttattgtataatatgcatgttatttttccttgtaacatgtataaaataataaattcatttacttgtaatttaagttgtaaaatgaaaccttgtaatttaggttgtatttaatattttcattcacgtgacatgtcccgtaagtaataatattattcgtacaatagtttatacaattgcaatattatttt

SEQ ID NO: 7753 - DNA, 2354 bp, Glycine max
  Clone ID: 700681991_FLI
ttcctttttcttctttttttgttctttgttttttgtttgataagaaactgcgagaagaaagtaaaaggttcaatttttacccttttttcttcccagaagcgatctctgaagccgacccattttggaattcggaaaacccagtgctgatcgctctctgggtgttcccaaaatgaagcttcggagatcttcgctgtgcgtctttctagggtttctggtgctgttcctttcgccgccgccatctatggcgaaattcgtggtggagaagaacagcttgacggtgacgtcgccggacgacatcaagggcacgcacgatagcgcgattgggaacttcgggataccccaatacggtggcagcatggccgggaacgtgttgtacccaaaggacaacaaaaagggttgcaaggagttcgatgagtatggcatttccttcaaatccaaacccggtgctcttcccactatcgttttgctcgatcgaggaaattgcttctttgctttgaaggtatggaatgcacagaaggctggagcttctgctgttcttgtttcggatgatattgaggaaaagttgataaccatggacactcctgaggaggatgggtcatctgcaaaatacatagagaacataacaataccatctgctctcattgagaaaagttttggtgaaaagttgaaggttgccataagtaatggggatatggtcaacgtcaatcttgattggagagaggctgtcccccacccggacgaccgtgtggagtatgaattgtggaccaacagcaatgacgagtgtggagttaaatgtgatatgttgatggaatttgtgaaagattttaagggtgcggcacagatattggagaaaggtggttatactcaatttacaccccattatataacttggtactgtcctcaggcatttacattgagcaaacagtgcaagtcccagtgcataaatcatggaagatattgtgctccggatcctgagcaagatttcagcactggttatgatgggaaagatgtggttattgaaaatttaaggcagctatgtgtcttcaaggtggcaaatgaaaccaaaaagccttgggtgtggtgggactatgtcactgattttcaaattagatgcccaatgaaggagaaaaagtataacaagaaatgtgctgatgctgtcattgaatcacttggccttgatattaaaaagattgaaaggtgcatgggagatccaaatgctgattctgaaaatcctgttttgaaagaagagcaagatgcccaagttggtaaggggtcacgaggtgatgttaccatattgcctactctagttgtcaataatagacagtatcgaggaaaattggagaaaggtgctgttatgaaagctatctgtgctggttttgaagaaactaccgaaccagctgtttgtttgagcagtgatgtggagacaaatgagtgtttggagaataatggtggttgttggcaggataaagtagctaacatcaccgcatgcaaggatacgttccgtgggagagtatgtgaatgccccctggtggatggtgtgcaatttaaaggagacggatatacaacctgtgcagctagtggacctgggcattgcaagataaacaatggaggttgttggcatgaagctaggaatggacatgcatattctgcttgttcggatgatggaggggttaaatgcaagtgtcctgcaggctttaaaggtgatggtgtcaaaaattgtgaagacattgacgaatgcaaagagaagaaagcttgtcagtgccctgaatgtagctgcaagaatacttggggaagctatgactgcacttgcagtggggatcttttgtatataagggaccacgacacttgcataagtaaaactgccagtcaggagggaagatcagcttgggctgctttttgggttattttaattggcttagttgtggctgctgcaggggcataccttgtgtacaaatatagaataaggtcatatatggattctgaaatcagagccatcatggcacagtatatgcccttggacagccaaggagaaattgtaaatcacgtgagcgaagaaagagcgtaaaaggaaatactctgtgaagcctgggtgtggcttaccctgtgtacccctttgagttcagattctgagcatttgaatttgatagactgtatcatatggacaataaaaggttcagaattagatagttatcctacgtttttattggggatgtagcaaatagtatacttaatttaggccagacttttttaagttatttcatttcactagattctaggatttctgttcatgtgacttcttgagttccacacttgtgattgtaacctttcgtgatttttcagtacaggcttaaatt

SEQ ID NO: 7754 - DNA, 637 bp, Glycine max
  Clone ID: 700682052_FLI
gtagaggtctctacgtcaaagacaggcaagcatggacatgcaaagtgtcactttgttgcaattgatatttttaatgggaaaaagcttgaagatattgttccatcatcccacaactgtgatgttccacatgtgaatcgcactgactatcagcttattgatatctctgaagacggctttgtgagtctgttgactgataatggaaataccaaggatgatctgaagcttcctactgatgaggcattgcttgctcagattaaagatggattttctgaaggaaaagatcttgtggtttctgttatgtctgcaatgggagaagaacagatctgttcactgaaggacatcggtcccaaaaattaatatgatgctatggctgtagctatagctgatagcacgctttttcttcttatgttgctaacaggtagtatattctccgatacatgtgtgcaaaataaacttcataagatggaaatttgcctgtgcttgaaactcaaatgcttgggatagaagaaattgagctaagtttagcttttgtccattaattaaggaacacaacggtcttgggtggatgaaattctcataaacatctcatattatttgtttttgttgagtttaatatataaccctatttgttctctgc

SEQ ID NO: 7755 - DNA, 1058 bp, Glycine max
  Clone ID: 700682054_FLI
agaagattgaggatgaggttagagggttaaggagggaactaaatgagaaaattgaagagaaaggggaaattttggaaaatgggttgaagaaaatggaggcaaagaatgaggaattggagaggtatttgagtgagttgaagggggaggattggttatcaaaagaggagtttgagaagtttgttgatgaagtgaggagtgtgaaggggagtgggtatgagggtggtgggttggatgagataagggagtttgcaagacgggtgattgtgaaagagattgagaagcatgctgctgatgggcttgggagagtggattatgctcttgccagtagcggtggcgcagtggtgaagcattcggaggtgtttgatttggtgaggggcaattggttcttgaagtctgctagaaatggtgtccaccccaacgcggagaagatgttgaaaccgagctttggtgagcctgggcagtgtttccccttgaaggatagtagagggtttgtgcagattaggctccgcactgccatcattcctgaggctgtcaccttggaacatgtagcgaagagtgttgcatatgatagatcaagtgctcctaaagactgcagggtctctggttggctgcaggagcataatgctgattctgcaattaatactgaaaagatgcatcttctggcagaatttacatatgaccttgagaagagcaatgctcaaacattcaacgtgttgaattcagcagcttctggtgtcatcaacacggtaaggcttgattttacgtccaaccatggaagcccttcacacacatgtatatatcgctttagagttcacggtcatgagcctgactcggtttctatgttggcactggagttataatgttgtcttgtttgctttgaattttgtcaatttctgtgtaattgtccagtgtattttctttagatgtaggataggatgtcatggactccttaattactagatgcagaaatttaacttcttattgctgcttcaaatggactttgtatctagtgtatgaatctgatttaggctgtcgatagatcttgggtattgcaaagc

SEQ ID NO: 7756 - DNA, 1106 bp, Glycine max
  Clone ID: 700682056_FLI
ggaatcttgagaaatggcaggggacagcaagagcaagattctgttcatcggagggactggttacatcggaaaattcatcgtggaagccagcgccaaagctggccacccaactttccttttggtgagggagtccactctctccaaccccgcaaaatcacccctcatcgacaatttcaaaggcctcggtgtcaatcttgttttaggagatctatacgatcaccaaagtttggtgagtgctataaagcaggtcgatgtggtaatttctactgtaggacacctgcagctagctgatcaagataagatcatttctgcaattaaagaagcaggaaatgttaagaagttctatccatctgagtttggaaatgatgtggaccggactcatgcagttgaaccagccaagtctgcatttgcaacaaaggccaaagttcgccgagctattgaggctgaaggaattcccttcacttatgtgtcaagcaacttctttgctggttacttcctgcccaacttgtcacagcctggagccacagctgcccccagagacagagttattatcctaggagatggaaaccccaaagctgtttttaacaaggaagaggatattggaacttatacaatcaattctgtggatgatccaagaaccttgaacaaaattctctacattagaccaccagctaataccttgtcgtttaatgagcttgttactctctgggagggaaagattggtaaaactcttgaaagaatctatgttccagaagaacaactcctgaagcaaattgaagagtccgcaccacccgtgaatgtgatcctgtcaattaaccactcttcttatgtaaagggggatcatactaactttgaaattgagtcttcttttggagtggaagcttcagctctatatcctgatgtgaaatacatcactgtggatgagtaccttaatcagtttgtctaaggtgcaaagcctagctgataagtttgtttaattggtaaaactttgttttctaaataaagagaatcatgtagtaagactgaattgctgcatgtgctcctcaaaagaacaatgtatgaaatacctatgctatgctatatgctatgatacctttattacatgc

SEQ ID NO: 7757 - DNA, 1268 bp, Glycine max
  Clone ID: 700682106_FLI
ctctgtttctcttcactctctctctccctccctcttcaactaacatggcaattgaaaaccaagacaccgctgtcagagaaatcaagcccaagaacaggagaatcatgggtgctggagggcctgatgatgaggacaataggtggccaccgtggttgaagccactgctgaaagagagcttctttgttcaatgcaagttgcatgctgattctcacaagagcgaatgcaacatgtattgcttggactgtatgaatggccctctctgctctctctgcctcgcccaccacaaagatcaccgtgcaatccagattaggaggtcctcataccatgatgtgatcagggtctctgagattcagaaggtgttggacatcactggtgtccaaacctacattatcaacagcgcaagggtggtgtttttgaacgagaggcctcaaccaaggcctggaaaaggtgtcacaaacacttgtgaagtctgcgagcgtagccttcttgattctttccgcttctgttctcttggttgcaagattgttggaacatctaagaacttccagaagaggaagaagcagtcaatggcaatgtcatcagattctgaggactcgtacagcagcaacagcgtccatggtcttaagaaaaactgcaaagtccagagcttcacaccatccacaccacccccaacttcggttaattacagaacggccaagagaagaaagggaataccacaccgtgccccaatggtgggactaatcatagaatattagtgatagtgggtatttttaggctatttgctataatgctcttaggtagtataaaaatactactatactaatgcgagtgtttcgacgtcgtttcatcaaaatccaatactcgagctttcctagggcaggtattgggaagtgtcaccgtccttctttctttttttctgtagtgatttctagcgttttgtatatatagaaagtccaatagaactggaaaaggctgaagaggtagaaataagacacctatgaaatagttgatggtgcagtgatcaaaagaatggcatgtagcaaaataagcaaggctcttttcaaccttagttaaggtgatgatgtttgataaggacttatagggtttggtttctaaggtaaaattatacctaagttttgggggtagagtatatgtaaatagtggctaagtgaggttggggaagaggacaaatgaaaatgtacttcttggaaaataggtggtatgtctatattatatgaaaatagaaaataaagatgtatttttttttt

SEQ ID NO: 7758 - DNA, 1731 bp, Glycine max
  Clone ID: 700682144_FLI
attggtggctagctaagcgaagctaaaaccaaactcttcagcagtttgtttttgcttagcttcttcttctgcttttgctttctccaccaccacaaccaccatgtattctgccactgcctccaacactttcttccttctctcttgtttccttctcttctgtctcctctcagctccttcctgtgtttccatgttctctggtattgagacaggagatttagaaaaaagagatgatttgtttccacagattctaagagacgaggcagttgcaaggctttatgagcttgggaaggtgagtgatgctagtggttatttggagaggacattcttgagtcctgcatccatgaaggcaattgatcttattcgtaaatggatggaggatgctggtttgagaacttgggtggaccaaatgggaaatgtacatggtcgagttgatggtgcaaatgaaaatgctgaagctttattgattggatctcacatggacactgttgttgatgctgggatgtttgatggatcactaggaattgtctctgcaatatctgccgtgaaggctatgcatgtcaatggaaagctgcaaaagctaaagcgccccgttgaggtgattgcatttagtgatgaagagggtgtcagatttcaaactactttcttgggaagtggtgctatagctggtattttacctggtacaacattggagatatctgataagagggaggtgatgattaaagattttctcaaggagaactcaatggacattacagaagaaagtcttttaaagctcaagtatgacccaaagtctatttggggttatgttgaggttcacattgagcagggtcctgtgctagaacaagttggtttcccacttggtgtggttaaaggcatagctgggcagacacgattgaaggttacagttagaggttcacaaggtcatgctggaactgttccaatgtccatgcgccaggatcctatggctgctgctgcggaacaaattgtagtcttggaaagcctctgtaaacaccctgaagaatatctttcttatgatggtcattgcagtgattcaacagtgaaatcactgtcaagctcacttgtttgtactgttggggagatatcaacatggccaagtgccagtaatgtcattccaggccaggttacatataccgtggatatacgagcgatagatgaccttggacgtgaagctgttatctatgatttatcgaaacaaatttaccaaatatgtgacaagcgttcagtttcctgcattattgagcacaagcatgatgcaggtgctgtgatttgtgattcggatctaagttcacagctcaagtcagcagcttattctgcactcaagaagatggagggtgacattcaggatgaagtgccaacattaatgagcggagcagggcatgatgcaatggcaatatctcacttaacaaaggtgggaatgctgtttgtgcgttgtcgcggaggcataagtcactctccacaagagcatgtgctagataatgatgtctgggcagctggtttagcaaccttgtcatttctggaaaacctatcataagtgatacggtaactgtgtaaagcaataaatagatattatagcttgtaattataggttaatttattgagttaattcatgagttaactcttttcttttagttgcttgtgtcttatagttttgtaattgaatttttggttttagttatcctgttatcaggaaacggctccaagttgttatgc

SEQ ID NO: 7759 - DNA, 1603 bp, Glycine max
  Clone ID: 700682285_FLI
gaagttaaaagccttagccttccctacaactccaaacacaaagacatcatcatccatggctgcctccgtctccactgtcggagctgtcaacagagctcttttgaacctgaatggttctggagctggagcttcagctcccagttcagccttctttgggaccagcttgaagaaggttattgcctcaagggtccccaacagcaaggtttccggtggaagcttcaagattgttgctgtagaagagaagaaagagattgaagagacccagcagaccgacaaggacagatggaagggtcttgcctatgatatctcagacgaccaacaagacatcacaagaggaaagggtttggttgactcccttttccaagctccacaggatgctggaactcactatgcagtcatgagctcctacgagtacctcagcactggacttcgccagtacttggacaacaaaatggatggattctacattgctccagcttttatggacaagcttgttgttcacatctccaagaacttcatgaccctgcccaacatcaaggttcctctcattcttggtatctggggaggcaagggacaaggaaaatctttccaatgtgagcttgtctttgccaagatgggaatcaaccccatcatgatgagtgctggagagttggaaagtggaaatgcaggagagccagcaaaactgatcaggcagagataccgtgaagctgcagacatgatcaagaagggaaagatgtgcgctctcttcatcaacgatcttgatgcaggagctggtcgtcttggtggaaccacacaatacactgtgaacaaccagatggtgaatgccactctcatgaacattgctgataaccccaccaatgtgcagcttccaggtatgtacaacaaggaagagaacccccgtgttcccatcattgtcaccggtaacgatttctcaacactctatgcacctctcatccgtgatgggcgtatggagaagttctactgggcaccaacaagggaagaccgcattggtgtttgcaccggaattttccgcactgatggtattcctgaacaggacattgtcaagcttgttgacaccttccctggccaatccattgatttctttggtgcactgagggccagagtatatgatgatgaagtgaggaagtggatttctggtgttggtgttgacagtgttgggaagaagcttgtgaactcaaaagatggacctccaacctttgagcagcccaagatgactctggagaagctcttgctgtatggtaacatgcttgtccaagaacaagagaatgtcaagagagtccaattggctgacaagtacttgaacgaggctgctcttggaaatgctaacgaggatgctattcagaggggaactttcttccagtcttgaattggaggcaaagcaaacttggcaagtaaatatttctgttcgtgaaggttgttgtactaatccaagtgctagaagttgtgatggaacttgcgtgtaacattcttagcattctcaatgtcttaggtgcaaagagaagatgctaagtttgagatgatcttactatatttttcatattggaccgtcttcctctataattttgagttacagtgtccactt

SEQ ID NO: 7760 - DNA, 1606 bp, Glycine max; identical to SEQ ID NO: 6118
  Clone ID: 700682328_FLI

SEQ ID NO: 7761 - DNA, 2075 bp, Glycine max
  Clone ID: 700682341_FLI
accaactaactccacctaacttcttttctctctggggttctttctccatttccattggctttcaaaagtcaccaacacaattctcccttcagagtttcaatggctgtttcaacaagtttccctggtgcaaagttggaggctttgttgctgaaatgtggctcctccaatgctgccactgccactgccaccaccaccacccatttgtcatgtttttgcaaaaccagaaagacacttgttcagagtcagagagggcctattcgctgtgaggcttcttctgcttctgatgttgtggctgatgccactaagaaagctgctagtgtctctgctcttgaacagcttaagacctctgcagctgataggtatacaaaggaaaggagcagcgtcatggttattggactgagtgtgcatagtacgcctgtggaaatgcgtgaaaagcttgccataccagaagcagaatggcctcgagccattgcggagctttgtagtctgaatcacattgaggaagcagctgttctgagcacctgcaacagaatggaaatatatgttgttgctctgtccaagcaccgtggtgttaaagaagtcactgaatggatgtccaaaacaagtgggattccagttgcagatctttgccagcatcagtttctgctatacaacaaagatgccacacagcacctttttgaagtatctgcaggtcttgattctctagtgttgggagaaggtcaaatccttgcccaggtgaagcaggttgtcaaagttggacaaggagtgaatggctttgggaggaacattagtggactattcaagcatgcaatcactgtggggaagagggttagaactgagacaaacattgctgctggtgcagtttctgttagctcagcagctgttgaactggccctgatgaagctacctgaagcctcacatgccaatgcaaggatgttggtcattggagctgggaagatgggaaagcttgtgatcaagcatttggtggcaaaagggtgcacaaagatggtggttgtcaatagaagtgaggagagagttgccgcgatccgtgaagaaatcaaggatgttgagataatctacaagccactctcggagatgctcacatgcattggtgaggcagatgtggttttcaccagcacagcatcagagaatccactgttcttgaaggatgatgtcaaggaacttcctcctgccaccgatgaagtcggcggccgtcgccttttcgtcgatatatctgttcctaggaatgttggatcatgtctctcagaccttgagtctgtgagagtgtacaatgttgatgaccttaaggaggttgtggcagccaacaaagaggataggctaagaaaagccatggaggctcaagcaatcattggtgaagaatcaaaacaatttgaggcttggagagactcattggaaactgttcctaccattaaaaagttgagggcatatgctgaaagaataaggcttgctgagcttgagaagtgcctaggtaagatgggtgatgatatcaacaagaagacacaaagagctgtggatgatcttagcaggggtatagtgaataagttgcttcatgggccaatgcaacacttgaggtgtgatggcagtgacagcaggactctaagtgagacccttgagaacatgcatgctttgaatagaatgttcaaccttgagactgaaatatctgttttggagcagaagattcgagccaaggtggagcaaaagccatagtgtgtgtgtgagatcttgtaccaatttttcattcataacactcatttattttattctattcaggcttaagaatcatgcaatctttggttgaatgattggagcagtaaaagtccccaagaacttcaattgattagtggtgtctctgtctacttggcctaactcctgtttgtaattttaggtcgggtgtttccaaggttttcttcaatagccgtttgcctctatgtctaaaatttgtttattattatgcaaaaatagaggtgtttatgtacaatgtactactatactattacggggagctttgtatctatcacgaataatctatggccaaaatttgtctcctgttaaat

SEQ ID NO: 7762 - DNA, 1638 bp, Glycine max
  Clone ID: 700682385_FLI
attgaagttaaaagccttagccttccctacaactccaaacacaaagacatcatcatccatggctgcctccgtctccactgtcggagctgtcaacagagctcttttgaacctgaatggttctggagctggagcttcagctcccagttcagccttctttgggaccagcttgaagaaggttattgcctcaagggtccccaacagcaaggtttccggtggaagcttcaagattgttgctgtagaagagaagaaagagattgaagagacccagcagaccgacaaggacagatggaagggtcttgcctatgatatctcagacgaccaacaagacatcacaagaggaaagggtttggttgactcccttttccaagctccacaggatgctggaactcactatgcagtcatgagctcctacgagtacctcagcactggacttcgccagtacttggacaacaaaatggatggattctacattgctccagcttttatggacaagcttgttgttcacatctccaagaacttcatgaccctgcccaacatcaaggttcctctcattcttggtatctggggaggcaagggacaaggaaaatctttccaatgtgagcttgtctttgccaagatgggaatcaaccccatcatgatgagtgctggagagttggaaagtggaaatgcaggagagccagcaaaactgatcaggcagagataccgtgaagctgcagacatgatcaagaagggaaagatgtgcgctctcttcatcaacgatcttgatgcaggagctggtcgtcttggtggaaccacacaatacactgtgaacaaccagatggtgaatgccactctcatgaacattgctgataaccccaccaatgtgcagcttccaggtatgtacaacaaggaagagaacccccgtgttcccatcattgtcaccggtaacgatttctcaacactctatgcacctctcatccgtgatgggcgtatggagaagttctactgggcaccaacaagggaagaccgcattggtgtttgcaccggaattttccgcactgatggtattcctgaacaggacattgtcaagcttgttgacaccttccctggccaatccattgatttctttggtgcactgagggccagagtatatgatgatgaagtgaggaagtggatttctggtgttggtgttgacagtgttgggaagaagcttgtgaactcaaaagatggacctccaacctttgagcagcccaagatgactctggagaagctcttgctgtatggtaacatgcttgtccaagaacaagagaatgtcaagagagtccaattggctgacaagtacttgaacgaggctgctcttggaaatgctaacgaggatgctattcagaggggaactttcttccagtcttgaattggaggcaaagcaaacttggcaagtaaatatttctgttcgtgaaggttgttgtactaatccaagtgctagaagttgtgatggaacttgcgtgtaacattcttagcattctcaatgtcttaggtgcaaagagaagatgctaagtttgagatgatcttactatatttttcatattggaccgtcttcctctataattttgagttacagtgtccacttaaattgaatttggtgccttttccttttgtcct

SEQ ID NO: 7763 - DNA, 1792 bp, Glycine max
  Clone ID: 700682412_FLI
gaaaatggtccatgtctaaagattccttgttccccgttttaatctcttggctctgagtcagtcaaagtcaaagggagtctcattcattctgtacaatttgtgtgcacaaccagggaacccacaatttgaggcaaaagagtgaggcattaggggccaactatatcattcctctcattgaattccttccatgtgaacacttcacactatcttcttaatttgaggccttctttcatcatgactagtcactatctttcagccaagttgttttccacagttgtgaccactggccacagatgcaccactgtcgcaaaattatcacaaacaatagctatcacattttgcatgcaaaacacggtatagtccccatttgcactcttggtgcatagagagacacataggatggatttgttggcagaagattggatcattttaggaacatttcactgctacacaatgacaaaatataattttcttaaacaccaattttgttagaaactgaaaacttaagtgtgttcaggtttttggacaaggctgctattaaagaagtcagtgctggctccacaagagtaccattgacagtatcccaagtggaaggagcaaagcttatctttggcatggcccttgtatggctagtgacactgattccaagcaccatttgggcacaaatcaacactctttttgtgaaacaaggcaccactttggacagaaaccttggccctcattttaaaattccatcagcctctcttggaagctttgtgacactctccatgcttctctcggtgccaatgtatgaccggtttttcgtgccgttcatgcgccagaaaaccggccaccctagaggaatcacattgcttcaaaggcttgggattggattttcaatccagatcatagccattgcaattgcctatgtagtagaagttagaagaatgcatgtcataggagcaaaccatgtagctagtcctaaagatattgtccctatgagtatattttggctgttgcctcagtatgtactaataggaatagcagatgtgttcaatgccattggattgctagaattcttctatgatcaatcccctgaagacatgcaaagtcttggaactacattcttcactagtgggatcggtgttgggaacttcttgaacagctttttggtgacaatggttgataaaataacaggaaggggtgacaaaaagagctggataggggacaacttgaatgattgtcacttggactactattatgggtttttgttggtcatgtcaagtgtcaatatggtggtttttctttgggtttcaagtagatacatttataagagggaatcaataagggtcaaggagggtctttgtgttcaaatggagggaggaaacccaactttggacgcctctcttggtttacaagtgtgataactagctatagggtggtggtaggcctaggccatgataaaataaccaaccagtagtatcatattaaatctaaattttcttgacagattctgcggcaaactgataagtgattgtttatttgaatttaattggtcccacctataagtaaagttggagccaaataaattcagatacacaagtttgggtagaatttatgaatgtataaattaatattaatatatatatatatatatatatatatatatatatatatatatatatatatatatatatatatatatatatatatatatcactagtcactacaccgtgtgtgctattttgaaaaatgtgtgccatgatggtatttttttttcctacttttgctaataaaatttcgtgtgaaaatg

SEQ ID NO: 7764 - DNA, 990 bp, Glycine max
  Clone ID: 700682513_FLI
gagaaaattatgctggctaggcaaacaggcttgaccagaaaccaggtggccaattggttcatcaatgcaagggtgcgtctctggaagccaatggttgaggaaatgtacaaagaggagtttggagactccgagatgaactgcaacctttcatctgagaacaacacggtcaaatgtaaaaaagatgatcttgttcaagagtctgataacattaacaacaataataaatgggaagagacacaggacaatttagtaactgttgacagtgtccaagtccaacctcaagcagaactggatagaggggtcaatgtagaaaatgtggtgatggattctggaactgggaaattgcagggtgatcaaaaccaacaaaggcttggcatgaacaacaacaacaacttttattctatctcaaccaaccagaatgatggaggcctaatgggttgttctactcatgccacatatgatttatcagagttgggtaactttactgtgggtagccacgtttcccttgcattggagttgaggaactgtgaaagtgatgggtttgccatgtctgatgatgccatacgcaaacgacgtaatcaagcattggcctcttccccggagactgatttgctagattatcatttcacggattcaggaaagcaacaacacaggtttggcaatccccatttgctgcatgagtttgtcgtatgaaatctagcaaaaaaatatttgatgattttaatggatctctggagaggtgtacctcaacaaagctgaaagagaaaaaagcctatgctgtgctgctgctgctgctgctgattttgctactttttttcttcctcattcttgttgcccattgttcgtaaaaaagtgatgtaaatcacaaaaccgtacaaaatatacaggtagatatgtgtagatatattcgcttgtaatattttacagatgattggttgtatgtatgtgcaggcaatttttgtaaggataaataaagaaaatttctcgtgc

SEQ ID NO: 7765 - DNA, 1120 bp, Glycine max
  Clone ID: 700682628_FLI
aaagaagtcaatcagcaggttggtcttgacaaaggaaaatcttcatctgataaatcaactaagtttcaaggtcgacgcagagttgatcatgttatttttgaccttgcaaaattcattggcaggggaaagataccctcaaaggtgctgaaagaagtgggagaattgataaatctcactctaagtcaggctcagagccatcaccaattatctggctcaacaattttcaatcgcatcgaaataccagcttcgtttgatcctttaaatggtctatacattggtgcacatgggctttactcctctgaagttattcatctaagacgtagatttggtcagtggcaagaggacaatggggctaaggagccttcaaatattgagttttatgagtatgtagaagctttgaagctaactggggatccttatgtaccagctggccaggtggcatttcgtgcaaaaattggaaagaggtatcaattgcctcataaagggataatacctgaagagtttggcgtgattgctcgctataaaggtgaagggaggctggctgagccagggtttcagaatgcccgatgggttgatggtgagcttgtgattcttgatgggaagcacctaaaagcagggccggttgttggatttgtgtattgggcccctgggtatcattttttggtcttcttcaatcggcttaggcttcaacagtagggttttgttcataatatcagagacttgtaaattctttcttcagattctcagcgttctaggttttgttgaatgctaaattgtgcttcaatggaagatatcaccaatcaatacagggtttccatttgagctttaaaagatcttcactactagctttctgccgagtagcataggttgagcatttggctgcttgtctagaactcaaatgaccgaggtatcttaagcttggtagctgtagcttgactaactatagattgaagagggattcataatatcagcactaaagcacaatgtactagtctcttcattcgacattttatggaggtgtagtgttcagggtatcttcatcaactttgtacattgttcctaatttataagaaaaattcccatgtatcataaaattcatgatatcatcgttctttctgtt

SEQ ID NO: 7766 - DNA, 661 bp, Glycine max
  Clone ID: 700682663_FLI
tcagaaggcacttcatgccaatgtaactgggattccttattcatgggcaggatgcaatgatgttattgtggaaaattggggtgattctccgctatctatgcttccaatatatcaagaacttattgaaggtggtatcagaatatgggtattcagtggagacactgattcagtagttcctgtaaccgcgtctcggtattcaatccgtgccttgaacctatctaccatcatcaattggtacgcttggtatgataatgacgaggttggtggctggagtcaagtttatgaggggcttacattggttacagtaagaggggcagggcacgaggttccacttcataaaccccgccaaggttttatccttttcaagacattcttggaggacaagaacatgccattgccaattgatagaagccttagtggcccaactgataaatcactgaacaagaacattcggttggctaggcccatacgcaagatcactatgccatcatcgacgcagggctttacttattagatttctatctttgttgttctacaataaaacaccccttctacaataaaacacccctttctgcaccgatttagaggggctatgtattttgttatataagtgatcttaataatttaagaggggtgaattaaattaaaaaatttctcgttt

SEQ ID NO: 7767 - DNA, 1111 bp, Glycine max
  Clone ID: 700682665_FLI
ccataaaagcatatactttcttagttggaaagagcagggtgctcaattgagcttattagccaaggattttggttctctcgattgttttgcgacggaatttttgattgatggaagtactcttagtctcatggtttcagatgataatagaaacatccagattttttactatgcaccaaagatgtctgagagttggaaaggacagaagcttctttcaagagctgaatttcatgttggtgcccatgtgactaaattcttaaggttgcaaatgctatccacttcggatagagctggttcagttccaggctcagataaaaccaatcgttttgccttattatttggtaccttggatggaagtattggttgcattgcacctcttgatgaaatcacatttcgcagactgcagtctttgcagagaaaacttgttgatgctgtaccccatgttgctggcctgaaccccagagctttcagattatttcggtcaaatggaaaggcccatcggccaggccctgacagtatagttgattgcgagctgctatgccattatgaaatgcttccattggaggaacagcttgaaattgctaaccagattggaacaactcgatcacaaattctgtcaaatctaagcgatctgtctcttggaacaagcttcttgtgaacagtcatcttttgtagatcagggaacagtgctgcccatgtttcccaagctcttggcagttatttattttgatgcaatggcatcttattatcacaattaaatgctccactatgttgaaggcttgggtaactgatgagatcgtagcctaactctcttacggcccttggaaacagtgaatgcagacaaactatggatagtgatatctaaaattgattccaatgtatgtttcattggaagtaggggtgtctgtttaatgctctaatggacgaggtggatgtaacatgaattttgttcatctaaagaaacaagtaggaaacttaaccccactagaaagcccggcccggacattctttcttttctgtatgtcagcatcaagaagtttctgtaacttgtaattattattacttaatacttttgttcgctccataatatgatggtttagtttcaaatggtatt

SEQ ID NO: 7768 - DNA, 1089 bp, Glycine max
  Clone ID: 700682749_FLI
ccagaatcaaatgcttcatcagagagcatttataatgctgcattggctctaggcattgcaaatcaacttaccaacatacttagagatgttggagaagatgctagaagaggaagagtatatctccctctttatttgtcccttcatgaatttccgccatttgtctgtaactcttccgcggaaaatgtcatcatctgaaaggccagcttgtgccaattcatcttttcgtatcacccaagattggatttttatttatttttaattgataattgagtgatgcatttgctacttgaggttccattgctgaagtggttgtggtattgaagtttttatttgttcagttgagatactgaagtttgggtgtgtaaatttctactcataatataatttatatatcaaattaatcttaatcttgactgcccctttcaaagctaaaattgacatttccttctcgaaaaacgctccttatacacaagaggaatgaagatgaccttgccgggtaaccataaacaaattttcctgaaaaatctttggcattatctaaatattcattccaaattaaacatgatatgataaaatgacatctgagtggtaaaacaaattaaggaaatgaaaggtgaggatcagaagatgaccatacttgccgagaattccctcctctctgagacccaacattgaagacatcaacaagagcttcaagcctctccattctccaagtttggcaactcagtgaaagcagccttccgcggatctgttccttgaggcatattgctctgcaccatagaaacttgcttgctacattctggatggatctttgctgctgtaaggatcccaagaacaataactggcccccttttcatcactgctccacaccatgagatcatccaggtctgaacctgaaggagtccaagacatatttcacccaaatcaacgctttctccatagttgccagaaagaaaggaaggcaggctgcagtctgccatcgttgactattcaggccgcccaaagaagatgactagaccatgctttctagtcaatcaagatttaaaaggtttgaagaaaaaaaattataaaattaatattttttatttt

SEQ ID NO: 7769 - DNA, 1037 bp, Glycine max
  Clone ID: 700682772_FLI
aggaaatggaaaatccacccacacaaaaaactccacagattgctttatgcagtctaatggatattcccaaacgcaagataatcatggatgcttcagttgcatttcaggaactggaggtaccatggagctaaagtgcccaccaaatggccaaatgcagatgctgaatgagtttgatggggctctccctttggtaacagttcctgctgttgctgaatttagcaaggaaaatggtgttgtctgggcatgctctcctgatcgtctcgaactgccttcaaagccattccaccattcaaactgctcagattcaccatgcgtatcagaatctggttctgatatttttagtaagcgggaagtcatacagaaactgcggcaacagttgaagagaagagatgatatgatactagaaatgcaagatcaaatggctgaattgcaaaattcactcaatgctcagatgggactttcttctcatttgcaattgcagcttgatgctacaaacagtgacttatttgactccgagagagagatccaacggctaaggaaagcaattgcagatcactgtgttggatttgttcaccatgacaaatcttccaaggtgacagtttttcctgctgagattagaaatgacctttcaaatgggcatcttgatggggagaataattgtgaatcccctgaaaaactaagggatgaggaggagagaattgagttgctgaaaaggcaagtaggagagttgaaagaggtaatagaaggaaaagaatacttgctccagaactacaaggagcaaaaggcagaactgtctctgaagattagggaattgcagcagagattggattctcagctgcctaatattttgtagaagctatcaagtttgtgaatactttggttctttacatttgacaaatcttcactgtcttcctcattctttattttctctgtaattagctcaatatatttcgagtttgtgcaatgtgtgcctactaaggagtgaacgagggcctgggtatttaaaatgagatgaatgcatatggtcttagaaatag

SEQ ID NO: 7770 - DNA, 1318 bp, Glycine max
  Clone ID: 700682893_FLI
gttatctgtttcccgccatatatccaataagctttaaccatgtctgcctttgttggaaagtacgcagatgagcttatcaagaatgccaagtacatagccacacctgggaagggcatcttggcagcagatgagagcactggcaccattgggaagcgcctatcgagcattaacgttgagaacattgaggccaaccgccaagctcttcgcgagcttctcttcaccgctccagatgccctccaatacctctctggtgtcatcctctttgaggaaactctttaccagaaaacctccgatgggaagccttttgttgaggtccttcaagagaacaatgtcatcccaggcatcaaagtggacaagggtgttgttgagttggctggcacaaatggtgaaaccaccactcagggattcgactctctcggagctcggtgccaacagtactacaaggctggtgcacgcttcgccaagtggcgtgcagtcctcaaaattggcccaactgagccctctgagctttccatccagcaaaatgcacagggcttggcacgctatgccatcatttgccaggagaatggccttgtgcccattgttgagcctgagattttgactgatggggctcatgacatcgccaaatgtgctgctgttactgaaactgtgcttgcagctgtttacaaggcactcaatgagcagcatgtccttcttgaaggaactcttctcaagcccaacatggttactcccggctctgatagcccaaaggtaccaccagaggtgattgctgagtacacagttcaagcactccgcaggactgtcccagctgcggtgccaggggttgtgtttctgtctggtgggcaaagtgaagaagaagctaccctcaacctgaatgcaatgaacaagttggaggtgttgaagccatggactctctcattctcattcgggcgagcactgcaacaaagcacactcaagacatggggtggaaagaaggagaatgtcgccaaagctcaagaggcatttctggcaagatgcaaggccaattctgatgctactctgggaaagtatgttggtggaagcggaagtggcttgacttctgagagtttgtatgtcaagaactacaagtattaaacttctaaagagtgtgtttgtttctccttttgaaaacgtcaatccatgcttttggttcagtcacgttgaggtctataagaaagtatgacaatggagaaacaagcatactctaaatggacttggggactgattcggggtggtctggcatatgtatgatacagcctaagaagcatttgcttctgattaacatgcttatttttgggtt

SEQ ID NO: 7771 - DNA, 581 bp, Glycine max
  Clone ID: 700682988_FLI
cgggagtgcaccaatgcaagataattcaggcagttcagttacaatttcttcaccacaggtttctccaacgcatgctcgaattaactataaggatggtgccttcttcttgattgatttacggagtgagcatggccctggatcattgacaacgaaggaaagcagtaccgggtacctcctaattatcctgctcgcatccgtccatctgatgttattcagtttggttctgagaaggtttcgttccgtgttaaggtgacaagctctgttccaagagtctcagaaaatgaaagcacactagctttgcagggagtatgactgattctgctcaattgcaatttgtaagttatggaaaaattatacagcacaaatttgctattgtatagtactatctgcattgttttagggtggggtattataccacagtctagtcatttaagatctgatatgttacatgcctatatggacatttaagagggactcttgggtataaatttgttactccactccaatactttttgtgtatgacatttgtaatttgttagagttagatttataacatgacacacataaacttgcacgtgatt

SEQ ID NO: 7772 - DNA, 1169 bp, Glycine max
  Clone ID: 700682990_FLI
gtcggctggttctgccactccgcccttctcgtcccatacttctcgtggaagatctcccacggcaagcaccacaaggccaccggccacatggagcgcgacatggtcttcgttcccaagacacgcgaggtatacgctacccgtgtcggcaaggcggtccacgagatctccgagctggctgaagagacccccatctacaccctgctccactccatcgtccagcagctcggtggatggcccatgtacctcgtcgcgaacgtcaccggccacaacaaccacgaccgccagatcgagggtaagggcaagggcaagaagaatggcgtctttggcggtgtcaaccacttcaacccctccagccccctgtacgagaagcgcgacgagcacctcatcctgctctctgatctcggtatcggtcttactgtcgctgctctcactgtcatcggcaagacctacggcttcaacaacctgctcgtctggtacatcctcccctacctctgggtcaaccactggcttgtgatgatcaccttcttgcaacacaccgaccccaccctcccccactacgacgccgacacctggacctacactcgtggtgccgctgctaccatcgaccgtgagtttggcttcatcggacgtcatctcctccacggtatcgtcgagacccacgttcttcaccactacatctccaccatccccttctaccacgccgacgaggccaccgaggccatcaagcccgtcatgggccgtcactaccgctctgacaccaaggatggtaccgtcggtttcctcaaggctttgtggaagagtgcacgttggtgccagtgggtcgagcccagcgttggtgccgagggtgagggtaagggtgttctattcttccgtaaccacaacggtctcggtacgccaccccagaagctcgatgctccaggagccaagaaggcttccaagatggaggtcggccctgagagcgacaacgagtaagcgacgattacgactgtttatgttttagagcggattattctgccacggcgttcgggagccgcccgacgaggctaggcactttgcttctcggtgtggcgcatggactagacgggccagtcaaacatgagcctggtgtagtttgtagatttgttgtagcagacccttgagggttcgaacaagttcaaaagttcatcatc

SEQ ID NO: 7773 - DNA, 2609 bp, Glycine max
  Clone ID: 700683029_FLI
aatggctcctgtgccgagcagaaccgtggccacggcctctctcgcctcgctccttccttcttcccccttcgcgagggcttctcttctcagaagcgcttttctgccgccgcaaatagggcgcgacaggaagtgcttctcccccgccgcagggctgcggtggacgcagcggcgccaggggaggagggacgggctcgccgtgcggtgcgaggccgccgtggcggagaaggacgaggccaccggtgagaagtttgagtaccaggccgaggtgagtcgattgttggatttgattgttcacagtctgtatagccacaaggaagttttccttcgtgaacttgtcagtaatgctagtgatgctttggacaagttgagattcttaagtgtgactgagccttctttgcttggagatgctggagatctagagatacatatcaagtctgatccagacaatggaactattactataacagatactggtattggaatgactaaagaagagctcattgattgtcttggaactattgctcagagtggtacctcaaaatttttgaaggcacttaaggaaaacaaggatctaggagcagataatggtctgattggtcaatttggtgttggattctactctgcttttcttgttgctgggagggttgtcgtgtctacaaagagcccaagatcagataagcagtatatgtgggaagcagaagctgacagtagctcttatgtgataaaagaagaaactgatcctgaaaagtttctgcgtcgtggtacacagattacactctatttaagagaggatgacaagtatgaattctcagagccaagcaggattcagggtttggtgaagaattactctcagttcgtttccttccccatctacacatggcaagaaaagtcaagaactgtggaggtggaagaggaggaagaacccaaagaaggggaagaaccaaaagaagagggtgagaaaaagaaggtgaaaaagactaaaactgagaagtactgggactgggaattggccaatgaaacaaagccaatatggatgcgcaacccaaaggaagttgaaaaggaggagtacaatgaattttataagaagacatttagtgaattcttagaaccacttgcacatactcacttcactactgagggtgaggttgagttcagaagtattctgtatgttccgggaatgggacctcttaacaatgaagaagtagtgaaccctaaaacaaagaacatacgcttgtatgttaagcgtgtattcatttcagatgattttgatggggagctgtttccacgttacctgagctttgtgaggggtgtggttgattcagatgatcttcctctcaatgtttctcgggagatccttcaagaaagcagaattgtaagaataatgagaaagagacttgtaaggaaggcatttgatatgattcaagaccttgctgaaagtgaaaataaagaggactacaaaaaattctgggagaactttggtaggttcataaaattaggttgcattgaagacactgcaaatcataagcgcattacaccactattgaggttttacacttccaaaagtgaggaggagcttaaaagcctagatgattatgttgaaaatatgggtgaaaaccaaaaggctatcttttatctagcaactgacagcttgaagagtgcaaagactgctccatttttggagaaattggttcaaaaagatattgaggttctttatttggtcgaacctattgatgaggttgccattcagaacctacagacatacaaagaaaataaatttgttgatatcagcaaggaggatttggaattaggtgatgaggacgaggtcaaagagagggaaaacaagcaagaatacaacctactctgtgattggataaaacaacaacttggtgacaaggtggccaaagttcaaatctcaaagcgcttgagttcatctccctgtgtgcttgtatcagggaagtttggttggtctgcaaacatggagagactaatgaaggcgcaagcccttggggacactgcaagtttggagtttatgagggggaggagaatattggaaattaatacagatcaccctattatcaaagacttgagtgctgcctgcaagaatgcacctgacagcagcgaagctaagcgagcagttgacctcttatatgacacagcactaatttctagtggattttctcctgacagccctgctgagttgggaaataagatttatgaaatgatggccttggccttgggaggaagatggggtagatcagaagaagaggagggagatgcacctgttgaagctgctgattcaagcacaagtgaagaaagttcagagccagaagtttatgaaccttctgaagtcattgcagagagtgatccatggacaactgattaggcatactatgccctcatagaataagttacaaatttttggcattatataatgcataccaaaaaggtgagaaaggaaagggagagactgatttttccaatgatttcatggtgctgaaggaagtttctaatatcattatagaactgtgagtgaatgtcctaaggggcaaatcctatggggcctttgcgaatggaattgagtttagtgttcgtaggtgggcaaatttttt

SEQ ID NO: 7774 - DNA, 689 bp, Glycine max
  Clone ID: 700683072_FLI
gttcaggaccactgttactttcccttcttcactcaaaactgtctcttgcagttccccacaacatgaacagcaacaatctccaaggaagaagaatgagaacaagttagcaaagttggcaatagttgcacttgctgctggtgtgttaacacttgggtcagttcatgatgcatcagccgccaagactggtggtagaatcgggggccaggccttcaagtcagcagctccgcgctcctcaccaagaatcaacaattccagaaccaatatctatattaatcctcgagtggcacctccgctagttggtggctatggctatggttatggtgtgccattttacggtggctggggatggtctccattttcattctttgcaccaggtcccagtgtagctgtaggcgttggaggtggatttgacactattcttctgtttatgtttcttggtgctgccgctgcagttgtgaggagattctttgggtcaagaaatgaagatgatgactactagcggtataaaaaagagtgccaagtcgatgtatagaagaatggaagggtgaccattgtgaccaatttattagtttgatgtattttgagatattatacttgaaaaccaagcaatcttgtgctttctaatgcactggtttacatgcttgttacacaggatgtaatgaagcaatggagatacattatactcgttc

SEQ ID NO: 7775 - DNA, 1455 bp, Glycine max
  Clone ID: 700683113_FLI
gctaaagcacaagatggctgagcagatcaggagagaagtagcaacaatgaaactaatcaagcatccaaatgttgttcgattgtgtgaggtcatgggaagcaagacaaaaatatatattgttttagagtttgtaaccgggggagagctctttgacaaaattgtaaaccatggaaggatgagtgaaaatgaagctcgtagatatttccagcagcttataaatgctgttgattattgccatagcaggggtgtttaccacagagacctgaagccagaaaatttgctattagatgcttatgggaaccttaaagtttctgattttggtttgagtgccctctcccagcaagttagggacgatggacttcttcatactacatgtggcactcctaattatgttgctcctgaggtccttaacgatagaggctatgatggggtaactgcagacttgtggtcatgtggggttattctctttgtattggttgcaggttacttgcctttcgatgaccctaatcttatgaacctgtataaaaaaatctcagttgctgaatttacttgccccccatggctttctttcagtgccaggaaattgattacacgaatcttggatcctgatcccaccactcgtatcactatacctgagatattggatgatgaatggtttaagaaagattataagcctccagtttttgaggagaacggggaaaccaacctcgatgatgttgaagctgtctttaaagattctgaagagcaccatgtgacagagaagaaagaagagcagcctacagccatgaatgcatttgagttaatttccatgtccaaaggactgaaccttgaaaacttgtttgatacagagcagggatttaaaagggaaacaagattcacctcaaaatcccctgcggatgagataatcaacaagattgaggaagctgcaaaacctcttggctttgatgtgcagaagaaaaattacaagatgaggcttgcaaatgtgaaagctggaaggaagggaaaccttaatgttgccacagagatattccaagtggcaccttctcttcacatggttgaggtacggaaggcaaaaggagatacattggagttccataagttctacaagaaactttcaacaagcctggatgatgttgtctggaaaacagaagatgatatgcaaatgcgagaaacaaagtgatattgttattatcattatcttgtgtaattttctttatgtctgaggttctactattttccaatttcttcattcgttatttcctcttaaggttccttcgtgtaggtttgtttggacatttaattacatattacttatatattgcgtaccatgctactattttttgaaagcatgcagagtttatgtaagaattttactcatcaacagttccagttatgttcatgaaacaaaaaattgtaagaaaagttgtatatatctatcttcctttttttgctagt

SEQ ID NO: 7776 - DNA, 680 bp, Glycine max
  Clone ID: 700683156_FLI
tggaggttcaatgtgttggaatacccgccttttctctgcaactgcaggtggtggggcattctgcaatggccaaaggatccaagtgagtgcaactaatcaggtggaacgatctcttctagtgacaggctttgggtatgatcatgatgatgcatgggctacgaacatagacttattcaaagaatttacggatgtcagcaggggtgtaagacgacttggcgcagctgccgtggacatgtgtcatgttgcattgggaattgtagaagcttattgggaatatcgtctaaagccatgggatatggctgctggtgttttgatggttgaggaagctggtggcacagtttctcggatggatggaggaaagttttgtgtttttgatagatctgttttggtttcaaatggtcagctccatgcaaagcttctggagagaattggacctgcaacagagaaactaaaaaacaagggaattgatttctcattgtggtataaaccggagaactacagggctgacgtttaaggcaccaagaattgcttttgttcatggacactgctaacagctagcagatgatatttttcttcttctttggatttgtacaaatctgcttgtcatagttataaattacatttgtgaaattttttacccgattacgataattacagtttgttcaacatttgtgagagcc

SEQ ID NO: 7777 - DNA, 1730 bp, Glycine max
  Clone ID: 700683191_FLI
ctactctctttttttctaccttagattccttctccaacaatggctctcgccgtttccactacttcttcctcttcagcagctgctgcagcttctagctccttcttctctcgtctcggatcttcctccgacgcaaaagctcctcaaatcggttcgtttcggtttccggagaggtcgcttgtttcgtctgttgttgtcaatgtaactcaacgacgctccttggtgaggccactcaacgccgaaccgcaacggaacgattctattgttcctcttgcagcaactatcgttgctcctgaggttgagaaggaagaggaagattttgagcaaatagcgaaagaccttgaaaatgcatctcctcttgaaattatggatagggccctcgagaaatttgggaacgacatcgctattgcatttagtggtgctgaagatgttgctttgattgagtatgcacatttgacgggtcgaccctacagagtgtttagtcttgacactgggagactgaatccagaaacctacaaattttttgatgcggttgagaagcattatggaattcacattgagtacatgttccctgatgcggttgaggttcaggcattagtaagaactaaagggctcttctcattttacgaggatgggcatcaagagtgctgccgagtaaggaaggtgaggcccttgaggagagcccttaagggtctcaaagcatggatcactggacagagaaaagatcagtctcctggtactaggtctgaaatccctgttgtccaggttgatcctgtttttgagggactggatggtggaattggcagcctggtgaagtggaacccggttgcaaatgttaatggtctagacatatggagcttccttaggaccatggatgttcctgtaaattcattgcattcccaaggatatgtttcgattggctgtgagccgtgcacaaggccagttttaccgggtcaacatgaaagagaaggaaggtggtggtgggaggatgccaaagccaaggagtgtggtcttcacaaaggtaatataaaacatgaagatgctgcccagcttaatggaaatggggcctcccaagcaaatggatctgccactgtcgctgacattttcaactcccaggatgtggtcagcttgagcaggtctgggattgagaatttggcaaaattggagaaccgaaaagaaccctggcttgttgtgctctatgcaccatggtgccgcttctgtcaggctatggaggaatcatatgttgatttggcagaaaagttagctgggtcaggagtgaaggttgcaaaattcagagcggatggagaccagaaggaatatgcaaagactgaactgcagttgggaagcttccccacaatactactcttccccaaacactcttctcaaccaattaagtacccttcggaaaagagagatgttgattcattgacggcattcgtgaatgctttacggtgatggttaattgagtatcttgctcaatgttccgtcgtacaataccggcaataaatttcttcacagttttggcaattcactgaaaatgggaatggcagttttgacagcaaaacgaagattctcagctagaagtatccctgtataggtttagataatcttcctcacaaatataattgtagtagtcattctgagaatgtgatttcctgttttgttagatgagtagagttatggttgtattatgttgtttcttcactatcataatctacgtttttagttttgcc

SEQ ID NO: 7778 - DNA, 940 bp, Glycine max
  Clone ID: 700683196_FLI
caggcaccgaaaccttcttcctttgctggcccacgtgtctaggccgggatgccactaccttgtttacgagttcatgaagaatggcagcttgcatgacaccctgagcaaggttgaggtgggcgagttcgagttggattggttgtcaaggcacaagatcgctctcggtgtggccgctggactcgaataccttcacttgaatcacaaccctcggatcattcatagggatctcaagcctgctaacattcttcttgatgatgacatggaggcccgaattgctgatttcggcctcgccaaggccatgcctgattacaagactcacattacaacctccaatgtggctggaactgtgggctatattgctcctgagtatcatcagatactcaagttcactgataagtgtgatatttacagctttggcgtcatacttggggtgttggtcattgggaagcttccttctcatgagttttttcagcacactgaagagatgagtttggtcaagtggatgaggaagattttgagttccgagaatcccaaggaggctattgatacaaagctgctggggaatgggtatgaggaccagatgcttcttgttttgaagattgcatgcttttgcactatggatgatccaaaggaaaggcctaacagtaaggatgtttggtgcatgctgtcacagattaagcactgactctgttggattactaatgtgtaccatatttgtgccaaagtgtgtttgtttaagaatataatcttgcttcataaggtaaattatgaaccgatgcaatattgtttccttcatcataccttgctgaatttccttggaaaatagaaagaaaatttcagcaatgcaatgatctatctataatctagtctgtcacaactagtttgcactttatatgtttatgcattcaccctgcaaataaaatagttttatgttgttacc

SEQ ID NO: 7779 - DNA, 1329 bp, Glycine max
  Clone ID: 700683248_FLI
gtaatagtaatatacataagtaacataaccaatggaagcgcgtgcaggagccaatcagcgtattgcaagaatctctgctcatcttcagcctccaaatttccaggaagggagtgatgttcttcttaagagtgctgagtgcagagcaaagggtggggcacctggattcaaagttgcaattttgggggctgctgggggaattggtcaacccctttctttgctgatgaagatgaacccattggtttcagttcttcatctttatgatgttgtcaacacccctggtgtcactgctgatgttagccacatggacactggtgctgtggttcgtggctttctggggcagcaacaacttgagagtgcactcactggcatggacttggtaatcatacctgctggggtaccaaggaaacctgggatgacaagagatgatttatttaaaataaatgctggaattgtgaggaccctttgtgaaggaattgccaagagctgccccaatgcaattgtcaacttgattagtaatccagtgaattccacagttgctattgctgcagaggttttcaagaaagccggtacatatgatccaaagcgactactgggtgttacgacccttgatgttgtgagggcaaatacttttgtggcagaggtacttggagttgatccaagagaggttgatgttccagtggttggaggtcatgctggtgtcacaattttgcctcttttgtcacaggttaagcctcgcagtagcttcactgcagaagaaactgaatacctgacaaatcgcatccaaaatggtggaactgaagttgttgaggcaaaagctgggacaggttctgcaacactatcaatggcatatgcagctgccaagtttgctggtgcatgcctccgtggcttaaaaggagaagctggggtagtggagtgtgcttttgttgattctcaggttacggaacttcccttctttgcaaccaaggtacgtctaggtcgtgctggagcagaagaggtttatcaactgggtcccctgaatgagtatgaaaggattggattggaaaaggcaaagagagagttagcaggaagcatccagaagggtgtagagttcatcagaaaataaatgtgataaggaaaaactagtttttgtctcttatatataaggaccatgtgtaatgcttctctttgttcatagatttttttcttcttcttaagaatagtactctaaatttttggtgtcatccgtaattgctgatgataacggatttgacatcagtggaactgcttaataatctcagaaagatactaaaatatcagccttttgtactaattccagatcttattttcttt

SEQ ID NO: 7780 - DNA, 1460 bp, Glycine max
  Clone ID: 700683262_FLI
agttaaaatcactgcctctcgttcccactcaaacttagctagcgcaacacaagcaacaaaacacaaacaagcgaacaatagttcacaactaaaggaagaggttgttgaagagatagagatacatagtgtttgtgttagtgttatttatggtgtccctcaacctcaacccaaacccacctcaaacttttcacttcttcgaccccttcaacatggaggatcagaataagaaggtccgaaaaccttacaccattaccaagtccagagagaactggaccgaccaggagcatgacaagtttctcgaagctcttcacttattcgaccgtgactggaagaagattgaagcatttgtaggttcaaaaacagttatccagataaggagtcatgcacagaagtatttcatgaaagttcagaagaatggcacaagtgaacatgtacctccccctcgtccaaagagaaaagctgctcatccctacccacaaaaggcatctaaaaatgctcttactatatcccaagttgcgcggccattgcaatcttcatctgctttatctgaatcatcacacatctataggccagattcatcatctgtggttagaactccagttaggcagtgtggccattgccatcttggggttataatgttacaccactagtcagtcttccccgagtgactaaagatgatatggtgttgatgagtcaacaaatcaatcctttcagcagtagtaatgagaacactcctaggggttggccaattagcaaacagacagatcagggtgaccaaggcaagccaactatagtaatgccagattttgcacaagtctatagcttcattggcactgtatttgatccaaatgcaattaatcatctacagaggctgaaacagatggacccaataaatgtaaaaactatattgctattgatgagaaacctctccaccaatttaaggagtcctgaatttgagaatgaaagaagggatgctgtcattgtactatgctaacatggagaaggaaaaatccagtagtcatcgaagccaacccctcacttgacagatcagagagtgttgtcttatctgcttaaggtgttaccaatggtttatcaggaacatagtttttaaatatcttccaaaaacacaataagctttcctctcagctaccactaactccaaatggtgaaatatggggcacaaggggggaaaggattacaggttttactaacagcttgtaggttgcagatacttgcatgtgtgcatgcgtgcacgtgtatgtagtttactgtcctttaggcttatgtgtgtatcttatgaagatggttgtcataggaatgcaggataatgagtccagagtcctgttaaggtaacctgggggctgtactgtacagaatattgagagcgtctgtgtgtaatgttgtgatggttttttctacaatttagtatacaagagcggtgctatgatttaggaggtgct

SEQ ID NO: 7781 - DNA, 1055 bp, Glycine max
  Clone ID: 700683380_FLI
cccgaacagcagctgatgaggggaacagacacatatcaacacgagtgatgggaactttcggttatgtggccccagagtatgcaatgactggacatcttcttgtgaagagcgatgtttacagttatggtgttgtcctccttgagctttcgactggaagaaaaccggtggacatgtcacaacctcctggtcaagaaaatctcgttgcatgggctcgtccactactctcaagcgaagaaggattggaagcaatgatagatccatctcttggacctgatgtgccttctgatagtgtggctaaagttgcagccattgcttcaatgtgtgtacaaccagaggtgtcggaccgtcctttcatgggggaggttgttcaggctctaaaacttgtgtgcaatgaatgtgatgaggcaagagaaacaggttcaagctctagctctgttgatttgagtcattctagacaactatcagataatttacaaggccaattctcagccactaactatgattctggagttgatattgaaaatgggttgttagcatcagagttattcagctcatcagcgagatatggaaggcgagtgtccggatcatttagaaggcattcttattcaggtcctctaaatactggaagaagcaagcggttgtggcagataattagaaagctttctgggggtagtgtcagtgaacatggaactatgtttaagttatgagtcttatgaccaggttccattgaaccaaattgcaatttttgaactttcttctgtgcatattgctctccctcactttgttaatgtgcagttcacaactctgctagaggcattgcacctctctgcctgagccatttgaagtttgacaagagaatacaagcaagttgtaaataggttttgacatgcttttttctgctaacctgcaagatcatgtgtatgtaactggtactaacactttgaagaggggaagcaatgcaaatctagcttgaaaatagaagatgactgaagatgacctttagtaagacctccaattgcaaatacaaacatacaagatatagtctatgcagttgc

SEQ ID NO: 7782 - DNA, 1133 bp, Glycine max
  Clone ID: 700683408_FLI
gtgagaactggatagacagagtgtagtacgtgaaaaggaaagcgcaagaagaaagcacagcctctactacatcatcccatttcagtaccttttctttctgagtctcagtttcaacaattgaagaagaaaatggttgacaatgaatcgctctcagaattcctcgcatctgcggtcgacgcggctcagaaagctggcgagattattcgaaaaggcttctaccagaccaaaaacgtcgaacacaaaggacaggttgatttggtcacagaaactgataaagcatgtgaagaactcatatttaataatctcaaacagctttatcccactcacaagttcatcggggaagaaaccacggctgcctatggcaccacagaacttacagatgaacccacgtggatagttgatcccctggatggaactactaactttgtgcatgggttcccctttgtttgtgtctccattggtctcacaattggaaaaactcctacgattggtgttgtatacaatccaataattaatgagctttttactggaatccgtggaaaaggtgcctttttgaatgggaatcccataaaagtatcgtctcaaactgaactaatcagctcccttcttgcaactgaggccggaacaaaacgtgaccaagaaacagtagatgcctctaccaataggattaaaagcttgcttttcaaggtgagatctcttcgaatgagtggctcctgcgctctgaatctttgtggaattgcatgtggaaggctggatgtattctttgaacttggctttggtggtccttgggatgtagcaggtggtgctgtcattgttagagaagctggaggtgttgtatttgatccgtccggtgcagattttgacataacatctcagcgagtagcagcttcaaactctttcttaaaagatgcacttgttgatactctgcgccaaatggtttgagaaatttactattaatcaatggcaagaacttatcatataagccatctttgttagttcgtttagcttttgcccaaataatttttaagattctcagtttttggtaaaagttgcctgataaaaatgttttagaatttttaacttctgtgaatccaaagtattcaatagtaaatcactttaaatcctttcaaacg

SEQ ID NO: 7783 - DNA, 1526 bp, Glycine max
  Clone ID: 700683426_FLI
tcaaatgtgacttgtcagcctggcagaaagtatattatcaacaagtcactgatgttggcagagttggcttagacaatggttctggaaaatcaaaaagtctacagaacttgacaatgcaactcagaaaatgttgtaaccatccctacctctttgtgggtgactatgatatccataaacacaaggaggagattttcagagcatcaggaaagtttgaacttcttgaccgtttgcttccaaaacttcgtagagctggtcacagagtcctccttttttctcagatgactcggctcatggacattcttgaaatttatctgcgacttaatgattttaaatttcttagacttgatggctcaacaaaaactgaggaaagaggttccctactacggaaattcaatgcacctgattctgcatactttatgtttctcttgagcacccgtgccggaggtcttggtttgaacttacaaacagcagatactgttataatctttgacagcgattggaacccacaaatggatcaacaagccgaggatcgagcacatcgcattggacaaaaaaaggaagttagagtttttgtgttagttagtgtgggatctattgaagaggtgattttagagcgtgctaaacaaaagatgggcattgatgccaaagtcattcaggcagggctctttaacacaacttctacagcacaagacagaagagaaatgttgcaggagattatgcgtagaggtactagctcacttggtacggatgtcccgagtgagagagaaattaaccgccttgcggcccgatctgatgaggaattttggctgtttgagaaaatggatgaagagcgaaggcaaaaggagaattacagatctcgtctcatggaagagcatgaactgccggattgggtatactctccactaaataaggatgataaggtcaaaatatttgacagtggtagtgttactggaaagcgtaaaagaaatgaagtggtatatgcagatacattaagtgacctacaatggatgaaggctgtggagaacggacaggacatatctaagctttcagtcaaagggaaaagaagagaccacctccctgttgacaaccatgcacaagctagtgatgacatggggacagaagaacggttatttagaagtgaagacactttcgacgtgacacctgcctctaagagactcaagcccgaagaaataaattcccagaaacatgaaaacgaagatgtcagtgttggtggtttgaacgagcatatattttcctggaatactcgtagaaagaagagatcaggctaccttggccagggttcattctctgatagtagagggcagaattcaaatggaagagcaaactggaactgatagttctaatttagtcatggatgccagaaattttccctacatttgtattgtgattctgcttcattgtgtttgtcaaggtaaatggtagattacactcgatcagcaaatgtagataccagcaaattccttctggcagttgtgaagtttatcagtgtgaatgtaaaatctaat

SEQ ID NO: 7784 - DNA, 602 bp, Glycine max
  Clone ID: 700683437_FLI
gacaggtaagaattgttgcttcaacgagtcacgtgtggagttttatcttgagcaagaacctcacccatcatcctccaaaaacttgaaacaccttttccagatgatccgcaaaggtacctactccaagtatgattatggaaagctaaaaaatctgatagagtacggcaagttcaatccaccaaagttcgaccttagtcgcatacccaaatcattgcctctgtggatggcctatggtggaaatgatgctttggcagatataactgatttccagcacacactcaaggaattgccatccacaccggaagtggtttatcttgaaaactatggtcatgttgacttcattttaagcttgcaagcaaaacaagatctttatgaccctatgattagttttttcaagtcatccggaaaatttagtagtgtgtaaatttccttcattccggtatgatggatgcaatacaatggtctacgtgtttatatattactgcactttctgtaaagtgaaaatattaatattgtgtggagttcaccttgattttctgtatgtaaatatgatgacagatataataaagagtggcgttgcatggcctatttctgcaacctgt

SEQ ID NO: 7785 - DNA, 649 bp, Glycine max
  Clone ID: 700683458_FLI
atcaataatagggcgattagcaatggcttggaactcaggccctctcaagttgttaatcgccctagggttactgttggtggtgaagacctaaggaccttctacactctggttatggtggatgcagatgcacctagccctagcaaccctgtcttgagggaataccttcactggatggtgacagatattccagctaccacaaatgcaagctttgggagagaggttgtgttttatgagagcccgaacccttcagtagggattcatcgaatcgtgttcgtattgttccagcaattgggcagagacactgtcatcaccccagaatggcgccataatttcaattccagaaactttgctgaaattaataaccttgcacctgttgcagcagcttatgccaactgccaaagagagcgtggttgcggtggaaggagatattaacaagttcaattaatgaagattcttggatgccttactccagcttatactttagagaaataaagacagaagagagaaaaatatatatagtaccttaagtaatatgatgtaataaaaggaaagataaataatgataataataataatgataataataataatagatgcttagtgtaatagaatagtagcactatcatcaaataagttagaagagtaatgg

SEQ ID NO: 7786 - DNA, 1042 bp, Glycine max
  Clone ID: 700683611_FLI
atttattttagtgccgcgacagagacaacaaagagagtgagaaactaaaaagagaagaggaaaaaaaaatggaggaatcatcaacaacatgcgtgttgtgcgagaagagggcaatgatgctctgcgactcggaccaggctaagctatgctgggaatgcgacgagaaagtccacagcgccaatttcttggtcgcgaaacattctagggttcttttatgtcgtttgtgtcactccccgactccgtggaaggcttcggggatgaaactcacgcccactgtgtcgttttgtaaccgctgcgttgcggaacggaacgcgaggtggaaccgattggtgaataatgaaaatgaacatcaacaacagcaacaacaacaacaacagagtgattttgtggtggatgatggtagggaatatggttctgatcatgtttttgatgatgacgatggtgattatagtgatgatagtggtgaagaagaagaagaggacgaggatgatgaagaggagaatgagaatcaagtggttccaatgtcttctggttctgccacgtcaccacctaaggttgcctgtttagcgttgaagcgattgagaaacaactcttttctgtcgattcttcacatgatgagacagcgtgctcttcatctgagatgcttagttctacattgcctagtggtgatgaatcaccctctttgagtagtgtattaaagaggcatcgggttgattagtgaaaattgaagaggttagaggtggtgacggtttgtgttgatgaacccaatttgatcgaaaattaatctggaccgttgaattgataggacaacttctgtttatagggcaacttcagattatgtttagtgttaacttccatctttctcttgaaactacttagtttatagaacaacttagattcagaaaaaaaattgttttctttttgcattcaatttttgtagccaaccccattgataataactctgtagttcacatttcatgatatatatgtatgtggagaatgtatatacttcaaatcctactttcattaattttcgccacct

SEQ ID NO: 7787 - DNA, 508 bp, Glycine max
  Clone ID: 700683674_FLI
atgatgatgaagtgaggaagtggatttctggtgttggtgttgacagtgttgggaagaagcttgtgaactcaaaagatggacctccaacctttgagcagcccaagatgactctggagaagctcttgctgtatggtaacatgcttgtccaagaacaagagaatgtcaagagagtccaattggctgacaagtacttgaacgaggctgctcttggaaatgctaacgaggatgctattcagaggggaactttcttccagtcttgaattggaggcaaagcaaacttggcaagtaaatatttctgttcgtgaaggttgttgtactaatccaagtgctagaagttgtgatggaacttgcgtgtaacattcttagcattctcaatgtcttaggtgcaaagagaagatgctaagtttgagatgatcttactatatttttcatattggaccgtcttcctctataattttgagttacagtgtccacttaaattgaatttggtgccttttccttttgtcct

SEQ ID NO: 7788 - DNA, 881 bp, Glycine max
  Clone ID: 700683721_FLI
caagataggtgttgaaactgacaagattggacggattttgtccaatccaagtccagcagtgaatggagtcctaccagcagatacaaggactccattcactgctggacttggattggacaagataggtgttgaaactgacaagattggacggattttggtaaacgaacgatttgccacaaatgtctctggtgtttatgcaattggagatgtaattccaggcccaatgttggcacacaaggcagaagaagacggtgttgcttgtgttgagtacatagctggtaaggtgggccatgtggattatgacaaagtccccggtgttgtctatacaatgcccgaggttgcatctgttgggaagacagaggagcaggtgaaggaacttggagttgaataccgtgttggcaagttcccgttcatggctaatagcagagctaaggcaattgacaatgctgaaggactggtgaagatattggctgaaaaggagacagacaagatattgggagtgcacattatggcacccaatgcaggagagcttattcatgaagcagcaatagcactacagtatgatgcatctagtgaggacattgcacgtgtgtgccatgcacatccaacaatgagcgaggctgtgaaagaagccgcaatggccacttatgacaagcccattcacatttaaaaggagccggttgctacttcttgttttcatttttgtccaagaattttacaatgacttggagatgatacatcctgtgttaaatttagattcaggtttttaaatgcaaattagccccttgtttacttgtttgcataataagaggaatgattgtgttgttcttatccttgttgaataatatatatatctccccttctctctgggacaatattgt

SEQ ID NO: 7789 - DNA, 1087 bp, Glycine max
  Clone ID: 700683746_FLI
aaaaagaaaagatactcatgttatatatgcgaattcgtcacataacaacacacccccacttactcttctcatttcattcttcttccttcttttgtcttcccttagcttagtttgaagatcatggggagaggaagggttcagctgaagcagatcgagaacaaaatcagccgccaagtgacgttttccaaaaggagaactgggctgcgaaagaaagctaatgaaatctctgtgctctgtgatgctcaagtggcactgattgtgttcaatgctaaagggaagctttttgagtattcttctgaatccagcatggaaaacgtcctggaacgatatgagagacatactcatatagggaaacttgttggagatggtgatgaatcacagggaaactggtccttacaatgcttcaagctcaccggcaaagttgaagtcttagagaggaacttgaggaactttgtgggagaagatctggatcccttaaacttgagagagcttcagagtctagagcatcagcttgagacagctataaagcgcatccgaactagaaagaaccaagttatgaatgaatccatctcagatctgcagaaaaaggcaaggcaattgcaagagcaaaatggcatccttacaaagaagattaaggagaaagggaaggaagtggttgaacgtccacactgcggaccagaaaccttaggtctaacttgtcctccagagctacaacgacagcaaagagtatttccttctttaacactctgtgagactttacaagcagggcatctggaggaagttgttgaagcacgaacggttcctactgccagcactcacatcccaccatggatgctgcatccatttacaagataaatctgcatgtgacacgttatgtttgtgacacatgtgatgaatgttagaagcataagttatatatctctatatgtcaaaaacttaatgttatatagctaagtgttaagtttgataactgctcatccttgtaagtactacatggtgcaagagtgcaagtgattcttgcatgcaaatgtcaactacatttattatgaatcaatattaataatagaaacatgtagttatttttgac

SEQ ID NO: 7790 - DNA, 1095 bp, Glycine max
  Clone ID: 700683750_FLI
cgtggagatagtacctgttccctgccgcagcactgatgacttcaatttaagtataacttcaatcgagagaaccttcaatcaagcaaagatgcgtggtcaaaaagttcgcggaattataataaacaacccctcaaatcctgctggcaaactattggatagggaaacactgttggatcttttggactttgctagagagaagaacattcacataatctctaatgaaatgtttgccagctcttcttatggaaacgaagagtttgtgagcatggcagaaatcatggaggcagaagatcatgaccgggacagagttcatgtagtgtttggtttgtcaaatgagctctcggttccaggtttaaaggtgggtgttatctactcttataatgacaatgtcgtggctgcttctagcaaattggcaaggttctccactgtttctgccccaacccaaagattgctcatctccatgctctcagatacaagttttgtgcaaaattttattgaggttaacagattgaggctgcggaaaatgtataatacatttgttgcagggctgaagcagttggggattgagtgcactaggagcagtggtggtttttgctgctgggctgacatgagcaggttgattcgctcttacagtgaaaagggggagcttgagctctgggatagattgttgaatgttgctaagatcaatgttaccccgggatcatcatgtcactgcattgaacctggatggtttcgtttttgttttgctacatccactgaaaaggctgtttctgtagtaatggagcggcttcggagaattgttgaggccacaaatggacatagttgatgtggggtcaattagttctgcaaatttagttggtttattgattttttattcttttggagaaggcagcatcatcctaggaggaataaataatcaccaaggggtagttggatgacatggacatgggtgttatgcaatggagttgcttcaaaatgacatggacaaggtggcaccactgatgctatcaagttaagtcgcttacaatgacaaaagtgtatgaaaagaaaggaaagataaaaagaaaaaactcactgcaagaacctaatttggtt

SEQ ID NO: 7791 - DNA, 1294 bp, Glycine max
  Clone ID: 700683783_FLI
atcggaatcaacggatttggaagaattggccgtttggtagccagagtggctctgcagagagacgatgttgaactcgttgccgttaacgaccctttcatcaccaccgattacatgacatacatgtttaaatacgacagtgttcatggacactggaagcatcacgatgtcaccgttaaggacgagaagacccttctcttcggtgacaagccagtcactatttttggacacagaaaccctgaagagatcccatgggggtcaactggagctgacatcattgttgagtccaccggagttttcaccgataaggacaaggccgccgcacatttgaagggtggtgcaaagaaggttattatttctgcccccagtaaggatgcccccatgtttgttgttggtgtcaacgagcacgagtacaagccagagcttgatattatttccaatgctagctgcacaaccaactgccttgccccacttgccaaggttatcaatgacaggtttggcattgttgagggtttgatgaccactgttcattccatcaccgctacccagaagactgttgatggaccatcagccaaggactggagaggtggaagagctgcttcatttaacatcattcctagcagcactggagctgccaaggctgttgggaaagtcctccctgctttgaatggaaaattgactggtatggcattccgtgttcccaccgtggatgtctctgttgttgacctcacagtgaggctggagaaagaagcttcctacgatgaaattaaaaatgctatcaaggaggaatcagagggcaagttgaagggaattcttggttacactgaagatgatgtggtctccactgactttatcggcgatagcagatcaagtatttttgatgcaaaggctggaattgcattgaataagaactttgtgaagcttgtttcttggtacgacaacgagtggggatacagctcacgtgtcattgatcttcttgtattcgttgccaagaagtctctttaaggtgttacttcaaagtagcttgtcttcacattattaccgtatgtttatgtttagctgcgatttagtgtcttgctcgagcaaaaaatgagaggtctgaataaatcggtttctgaaaccagtggtgttacttgttggaggagcattagctcttttttggacttttgatgttttctcttgtggagggggatcgagtttttggatttttatatactcgctgatgtacttggcttgaatacttgctaatgtacttgttattgattgttatagtagatatttgtccgtcctttttttc

SEQ ID NO: 7792 - DNA, 962 bp, Glycine max
  Clone ID: 700683791_FLI
gcaaagcaatggctacttcaaagttgaaaacccagaatgtggttgtatctctctccctaaccttaaccttggtactggtgctactgaccagcaaggcaaactcagcggaaactgtttctttcagctggaacaagttcgtgccgaagcaaccaaacatgatcctccaaggagacgctattgtgacctcctcgggaaagttacaactcaataaggttgacgaaaacggcaccccaaaaccctcgtctcttggtcgcgccctctactccacccccatccacatttgggacaaagaaaccggtagcgttgccagcttcgccgcttccttcaacttcaccttctatgcccctgacacaaaaaggcttgcagatgggcttgccttctttctcgcaccaattgacactaagccacaaacacatgcaggttatcttggtcttttcaacgaaaacgagtctggtgatcaagtcgtcgctgttgagtttgacactttccggaactcttgggatccaccaaatccacacatcggaattaacgtcaattctatcagatccatcaaaacgacgtcttgggatttggccaacaataaagtagccaaggttctcattacctatgatgcctccaccagcctcttggttgcttctttggtctacccttcacagagaaccagcaatatcctctccgatgtggtcgatttgaagacttctcttcccgagtgggtgaggatagggttctctgctgccacgggactcgacatacctggggaatcgcatgacgtgctttcttggtcttttgcttccaatttgccacacgctagcagtaacattgatcctttggatcttacaagctttgtgttgcatgaggccatctaaatgtgacagatcgaaggaagaaagtgtaataagacgactctcactactcgatcgctagtgattgtcattgttatatataataatgttatctttcac

SEQ ID NO: 7793 - DNA, 961 bp, Glycine max
  Clone ID: 700683792_FLI
tggtcttggccctttagaatttttgactaagtttcgtataccacatcctggaagagttggaggaaggttttttgttgacatcatgatgccttctatgttgagctgggtcttaggtggcaatagcgacaaacttgagggcagaccactaagttgcaggctcacagacaaagtacgttgctcaaataaagtttcttttgtactttgttgctgagaagatattgtatatctggcaaatgatcagttacgtagatggtttgaagatgatgaagcactcgagccgtgctattaatggagaatggattttattaccgcatggagatggaacaggtctttcaaagcctatatctttaagtcgaaatgagatgaaacccttcataatcgggagtgcaccaatgcaagataattcaggcagttcagttacaatttcttcaccacaggtttctccaacgcatgctcgaattaactataaggatggtgccttcttcttgattgatttacggagtgagcatggcacctggatcattgacaacgaaggaaagcagtaccgggtacctcctaattatcctgctcgcatccgtccatctgatgttattcagtttggttctgagaaggtttcgttccgtgttaaggtgacaagctctgttccaagagtctcagaaaatgaaagcacactagctttgcagggagtatgactgattctgctcaattgcaatttgtaagttatggaaaaattatacagcacaaatttgctattgtatagtactatctgcattgttttagggtggggtattataccacagtctagtcatttaagatctgatatgttacatgcctatatggacatttaagagggactcttgggtataaatttgttactccactccaatactttttgtgtatgacatttgtaatttgttagagttagatttataacatgacacacataaacttgcacgtgatt

SEQ ID NO: 7794 - DNA, 1606 bp, Glycine max
  Clone ID: 700683795_FLI
gggaaaatcattcacagaaagggcggtgtgttgtaccttttccgaggcagaaactacaattataaaacacgcccacattttcctctgatgttgtggaaacctgtgcctccagtatatcctaggttggttcagcgagttcctgaaggtctaacgctagaagaagcaactaaaatgcgtcaaaagggaagcacattgattcccatatgcaaactaggtaaaaatggtgtttactgtgacctagtaaaaactgtcagagaggcatttgaagagtgtgaactagtgcgtataaactgtcaaggactgaataaaagtgactatcgaaagattggagcaaaactaagggatcttgttccatgcacattgctttcgtttgaatatgagcacatacttatgtggagaggaccaaattggaagtcatttataccagatcgaggagatgaccgcaaggaatccaaacaaatagaggttgaccataaaaattataaaccactgccgtcagaggccctagaattctcagcaccgagtctacaaatgaacccattagagcatgaaagcaatttattacatgacactagcatttcctctatttcaagtgatgtgactttggataaggttgaggtgtcatatcccaatgaaaatagccaccaatctatgtctggggttactgaagttccttcacttacaaaaatctatgacgttgaaaccacaaatgattccacagactcctatgctgagccagaacctcgcacaagcctcattccaagtatgaccataccacactatgatagccatgctgaattctcctcgaaagctatgagtgaaagtcatggaactgagcatataatggatagcaaaagctgcagtgatggtctttctgcttcaatttcaggatctcatgcaacgctaggaggtagtgacaattctactaatggcatggtggattctcattctaataagttgctagatgctttgggagaagaagatgtcagtcaggcaccaaggtcagctgctccttctatgaaagcaatttggttactgttggaacaagctgttgagaaaggcagtgctcttgttttagataaggattctttggatgcggacaatatttatcaaaacacagttgcctttgccaaatcagctccacccggaccagcttttaggaaaaacacaaaggctgtgtctcaaaagaatcctaagcaagaaggttcaactttggagactaaagaaactaccattgattccatgaaacggaaaaaggagaatagtactaaaattcctagaaaagcaaattttgatgaccaattactaaatgttgtaccacaaggaacattaggagttgatgaacttgctaaacttttaacatgatactggatggtgttatcagaagttctagtgtcattttacttggtggtgaggatcgactggcagagagggggtcgttatagcagaggtcaacttggatccgagcgaagaggatgtccattatttttcatccattttgtaaagttttttctaatttattgttactgttaaagtggtagattctggtgtttgtaaaatttttctgatttgttgttaatgcaaattactttcttttgttttttct

SEQ ID NO: 7795 - DNA, 3895 bp, Glycine max
  Clone ID: 700683892_FLI
cacacacaccaatggaatcataacaagaaaaagataaacactccccagagttcaaagagcaagcactatttcctctgttgtgtcttttttcaatttgttttccctctctgtagcagcagcagcagtgatggaacgtgctcgcaggctagcaaaccgcgccattctgaggcgtctggtttcagaggcaaagcagcatcagaagaatgaatccgtgctgcactcttccaccacccccatgctgctctattcttcctccaggtgcatgtcctctgttctgcgaagcaggggatccaaaacagagacccttctgggaaggaacatcaacatgtcacgcggcgttgttgttgctgctgctggtggttttctcggcgttggctcggcccggtccatctcggtcgaagcgcttcgaccgagcgacaccttcccccggcggcacaactctgccaccccggaggagcagagcaagatggcagagtcgtgtggcttcggtagcctcgactccctcgtggacgccaccgtgcctaagtcgatacgccttaaggatatgaagttcgggaaattcgatgcagggcttacagagaaccagatgatagagcacatgaaggacttggcctcaaagaacaaggttttcaagtcctacattggaatggggtactacaacactcatgttccaccagtgatcctgaggaacattatggagaaccctgcttggtacactcagtacacaccttaccaggctgagatatctcaggggaggcttgagtcactgctgaattaccaaaccatgatcactgacctcaccggcttgcctatgtccaatgcttcattgcttgatgagggaactgctgctgctgaagcaatgtccatgtgcaacaacattcagaaagggaagaagaagaccttcatcattgcaagtaactgccaccctcaaaccattgatatttgcaagacaagggctgatggttttgatctgaaggttgttactgcagatcttaaggacattgattacaagtctggggatgtttgtggtgtgcttgtgcagtaccctggcactgagggagaggttttggactatggggagtttgtgaagaaggctcatgctcatgaggtgaaggttgttatggcaagtgatttgttggcactgactgtgttgaagcctcctggtgagttcggggcagatattgttgttggatcagctcagaggtttggggtgccaatggggtatggagggcctcatgcagctttcttggccacttcacaagagtacaagaggatgatgcctgggagaatcattggggtcagtgtcgattcttccggaaagactgctttgaggatggcgatgcaaactagggagcagcatatcaggagggacaaggccaccagcaacatttgcactgctcaggcactgcttgcaaacatggctgccatgtatgctgtgtatcatggacctgaaggcctcaagaacattgcacaccgtgttcatggtcttgctggggcatttgctcttggaataaagaaacttggaactgtggaaattcaggaccttcccttctttgacactgtgaaggttaagacttccaatgcacacgcaattgctgatgctgctctcaaaagtggaataaatttgcgagttgttgatggaaacactatcactgttgcttttgatgaaacaaccacattagaggatgttgataatcttttcaaagtttttgctggtggaaagcccgtctccttcacagctgcatctcttgcaccagaagttcagagtgcgattccttctggattagttaggaagagcccttatctgacgcaccctatctttaacacgtaccaaactgagcatgagttgcttaggtacttgtataggctacaatcaaaagatctctcactatgccacagtatgatcccacttggatcttgtacaatgaagctgaatgcaacaactgaaatgatgcctgtgacatggcccagctttagtgatattcacccttttgcaccagttgaccaggctcaaggttatcaggaaatgttcaacaatttgggtgaactgttgtgcaccatcactgggttcgactccttctctttgcaaccaaatgctggtgctgctggagaatatgctggacttatggttattcgtgcatatcatttggcaaggggagaccaccaccgcaatgtttgcattatacctgtctcagcacacggaacaaatcctgctagtgcagctatgtgtggaatgaaaattgtctctgttggaactgatgccaagggaaacattaatatagaagagctgaggaaggctgctgaaacacacaaggataacttatctgcacttatggtaacatatccttcaacccacggtgtttatgaggaaggtattgacgaaatttgcaatattattcatgataatggaggccaagtatatatggatggtgccaacatgaatgctcaggtgggactcacaagcccgggttggataggagcagatgtttgccatctcaatctccacaagacattttgcatccctcatggaggaggtggccctggcatgggacctattggtgtaaagaaacacttggcaccatttttaccttcacaccctgtgatagaaactggtggaattcctgcccctgacaaacctcaaccacttggtaccatcgctgctgcaccatggggctcagcactcatattgccaatctcttacacttacatagccatgatgggttctaaaggactcaccgatgcatcaaagatagccattttgaatgcaaactacatggcaaaacgattggagaattattacccggttcttttccgtggagtcaatggaacagttgctcatgaattcatcattgacttgagaggctttaagaatactgctggaattgagcctgaagatgttgcaaagcgcctcatggactacggttttcatgcaccaacaatgtcatggcctgtgcctggcacactcatgattgagcctactgagagtgaaagcaaggccgagttagacaggttctgtgatgctcttatttccattagacaagaaattgctgagattgagaaaggaaaggttgacattaacaacaatgtacttaagggcgcccctcatccaccatcactgctcatggctgatgcatggacaaaaccatactccagggaatatgcagccttcccagctccttggctccgtactgcaaagttctggcctaccacaggtaatcatgtagttgtttatataactatatctttctcatttcaagaaattattattatcctgaccaatcttcatgagacacaaccataatttaaaaaatatggttacatgtcacatgaagatttgtcgatttgtcaggatcatatgatctttagaccatacaataatttctttttcttatgacacccttctcataattaacctattccattatctcctgtttgatatagtttacgaggaatgctagcaacatattttctgatattctctttctaacactcttgtattggtttaaaatcatgcgtcccactaatttgggaatagaacttaccaaatgaggaaggagactcagatttaatgggacctatataaatttcacccaaatagtgtgtgtggtactaacatttattatagtctattgaaggtgtgctatgttgtatgtagtgactgcatagtttagtttgagaaataaatgcatagactaattaatgaatgaaacatgtgtatcaggacgtgttgataatgtgtacggtgaccgcaacctcatttgcacccttctcccagcatcacaggctgttgaagaacaagcagctgccacagcataatgtgttcaaatgacaactattttcatttcccgttgtacataaactcttattcctattcatacagttcttgcacttgttg

SEQ ID NO: 7796 - DNA, 1163 bp, Glycine max
  Clone ID: 700683896_FLI
ggggcctccggccaatttcccaacaattctgggtcatgaggcaataggggttgtggagagcgtaggagaggatgtaactgaagttgcaaaaggagatatggttgtcccaattttcatagctgaatgtggggagtgtatagattgcaaatcaagcaagagcaacctttgttcaaagtttcctttcaagctgtctccttggatgcctagacatgccacttctagattcgtggatttaaaaggagagatcatacaccacttcttgtctgtttctagttttagcgagtacaccgtggtcgacatcgcccatctaaccaagattgatccggaagttcctcccagcaaggcatgcctcctcagttgtggtgtatcaaccggggtaggtgctgcttggagaacagcaggtgtggagccagggtctacagtagctattttcgggctgggaagtattggattagctgttgctgagggagctagactttgtggagcaacaaggattataggtgtggatatcaactcagaaaaatatgaaatcggaaagaagtttggaatcacggattttgttcattctggagaatgtgaaaacaaatctgcgagccaggttatcatagagatgactgatggaggagcagattattgttttgaatgtgttggtaatgcatcattgatgcatgaggcatatgcttcttgtagaaagggttggggaaaaacaatagttttgggatcggacaagccaggctccaagttgagccttagctgtagtgagatcctcgttagtgggaagagcctcgtgggatgcatgtttggaggactcaaacccaagtctcatgtgcctattctcattaaacgctacttggacaaggaactgaatttggatgggtttgtcacacatgaagtggagttcaaagatatcaacaaagcttttgatttaatgattaaaggacagtgtcttcgatgtgtgatttggatggacaaatgagcctgttattgttaagtccttgaattatgagatcaataagtgaaatattgtatgctgctcttgttttgtatttgacgaaaacattttcaatgcattgcttgaaatccaaaagtgcctctgtaaggaggtcacaaaaaaaagacagaacacagaaattacagaaacaaaattattgagtagtgtttgg

SEQ ID NO: 7797 - DNA, 1440 bp, Glycine max
  Clone ID: 700684006_FLI
gaagaagaagaagaattaccatttggtcccgaccccccaaaaattggaccttccgatttccatattcttcgtgttgtaggacagggtgcctttgggaaggtctttctcgtcagaaaaaaaggtgattgcttcgacgacgctgatggcgtgttcgccatgaaggtgatgaggaaagacaccatcattaaaaaaaaccacgtcgattacatgaaagccgagagggatattctcaccaaagtccttcaccctttcatcgttcagctccgttactctttccagaccaaatctaagttgtatttggtgttggacttcataaatggagggcatctcttctttcaattgtatcgtcagggtatcttcagtgaggatcaggcaaggctttacactgctgagatagtgtctgctgtttcacaccttcacaaaaacggcatcgtgcatcgagatcttaagcccgaaaacattcttatggatgctgatgggcatgtcatgctaactgattttggactgtcaaaagagattaatgaattggggagatccaactctttttgtgggactgtagaatacatggctccagaaatcctactggctaaaggccataataaggatgcagattggtggagtgttggtattctgttgtatgaaatgctaacagggaaggcaccatttacacacaataacagaaagaaacttcaggagaaaattattaaagagaaagtaaaacttccaccattccttaccagtgaagctcactctttgctcaaaggattgctacaaaaggatccatcgacaaggttaggcaatgggccaaatggagatggccatatcaaaagtcataaatggtttaggtcaatcaattggaaaaaattggaggcaagagaactggaaccgaagttcaaaccagatgtgtctgcgaaagattgtacatctaattttgaccaatgttggacagcaatgcctgctgatgactcgccagcacccacacctacagcaggtgaccatttccagggctatacttatgtagcacctaacccttggctttcatctagatcactagattgaagaaggaaatttgtacatggatgaatgaatcaagatatgacctgaataagacaagtaacccaaatcttctcgcacaaaggtgccttccaatccgttttcagagttaactcttaaatgtaaattgtaatgctcattgcacagaatagagaatgtttagtggctctgatgtggcctttcatgtttgtgcagtttggtttagttcttgtcttaaaaggtaaaagatttgaatttctttgccttccattcaggtcaacattaatatatttgactagccagggcccaaaagaggctgaaggggtatagcatatttgacttactactatttatctagaagagttgcacgcatcaaattgtattgtgtcctattttttgcagcaccac

SEQ ID NO: 7798 - DNA, 2419 bp, Glycine max
  Clone ID: 700684108_FLI
cctttgtaaggtcgaccatgcataggagcctcttgtacctgttttcagctattcataccaaattatgcgtagtcttcaaaggaacatgtgtgataatgagacaggccatgttctttatgagaccatgtttgtttggaatgagttcttaactcgaggaattaggaatcacctccagaatactatttggacagttgcgctagtgtatggattttttaaacaggaaatgctaatgatatccagacgggagttcacacttacgctcattgcaagacgatcacgtcattatgctggcactaggtatttgaggcgtggtgttaatgagaaaggaagagtagcaaatgacgttgagacagaacaaatagtctttgaggatgttgcagaaggtcttcccatccaaataagctctatcatccagaaccgtggttcaatccctcttttctggtcacaggaaacttcaaaactaaatattaaaccagatattatattgtcaaaaaaggatcagagttatcaagccactagatatcactttgaaaaccttgtcaaaagatatggaaatcccataattattttgaatttaataaagacccatgagaagaagcctcgcgagtccatacttcgtcaagagtttgctaatgccatagatttcattaataaagatttatcggacgaaaacaggcttaggttccttcattgggatctgcacaaacattttcagagcaaagctacaaatgtcttgcagcttctcggcaaagtggctgcatatgcattgacattaacagggtttttctattgccaaacaacaccaaccttgagaccagaagaatgtctgaaatggccaagtaccaaggttgacaacagggatgcagatgaaaattattctgtcaaaccacccatgttgcagaggggggtgctcaggaccaactgcatagactgcttggatcgcacaaatgttgcacaatatgcatatgggttggctgctcttggccaccagctccatgctctgggggttattgaccacccaaaaattgatcttgatgagcctgtagcagatgatttgatggggttttatgagcggatgggtgatacacttgcacatcagtatggtggttctgctgcacacaacaagattttctctgagaggaggggccagtggagagctgcaacacagtctcaggagttttttaggactcttcaacgctattatagcaatgcatacatggatgctatgaaacaggatgcaatcaatgtattcctggggcattttcagccacaacagggcaagcctgctctatgggagttgggttcagatcagctctatgatgcaggaagacatggagatgatgatgcaaggtcatttttcaaaagatccttctcagatggaaacattcttaatgaaagttctacaccgatgtcagccccaaaggccaagcacgaaaaattcccaagccaaggcggcttaccagatcgatcagaagaaggaagcaagggtctttgtgagtcatcaccagaaatatccactactgacagtgacatctcattttcaaggtacactccctcaatgcctcggagacagctctttggagatatgcaaagagagcgctgccttgaaagtgaacatatttactattctgatcacggggattccttcagctgctccaactttgttgacctggattggctctcttcttcaggaaattcatgcgaagaagagccattcgagaggtcatcaattaccaactctccaattgctggagtttcttcagaaaatgttatcaatggaatgatggtaggtgaggcaactgcctccactagtgattggggggcctccagcctaaagggaagggaacaaactgaatccgagttatcttacgatgatgcacggtccaacacaccagaagaatttccagatacttttgtgaactgggtgacttatggacaaacactttgccattgaactttgcatatgatctcttgcactaatgtataattgatatttttttggcttggtctaaagatgcttattagaagaaactagagagaaggaagcggcgaaagaaaaagaatcaggcatttgggtaggcttctgtttgtgtttatgtggtggtgctaatctaagaatcatcctgaggccaatcttggtattgacatgcagcattaattctgttgtgaagatctcaatcaaatcctcaaggcatagtagaaaatagtgcatagcaaagcaagtgcttgtaaaattgtttgttgtcttttcctttcttttattattttattattattattattttctgttgttattgtcttcttggagttcagtgttttcatttttctttcagcagttataataggtgcactttttgtaaatattattaccctacttgtgggagcttcacttttagaattgtagataattgattctttt

SEQ ID NO: 7799 - DNA, 1142 bp, Glycine max
  Clone ID: 700684117_FLI
gtgggcagagaactgaagggtttagaatcacaaactagtttatttaccctacgacaaatcaaggcagcaacaaataactttgacaaatccttgaagattggagaaggagggtttggtcctgtttacaagggtgtactatcggatggcactgtagtagcagttaagcagctttctgctaggtcaaggcaagggagtcgggaatttgtaaatgagataggcctgatttctgctttgcaacacccttgtttagttaagctctacggctgttgtatggaagaggatcaattgttactgatttatgaatacatggaaaacaatagtcttgctcatgctttatttgccaaaaatgatgactctgagaaatgtcaattgagattggattggcaaacaaggcataggatttgtgttggtatcgctaaaggtttggcttaccttcatgaagagtccaaactgaagattgttcatagggacatcaaggccaataatgtgttgctggataaagatctcaaccccaagatatctgattttggattggcaaagcttaatgatggggacaaaacccatttgagcaccagaatagctggcacttatgggtacattgctcctgagtatgcaatgcatggttatttgacggacaaagcagatgtttatagttttggaattgttgcattggaaattgttagtgggatgagcaacaccattagccagcctacggaagaatgtttctctctcattgatagggtacatctcttgaaagaaaacggtaatctaatggagattgtggataagaggttgggtgaacacttcaacaaaacggaggcaatgatgatgatcaatgtagcccttttatgtaccaaagtctctctagcactcaggcccaccatgtctttagtggtaagcatgcttgaagggagaacacatattcaagaggtggtgttagacaaaagagaggtattggatgatgtgaaattttagatgatgcaacagtattatcaacactgaggagaaaataacataattgagtctcagaacctaagtgaccctacgtgagaaacttctaaacttttcgatgatacaagttcttctggtgagcaaatttaaagttagagaacttatagaaatgaacatcttgttgttgctct

SEQ ID NO: 7800 - DNA, 1445 bp, Glycine max
  Clone ID: 700684215_FLI
tgatgaaaagttttgttctggcaactggttggagaacaaatattggagaaagtgaaaatctgggtcctatgggcgttgattgttgttgaattgacttcctttttgaacccatatcacttgttataaacaccaaccaatttctctccttcttctcatctacttttctcactgctttcgtgttttttttccctctctctttgtagcacaacaacatagttattagttaatacttaatagcctctgttttcttcttgctaccaaaatctcacaccttcattacatcatcattcataaatggctcaccccacctcatcatcaggtcaatccaatgatctcacaaaagaagattgcaaggaaacaagttcagtggttgtttgcttcggggaaatgttaatagactttgttccaatggtgggaggagtgtcactggctgaagcacccgctttcaagaaagctcctggtggtgctcctgccaatgtggctgttggtatctctagactaggaagttcatctgctttcataggcaaggttggagcagatgaatttgggtacatgttggctgacattttaaagcagaacaatgttgagacttctggcatgcggtttgactctaatgcaagaactgcattagcttttgttacacttagagcggatggcgaacgtgagttcttgtttttccgcaatccaagcgctgatatgctccttcaagagtcagaacttgataaagatctcctaaagaaggctagaatattccattatggctccatcagcttgattgatgagccatgcaagtcagctcaccttgctgctatgagcattgccaaaaactctggttgcattctatcatatgatccaaatttgagattggctctatggccttctgcagacgccgctcggaaaggcataatggatatatgggatcaagctgatgtcataaagataagtgaggatgagattacatttttgactggtggtgatgatccctatgatgataatgtagttttgaagaaactttttcacccaaatctcaagcttttaatcgttactgaaggttcacagggttgcagatattacaccaaggcatttaaaggcagggtttcaggtgttaaagttaaacctgtagacacaactggagctggcgatgcatttgttagtgggattttacactgcatagcttctgaccaaactatttttcaggatgagaaacgtcttcgaaaggctttatattttgccaatgtatgtggtgccctcactgtaactcagagaggtgcaattcctgcactacctacaaaggaagctatcttgcaattcttactagaagcagctgtaatttaaaagtattgacagatttttgttataatttgttgttaagctatagcttaggtgatgctgtattcttttttccttttttaattaaaatttttggctatgtaattttcttatat

SEQ ID NO: 7801 - DNA, 2034 bp, Glycine max
  Clone ID: 700684221_FLI
caaaccatatacggtcttgtgcagtgtacgcctgatttgtcaaggcaagactgcggtgactgcttgcattggagtttggcagatttcggaaatgttttcaaaaacaaagttggtgctgtagtgcttagaccaagttgtaatgttagatatgaaatctaccccttctacgatgaacctacaccatcagcatcggtaccactttccctaaaagaaaagggcaactcactgcgaactacaatcgccatagttgtgcctaccgttctcgttgttgttgctttgctcattttcattagcatatattttaggaggaggaaattagcaaggaaaaatcttctcgctgatgaagacgatgatgaaattgaattggctgaatcattgcaattcaacttggacacaataaaagttgcaacaaataacttctctgactctaataaactcggagaaggtgggtttggagctgtttaccaggctctctaatggacaagtgattgctgtcaaaaggttgtcaagcgatcctggccaaggtggcgtggaatttaagaatgaagtccttttactggccaagcttcagcaccgaaatttagttaggctacttggttttagtttggaagggaaagaaaagctacttgtttatgaatttgttccaaataaaagccttgattacttcatatttgatccaacaaagaaagcacgactggattgggatagacgatacaaaatcattcgaggtattgctcgaggtcttctttatcttcacgaggattcacgattgcgcattatacatcgtgatctcaaagcaagcaatgttctcttagatgaagagatgattcctaaaatatcagattttggtatggcaagactgattgttgcaggtcaaacacaagaaaatacaagtcgagttgttggaacctatggatatatggcaccagaatatataatgcatggacaattttcaataaaatcagatgtcttcagttttggtgtactagttcttgagattgtaagtggccaaaaaaaccatggtattcgtcatggggagaatgtggaagatctactaaactttgcatggagaagctggcaagaggggacagttacaaatattatagatccaatattaaacaatagttcacagaatgaaatgataagatgcacccacattggtttactctgtgttcaagaaaatctagccaacagaccaaccatggctaacgttgcactcatgctaaatagttgttctatcactctcccagtgcctacaaaacctgctttttttatggatagtgcaactacaagccttccaaacatgtcatgggaagttaattcagggacaacacgatcgaatcagtccacaaccaaatcagctcacgactcagtaagtgaggcttcaatttctgagctataccctcgttagattctggtcatagttaggggtgatatatgcatttgtcgtcaatgttattaatacatgttttggaacttgtaatttatttgtgcaaagtatggttacttaaatagaccatagaacttaattgtttcagtcaactaagacagaaacatgaaatataaatgaatggtgtattggtcttaaagtgtatggtttggttattatgctatccgtgctgcttggtgttgcttccacagctacaacgaaaagcaccttcaatggaaataaatattgcttttaatggcaattaaaatggccataaaatattttactagcaattatatattggttggcgtggacgtgggtggtggatcttcgtcatactctcagagaagggaagggagtgttgatttcatctctgagcttggtcctaattcaggggtgcagcttcagctggttgcaagtgttccgcaaggtctcaaatctatgctccaagcagatgctcatggaactagtttcctaagactgtaattctgttttttcttttcttgtttttcctccacttaccaaaaaaagacgtttggttggcgtatgcagtgttacaatggctagtaaaagtaatttggttaaattattcatttagtctgcat

SEQ ID NO: 7802 - DNA, 712 bp, Glycine max
  Clone ID: 700684235_FLI
aaaataatataatttctaaatattaaaaaagaataattttgtactagaagtctaaaaacttaaaaatctagcctttttatacaacaattgaattaaaaatcctagccactcactgattgatggaatacagctgttaaggtttgtgttgtcggcaagactcaatagttgttggttgactgaccttgaaacaaaaagatctttactttgatttgatgaccacttcattgcactgagtgattggcataagctgcacttgaaaacacagatttccattcatcgattccactgctccctttcctaccatacaatggcattagaatgcgttggtggtgctgttctttcttctttcctcggggctctatttcagaagctggcttctcctcaagttctggatttctttcgtggaacaaagatcgaccagaacctgcggagggacttagaaaacaagctcctctccatccaagctgtgcttgatgatgctgaacaaaaacagtttggaaatatgccagtgagagactggcttattgagctcaaagttgccatgcttgacgttgaagatgtcttggatgaaatacaacactccagactccaagttcaacctcaatctgaatctcaaacctgtacttgcaaggtacccaatttcttcaaatcttcccctgttagctcctttaacaaggaaattaattccagcatgaaaaatgtccttgatgac

SEQ ID NO: 7803 - DNA, 1176 bp, Glycine max
  Clone ID: 700684271_FLI
gttgctatttgctatttgctctgctaatttgtatttctttttggtgaattgctgctaactttcattcttgtattctttttggtttttagtttcaggatgctggaagttcatgctcacactgagtcctgcagggctgctcgattcatcaacggtggacgtgcgatcttgacaggttctccggattgcttaatactggctacagatgtggaaactggatctacaattgctcgtcttgatgatgctcatgagtgatcaaatttcctgcaattacacctttgtcatgatttgggttacagtagattcacaagtatcttcattgctttagaatttgtttgtggtttttgttgtgatgcagggctgcgataaatagattgataaacttgactgagtcaactgttgcctcgggagatgatgaaggttgtataaaggtatgggatatcagagaacgttcttgttgcaattcttttaattcccatgaagattacatttcagacattacttttgtgtctgatgcaatgaaactgttggcaacaagtggagatgggactctgtctgtttgcaatcttcgaagaaataaagtgcaagctcaatctgaattttctgaagatgagctactgtctgtggttttaatgaagcgatcgatttactgatctctcttctaattctattgatgctatgttgaagcttgatgaagacaggattattaccggatcagagaatagaattatcaacattctctcatgataggaagtttcttggaagcatttcccatgatcaaatgttaaagctatgggacttggataatattctacaaggctcaggaaacacacaaagtaatgaagctggagctgttgacagtgacgatgatgagatggatctagatgatgatccttcaaagaatagtaaagggaacaagagaaagaatgcaaataatgggaatgccctaggtggatcgaacaacttctttgcagatttataggaggtttgaatgcatctctgttcaaatgtgttgacccaattagaaaacttccttgatttcctaatcaatattaagttgaaggcgcccctccaaaaaattgatacatacgttggaccgtgtccagatgatggcttttttgtgtgttatattggtacaaggatataattttttctttcaatatatgaagtaattcattt

SEQ ID NO: 7804 - DNA, 1606 bp, Glycine max
  Clone ID: 700684286_FLI
gttcgagctgtggaggaggggagaataataataataatgatggaggcaaacaaggagttgaactcagcacagcacagagacaagagcttcagatgaagaagtcaaaacttgtgaccatgctagatgaggtggagcaaaggtaccgacagtatcaccaccaaatgcaagttgtgataacatcatttgagcaagcagcgggtgttggagctgcaaagtcttacacagcccttgcgttaaagacaatctcaaagcaatttcggtgtctcaaagatgcaatctcttcacaaataaagaccacgagcaaaaccttaggtgaagatgattgcttgggagttaaggtagaaggttcgaggcttaggtatgttgatcatcaactgagacaacaacgtgcattacaacagcttggaatgatccaacacaatgcttggaggccccaaagaggcttgcctgaacgtgctgtttctgttcttcgagcttggctttttgaacatttcttgcacccttatcctaaggactccgataaggttatgcttgcaaaacaaactggacttactcggagccaggtgtctaactggtttataaatgcccgagttcggctatggaagccaatggtagaagaaatgtacttggaagaggtaaaacaagaaccaaacaatagctctcaggataacaccacaaaaagatcaaaagaatcaagcaaggagttatggtcagaagctaatgctactgcacaggaatctggtgcaatgagacttgatcacatcaacattctccaatcaaaagcagaaagcttcaacaacaacaacaacaaccaaaccacttccccaacagagatctctaataattcccataattcactccaatcagctggtttccatcttgctgacatgcaaagcccaaacaagccaattagaagcacttctgaaatgcagaactctccaggtagcattctttcagtggacatggaaatgaagcctcgtcatcatggagagacaaataataatactattattactagagaaggcaacaacaacacaacaaagtttggcattgaaagccatggtggtggtggtggtggttttggagcatttcccaatatggaagacattggaaggttccatcatcatcatcatcatgtcactgatcagcaatcactggctcctaggtttcatggaaatggtgtttctctcactcttggacttccacacagcactgagaataataataacctttccctctcaggaactactcatcaacatggattcctctcacagaacatgcacttgggaatgagatcaacaaccaataatgcgaataatgagttttgtggtgccatcaacactactccaccttctaattctcactcaggcaccagttatgagagcattgacattattcaaaacagaaagagatttgctgcgcagttgttgcgggatttcgtggcctaaaagaattgataattaactagctagcaagggtaattaatcaatgaagataccccatgaaggaattgttttttattttattttttatgttgcaatatatccacaaaacacaatgcagttcagagtgttaacttagcagaaaaatagcaacaggagagaac

SEQ ID NO: 7805 - DNA, 1358 bp, Glycine max
  Clone ID: 700684311_FLI
gtgaaaaggctgttacacacactgccaccaaagaggcctttttcctccattttgacgtgccccaaatcagagttttttctttccacacacacacacactggtggttgagtggttcttctcaaaatgggtgagaaagatgatgattttgggttgagtttgagtttgagtttggggagagtgaaccaacaacaacaacaccctcctcctttgaatcacatgcaccagcctcaacaactacaacctgttcccatgaatcacaataagactctctttggtgatttgtctcagttaccagcagaccggagctccgaaatgatacgaggaatcgacgtcaattcggcggcggagtgcgacggcgtttcctcgccgaacagcgctgtctcgagcgtgagcggcggcgacggcaagcagagcgagagggacgacgataataatgctgccgccgtggccggtgagaggacctcgtgctcgcgagggagcgacgatgacgacggtggtggcagcgatgcctcgaggaagaagctgaggctgacgaaagaacagtccatggtgttggaagaaacgttcaaggagcatagcacgctgaatccgaaacggaagcaagcgttggcagaggagttgaatctgaagcccagacaagtagaggtgtggtttcagaacagaagagcaaggaccaagttgaagcaaactgaagtggattgtgaatacttaaagagatgctatgagaatttaactgaagagaatagaaggttgcacaaggaggtccaagagcttagggcattgaaattatccccacaaatgtacatgcatatgaaccctcccaccactcttacaatatgcccttcttgtgagcgtactcactcctttgcatcctcctccactgccaccatccactcggcggtggcggccacatcgagcaatcgcaaactgttcggcacaaacatccggctgcccgtgtccttcaacactcggccatttgaaggcccaattcctcggccataattggttgaggcctgaggacaatgtgatatttataatgatgtctagacatttttaattactagacatgtatgcatggaaaaaaaatcaaattgcaacggaacaccaatttgtggtttttgttaggaatcaaggatatgagtttggacttggttaagtcttcagtgaagggttgttctattttgtgtatgctataagttatagctagtcaacttcaggatttgtgtagggtagatatgttaccggcgaggtatggtttgagtggggtaagattttcatatgccgaatagtactagcatttattagtttagacttataaaaagaagagaaagagaatccgaatctgtgatgttctcatc

SEQ ID NO: 7806 - DNA, 1260 bp, Glycine max
  Clone ID: 700684348_FLI
ccacaatctaatttctgattcacagtcctatccttttgagataagagcacacgtttaacaaaattgcattctctatttctcttcccctctcatcattttaatcacgcgcacatcagcacaacacaacaattcactaagctaaaatcacttcatcatggcttcctcgtgtgcttcctctgccattgcagctgttgccatctccacaccaagttcccagaagaatggatcactcttgggaagcacaaaagcttcttttcttagtgggaggaaactgaaggtgaacaactttacagcaccagttggagcacgatccagcactacagtttgcgcagttgctgagcctgataggcctctgtggttcccaggcagcacccctcctccatggctagatggcagtttgccaggagattttggctttgatcctctaggtcttgcatctgatcctgagagcctgagatggaatgtccaagcagagcttgtgcactgcagatgggccatgttgggagctgctggcattttcatcccagaattcctcacaaagattggtatcctgaacaccccttcatggtacactgctggagagttggagtacttcacagacaccaccacactcttcatagttgagctctttttcatcggttgggccgagggtagaaggtgggctgacatcatcaagccaggctgtgtcaacactgaccccatctttcccaacaacaagctcacaggaactgatgttgggtacccaggtgggctttggtttgacccacttggctggggaagtggttctcctgagaagatcaaggagttgagaacaaaggagatcaagaatgggaggttggccatgttggctgtgatgggggcatggttccagcacatttacactggcactggtcctattgacaacctctttgctcaccttgcagatcctggccatgctactatttttgctgctttcactcccaagtgagaagtgttggaacaactctatgattgcaagccttggagaaacattggcaaacctttttaactaagttgtaacgcttaaatggttttaggtgggagtgtttatgttggtgaaagcttgtaaaatggctacttctattgtcatgcatagattgaagattcaatgtacaaatacctatttaaggtttagatgcatttaatgtaaattcaggaagtaatcacagtttttgcatggatgatagaactgcaacaatatttgatggtaactagcgcaggggatattagatggtccttgtt

SEQ ID NO: 7807 - DNA, 1079 bp, Glycine max
  Clone ID: 700684366_FLI
gacccttcaaccccaaaaaaactaaaaaattaaaaaaaaacatcaaccgaaggggtcatttctcccaatccgctagcttctgctttctgtcttccagtgcgtgaaggatacgatgaacatcatgtctacccaccagtgtagttggcctgtgagaattcaggatcatcctgacaaaggaagtattaacaaggctccattttccagaggatcggaattccttaatgttggataccatgctcaaaaatatggccatagtgccagaaaatgtaggcccatttttgccagttcagtgagcaacagtatggatccttctgattcagatgacactgataagaaaaaacctcagaatggtgaaatgggaggagtgaatagtgaaatgcttagagagagtctcgagaaaatagttggagaagatgattccacttttagtggatttgaccttgctactcttatcaggaacaaatatgggaggtcttatgatgtacagttgataaagaaggaattcatgggaagaaatctccttgcgatgaatgtcatgtggaagtacatggagcagagatctttcccattgaccgaagaagagtatattttgaggcttgatgatattgcaaacaccttaaaatgttggggagctgtctcacatattcggaacagcctagaaaagtcgaaggaacgacctcggataggcaaggcagtaagcatttttatagatatggatgagtcgggtgctcgttccaacgagtggatctacaaatagaatgcattgctgaattgaaatcttatttagtcaatggattccagattccagtgaagaaaaagtccatagcgcgcatgcaggaccaccactttttgtgaatttcgttaatttggaatttgttatacttggatcttaacaacatctacagaagcttctctaacgtttctgttggcaacttagcatcaggcctaggcaaatatatttttggttcgtcccttctttttttttcctttgttcgatgtaaaatgagttaatataagaaaaaacattcatattaaatttctaacgaacttctcttcaatttagagtatatattaatact

SEQ ID NO: 7808 - DNA, 1541 bp, Glycine max
  Clone ID: 700684396_FLI
gaagatgtatcactattacttggattggctattgatggagaacctgtgataggtccaataagtgcaccaagttcagtttgtgaaaaattattagggagagtacctgaggacctgaatggtggaatggtgaagcttacttggctgaaggagttcttctctgagtgtcctgaagatgcatcacaggaggaaattgagcgatgtacttgtgctttccttttatacctagtaggcagtacaatattttctacaacaacagggaacaaagtccctgttatttacctttctttgtttgaagactttgacaaggctgggaagtttgcttggggtccaggagcattagcatttttatatagagcacttggcaatgcttctcttaaatctcaaagcactattagtggctgtttaactctagtacagtgctggtgttattctcgcctcaatgttggactgccaaaatttaatcaagaacctgataataattgctttccctttctgcttaaatgaaaagggaaaagtggtgcttggatgaaatgtaatgtagtgtcctacagaaaggctttggactctcttaatccatgtgatgtccagtggctaccttacaatgacatggactgttcatccataccagaagatataaaagctagtctgattttatgggaatctaggactatgctattgtgtttcgacaaagtggaaaggcatcttcccgatcgttgcttaaggcaatttggcatgcatcaaactatcccaaaatacgtggaacgatgggagaggaagagttgtatagtggatcacggggtagacttgatggaaaaaatggagtttggctctcagagtggtcagaaccttgggttatgttgttgaaggtggtgacattgctgatgagggtgagtacatgcagtggtatcagaagattacccggaaatatatcaggagagtcacatcatccctggaatcagagtatcaaagaacagtatttctttgcttagttatcattgtttgtcttttactggaatgtatgttaatatcaatacttttacttgactgctacatgcttttacaggttactgctatgagggaaattgcaaatattgctgatatagtctcagcagaagggttggattcttataatagagagttgcttgatgaagtgataaacattgtgcacaaatgtttaacagggcagtttgaagaaattccaaatgagaaagtgaaaaagaagggtaaacggaaaggtaggcaaaaggaccatctgagtatggaatatgaatagcagcagaatagagcacagtccaaagctaatcctgaccttagcctactgatatttataacttcaggttggtaaaggacgaaggtatataatctcaaatggtcaacaccactacaagagtatattttatagaagaggatggcatatttattaacattaaaaaaaattgagacatttgaatgcagatagtttgtaagtatctactgtaaagttccatttgatatttgatccttttaggcatttattggatccacccccatgttgctgatgt

SEQ ID NO: 7809 - DNA, 1597 bp, Glycine max
  Clone ID: 700684418_FLI
atttttattaataaatacattgacataatcaccagtgatgttgttgcacttattgatgaatttgcacgtagagtttttcaggagctcaattatgtgcaggagggacaaaatgcaaggagattcaaaaaattgtatgctgacaaggaagatatttgtgtccctgatgttttctgggactatacaagtgctaaagtactgacaatggagtgggttgaaggagtcaagttaaatgagcaagaagccattgagagacaaggattaaaagtcttggatcttgtgaacacaggcattcagtgcagcctcagacagctacttgagtatggatatttccatgcggatccgcatcctggaaaccttttagcaacacctgagggaaagcttgcctttcttgattttgggatgatgagtgagactccagaagaagcaagatctgccataattggtcatgttgttcatttggttaatcgggactacgaagccatggctcgtgactattatgctcttgattttctatcacctgatgttgatgtgtcaccaattgttccagcactacgggacttttttgatgatgcacttaattatactgtcagtgaacttaacttcaagacactagtggatggcctgggaaacgttttgtatcaatttccatttaatgtcccagcctactatgctttaatattgaggtctctcactgttttagaaggtttagcactctatgctgatcccaattttaaggttcttgcggcatcatacccatattttgctaagcggctcttgacagatccaaacccatatctaagagatgctcttatagagttgcttttccaggatgggaggttcaggtggggtagacttgaaaacctgctagcccaggggagaatggacagggatttctctgcaaaagaggctttgcaacctgtcctgaaggtattattgagtccagatggtgaagaaatcagaaccctagttattaaggaagctgttcgtgtaactgaagcttttactcttagcacaatttctgatacatacaagtcagttcccgattttatgagggttcttgttttcaatggcaatgcaaatggacccattataacgtcagaaactgaaatgcaaaacttgatagagcttagagatcaagtaattaggatatgggaacttctgcgatcctctaatgattatgatccagatcttttactacctatactacaggttcttcagcaacctgaagcacgcagacttggggagcgtgttatgggtgggatcactcaacgtcttgcagcacgctttctgcaacaagtacttcgagttccaatgccagcttcctcatagattttgtgccactgtcaaggtcaacagatgtaatctagataaggttaccatgaacagggaatagaggagctatattcttacaaagcaagaaaaaaatatattctttcaaaattgtttgattagcttgtttgtttggatcctctaatttgcaaaaaatctgtatatattatatactgctttattgatgctgcaagcatcataatcagcttcattatataacaataatgtaatagtgttaattgaaaagggattgctcttggcttcttgc

SEQ ID NO: 7810 - DNA, 1729 bp, Glycine max
  Clone ID: 700684429_FLI
cagaaaacctgagcaaaaaacaaaacaaaacagtaagctaagcttcactgccatgcctgcaacgccattctcgtgttcgttcctcactcttcaaccgcgcttcaactcctacgttaaccccatcttccgttcactcaccttccaactctcttcttcgccgctcccattcaatgccaacttctccagcgtcagactccactcttcgctctcgcgagcggcggagaccgattctccgaccggcggaaggtccggcgcgctaactcccggtcccgccgtcgccggtgaagttcaaaagatcgacgtgaatcctcccaaggggacgcgcgacttcccgcccgaggacatgcgcttgcgcaactggctcttcaatcatttcaaagaggtttcgcggttgtatggatttgaagaggttgattacccggtgcttgagtcggaggcattgttcactaggaaagcaggagaagaaattaaggatcagctttattgttttgaagatcgaggcaatcgccgtgttgcattgaggcctgaacttactccttctttggcaaggctggtgatccagaaagggaagtccgtgtcattaccaataaagtggttcactgttggacaatgttggcggtacgagagaatgacaagggggcgtcgtcgtgagcactaccaatggaacatggatattattggtgttcccggggttatggctgaagcagagcttatagcttctatcgtcactttgtttaagcgaataggaattacagaatcagatgtcggatttaaggtttccagtcgaaaggttctgcaagaagtattattgttattcagtaccagaaaatttatttggcaaggtctgcgtcattattgataaaattgagaaaattccagctgacgagataaagaaagagttgaaagctgttggtctatctcaagaggctgtccaggagctattgcaagtcctttctgtgaagtcattgaccgagttagaagagagacttgggagcagtggggaagcagttgctgatctgaaacagctattctcccttgctgaaaaaattggttactctaaatggcttcaatttgatgcatcagttgttcgaggtcttgcttactacactggcattgtatttgagggttttgaccgagaaggaaagctgcgagctatctgtggtggtggtcgatatgatcatttgttctcaacttttggtgctgatgacattgctgcatgtggttttggatttggtgatgcagtcatagtggaattgctcaaagagaagggtctgttaccggagcttaacttgcaaatagatgacattgtgtgtgccttggacgaagatcttcaaggatgtgctgctatggtcgctaacattctcagagaaaaagggcagattgttgagttggttttggaaagcaaaccacttaaatgggtttttaaacgtgcagcccgattaaatgctgagcggcttgtgttagtggggaattctgaatggcaaaggggtgtggttggtgtcaaaattctctctactgctgaacagtatgaggttaaactggatgatctgaagtaaatcagaatttgaattttttgtggttatgtattctgtctttactattggtattaatttcaccttgattttttttacatagtcctttgagactcaagtacttgttttgtatgtgtacatactcacctgtgtatgcatatgtgattatccatataccaaaacttccgcttctgttt

SEQ ID NO: 7811 - DNA, 1422 bp, Glycine max
  Clone ID: 700684449_FLI
ggagctcttctccattggttcttcatctgcatgcacacacttgcatagttttggaaaccaagaatttttgaagggtagcatcaacaagaagttctggaaatggagatcaccaatgtcagcgagtatgaagctattgcaaagcagaagttgccaaagatggtgtttgactactacgcatctggtgcagaggaccagtggactctgcaggagaacagaaatgccttttccagaattttgtttcggccacgtattcttattgatgtgagcaagatagacatcacaactactgtcctgggcttcaaaatatccatgccaatcatgcttgccccaacagccatgcagaaaatggctcatcctgagggagaatatgcaacagcaagagctgcatctgctgctggaacaatcatgactttgtcttcatgggctacttcaagtgttgaagaggtagcttcaacaggacctggcattcgctttttccagctatatgtgtacaaggacaggaatgtggttgctcagcttgtgagaagagctgaaagggctggattcaaagccattgcccttactgttgataccccaagactaggacgcagagaagctgatatcaagaacagattcacactgccaccatttttgacattgaagaactttgaaggattggaccttggaaagatggacaaagctgatgactctggacttgcttcatatgttgccggtcaaattgatcgtactcttagctggaaggatgtgaagtggcttcaaacaatcaccaaactgccaattctggtgaagggtgtgctgactgctgaggacacaaggatagctgtacaaagtggtgcagctggaattatagtgtccaatcacggagctagacaacttgattatgttccagccactatatcagccttagaagaggttgtcaaagctgctgaaggtcgtgttcctgtatttttggatggtggtgttcgccgcggaactgatgtcttcaaggcattggcactaggtgcctctggcatatttattggacgcccagtggtgttctccttggctgctgaaggagaggctggtgtaagaaatgtgctgcggatgctacgtgaggagtttgagctaaccatggctttgagtggttgcacctcactcaaggatatcactcgtgatcacattgtcactgattgggaccaaccacgcactatcccccgcgccttgccaagattatgaaaaactttttccaatgggggaaacacttctatatatgtttcatgaacctgttcttctcatcctttcttttcctttttggacaactcatttaaacttgtatttggataactctatgcttaatttctaagcattaatatgatgatacttctgtggctactctgctgctgcattcactcattgtatattattaattttgagtcctttatc

SEQ ID NO: 7812 - DNA, 387 bp, Glycine max
  Clone ID: 700684616_FLI
ggtggccatctgaaggtggagctggagcctcaattgataatgcaggcacttactatgctaatttgattcgtcatgcctcgagtgggaatggaactccaaagaggcctggtgagtctatagagacttacttgttcgccatgtttgacgaaaaccagaagcaaggtgctgatactgagcgtcattttggtctcttcaatcctgataaatcacctaaataccaacttagtttcaactaattgaaactaacagaaatatatatatatatatatatgctcctatatctatttactttgaataagtgtgtcaagtatatatgcacatctgtaaaacgcttatttatgccctaaatgacaaatatataagaagtgtcataatttagtttgtgat

SEQ ID NO: 7813 - DNA, 1527 bp, Glycine max
  Clone ID: 700684617_FLI
aaaagccttagccttccctacaactccaaacacaaagacatcatcatccatggctgcctccgtctccactgtcggagctgtcaacagagctcttttgaacctgaatggttctggagctggagcttcagctcccagttcagccttctttgggaccagcttgaagaaggttattgcctcaagggtccccaacagcaaggtttccggtggaagcttcaagattgttgctgtagaagagaagaaagagattgaagagacccagcagaccgacaaggacagatggaagggtcttgcctatgatatctcagacgaccaacaagacatcacaagaggaaagggtttggttgactcccttttccaagctccacaggatgctggaactcactatgcagtcatgagctcctacgagtacctcagcactggacttcgccagtacttggacaacaaaatggatggattctacattgctccagcttttatggacaagcttgttgttcacatctccaagaacttcatgaccctgcccaacatcaaggttcctctcattcttggtatctggggaggcaagggacaaggaaaatctttccaatgtgagcttgtctttgccaagatgggaatcaaccccatcatgatgagtgctggagagttggaaagtggaaatgcaggagagccagcaaaactgatcaggcagagataccgtgaagctgcagacatgatcaagaagggaaagatgtgcgctctcttcatcaacgatcttgatgcaggagctggtcgtcttggtggaaccacacaatacactgtgaacaaccagatggtgaatgccactctcatgaacattgctgataaccccaccaatgtgcagcttccaggtatgtacaacaaggaagagaacccccgtgttcccatcattgtcaccggtaacgatttctcaacactctatgcacctctcatccgtgatgggcgtatggagaagttctactgggcaccaacaagggaagaccgcattggtgtttgcaccggaattttccgcactgatggtattcctgaacaggacattgtcaagcttgttgacagtgttgggaagaagcttgtgaactcaaaagatggacctccaacctttgagcagcccaagatgactctggagaagctcttgctgtatggtaacatgcttgtccaagaacaagagaatgtcaagagagtccaattggctgacaagtacttgaacgaggctgctcttggaaatgctaacgaggatgctattcagaggggaactttcttccagtcttgaattggaggcaaagcaaacttggcaagtaaatatttctgttcgtgaaggttgttgtactaatccaagtgctagaagttgtgatggaacttgcgtgtaacattcttagcattctcaatgtcttaggtgcaaagagaagatgctaagtttgagatgatcttactatatttttcatattggaccgtcttcctctataattttgagttacagtgtccacttaaattgaatttggtgccttttccttt

SEQ ID NO: 7814 - DNA, 522 bp, Glycine max
  Clone ID: 700684627_FLI
tgttaagaacaaaaggaagcaagcttggtgtgatacatcaatcaccatctttattgtgagtcatatacaaagattgatgatgggctagcttcctttgatgccaagaagctaattttcttcctttcacctgaatcaagcccttgtgatacatgcatcaatacacataaaatgtaacgtgcctaggctagatcactataagttgtattattacatacacaaggaggagactccagaacctgtattataatacaccctaatcttccaatcagcctcaatcatttcgaatgagaagagaggctgagtttacaaggaagaagaattaatatgggttttgctacccttaacaaccaattacaactcaattgcaaccaatcaaactttgctcctacgtacactccctgccacaaaaacaaagttttaaaccagggaccttcacacacagcagaaaagacaacaaaataggtcaaaaaggtagaatgaaccatttctgaacttctacaatattgtccccctttgttccat

SEQ ID NO: 7815 - DNA, 1103 bp, Glycine max
  Clone ID: 700684642_FLI
ggaacttgggaagaactaccaggaagcaattgaggacattaccaaaagaatgggtgctggaatggccaaatttatttgcaaggaggtagaaacaattgatgactatgatgaatattgtcactatgtggcgggacttgttgggctgggtttatcaaagcttttccatgcgtctggttcagaagatctggctccagatgacctttccaattcaatgggcttgtttctacagaaaacaaacattattcgagattatctggaagacatcaatgagatccccaagtcacgcatgttttggccacgacagatttggagtaaatatgttaacaaacttgaggatttgaaatatgaggagaactctgttaaggcagtgcaatgcttaaatgacatggtcactaatgctctgatgcatgctgaagattgcttaacatacatggctgctttacgtgacccgcctatatttcgcttttgtgctataccccagataatggcaattggaacacttgcattatgctacaataacattgaggtcttcagaggtgtagttaaaatgaggcgaggtttaactgccaaagtgattgaccgaactacgactatggctgatgtctatggtgctttctttgattttgcttctatgttggagtccaaggttgacaaaaatgatcccaatgcaactaaagcattgagcaggctggaagctatacagaaaacttgcagagaatctggtctcttgagtaaaaggaaatcttacattgtgaaggatgaaagtggatatggctcaaccatgattatcgtactggtcatcatggtttccatcattttttcttatctgtctgctagccaccaaaataactagtcaactagccatgccttcttgcctttccgaacattgatatcatgcctcgttcatggaatgcaaatttgcacgcaagcaatattatgatggctgcagttgactatcgtgtattttaatggaaaaatagtcgaatgtagtgtcaagagctccttgtgttagtttggatttaactctacccctacgttcgtcctgaaaattatcattattctgcgtgttattagttgtttgtattctcggataaagttggaat

SEQ ID NO: 7816 - DNA, 1252 bp, Glycine max
  Clone ID: 700684661_FLI
tgttcttgcacatgactctggctatcaccaacttgttagtcattggttaagaactcactgtgtgacagagccgtatgttattgcaaccaacaggcaacttagtgagttgcaccccatatacaaattgctacaccctcatttccgttatacaatggagattaacgctatcgcacgagaagcacttatcaacgctgatggcaccattgagagctcatttgcaccaggaaagtactccatagagattagctctgctgcttatgctctcgaatggcggtttgacaagcaggcactaccagcagatctagttagcaggggaatggctgtgaaagatccattttctccacatggcttaaagctcaccattcaagactatccttttgccaatgatggactccttctgtgggatgctataaagctatgggtcactgactatgtcaaccactactaccctgaaccaagtcttgtggagtcagacgaagagttgcaggcatggtggacagagattagaacacttggtcatgctgacaaaaaaagacgagccatggtggccacgtcttaaaaccccaaaagacctcattggaatcctcaacacaatcatatgggtaacttctggtcaccatgcagctgtgaactttgggcaatatgtttatgggggatatttcccaaataggcctacaattgtcaggaccaaaatgccctcagaggaccctacagaggaagagtggaaaaagttcattgcaaaccctgaaagagcactcctcaagtgctttccttcacaacttcaagcaactagagtcatggctgtcttggacatactctcaactcattcacctgatgaggaatacataggagagaagatggaaccatcatggggtgaagatcctgtcataaaggatgcctttgaaagatttagagaaagactgaagaaattagaaacactgattgatgagaggaatgaaaacacaaagttgaagaacagaaatggagctggcattgttccgtacgagcttttgaaacctttctcaaagcctggtgtgactggaatgggggttccctgtagtatatctatttaagttgacaaagtcaaactgatattatgtgtgaagtgtgatcctaaactcatatgggttttcaattaaacatatgatagacacatagtcacataaactggtgcctcaaccagaatttccataaacacatgactagtgtttctttaggatgttcttgaaccaatgagattatttctttgagt

SEQ ID NO: 7817 - DNA, 539 bp, Glycine max
  Clone ID: 700684680_FLI
taagatcatgtcagcacctacacttcatcatttctcttctctcttcacccttttcatagttttgcttcaccactccaacgctgacgttggcaccgcttctcgttactcccctccatatttaccatccgggtgctacggtaccgaagcgacgcagtttccgtcgagcaatctttttgcggcggcgggagatggaatatgggataacggagctgcgtgtgggaggcaatacctagtgaggtgtataagtgcggagcaacctaggacttgcattccagaccagagtattcagattaaaattgttgattacgctgccactgccgtgtcgccggcttccgccggcggcaccaccatggttctttccgataaggctttcgggactatagctaacatgtctgccaccttgatcaacatagagctccaacagtaaattccaaatctctccctatttaataattaatttctatttatgtatacatagtttgacaaaatggtgttatatgtttggttgcagagtgtgataaatctggtaattaattgct

SEQ ID NO: 7818 - DNA, 3225 bp, Glycine max
  Clone ID: 700684713_FLI
ggcgttgttgttgctgctgctggtggttttctcggcgttggctcggcccggtccatctcggtcgaagcgcttcgaccgagcgacaccttcccccggcggcacaactctgccaccccggaggagcagagcaagatggcagagtcgtgtggcttcggtagcctcgactccctcgtggacgccaccttgcctaagtcgatacgccttaaggatatgaagttcgggaaattcgatgcagggcttacagagaaccagatgatagagcacatgaaggacttggcctcaaagaacaaggttttcaagtcctacattggaatggggtactacaacactcatgttccaccagtgatcctgaggaacattatggagaaccctgcttggtacactcagtacacaccttaccaggctgagatatctcaggggaggcttgagtcactgctgaattaccaaaccatgatcactgacctcaccggcttgcctatgtccaatgcttcattgcttgatgagggaactgctgctgctgaagcaatgtccatgtgcaacaacattcagaaagggaagaagaagaccttcatcattgcaagtaactgccaccctcaaaccattgatatttgcaagacaagggctgatggttttgatctgaaggttgttactgcagatcttaaggacattgattacaagtctggggatgtttgtggtgtgcttgtgcagtaccctggcactgagggagaggttttggactatggggagtttgtgaagaaggctcatgctcatgaggtgaaggttgttatggcaagtgatttgttggcactgactgtgttgaagcctcctggtgagttcggggcagatattgttgttggatcagctcagaggtttggggtgccaatggggtatggagggcctcatgcagctttcttggccacttcacaagagtacaagaggatgatgcctgggagaatcattggggtcagtgtcgattcttccggaaagactgctttgaggatggcgatgcaaactagggagcagcatatcaggagggacaaggccaccagcaacatttgcactgctcaggcactgcttgcaaacatggctgccatgtatgctgtgtatcatggacctgaaggcctcaagaacattgcacaccgtgttcatggtcttgctggggcatttgctcttggaataaagaaacttggaactgtggaaattcaggaccttcccttctttgacactgtgaaggttaagacttccaatgcacacgcaattgctgatgctgctctcaaaagtggaataaatttgcgagttgttgatggaaacactatcactgttgcttttgatgaaacaaccacattagaggatgttgataatcttttcaaagtttttgctggtggaaagcccgtctccttcacagctgcatctcttgcaccagaagttcagagtgcgattccttctggattagttaggaagagcccttatctgacgcaccctatctttaacacgtaccaaactgagcatgagttgcttaggtacttgtataggctacaatcaaaagatctctcactatgccacagtatgatcccacttggatcttgtacaatgaagctgaatgcaacaactgaaatgatgcctgtgacatggcccagctttagtgatattcacccttttgcaccagttgaccaggctcaaggttatcaggaaatgttcaacaatttgggtgaactgttgtgcaccatcactgggttcgactccttctctttgcaaccaaatgctggtgctgctggagaatatgctggacttatggttattcgtgcatatcatttggcaaggggagaccaccaccgcaatgtttgcattatacctgtctcagcacacggaacaaatcctgctagtgcagctatgtgtggaatgaaaattgtctctgttggaactgatgccaagggaaacattaatatagaagagctgaggaaggctgctgaaacacacaaggataacttatctgcacttatggtaacatatccttcaacccacggtgtttatgaggaaggtattgacgaaatttgcaatattattcatgataatggaggccaagtatatatggatggtgccaacatgaatgctcaggtgggactcacaagcccgggttggataggagcagatgtttgccatctcaatctccacaagacattttgcatccctcatggaggaggtggccctggcatgggacctattggtgtaaagaaacacttggcaccatttttaccttcacaccctgtgatagaaactggtggaattcctgcccctgacaaacctcaaccacttggtaccatcgctgctgcaccatggggctcagcactcatattgccaatctcttacacttacatagccatgatgggttctaaaggactcaccgatgcatcaaagatagccattttgaatgcaaactacatggcaaaacgattggagaattattacccggttcttttccgtggagtcaatggaacagttgctcatgaattcatcattgacttgagaggctttaagaatactgctggaattgagcctgaagatgttgcaaagcgcctcatggactacggttttcatgcaccaacaatgtcatggcctgtgcctggcacactcatgattgagcctactgagagtgaaagcaaggccgagttagacaggttctgtgatgctcttatttccattagacaagaaattgctgagattgagaaaggaaaggttgacattaacaacaatgtacttaagggcgcccctcatccaccatcactgctcatggctgatgcatggacaaaaccatactccagggaatatgcagccttcccagctccttggctccgtactgcaaagttctggcctaccacaggacgtgttgataatgtgtacggtgaccgcaacctcatttgcacccttctcccagcatcacaggctgttgaagaacaagcagctgccacagcataatgtgttcaaatgacaactattttcatttcccgttgtacataaactcttattcctattcatacagttcttgcacttgttgaatattgcttcatcatatgtgacaatgatgataatccactgctcttaagtttcatccaatcacaggaaaaaaaaaaaaaagtaattcgtataattgctgctgctattggattttaggaatgtattttaggcctatctgttacagtaatgtgaaaaaatggatttgattcatgt

SEQ ID NO: 7819 - DNA, 1346 bp, Glycine max
  Clone ID: 700684719_FLI
gtggggtgtataggaatcctgtcatctgaatataccatcatattgcatgattgtgaaaaggtggtcttaacctttttgggatttagggttgaaaaataatgcatattagatagacatgactgaccctaattatatattatagcatcctagctagaaacttcttaaccaacaagtaagcttttttttttctttctttcttttgaattactcttccttctataaattattattatatcactcttctggtgtgtatttacaggaggtactgctccctggtggtcatggtcttatggtccgtggctacttgcctgttgtaaatagcctagccaagggtcttgatattcgattggggcacagggtcacaaaagtagttaggcgatataatggagtaaaggtaactgtggaaaatgggaaaacgttttttgctgatgctgctgttattgctgtcccacttggggtgcttaaggcgaagaaaatattgtttgagccaaagcttccagactggaaggaagctgccattgctgatcttgggattggacttgagaataaaatcattttacactttgaaaatgtgttttggcctaatgtggagttcttgggagtagttgcagatacaccttatgaatgtagctacttccttaatctccacaaggccacaggtcgtgctgttctcgtttacatgccttctgggcagcttgccaaagacgttgaaaagatgcctgatgaagcagctgtcaacttcgctttcatgcagctcaagaagatttttccagatgcttcttcaccgattcagtatcttgtgtctcgttggggatcagatataaattcactaggttcatatagctatgatgcagttgggaaaccccatgaactatatgagaggctacgggtcccagtagataacttgttctttgcaggggaagcaacaagcatgagctatccaggatctgtccatggggcatactccactggaacgatggctgctgaagattgccggatgcgtgtgctcgagcgatatggagaggttgatttattccagccagtgatgggagaagagggttccatgtctatcccgcttcagatatcgcgtctttaatcgtctttgggtcacaactagtggacagaaacacaatctatctatgcttgttcttttgttatcaacctatatataagttatatagcaaatgttttggcaaatagtctttaagagtatatgtccacttgtgaaatcacattttgtgttggatttccttagtcagtgtttccagtaactggtaatgtgaatattgcgcacctaagaggcgttgtcacttctatcagtatacttataataaaattgggacaac

SEQ ID NO: 7820 - DNA, 2120 bp, Glycine max
  Clone ID: 700684721_FLI
gttggaaagttttatgattctgcagaaacacagaagtcaggctccaggatccagcctctttacatagaactgtagcagagactagaatcattgtgcaaacaacaagtgaagtggatctcttagatgatggatatcgatggcgcaaatatgggcagaaagttgtcaaaggcaacccatatccaaggtgatattggttttctccctacactttgattgcttatatttaagtaataattatggatgagcaatatcattgctaaaagtaacaagtatgagagaagaagacacgattgagtacgaataaacaagttgaacaacatacaagtgagatgacctcatactttaatgttttaaggcattaagttagatatgatgaaagttcatttaaattgttagattgtgaatcgttaatgaaggtatctcccacctttttaatcagcttgtatttcctaacattgtccataacagctttcaagaaatttgattcccataatgcttaattattcaccatactcagattatgatactccatatattatggtgtacatttccacgaattttcccactattctgcttttttattgtttgacttgtctaggaaaagaaggtgatgcatgtttttatgatatgtaggagctattacaaatgtgcaacccaaggttgcaatgttcggaagcatgttgagagggcttcaatggatcctaaagctgtcctaacaacatacgaaggaaaacacaatcatgatgtgccggtagctaagactaatagccacacacttgccaacaatagtgcatcacagctaaaagcacaaaatattgccatacccgacgacaagcatagtttcagcagtaggggtgttcgggggaatgaacagcgacctttgggaagtctaagattgaaggaagagcagataacatagttttcttagttcatagtctaatctatctttttctcataattcgacatatatacaataggcaagattgtaaaattggtcccccactttatctccaattacggatttggtccccctataatttaattcacaaatttggtctctcaattttataaatttctgcaaaattggtcctggaagtccgatttggacattgaccgttaatctcagacgttgactgtcacatgtcaatgccacgtgtcaacgtctaagtggtttccggtaaaggtttcattttttgtaggtaaaattacatttttggtccctcagttttactccaattttaattttggtcctctttaatttaattcacacatttggtccccccaattttataaatccctttataaattgttcctacaaaattggtcttttgaatggtttagccactggtactagagacatgatagaccttgataaattttgcactccttttttatcgcaagtttttcactcacttggaacccagagaaaaatcactctttatctctctcccaatttcggggttattcaacttgagaaagtggcgtatgaatcccagcctaggtccgaaattttcaaatctcttgctttaacaggttttgtaataaccccccccccccctttttttttcgttttttgctcccccatgtggtattatgtgtatacgacttaagtggtctatgtatgacaatgatatttttgtttgaaatttgaaatacgacttctccagtaatgaaatttggttgaatttataaaggaatttacaaaactgagggaccaaatgtgtgaattaaattataaggggatcaaaatcgaaattgtagcaaaactgggggaccaaaagtacaattttacctacaaaaaatgaagcatttacagagaaccactcagacgttgacacgtggcagtcaacgtctgaggttaacagtcaacgtttaaatcgggcttctaggaccaattgtacagggatttataagactgggaaaccaaatttgtgaattaaattataggaagaccaaatccaaaattagagataaactaggggaccaaaagtgaaattttgcctatacaatattatgttcaactcaccgcattactatacaacacaacaaacttgttctatacaactcagaaatttgatgtcaaagtaacaaaatgaaatgaagcacaaaacgaattgaat

SEQ ID NO: 7821 - DNA, 1671 bp, Glycine max
  Clone ID: 700684751_FLI
gaaagaatgagagaggttgccaaccttattctgagcttcccggaagagaggccaataattgttctctctgccatgggaaagacaactaacatgcttttgctggctggagaaaaagctgtaagctgtggagtaactaatgctgatagtattgatgagctcaacataataaaagatcttcatctcaggactgtggaacagcttggagtggacagaaatgttattgagaagcatctagaagaattggagcaacttctaaaggggatagctatgatgaaagagttgactccacggactcaagactatttagtttcatttggagagtgcatgtccactaggatatttgctgcatatcttaatacattaggagttaaggcccgccaatatgatgcatttgagatgggtattataacaactgatgacttcacaaatgctgacattttggaagcaacatatcctgctgttgcaaagaggttacatagtgattgggtttctgatcctgctattccaattgttacaggcttccttggaaaggcacgaaaatcatgtgcggtgacaacattgggtagaggtggaagtgatttaactgctacaacaattgggaaagcgctagggttgccagaaatccaggtatggaaagatgttgatggtgttctaacctgtgatccaaatatatgcccacaagcaaaacctgttccatatttgacatttgatgaggctgctgaacttgcatactttggtgctcagtgttaaacacaattatttgataggagaaactcaatactgcaaatgtacaactggggaaggaatagagaaactgaaaaaggagcctacagggctaattgcaaaaggctattctcttgaccatggagagaacaccggatagaagttatcaacaaagtcctccatccacagtctatgagaccggctagggaaagtgatattcctgttagggttaaaaattcatacaaccctaaagctccaggtactctgattgctaagacaagggatatgagcaaggcattattaacaagcattgttttgaaacgtaatgtgaccatgttagatattgtaagcactcgcatgcttggtcagtttgggttccttgctaaggtattttcaatattcgaagagttaggcatatcagttgatgttgtagctacaagtgaagttagtatttccttgacattggatccatcaaagctatggagcagagagctaattcaacaggaacttgactatgttgtcgaagaactggaaaaaattgctgtggtaaatctcttaaagaccagatccataatctctctcattggaaatgttcagaagtcatcactaatattggagaaggcctttcatgttcttcgaactcttgggatcactgttcaaatgatctctcagggtgcatctaaggtgaatatctcgttagttataaatgacagtgaagcagaccagtgtgtcagggctctccacaaagccttctttgagagcgaactctctgaattagagaatgaatgcatacctagaaatggttcggttcctgcattatcttagcggtatacttttgttttgccaatatagcagattaatatcttatcttataggttaagaaattttttggctaggaggaataacgatatattagtacagtatttattagtatgttattgacagagt

SEQ ID NO: 7822 - DNA, 227 bp, Glycine max
  Clone ID: 700684806_FLI
attgctcagaaacagatcaaaagattatcatttaaatggtgtctgctccagctattgagctttgtgtgcttccttgtttcggtagtcgccgcagttggttccattcgtggaattagcaagaatatcaaaaaatacaaacttttcatgtataaacaataggccattttgcgcattacttaccatctttcgtgtacgtgtacgtttaagataagtgaatataaacggac

SEQ ID NO: 7823 - DNA, 1992 bp, Glycine max
  Clone ID: 700684820_FLI
gaaattattgaggtctttgcagtttgcaagaactctaaacatttgatccatcaccatcttcttagcagtgaggtgaagtgaggtgactgcaatggcttctgcttgtgtgaccttgaaatccaatacccatttagcaaactctgagaagggctttctaggagaaagaataaaaggtggcttcaacaacagtgccttggtaatgaatcagttggctatacgttctagaagccacaagagggtgaaacatggtgttggtgttgtatctgctgttctcacttcaaacaatgccaaagaatcactgaccttgcaagtgccttcctttttaagaagaagggctgatccaaaaaatgttatttccatcatattgggaggaggacctgggacacaactctttcctctcaccaaacgtgctgccacacctgcggttcctgtgggtggatgctacaggcttatagacatccctatgagcaactgcctcaacagtggcatcaacaaaatatttgtgctgacacagttcaactctgcatccctcaaccgtcacattgcccgcacctattttggaaatggcatcaactttggggatgggattgtggaggttctggcggctactcaaacaccaggagaggctggaaagaattggttccaaggaactgcagatgctgtgaggcaattcacttgggtatttgagaatacaaatgttgagaatgtattgatcttggctggagatcatctatatcgtatggattacatggaccttgtgcagagtcacgttgatagaaatgctgatattacagtttcatgtgctgctgtgggtgacagccgtgcatcagattatggattggttaaagtagatgacagaggccgcatcattcaattttctgaaaaaccaaatggtgatgatctgaaagcaatgcaagcagatacctctcttcttgggttgtctccccaagatgcattgaagtcaccatatattgcatctatgggggtttatgtattcaagacagatgttttactcaatcttctgaaatggagatatcctacctccaatgacttcggatctgaaatcatccctgcagctgtgagggatcacgatgtccaatcgtatttttttgaagactattgggaagacattggaacgataaaatcgttttacgatgctaacttggcccttactgaagagagtcacaagtttgaattttatgaccccaagattcccatttacacatctccaggattcttaccaccaacaaagattgacaaatgccagattgtggatgctattatttcccatggatgtttcctgcgagaatgcacagtccaacactccattgtgggtgaacgttcacgtttggattatggtgttgagctcctggacactgtaatgatgggagcagactattaccaaactgaatctgaaattgcttctctgctggcagaggggaaggtcccaattggtattggaaggaataccaaaattagaaactgtattattgacaagaatgctaagatcgggaaagatgtcatcatcgcaaacaaagatctttctctgtagggcgttcaagaagcagatagaccagaagatggattctacattcgatcaggaatcaccatcataatggagaaggcaaccatagaagatggcactatcgtataaatggatagctcatttctgggctgattatccaaaggcgctggaagaggaatgctcccatctttggggacagaagggtatctgtttgcaatgctgtgttacaatggaggaagcagcacatcaccccatttgctatatgtaaaatagaaggctcccccactactcaatacatgtaaaaatagaatgaataaaaccatgaaaatcaagatgcatgaggagtaaataaattaaagggctgaccctgagctagctacaaagttgctttacccccttgtaaaagacactttctaaattatttgtattactaaggtatcagtgaatggctgaattgattcattggc

SEQ ID NO: 7824 - DNA, 1550 bp, Glycine max
  Clone ID: 700684930_FLI
ctgcctccgtctccactgtcggagctgtcaacagagctcttttgaacctgaatggttctggagctggagcttcagctcccagttcagccttctttgggaccagcttgaagaaggttattgcctcaagggtccccaacagcaaggtttccggtggaagcttcaagattgttgctgtagaagagaagaaagagattgaagagacccagcagaccgacaaggacagatggaagggtcttgcctatgatatctcagacgaccaacaagacatcacaagaggaaagggtttggttgactcccttttccaagctccacaggatgctggaactcactatgcagtcatgagctcctacgagtacctcagcactggacttcgccagtacttggacaacaaaatggatggattctacattgctccagcttttatggacaagcttgttgttcacatctccaagaacttcatgaccctgcccaacatcaaggttcctctcattcttggtatctggggaggcaagggacaaggaaaatctttccaatgtgagcttgtctttgccaagatgggaatcaaccccatcatgatgagtgctggagagttggaaagtggaaatgcaggagagccagcaaaactgatcaggcagagataccgtgaagctgcagacatgatcaagaagggaaagatgtgcgctctcttcatcaacgatcttgatgcaggagctggtcgtcttggtggaaccacacaatacactgtgaacaaccagatggtgaatgccactctcatgaacattgctgataaccccaccaatgtgcagcttccaggtatgtacaacaaggaagagaacccccgtgttcccatcattgtcaccggtaacgatttctcaacactctatgcacctctcatccgtgatgggcgtatggagaagttctactgggcaccaacaagggaagaccgcattggtgtttgcaccggaattttccgcactgatggtattcctgaacaggacattgtcaagcttgttgacaccttccctggccaatccattgatttctttggtgcactgagggccagagtatatgatgatgaagtgaggaagtggatttctggtgttggtgttgacagtgttgggaagaagcttgtgaactcaaaagatggacctccaacctttgagcagcccaagatgactctggagaagctcttgctgtatggtaacatgcttgtccaagaacaagagaatgtcaagagagtccaattggctgacaagtacttgaacgaggctgctcttggaaatgctaacgaggatgctattcagaggggaactttcttccagtcttgaattggaggcaaagcaaacttggcaagtaaatatttctgttcgtgaaggttgttgtactaatccaagtgctagaagttgtgatggaacttgcgtgtaacattcttagcattctcaatgtcttaggtgcaaagagaagatgctaagtttgagatgatcttactatatttttcatattggaccgtcttcctctataattttgagttacagtgtccacttaaattg

SEQ ID NO: 7825 - DNA, 738 bp, Glycine max
  Clone ID: 700684992_FLI
cagaaaaacaagtagttgagaactaagaagaaggaaatggcttcctcaatgatctcctccccagctgttaccaccgtcaaccgtgccggtgccggcatggttgctccattcaccggcctcaaatccatggctggcttccccacgaggaagaccaacaatgacattacctccattgctagcaacggtggaagagtacaatgcatgcaggtgtggccaccaattggcaagaagaagttcgagactctttcctacttgccagacctcgatgatgcccaattggcaaaggaagtcgaataccttctaaggaaaggatggattccttgcttggaattcgagttggagcacggtttcgtgtaccgtgagcacaacaggtcacctggatactatgatggacgctactggaccatgtggaagctgcctatgtttggctgcactgatgcttctcaggtgttgaaggagcttcaagaggctaagactgcataccccaatggcttcatccgtatcattggatttgacaacgttcgccaagtgcagtgcatcagcttcatcgcctacaagcccccaggcttctaagtcattgaaaaatttgcaaagcatctgtagccaccccactttgtttgttgtacttaaactacattcccatttgtttttgctttatgagatttcatcatcctgtatttttggtttctgttttcggacttcaatggaaattaatggatgagaactaatgaataagct

SEQ ID NO: 7826 - DNA, 828 bp, Glycine max
  Clone ID: 700685048_FLI
ctacaacagatgttgcgcaaagggcattgaaagccggactgcagcaatcccaaataaagatttttggtctacctgtccgaccttcctttgttaagcctgtccggccaaaggatgaactaaggagagaattagggatggatgaggatcttcctgctgtattattgatggggggaggtgaaggtatggggcccattgaggctactgctcgggcacttggagattcattatacgacgagaatattggggctcctgtaggtcagatccttgtgatctgtggtcgtaataagaaacttgctaacaaactaagttctattagttggaaggttcctgtgcaggtcaaaggatttgttaccaaaatggaggaatgcatgggagcttgtgattgcataattacaaaggcaggcccagggacgattgcagaggcccagatccgaggcctccctattattctgaatgattacattgctgggcaggaagctggcaatgtcccctatgtagttgaaaatggatgtgggaagttttcaaaatcccccaaggagatagcgaaaatcgtagccgagtggtttggtccaaaagcttacgagctacaacaaatgtcacaaaatgcattgaggctagcaaggccagatgctgtgttcaagattgtacatgaccttcacgagcttgttagacaaagaagctacctaccagagtattcttgtacaacttaaactgacacacgagactgagggttttttttgcaacactgtttctgaggaaaaatatgtacaaggcagcgatgatgatgtatcactagacaaaaaaaaattcagtgtattttcttccatc

SEQ ID NO: 7827 - DNA, 1652 bp, Glycine max
  Clone ID: 700685058_FLI
gtcgatatttccaattaaatcttcttgttcctgtgaaggtcctataaaaaaaagggctatgcccttttttttataggaccttcacgaaaggtcggaacataaggcggggaagagttagtttcttctctcttcgatggaaggcggggaagaggttctcccttcggccactgccacctccgccgccaccggcaatcccaccgcttcgcctcctccgctcgctgatcttgtcggtgctcccgatctcgctgctgcctcggacgacgtcgttacccaacctgaaattcacgcgctgatttcagacgaagagcacgatcacgagcatgaacatgacgatgacctcgagcacgagcacgatcagcatgagcatgaccaccaccacgaggaccgcgatgatcacgccgctgtggccgctgtctccttggaagatctcaaactcaagatcattaagcaggcggagtattatttcagcgatgaaaacctgcctactgataagtatctgttgggtttcgtcaagaggaacaaggaagggtttgttcctgtatcagtaattgcttcttttagaaaaataaagaagctcacgcgagaccatgcatttattgttgctgcactgaaggagtcttcactgcttgttgttagtggtgatgggagaagggtcaagcggctcaatccacttcgtttcaatgaatctagagatcataagttatatactgttttggtagagaatttgccagaggatcattcaaagaagaacattcaacaaatattccatgaagctggaaatataaagaggataaccattcatgacccacattctacttcagagtctgcaaaacaacataacaagcaagaaatgctaattagtaataagttacacgctcttgtggaatatgagactatggaggctgctgagaaagcagtggctatgttaaataatgaacaagactggagaaatggcatgcgggttaaacttctcaagggaatggggaagtatggacacaaaaaaacaagcttggaaaggacatcattctgagaagaatagctcaaggcctgaacaaacaggagatgaggagaatcatggctctaatgatcatcatgaagatacccatgaggaagaagatggggatcatttgtcaaaggataagggtgggcagaggtatagaaatcaaggaagatcaagaaaacataaatatcgtgctggaaatggaatgggccatggaagtgcaccatcaactcatgctgctgaagcatcaaagtcacctcctggacccagaatgccagatggaacacgtggcttcgcagttggacgaggtcggcctcctgtccctgcttcgaattagcaagatttgacacaacacgagggattgtatttagcagtattatgtggtccgatgttttagtgatggtactagttttaatctgggtccctatgcgtgttcggttgagtcaacatgggtttgttggactgttaaattatgcattcaatctttggaagcgagtgttggtggtgaagtacatgcccattttaagattattaggctgggaaacatagaactgtttttgttgtggtaatcctcaccttacgaggattctgtgtaacaaaatcatatcgagaaatttgttaatggggatgaaagaaagctgtgtttgatacc

SEQ ID NO: 7828 - DNA, 2153 bp, Glycine max
  Clone ID: 700685085_FLI
cagaatgcgattcccggccccaacggtggtggtgctgctggaaatcagttcgtgacgacgtcgctttacgtcggagatctcgacccgaacgtcacggacgcccagctgtatgatttgttcaaccaattggggcaagtcgtatccgttagggtttgcagggacttgaccagtaggagatcgctcggttatggttatgtcaactttagcaacccgcaagatgctgccagagctttggatgttctgaacttcactcctctcaataacaggcccatccgtatcatgtattcgcatcgtgatcccagtatccgtaaaagtgggcaaggaaatatatttattaagaatttggatagggcaattgaccacaaggcgttgcatgatactttttctacatttgggaatatcctttcgtgcaaggtagctacagattcatctgggcaatcaaagggctatggctttgttcaatttgataatgaggaatctgcccaaaaggccattgagaagctgaatggaatgctgctgaatgataaacaagtgtatgtgggacccttccttcgcaagcaagagagagaaagtactgctgacaaggcaaagttcaacaatgtttttgtgaagaatctgtcagaatcaaccactgatgatgaattgaagaatgtttttggtgaatttggaactattactagtgctgtcgtaatgagggatggagatgggaaatcaaagtgttttggatttgtgaattttgagaatgctgatgatgctgctagggctgttgaggctctcaatggcaaaaagtttgatgacaaagaatggtatgttggaaaagctcaaaagaaatctgaaagggagaatgaattgaaacaacgatttgagcagagcatgaaagaagctgctgataaatatcaaggggcaaacttgtatgtcaaaaatttagatgatagcctcggtgatgataaacttaaggagctgttctccccttttggtaccataacttcttgcaaggttatgagagacccaaatggcataagtcgtggatcaggatttgttgcattctcaactcctgatgaggcatctagagcactcttggagatgaatggcaaaatggtggtaagcaaacctctgtatgtgactctagcccaacggaaagaagataggagagctagactgcaggctcagtttgctcaaatgcgacctgttggaatgccaccatctgtcggtcctcgtgtgccaatgtatcccccaggtggtccaggtattggtcaacaaatattttatgcccaaggccctcctgctatcattccttcccagcctggatttgggtatcaacaacaacttgttcctggtatgaggccaggtgcagctcccgtgccaaatttctttgtgccaatggttcagcagggacaacagggacagcgtcctggtggaaggcgtacaggtgcagtccagcagtcccagcagcccgttccaatgatgccacagcagatgctacctagggggcgtgtctatcgttatcctcctggtaggggtatgccagatgtttctatgcccggggttgctggaggtatgttttctgttccatatgatgtgggtgggatgccactgcgtgatgcatcaatctcccagcaaattcctgttggggctttagcaacagctctggctaatgcttctccagagcagcagaggacgatgctgggtgagaatctctacccccttgtggaacagttagagcctgacaatgctgccaaagtgacaggcatgcttcttgagatggaccagactgaagttctgcatttgctcgagtcgccagaagccctgaaagcaaaggtggcggaggcaatggacgtcctaagaaatgttgctcagcaacaggctggcggtactgcggatcagctggcttcattatctcttaatgacaaccttgtttcttaaggtttatattttggatttatttagtgacgatgggttgttattttcggcactggctctgatacagtttcaggttgagtttgtttcgttagattagacacttttggtttgttatggaccaccaccttcttttggttgaagggcacttcaacactgattttaattatgccttgcatttggtacatggaatcatttgttggtttatcttttgattacatgagtttgatttgcat

SEQ ID NO: 7829 - DNA, 1613 bp, Glycine max
  Clone ID: 700685101_FLI
tgcaattgaagttgaagtcttgcccttctctcttcaactccaaacacaagacatcatcatccatggctgcctccgtctccactgtcggagctgtcaacagagctcttttgaacctgaatgggtctggacctggggtttcagctcccagttcatccttctttgggagcagcttgaagaaggttattggctcaagggtccccaacacaaagatttcctctggaagcttcaagattgttgctgtagaagagaagaaagagattgaagagacccagcagaccgacaaggacagatggaagggtcttgcctatgatatctcagacgaccaacaggacatcacaagaggaaagggtttggttgactcccttttccaagctccacaggatgctggaactcactatgctgtcatgagctcctacgagtaccttagcactggacttcgccagtacttggacaacaacatggatggattttacattgctccagcttttatggacaaacttgttgttcacattaccaagaacttcatgaccctgcccaacatcaaggttcctctcattcttggtatctggggaggcaagggacaaggaaaatctttccaatgtgagcttgtctttgccaagatgggaatcaaccccatcatgatgagtgctggagagttggaaagtggaaatgcaggagagccagcaaaactgatcaggcagagataccgtgaagccgcagacttgatcaagaagggaaagatgtgtgctctcttcatcaacgatcttgatgcaggagctggtcgtcttggtggaaccacccaatacactgtcaacaaccagatggtgaatgccaccctcatgaacattgctgataaccccaccaatgtgcagcttcctggtatgtataacaaggaagagaatccccgtgtgcccatcatcgtcaccggtaacgatttctccacactctatgcgcctctcatccgtgatgggcgtatggagaagttctactgggcaccaacaagggatgaccgcattggtgtctgcactggaatttttcgcaccgattcaattcctgaacaggacgttgtcaagattgttgacaccttccctggccaatccattgatttctttggtgcactgagggccagagtatatgatgacgaagtgaggaagtggatttctggtgttggtgttgacggcattgggaagaagcttgtgaactcaaaagatggacctccaacctttgagcagcccaagatgactctggagaagctcttgacgtatggtaacatgcttgtccaagaacaagagaatgtcaagagagtccaattggctgacaagtacttgaacgaggctgcacttggaaatgctaacgaggatgctattaacaggggaactttcttccaatcttgaattggaggcaaagcaaacttggcaagtaaatatttctgttcctgaaggttgtgctgatccaagtgctagaagttgtgatgggacttgcgtgtaacattcttagaattctcaatgtcttaggtgcaaagagaagatgccaagtttgagatgattttactatatttttcatattggactgtcttcctctataattttgagttaaagtgtccacttaaattg

SEQ ID NO: 7830 - DNA, 1833 bp, Glycine max
  Clone ID: 700685107_FLI
tgcttctttaatggctttaggcacatttattgatcaaggtgaagcccctgacttttatttccagaaataccctgaagatcatcccgtgtttggattttttacttggagatgggttctcacccttggttttgatcacatgtttacatcccctatatttcttggagtgttggctctccttggtgcatccctcatggcctgcacttacacaactcaactccccctcatcaaggtttcaagaagatggtcatttttgcactctgctgaggccatacgtaagcaagaattttcagaatcattgccaagagcatcaatccaagatgttggtactatattgatgggagctggatacgaggtattcttgaaaggaccatctttatatgcttttcaagggcttgcgggtcggctggcccctgttggagtccatatagcattgctactgataatggctggaggaactcttagtgctactgggagcttcagaggttcagtcactgtgccccaggggctgaattttgttgtaggtgatgttctggctccttttggctttctctcctctccaaccgatgcttttaatacagagattcatgtcaacaaattctccatggattattatgagagtggagaggtttcacagttccacaccgatctttcccttcgtaacatggatgggaaagaagtaatgaggaagacaatcagtgtaaatgatcctttaagatacggtggtatcaccatatatcagacagattggagtatttccgctctgcaaattcttaaggataatgaaggaccttataacttagctatggcacctctacagataaatggagataagaaactttttggtacttttctaccggttggagatattaactctcctgacgttaagggaatatctatgcttgctcgtgatctgcagtcaattgtcctttatgacaaggaaggaaaatttgcaggagttagacggcctaattcaaagctcccaatcaatattgatggctcagaaattgtcattgttgatgcaataggaagtagtggcttggaattgaagactgatccaggtgtgccagttgtatatgctggatttggtgctctaatgatcactacttgcatcagctatttgtctcattcacagatatgggctttacaagatgggacaacagtcttcgttggagggaagactaacagggcaaagatggaatttccagaggagatgagccgcttacttgataaggtccctgaaatagttgaatcaaatctacctaagcatgctgatagcattagtggttagcttatggcttttgagaaatcaagataggtaaagaagacacttcaattggatgatagcaacttatatggattatgattcaatttggatacacttatccattagcacctatagaagagataaaaaaaaaattaaatgatcaaacttctcaaataaattaaaatcaccttatgcatctcaaattctttggaagtttttttcatttaacttttgcaaaagctgagatgtataacttggttttaacttaaaggataaatttgaatttttatctccttatttcttctttataagtgcttattgaaaagtttattcaacttatgtgataaagtactttggcatacaaatacaaattgaacttcatcattgaagtgtccagcagttgtcttgctggttgatcatcagggaatttacaaatgctcgaaggatgcctacaagaagtatatcaagaaaacttttgcagctcatattatttgacattatctagatacactgagttcaacatacatgtatatttcctgtatttttttagtaatggggccaaattaatc

SEQ ID NO: 7831 - DNA, 1453 bp, Glycine max
  Clone ID: 700685156_FLI
gtctaatccgacgtcgttttggtggtgttctatgtcagtgtggtgctcgtgtttgggacatggcggaaacaacctctgcttctgtttcttctcctgcgggtgattctaattggagagagaacaagttgtggaaaggcacatttgctgtcgcaggaatcatgctcaccctcgttacctatggtgttttgcaggaaaagatcatgagagttccttatggggtgaacaaggactacttcaaatattctctttttcttgttttctgcaatcgcatcacgacatctgctgtttcagctggtgctttactggcaagtaaaaaggcattggatcctgtagctcccatttataagtattgccttgtgtcggtatcaaacatacttaccacaagttgtcagtatgaggccctcaaatatgttagtttccctgttcagactcttgcaaagtgtgctaaaatgataccagttatggtctggggcactgccataatgcagaagagatatcggggaactgactatttgttggcctttgtagtaacccttggctgctcagtgttcatcctgtatccggcagggaccgacataagtccatacggtagaggaagagaaaatactgtttggggcgttttgctaatgcttggttatcttgggtgtgatggctttacaagtacattccaagataagatgtttaaaggctataacatggagatacataatcagatattctatactactttgtgttcttgtattcttagcctggcaggtcttatcatacaaggacatttattaccagctgtagagttcgtttatatccataaagattgctttttttgacattgcattgctttcaactgttgcgacagctagtcaattttttatttcctacacaattcgcacatttggtgctctaacatttgctactataatgacaacaagacagttggtaagcatcttgctgtcatgtgtgtggtttgcccatcctcttagctgggaacagtggattggagctgtaattgtctttggcgcgatttatgcaaaaagcttcttgaggaaagcacctgaaaagacaacctcttctgtagaacatgtacaaaatggaaattcaaataatttgaaggagaatccatgatggaggctaactcctttgctgacctgatgtggtgctacccatagtagtgtgggtggggcagcttcagttttaagtttagagctgcacatttaatatttcaggttgcggctaatgcattatatgaaggtgatttgacacagcccctgattttgtgtcccaatcataacaatggagaacttgataggagcttagtccctcattttttgataggggagatcaataatactgatcaaagccaaaataatgtttataaattgaaatatgttcaatgtgtttgctcaaacaaggttgttttttggtttagttttcctgagtatgttttgttaaagac

SEQ ID NO: 7832 - DNA, 1218 bp, Glycine max
  Clone ID: 700685226_FLI
gctgcagtgagagtagcagagcaagaacaagtagttccactaaacaaaggggtagagggactttccaccccacttctggaaaacagactttctgatggtgctgaagttgaaatggaagtgatacctatgggtgtcaacaatcgtgacatttcaaacacattcaggatcacctctccattggttgttgatgaagctatgcttgaaaaagtgcttgggcctccaaaatttgatggaagagaagctgaggatcgtgttgctacccctggggcatctgttgggcttgtttggactacttttggtggagaagttcaatttgtggaggctacagcaatggtagggaagggtgaattgcatcttactggacaactgggtgatgtaatcaaagaatcagctcagatagcactaacatgggtaagggcaagagcaactgaacttaggctagctgctgcagaaggcattaatctgttggagggccgtgatatacatatacattttcctgcaggtgctgtacccaaagatgggccttcggctggtgtgactttggtaacagcattggtatcacttttcagtcagagaagagtgagatcggatacagctatgactggggagatgacattgaggggtcttgtactacctgttggcggtatcaaggataagatattagcagcacatcgatgtggtattaagagagtcatcctgcctgaaaggaacctgaaggacttggttgaagtaccatcatcagtactggccgatttggagatactgcttgcaaaacgtatggaagacgtgctagagcaagcttttgacggtgggtgcccttggagacaacactcaaagttgtaatagcatccttgacttgcacgttatgtggcaatccccggtggcttatgtattcatttaaatcctgatctatgctattgcaacattgttggtgagtgagtacttatctcttcaacttcttgtgattgagcacaactctagaaaccgacagttttggaaaggagctggcatctgcatatattcttgagactccactctccataatcttttgtaagtattttttttttgctttcgagcagctgtacttatccaagttcagtaaatgatgtttttcactctccccttcagcacccaatccttggctccctgtattttgttaatcttttgtcatgttactataattttattattgtgaataaaccattattttctccgagc

SEQ ID NO: 7833 - DNA, 1049 bp, Glycine max
  Clone ID: 700685326_FLI
caggcccaacgacacagtgcttctactgatcaacaacttcggaggcatgtcaaatttcgagctcgaagctctgacagcatccactcgcaggcttttgaagaaagactggagcatcgcacctgaacgcctctacgtctcagcattcgagacctcgctgaatgcacctggctggtctctttcgttgctcaacgtctccggcatcgaacgaaccaccggcacatccgttgcagaccttctgaagctcctagactccgacaccaacgcatccgcctggcccagaaatggctaccgagaagtccaagagacgtcagaggaacttgatcgcactgatagcaagatctctccacaagccacatcccaaggctcaaccgtcgatcccgctcgcctcgaacgtgccctccgctccgcatgctcagcagccatcgctgccgaaccgcaaataaccaagtgggatatcgagatgggcgacggtgactgtggtgaagccgtcgtcggcatgtgcgaaggcattctgcggaaactggacaacggactctgccagtctggtaagatcttccacatcttggatgaaatcgacgaggctgtggaagaaatcggcggcacactcggtgctatcattgcaatctctgttgctgcgtacgcgacgaatctgagacaagccgctgcggcgcagggagacgggttcgatttggatgagaaggccgccggacaagctgctggaaaagctcttcggaatttgatgggctacacaagtgcaagacaaggtggacgaacggtcatggatacactcatgccgttctgcgagacgttcgagaaagacagcttcgagcaggcggtaaaagcagctgaagagggcgcgaagagcacaggcggtatgaaggcgaaatttggcagagcgacgtacgttggtgacaaggcggacgtgggcgatgcaccgccagatccaggtgcgatggcagcatattacttccttgaaggcttcctcaaagggtacgcttgatataaattgagggcatcgtagcttgtcattaataatactattgactgcc

SEQ ID NO: 7834 - DNA, 3123 bp, Glycine max
  Clone ID: 700685384_FLI
gaaggctgaggaggagtcgttgcagcaggttcagagtgggagtgggagtggtagtgagatggaggaaggggagcttgagcctgaaccccaagcggaaacggttcctcccgtgagcgaagacttgccctctgttgctatggagactgatgagaagcaagctcagaagaatgaatgccaccctaatgatgacagcactgatgctgctgtggatgagagacgggagttgtccagtaaggaagaagtgaaacctaatgaggaggttggttgttgtgaggtaaaggatggagaggagatagaagctgatgagatggcagatgttcgggatgatttgtctgagaaaatgcttgttactgagactgaagttgagtctgtgggtaatggtgatgatgataaaaaggaggaggctttggatgctggagctgagtgcgaggaggaaacaaagaagggtgcggatgtggataagcaggacaaggacaagaacaaggttgtagatctaggaaccggcgcggatgttgtcaaacctgagttaaatgatggagtatcaacaggaaatgaagttccaaaggaagtggatagagaaatgatgatggagagtgcggtcaatattgcaaaggataaaggcaaaggtgtctctgttgcacttgtaccacctactaatgttgttcatgctttagatgatagcttgtggttggacagagggtcgagagacctcccgacgtgttctgttgatgttatagaaggtccaagcacaaggggattcgagttgttttccagatctcctgttaggaaagtggagaaagtagaccactcagttctcaacaagcacaaggatgacatggagcagcttgatcttactcttagcttgccgaatgttctgttacctattggtgctcatgagacaacatcgcaagcccctggatcccccagtcaagcacggagtgtgcagtctttaagtaatacattttgtactaactcagatggttttactgcatcaatgtccttttcaggttcccaatcattctatcataatccaagctgttctctgacaaaaacttcagtggactatgagcaatctgttggcagtcgccccttattcgggggaatagatcaagtttcccagggatgttggcaaggtcagtctcagagcgatcccaaacagaaagaagttccttttggtcaaagaacctcggcaaacggaaatggctcccttttccagcctcaggcatcatggggtgttttagacagtcaagctgtaaagggtcaacattccagggttctagaaggaagttcaaaaatgggcagtggacttgacaggcaattgagttttcataaacagttttcaggccagtcaagacgccatgacgatgttagatctccgtcacagagtgttgggtctcatgatattggatcaaattatagctttgagaaaaagagagaggtaagagagaggggtagtggtagtctgtatcgaactacaagccagaaggaacaagaacaacttctggtgggtggagttgattttgttgagacaatcattgcaagaattgtttctgaacctgttcatgcaatgtccagaaagtttcatgaaatgaccggacagtccatagtatgtctgaaagagggtattcgtgaaatcatgcttaatgcagataagcacgggcagatacttgcttttcaaaaagttctgctgaacagatctgatataatcttggatgtcctattgaagtgtcacagagtgcaactggaaattttggttgctttaaaaactggtttgactcattttcttcacctagagagcagcatttcatcttctgagttggctcaaatttttctgaacttaaggtgtaagaatctttcatgtcgaagtcagttgcctgtggacgaatgtgattgcaaggtttgtgcacagaagaatggtttttgcagggagtgtatgtgccttgtgtgttcaaagtttgacaatgcctcaaatacatgtagttgggttggatgtgatgtttgccttcattggtgccatactgactgtggattacgggaatcttatattagaaatgggcctgggacaaaagggatgactgagatgcagtttcactgtattgcttgtgatcatccttctgagatgtttggctttgtcaaggaggtgtttcaaaattttgcaaaagaatggtcagttgaaaccctttgcaaagagcttgaatatgtaaagagaattttttctgcgagcaaggatatgagagggagacagttgcatgagattgcagagcaagtgctgccaaggttggcaaataagtccaatctccctgaggttttgaggcacatcatgtctttcctttcggatggtgattcttccaaattacccatgacaacaaacttttctgggaaggaacaaattaaagaaaacaatggagtagctgggcccagccaggaagcaacttggatgaaatctatttattcagaaaagccacctctgttagaaaggcctgcaaatatccttcctacctttgaccagaatgataaaagaactcttgtgcaagaattgcagatgagtagtatccagaaggacttctgttttgatgaattggagagtatagtaaaaattaaacaggcagaggctaaaatgtttcaatcacgtgctgatgatgctagaagagaagctgaagggttgaagcgcattgcccttgcaaagaatgagaaaattgaggaagaatataccaatcgaattgccaagttacgattgactgagactgatgaaattcgtaaacaaaaatttgaagaagcccaagcattagaaagagcacatctggagtatttgaacatgaaaatgagaatggagacagacattaaagatctgttatccaaaatggaagctaccaaaatgagccttgccatgtgatcagatcaaaaaaatctagaatagtactttcaggtaaatgtattatgtcccatcctgaaatttgtaggttctgatgtcaccaccttattgttgtgagctactttagtcctgatccgtagttgtatctattgttgtagtccgttttgctttttagctgctaaccaaaacctgtagagtgcatcagttattagtcttatgaaacaatatcagttatgaaagcaatttaaaat

SEQ ID NO: 7835 - DNA, 1556 bp, Glycine max
  Clone ID: 700685392_FLI
ttccgaaccaacgcaatgatggaatggaagggtcttgcgttcttctgcagttctgatagctagccatgttggcatgaagatttaagcgggaaaataataagacaacgtatataacgttttcacaaagtggctttttttttattatcacaaggagtatgtgttgaatgattattgagttgcagcactgatcagttcttagaacatgaattcagcatccccgcagtttgtttccccgagaagtatgagtgtgtacgatccgatccaccagattagtatgtggggagaaggcttcaaaagtaatggaaatttaagtgcagccatgcctttaattgatgaggcagacatgaagtttgatagtcagtcagaggatgcttctcatggtatactgggagaacctaataagtatgaccaagaagctagcaaacctactgataagatacaaagacgtcttgcacaaaatcgagaggctgctcgtaagagccgattgaggaaaaaggcctatgtgcagcagttagaatcaagtcgtttgaagttgatgcagttggagcaagaacttgaacgtgcaagacagcagggaatgtatataggtggtgggttggattctaatcatctgggttttgctggatcagtaaattcaggaattacaacctttgagatggagtatggacactgggtgaatgagcaaaatagacaaatcacagaactgagaaatgctttaaatgctcatattggtgacgtagagctcaggattttagtagatggtatgatgagccactatgccgaaatgtttcgcatgaaatctgctgctgcaaaagcagatgttttctatgttatgtccggtatgtggaaaacaacagctgaaagatttttcctgtggattggaggctttcacccctcggagcttctaaaggttcttggtcccctgattgaacccctgacggagcaacagcgtttgaatatctataaccttggacaatcatgtcagcaagcagaagatgccctttcacaaggtatggacaaactccgccaaacacttgctgatagtgtagcagctgggcagttcatggaaggaacgtatattccacagatgacttctgcaatggagaagttggaagatctggtgagctttgtgaaacaggctgaccatcttcggcaagaaaccttggagcaaatgtctcgaatacttacaatccgtcaggcggctcgatgcttgcttgctttgggggaatatttccaacgcctgagggctttgagctcactgtggtctaatagaccccgggaacctgcttagtctcacaacaagattacaagagcgcaaactcataacatgaacgtgatgtgatgatgaatatgggtcagtttctttggcaaagagcatcaaaaccatgtgtcatgagaggtccaggttgctcacatttttcctgcagttttgcgttatggagaagttgtaaatatgactgctagctcattttatgcatacgggcttgtaaataaattgattttggacgcatggtgtatatcggattgttgcaaaaatgaaatatttagaatctgcc

SEQ ID NO: 7836 - DNA, 476 bp, Glycine max
  Clone ID: 700685405_FLI
ctaaaaactgggatgaccctactaccaagtatgtggagaactgcaagtatccaagagatggttcatcaccaaagtccctaagatatattggaagcatggtagctgatgttcaccgcacattgctttatggaggtatttttctgtatccggctgataaaaagagtccaaatggaaaacttcgtgtactctatgaagtcttcccaatgtcattcttgatggaacaagcaggaggacaggctttcactggcaaccaaagggcacttgatttggttccaaagaagttgcacgagcgatctcccatattccttggtagctatgaggatgtcgaggaaatcaaggctctttacgctgctgaggaatgaagctggaagaaagcattctttgtctttcgctacttacaagcaattgttatctaattgttacacacatacatggtcatgtatatgttaagaaaacttgttaatgttttgtgcttt

SEQ ID NO: 7837 - DNA, 989 bp, Glycine max
  Clone ID: 700685431_FLI
cggcgctaccggaccagcgcagatccgacgggatgctcctcacgccgtgcggcacgccggcctacgtggcgccggaggttctcaagaagaagggctacgatgggtcgaaggctgatatatggtcctgcggggtcatcctctttgctcttctttctggctatttgccctttcaaggtgaaaatgtgatgagaatttacagcaagtctttcaaagccgattatgcattccccgaatggatttcccctgcggccaaaaacttgatctccaatttactcgttgtggacccgcaaaagaggtattccattccagacatcatgaaggacccttggtttcaaattggcttcttgaggcccattgcgttttccatgaaggagtctgcgcttgaagataacattgatttcagcggggatgatgttcctagtcctggtagtgatgatggtaatagcagcagcaacaacgaggatggggagttgacgggggctaagcctgctcgtccgtcttacaacgcttttgagataatctcgtccttgtcgcatgggttcgatctgaggaatttgtttgagacgaggaagcggtcgccgtcaatgttcatttccaagttttcggcttcggcggtgatggcgaagctggagggggtggccaagaagctgaactttagggtgacggggaagaaggagttcatggtgaggatgcagggggcgacggaagggaggaaggggaagctggccatgacggtggaggtattcgaggtggcgccggaggtcgcggtggtcgagttctccaagtccgccggagacacgcttgaataccttaatttctgtgaggaccaagtcagaccttcgctcagggatattgtgtggagttggcaaggggacgctaattgccaccagtaactattcaattcaatttagattattgcagcatgtaataaatatctggagtttgggatgttgattgaacataataagaattaagaatcatcttgattg

SEQ ID NO: 7838 - DNA, 1859 bp, Glycine max
  Clone ID: 700685483_FLI
gctgatttccttatcctaacactctcatctggtctctatgtctcgaatcttctccgcatggaacaagaagaagctgcaccttcatctcaacttaatccccactattttttcttcttcccacactcacttcgacgctctcgctgccgccaatagtgggcttctccggcccagtttgaggctctacagtagtagtagtagcagcagcaatggggagccaccagaggattggcctcacgatcactacgctgctacgcaaactcctattagtgttaatttcattcgggcctctgggcccagggacgggtgggtcggagggtccaatttgggtagggattttcctactccgaaggaaatctgcaagggactcgacaagtttgttattggccagcacagggccaagaaggtgctctctgtagctgtttataaccactatcaaagaatataccaggggtcagaggcagatgaaggactctctcaaggattggatgatggggatgatgtggagctggaaaagagtaatgttctcttgatgggtccaaccggttcagggaagacgttacttgcgaaaacactggctcgttttgtgaatgttccctttgtcattgctgatgctactaccctaacacaggctggttatgttggggaagatgtcgaatcaatattgtataaactacttgcggcagcagagttcaatgtccaagctgctcaacaagggattgtttacattgatgaagtggacaagataactaagaaggctgagagcttgaatattagccgggatgtttctggtgagggtgttcagcaggcattattaaaaatgctggaaggaactatggtaaacgttcctgagagaggagcaaggaagcatccacggggtgataacatacagattgacacaaagaatattctttttatatgtggtggagcatttattgatcttgagaaaaccatttcagagaggtattttgtttttctttttatgtctttgttttttcatcatattttgattatttgtgaaataaaccagacgacaagattcttcaattggttttggatcaccagtccgttccaatatgagaactggtggagttacaaatgctgcagtcacatcatctttacttgagtcggtggaaagtgctgatcttattgcatatggtctcatacccgaatttataggacgatttccaatcttaattagcttgtcagctctaaccgaagaccaacttatgcaggtcctcacagaaccaaaaaatgctcttgctaagcagtacaagaaattatttaacatgaataatgtaaagctacacttcacagagaaagctctgagattgattgcaaagaaagcaatggccaaaaatactggtgccaggggtttaagagcactactggaaagcattttaactgaagccatgtttgagattccagatgttaaagcaggaaatgaactcattggtgcagttgttgttgatgaggagtcagtaggatcagtaaatgcccctggttgtggaggaaaaattctttgtggagatggtgctttggaactgtacctagctaagatggagggttttcagtggctaacggtgccgtagctgagccagacttacaagaaggggaatcagagatttcatcaagagccgtgagcatgtaatattatatattatatttaccacaatcaaggtgtataatatatcattgttgttatctgtaaaaatcacattcataatctgctgtaattatcccttgtataacggtgtagcttctgttttatgtacattggataggaaggatatagaaaattgaaggatgtagcattgctaatttaggcatcacgtcatccaaaatttcaattgattttgatg

SEQ ID NO: 7839 - DNA, 1124 bp, Glycine max
  Clone ID: 700685541_FLI
ggatgcaagacccaacagcattccaaggagtgaagccaccccagtttcctgaacaagaacaactcaagtgtccacgttgtgactccaacaacaccaaattctgctactataacaactacaacctctcgcagccacgccacttttgcaagaactgcagaaggtactggactaaaggtggcgctttgagaaacatccctgttgggggtggaagcagaaagaccacaaaacgttcttcatcaaccttatcaaaacgctcttctgcaccatcttcttcctctgcagtttcggatcctgacccgacccggatttgcaccaacccggttgatcaagaccaaagggtgctcaacattggtggtggcagtttcagttcccttctagcttcatctgggcacttcggaaccctcttggagggtctgaatccatctgggtcgggtctcaaaatgggtgaatttgtggagggcgtgagttctgacccgggtctgaatctggattcgggtctaaacccggatttgcaggttcagagcaatgagaattcagagagttttctaggtttgcagaatggtgattcaagctgttggaatggtactcatggttggtctgatcttgcaatatacacacctggcccaagttttcaatagaagcttagtgataaaagtttgagactttttggcttaatccagcttctcgattatggtgattggtcttatatatataatatatacttaaatactattgttgtgttttttcctggttatagaaaagtttagtggagtttgatcttgggaaattcataacaggtttcaccgttcaaaaagcacttaatgtacaggatattcaaattcacattcttgtgaaatatgaattctatcttgtcaactggatcaatcttcgttcatatttactatatgattatgtaaagagttatataatttgatcaagcctatggagagcatgctatggaggatcatacatacaccagaatgtcactgaagcagcatcctttaggtaaagatttttttttctttcaatagtttatatgctcgtgattggtgtttttcaaacttaccacttgtgaaaatttggggaaaaaaaaggcattttttttgtgaggatggctcggagga

SEQ ID NO: 7840 - DNA, 1934 bp, Glycine max
  Clone ID: 700685549_FLI
ccttaaagcagcttagtactcttgctttgcaatataacaagttaactggtcaaattcctcttagcttggggaacttggagaagctaagcaggcttaatttgagcttcaacaactttagtggtactgttccagcaacactagcatatattgaacatttggaagttctagatattcagaacaattctttgtcgggaattgttccttcggcattgaagagacttggggaaggattccaaggtgcaaacaacccgggtttgtgtggagttgggttttctactttgagagcctgcaacaaagatcaagatttaaatgttaaccatattgatacctcagacggagaccaacccaaaaatagtaattcttcaaaggcgctcccggagcctgcttatgttcagttgcattgtggccagacccattgttcgaaatcaagaaggtttcctcaaactgtcatcacagcaggtgttgtaatcgttactcttacattcatatgtgctggatttttgacattcttcagataccgccgtcaaaagcagaggattagtaatacattaagttcttcttcagaaggaaaagttagtcttgaccagcctaaagagttctacacaaaaagtccatctgcacttgttaatattgactattatagtggatgggatcaattgtctaatggtcaaaatgctgatgctggtggactatccaatgagtatctaaatcagttcaggtttaatgtggatgaggttgaatctgcaacacattacttctcggaagccaatttacttaataggagcaaattcgcagcaggttataaaggagttctcagagatggttctcttgtggctattagaagcattagtgtgacatgctgcaaaacagaggaagctgaatttgtaaagggcttgaacttattaacctctctgagacatgaaaaccttgttaggctgagaggtttttgttgctcaaggagtagaggtgaatgtttccttatctatgactttgccaccatgggtaacctgtctcaatatctcgacatagaagatggaagtagccatgtgctcgagtggtccaaaagagtctctatcatcaagggcattgcaaacggcattggatatcttcatagcaatgaagaaagcaaacctacaatagttcaccagaatatttcagtggaaaatgttctcctagattatcagtttaacccattgatcagggatgctggactacctatgcttcttgcagatgatgttgttttctcagctctaaaagttagtgccgcaatgggatacttagctcctgaatacatcactacaggccgctttactgagaaaagtgacatatacgcatttggagtaatcattcttcaagttctatctggcaagaccacaataggtagttcaatacggacagcagttgagtctttcagatttgatgattctgttgacacaaatctcaagggaatatattctaaatctgaagcagcaacactttcaaagcttgcaatacagtgcactaatgagcttcctgacgaaagaccaaccatggtggatgtgattcaggagctgagtgtgttatctgctcatttataatcatctactactttctattggtattaggagacgtttaaacttttcctaatcgcttggtttcatacatttactatttccatgagcatatatataatataatgtagttaataattgtggatctaaatggattcttgtcctatttttacgaaaactaggatagatgaaggatagtcttcattcagtttattgtaaattaaagggcttcctgtcctgaggtaatgatctcagcacaactctcgtggtttattgttgaatagcatgaaacactttcttcttggtacagaaacttagtttacagtaagctatgtctattatagtgtacaattgaaaaatatataaacataattggttatgtct

SEQ ID NO: 7841 - DNA, 895 bp, Glycine max
  Clone ID: 700685575_FLI
ttttaaaattttacaatattgttgcaaatcctccaaataaatacatagtcattgtgtagggtacttcagatgaagttgtagattgctcccatggcaagcaactctgggaactgtgtaaagagaagtacgaaccactgtggctcaaaggaggaaaccattgtgatttggagctctttcctgagtacatcaggcatctgaagaagttcataacaacagttgagaagtctccatcgcaacgatacagtttccggcggagcacagaccagtttgagcagcctcgaaagagtacagatatttttgaagtaagtagaaagagcactgatcgtagagaaaagccaaggaagagcacagacaagccagaaaagctgaaaaacttgtctaataattctgatatgttagagaaattgagaatgacttttgatcacaaggaaaggtctaggagaagtgtggattgtcatgagaagtcccggaaaagcattgaccatcaattagaaaaagcaaggaagagtgttgacaggctggacagaataaggagtggataataattcttcttatagtgaaattatattcatgcatgggttggttttatggggttctttttcttttttatattggtcatcatgttgtgtagtatggcttatatcagatatgaatactatttagcattgaagaaaagggtttggtgtcatagtgagattcacttttcattcatatggtatggcctatttacctctgttgcactctcccactttatgtgacaaatgctactagcatgttagcacattaatcttttgaaaaatttgtcaaaaatattttatcaaaagatacaaagaaattcttatatttgtattttcatttcttattttagttttagctaaggatcaatgttgtgatc

SEQ ID NO: 7842 - DNA, 945 bp, Glycine max
  Clone ID: 700685633_FLI
gggcgcaattactcttgttcaaataacaatattcccatgcacagttgctatgatttccttctaagcttggacatcaatggtggctgcgactctctaacgacctttccgctagatatcttcccaatactcaggaagatttttatcaggaagtgtcctaatctaaagaggatttcacaggggcaggctcataatcatctccagagtcttggtatgagagagtgcccccaattagaatcattgcctgaaggaatgcatgtcctccttccatctcttgatcggctgcacatagaggattgtccaaaagttgaaatgtttcccgaaggaggtttgccatcaaatttaaaaggaatgggtctctttggtggtagttacaaacttatctacttattgaaaagtgcattgggaggcaatcactctctagaaagattatctattggaggagtggatgttgagtgtcttcctgaggaaggtgtactgccacactctcttgttaatctatggataagggagtgtccagatctaaaaagactggactacaaaggtctctgccacctctcctctctcaagacattgcatcttgttaactgccccaggctccaatgcttaccagaggagggtctgcccaaatccatttcaactttgtggacttacaattgtccgttgctcaaacaacgttgccgggaacccgaaggcgaagactggccaaagattgctcacattaaacgcgtgtcgttacacggtggttaatgagatgcagattagctacttgctatcctgggagatgcatgcttattctacattgttttaaacattagtttatgtacagctaaatttgtaacaggattatgggcattgcttttatcgggaattcactgacatgtacatttctaaaatttcaaatttgttttcttctaaaactaatgatcgtgaattcatgatacttct

SEQ ID NO: 7843 - DNA, 1455 bp, Glycine max
  Clone ID: 700685655_FLI
ctgtcatacccacttccccttcaagagcacacgcccagatcagcgttaacaacgtcttacaactgcgaaacaaaaccaatctgaaatgtccgaccaacaagagatttacgctgcgttccccaacgtccctcaggctcctcctgattccatcttccaattgaccgctcgttacgtcgccgacaagcatccgaacaagatcaacctgggtgtcggggcatacaggacggacgaggggaaaccttgggtcttgcccaccgtcaagaaggcttccaggcaactagaagagaaccccaatatcgaccatgaatacctccctatcacgggtcttcctcagttcaccaaggccgctcaggggttgatctttgggaaacagaacaaggctgttgacgagggaagggtcatcagcgtccagaccttgtcaggtaccggagccaaccacttggccgcgctgtttttcgccaagttttacgagttccctacggacaaggagatctacattagcaatcctacttgggccaaccacaacgccatcatatccaacgtcggggtcacgcccgtctcctacaggtattacaacaaggagaccatcgcgctcgatttcgatgggtacttggaggacttgcaaaaggccccagagagatcggtcatcttggttcatgggtgtgcccataaccctaccggagtcgacccgacggccgagcagtgggacaagatcctggacgtctttttgcaaaagaagcactacgcgttctttgactcggcttaccaagggttcgccacgggagatctcgatcgggatgccgggtccatgaggaagttcgccgagaagagggtcccgatgttggtctgccagtcgtttgccaagaacgccgggctgtacaacgaacgagtcggtgctctgcacgtcgtcgcggccgataccaaggaggccgagagggtcaagtcccagttgtccgtcttgcagcgaagcgagatctcgaaccctcccgcttacggagctcatatcgtctccatgatcctcaccaacccggaactcttcgattcgtggaagaacgacattaccaccatgtcgggtcgaatcattgagatgagggatgccctgtttgacttgctcaatgacaagttcaagacgcctcccccgcccggaaggaaggactggggtcatatcaaggagcagatcggcatgttctcgttcaccggtctcaaccctgatcagactaagaagctcgtcgaggagcattccgtctaccttaccgggaacggtcggatatcgatggccgggctaaacacccacaacgtcgagaccttcgccaaggccgtcgacgaggtcgtccgaagtacctctggtactgtccccggttctgccctctgaggggttagctagcgtcttgtccgtcatcgtggtcgtcttgtatatagcttgtcgtcggtatcgaaaatgaagagccaattgtc

SEQ ID NO: 7844 - DNA, 534 bp, Glycine max
  Clone ID: 700685656_FLI
gagagacttgatcattgagagccacgaccacgcgtttcaggtgaaggaaggggagatgctgttcgggtaccaaccattcgcgacgaaggatcctaggatcttcgagagggccgaggagtttgtcggggacaggttcgtcggggaggaaggggagaagctcctcaagcacgtgctgtggtccaatgggcctgagactgagtctccaacacttgggaacaagcaatgcgccggaaaagacttcgtcaccttggtttcgaggcttttcgttgtggagttctttcttcgctatgattccttcgagattcaagtgggaacttctcccttgggttcttccgttactattacttccctaaagagagcaagcttttagttagttagttaattaattaattaattaattaattaatatttgttattaattttgtttttgaccggttaggatgatgatagtattattattattattatttttttatcatcgagaatgatagtatgtgataatttataagtttattgtatggttacattttacat

SEQ ID NO: 7845 - DNA, 2498 bp, Glycine max
  Clone ID: 700685736_FLI
ccaaatcatgcgagaattccttttagcgtcgtctcgctaggtctgtcttcgaaatcaaagacggaggctctgaaataataaaaaccacgcacgcatcgaaagaaagagagagaagaagaagaagaagaaaagaggggtcttcgaagaaaccatgagtatcctctctctctaaactctctcagattcgatcctctcttctcttctttcaattccgcttccctcgcactaaatgacagggtttcctggccctcgccgcgatcacgcttcttcttcctcctcctcgcacaattccaacagcagtggtagcaacgtatttaatttgcttgcaaggagggagatctcaccccgaacaagatatgtggcaaaatggcattggggagaacccggtgaagcttcaaaatcaaagtctattccttattctcgtcctaaaaaagaagttgtgagagatgcaagacgtggtctcctctcatgggttgaggctgagtcattgcggcatttgtctgctaagtattgtcctttggtgcctcctccaaggtctactattgcagcagcatttagcccagatgggaaagttcttgcctccacacatggtgaccacacagtaaagataattgattgtgaaactggaagttgcttaaaggtgttagttggtcataggagaacgccttgggtggttaggttccatccattgcacccacatatacttgctagtgggagcttggatcaagaagttcgtttatgggatgctaacacatcagagtgcataatatctcatcatttctatcgtcccattgcatctattgcttttcatgccaaaggtgaaataattgctgttgcatctggccacaagttgtacatatggcaccacaacaagaaaggtgaagcatcctctccaatatttgtgttgaagacaaagcgctcccttcgtgctgtgcattttcaccctcatgccgcaccatatcttttaactgcagaggtcaatgatcttgattcttcagattcctcaatgacagaggctacatctcttggttatttacaatatcctccgcctgctgtttttgtcacaaatattcatcctacagaacatattaatttgtccagcgaactaccttatgtgtcattacctttctatgtaatgcctgcatataatgttgatgagtcaagagcagaactacagcatgctagtcatgatgttgtctcaggtagcatgcaaattgagtcttctgccatggtacagttgcaagcagacccaagtgcagcagagcattatgagactacagtgtctcccatggatacattctctgagatgccctctagctctcaaactggtgcagaatatcctgctcatactgctttctctaatggaatgggaattggcctcagtaatctcacaatggatggtatggagaccgatgaaaccagacctgctgaaggaaaccaacatgggaacttgactaatacctattctcttaatggcatgctacatggactgtctaggcaaactgcaaaccgtggggttccctcagagtttggtcaatttcatcagttttttccttcaagagatccaagtggatgggagattccttttctccatggatggataatgggtcaaagccaagttggtgttccttcaatgcttcctcacatgggtgctagtcgtgacaatctatcccaacagattggttcttcttcttacataatggcatctaatcattccacttctaatgttgatgcagcgatgccatcttcagcaatacctggcagcatcagcataccgggttcttcaatgagatcaggtttacggaatcacttttcacaatcccgtgtacctgtatctgaatctggcaatcttgctgcttctattaataccccacatgatggatttgatatgcaaaccatcgtaagtcgaattcagtcagaacttgccacatcagtggctgcaacagctgcagagttgccttgcactgtgaagttaagagtgtggtcacatgacataaaaaatccctgtgccccacttaatgctgatagatgtcgtctaaccgtaccgcatgctgtcctctgcagtgaaatgggtgctcatttttcaccatgcggtagatttttagctgcctgtgttgcatgtatgcttccccatatagaagcagatccaggattacaaactccagtacaccaagatcctggtgttgcaacatcaccaacccggcatccaatttcagcacaccaagttactttcctgaggagaccatcgttggagtcagtcagtgagcaaggtttagacaaatgattggacatgtaattcaaagatctgcttcacatcactgtacaactcatctgctgtctctgctgatgatctgcacaaacgcaacaccatattatccaatgctgagcccatgcaaccgatggtggtggaacttcactcgcattagcaaaaatgtatatttttgtattatccatgtatgaatatgtactaacattttcctttgttaacatgttttctt

SEQ ID NO: 7846 - DNA, 1445 bp, Glycine max
  Clone ID: 700685790_FLI
atacaaaggttgctgtaggagataagattgcagtagtgctaagtgctaacacctgcagtgaacaatggcctctgcatcagcatctctgctcaagtcttcacttgttcttgacaagtctgagtgggtgaagggacaaacccttcgccaaccttctgcatcagttgtgagatgcaaccccaccaccccatcaggcctcaccatcagagctggttcctatgctgatgagctcgttaagaccgcgaaaacagtggcttcaccagggaggggtattttggccatggatgagtccaatgctacctgtgggaagcgtttggcttcaattgggctagagaacactgaagctaaccgccaggcataccgtaccctcctcgtgacagttccaggccttggtcagtacatctctggtgccattctctttgaggaaacactctaccaatccacaactgatggcaggaagattgttgacgtgctgcttgagcaaaacattgttcctggtattaaagtcgacaagggtttggtgccccttgcaggttccaacgacgagtcatggtgccaaggtttggatggtctagcctctcgctcagctgcatactacgagcaaggtgcccgtttcgccaaatggcgtactgttgtgagcatccccaacggtccctctgctctggcagttaaggaagcagcctggggtctggctcgctatgctgcaattgctcaggacaatgggttggtcccaattgtggagccagagatcttgcttgatggggagcatggtattgatagaacttttgaagtagcccaaaaggtctgggcagaggttttcttctaccttgctgagaacaatgtcctttttgagggtattctccttaagcctagcatggttacacctggagccgagtccaaggacaaggccagtcctcagacagttgctgattacaccctcaagctccttcacaggagaattccccctgctgtccctggaattatgtttttgtctggtggacagtctgaggttgaagctaccctcaatttgaatgccatgaaccaatctccaaacccgtggcacgtgtcattctcgtatgccagagccctccaaaacactgccttgaagacatggggaggccgcccagagaacgtgaaggcagcacaagatgcactcgcattccgtgccaagtccaactcactcgctcagcttgggaagtacactggtgagggtgaatccgaggaagccaagaaggagttgttcgtcaaaagctactcctactaagatgtttgcagtgaatatgatacttgttaggcagcaacaccagcagttacagtaggtgttgacggacgatgaagtggaagactaatttgtctaaaatgtaatgtttttatagtcttggagactatttttgtttatggttaaatgcacctttacagcttaataaaccttttgctatgagttgtgt

SEQ ID NO: 7847 - DNA, 1100 bp, Glycine max
  Clone ID: 700685816_FLI
gtgtattctacttcagaaccaacaccatttcccagtggacctggcagtgacattgcaaaggacaccagaaacgaggaggtgtctatgcttgaaaatgtgtactggaaggagtttggacttcttgtttttgtttgggtttcattccttggaatacagattgccatgaaccagacaagcaaatgttcaacaatatattgggtactgaacatgttgcagattccaatttcagttggggtatctggatatgaggcagcttccttgtataaaggacggagacaaatttcttcagtgggagatcaagggaaaacttttacttctcagcagctaactatatattgtatctttggtgtattggctggaatagttggtggcttactgggaataggtggaggattcgtaatggggccactctttttggagctgggagtcccacctcaggtttcaagtgccacagccacctttgccatgaccttttcctcatctatgtctgttgtagaatactacctgctcaaacgttttccagttccttatgctctgtactttattgcggttgctgctatttcagcaattgtagggcagcatattgtgagaaagctgatcgatgtgcttgggagagcatctctaatcatctttgttctagccttcacaatacttgtcagcgcagtctcactaggtggagttggcattgtagcaatggtcaaaaagattgaaaatcacgagtatatgggatttgatgacctctgcacatatgattcatagcccatttcactaaattattttatgctttgttttgtctcaagttcccaataaaggagccaagagaacctaggtcgccaaaattgacttaaggtatgcttggattcccgtaaaaaacagtggacttgaaagcaatgcatacatgcttctatgtatttatctgggttttttgtgaggaaaaaaatgttagatgttggacactatttcaaacactcacttgtgctctgtgtgtgcctgggctcttgttaagaggtatgatatgtacatttatatttttgttgctgctaagacatgtattgatgacactgttgaagattgagaaactgaaatcatgttattttaat

SEQ ID NO: 7848 - DNA, 651 bp, Glycine max
  Clone ID: 700685819_FLI
ggaacgttagggtacattgcccctgaagttttctcaagaaacttcggtaacgtgtcttacaagtctgacatttacagctatggaatgttgttgctagagatggtgggaggaagaaagaatacaaatatgtcagctgaggaaattttccaagttctataccctgaatggatccataatttgctggaaggtagagactttcaagttactattgaggatgagggagatgttcaaatagcaaagaaactggccattgtaggacttaggtgcattcagtggaatccaagggaccgcccatccatgaaaactgtggtacaaatgcttaaaggagatggagatgatttaattgcacctcctactccttttgacatcactggttcttctagaacaaatgctcttgttccaacaagacgtcagaatttcgagttggaagttattcatgaaatagaagagtaaatgatgttgatagtctattatccgtataggcttattattctacatgttagtttatttttttcttattcttgcattaagcttctagaattatactttgagttttagtttctgacttcatgtctgaatagaagatgtattttatagaagttgtaagacctatcagcactgttaatagtctgttatccgtgtaagcttaac

SEQ ID NO: 7849 - DNA, 589 bp, Glycine max
  Clone ID: 700685831_FLI
gcgaatctcacaccgtatagtgatggccgagaccgatgttcccgagacgcccgctgcttcagagacgcccgctactggtccatctgtgaaggagtttacgctagaagatgtcaagtcgcacaatttggcaaaggactgctggatggtcattcgggacggaggtatccgcaaggtttatgatgtaacgactttccttgacgatcatccgggcggccctgagatcatggtagacgtagctggacaggatgccactgacgagttcgaagacatcggccattcgaacgacgcgcgtgcgcagctgaagcagtacgagattggtaagatcaagggcgacaccaagcagcaggtgccaagtgccagcacttcgtcgggacgacaggacattagcggtcaaaatggtccgctgtacgccgtggtggcggctgtggtggtctttgctgccttttacattcagtacaaatgatcggcagggtgtgagcaatggcagagcaggacaaacgttgcttggtgtgtggctggcagagcgccatgctgccacaaccttgtcacgggataactaacgttacatataacaactttttggctttgc

SEQ ID NO: 7850 - DNA, 1361 bp, Glycine max
  Clone ID: 700685876_FLI
attggatgtaagcaataatcatttggtgggaaagattccaagccttataaaaaacttgtcaggattgaacgaactttgtttgtctaataaccattttgaaggatccattccattagaacttggagaacttgaatatctaacttctttagatctctcccaaaataattttattggtcttgttccatcatttacaaattcttccgtggcatttatccatttgaacaacaatcgtttgagtggattgtctaaaagaatgttccatggaaactcttctttagtgatgttagaccttagctacaatgaaatatctaacaaccttaaagatctgatacataaccttagttataaaaggttaaatattctccttttaaaaggtaatcactttatgggggatataccaaagcaactatgccagttgatagatttaaacatgctagacctttctcataacaatttctctggtgttatccccaaatgcttaggtaaaatgccttttgagaataagaacccgaaggacttgttagcaagattttctatctttgatccagatctccatatccatgccgctgctctgtcgccatcaaatgtgcaagagaaagtgaatttcactacaaaggaaagaactgacacttacatcgggagagtccttgtttatatgtctggaattgacttatctcacaataaactgaagggaaatatcccatttgagcttggatacttgacaaaaattcgagcattgaacttatcccacaatgatttaactgggcaaattccagttacgttctccttgttggcacaaatagagagtttggatctttcttttaacatgttaaacagtcaaattcctcctcaattgagcatgttaacatcacttgaagtatttagtgtggcacacaataacttatcaggtccaacaccagattttaaaggacaattttccacatttgatgaaaacagctatgagggtaatccgttcctttgtggacttccactgccaaagagttgcaatcctccacctactattataccaaatgactcaaacactgatggagacaatgatagtttgttggatatgtatgttttctgtgtgagctttgccgtgtcatgcacatcagcattgttggtaactgcagcagctttatacatcaatccttattggaggcaggcatggttttactacatggaattggtgagcatgaattgctactactttatcaaggataatctgagcaaggttttcaaaattggaaatatgtaatatatcaagttgtatgtctagaatgatttccatgtgtttttgctaagtttgatagaataaaggttatgtataagttgtatgaaaataatatgcttcgtatatg

SEQ ID NO: 7851 - DNA, 1550 bp, Glycine max
  Clone ID: 700685906_FLI
tctgaatctgcaatggcttctctactcaacatggtttcggttccaccaagaatatcaccaacctcacacaccagaatcgcttcgcttcaagctcgacccgttttgccacccttttctgtctcattttccaggaggagactatcaattagagcaacagaaactgataccaatgaagttcaatctcaggcaccgggtgcagcgccatctaaagatggttcaagcttcaatcagcttcttggtatcaaaggagctgcccaagaaacaaataaatggaagattcgtcttcaactcacaaagcctgtcacttggcctccgttagtttggggtgtagtttgtggtgctgctgcctcgggaaattttcattggaattttgaggatgttgctaaatcaattgtgtgcatgatgatgtccggcccattcctgacaggatatacacagactctgaatgattggtatgaccgagaaattgacgcaataaatgaaccttatagaccaattccttctggggcaatatctgagaatgaggtaatcactcaaatatgggtgttgctgcttggtggtctttctctggctggtatattggacatatgggcagggcatgatttccctatagtattttaccttgcagtgggtggagccctactgtcttatatatattccgcgcctcctttaaagttaaaacaaaatggatggattggaaactttgcccttggagcaagttacattagcttgccatggtgtggtgggcaggtcaggctttgtttggaactcttacaccagatataattgttctcacactcctatacagcatagctggattgggaattgctattgtcaatgacttcaaaagtgttgaaggggatagggctctagggcttcagtctcttccagttgcttttggttctgaaactgcaaagtggatatgtgttggcgctattgacattacacaattatctgtagctggatatctacttggggctgataaaccgttttatgcgttagctttacttggcctaataattccacaagtcttttttcagttcaagtatttcctcaaggaccctgtgaaatatgatgttaaatatcaggctagtgcacagccatttttggtgcttggtttgttggttactgctctagcaactagccactgatctttgatgtgcaaaagttgccaaaggggcattaaattcatagaataaagatgaagggagccaccggttagaaggataagagtggcttctcttaggtacctgcattcaagatttgtggcatagcttttgttggccaccctacattcaaggaggagtatgacctaggcttgtccagtattgtgttttttttttccttatcttgttatcctcttttccacttgttcaagttttgattattttaggatgagaaggggtttctttttaggaagctttaaaagacaataaattgtacaaagggtagacacatacatgttattgttcccttgaatctgggacccttatgtttggcccatcattgatttgagatgaaaacgtgaaactttagttattgttctcgac

SEQ ID NO: 7852 - DNA, 1335 bp, Glycine max
  Clone ID: 700685957_FLI
gcctatgatatctcagacgaccaacaagacatcacaagaggaaagggtttggttgactcccttttccaagctccacaggatgctggaactcactatgcagtcatgagctcctacgagtacctcagcactggacttcgccagtacttggacaacaaaatggatggattctacattgctccagcttttatggacaagcttgttgttcacatctccaagaacttcatgaccctgcccaacatcaaggttcctctcattcttggtatctggggaggcaagggacaaggaaaatctttccaatgtgagcttgtctttgccaagatgggaatcaaccccatcatgatgagtgctggagagttggaaagtggaaatgcaggagagccagcaaaactgatcaggcagagataccgtgaagctgcagacatgatcaagaagggaaagatgtgcgctctcttcatcaacgatcttgatgcaggagctggtcgtcttggtggaaccacacaatacactgtgaacaaccagatggtgaatgccactctcatgaacattgctgataaccccaccaatgtgcagcttccaggtatgtacaacaaggaagagaacccccgtgttcccatcattgtcaccggtaacgatttctcaacactctatgcacctctcatccgtgatgggcgtatggagaagttctactgggcaccaacaagggaagaccgcattggtgtttgcaccggaattttccgcactgatggtattcctgaacaggacattgtcaagcttgttgacaccttccctggccaatccattgatttctttggtgcactgagggccagagtatatgatgatgaagtgaggaagtggatttctggtgttggtgttgacagtgttgggaagaagcttgtgaactcaaaagatggacctccaacctttgagcagcccaagatgactctggagaagctcttgctgtatggtaacatgcttgtccaagaacaagagaatgtcaagagagtccaattggctgacaagtacttgaacgaggctgctcttggaaatgctaacgaggatgctattcagaggggaactttcttccagtcttgaattggaggcaaagcaaacttggcaagtaaatatttctgttcgtgaaggttgttgtactaatccaagtgctagaagttgtgatggaacttgcgtgtaacattcttagcattctcaatgtcttaggtgcaaagagaagatgctaagtttgagatgatcttactatatttttcatattggaccgtcttcctctataattttgagttacagtgtccacttaaattgaatttggtgccttttcctttt

SEQ ID NO: 7853 - DNA, 1531 bp, Glycine max
  Clone ID: 700686007_FLI
tacaaacttcctttcaagtgtgatgattcatgcaacccgaccttttgtggttaatgaatggattcaaacaaagattgaaggatatgaggtttctggtacagtcgagcatgttggctggtggtcaccaacaattattagaggtgaagatcgtgaagctgttcacattccaaaccacaaatttacagtgaatgttgtgcggaaccttagtcaaaaaacacattggcgaatcaaaacccatctagcaattagtcatttggatgtaaataagattaataacattgttgccgacatgaggaaagtattagccaaaaatcctcaagttgagcagcagaggttgcacaggagagtgtttttggacaacataaatcctgaaaatcaggcacttttgattctggtgtcttgttttgttaagacctcacattttgaagaatatctgtgtgttaaggaagctatactgttagatcttcttagagttattggccatcaccgagcccgacttgccacaccggtccgtaccctgcagaaaatatacagtgatgctgacttggagaacataccatttgcagattcgacatttggtcatggtgctgggacagtacctcaccgtccattattagtgattgaaccatcttacaagatcaatggagatgataagaaaagtcgagctgcacggccagctgttgatcaagataacaagacagctacgcaaaccaaagttgacaccaagacacacaacgtggctagaggaacccaggatgacactgagggggataacaaagttttgacacctaactctgatgcaaatggaaactctaagacagttgtgacacccaaacctgatcctgaagtgggtgaaaacaagccattgaaatcagattcaaacaaggagaacgtggaggtgccagaatctccttctaaatccaaagttactggtttggtagtggataattcagcccagaaggacgtagatgtcaaacaatccaaggttcagatcactaaaaacataaagccaaatattgactctgacaatgtagtgtcctcctcaactaacaatgctgacaaaattggtggatttaatacgaatatgccaatgaaacagcaaggggaaaagaaacctgctgcacaggctcatgcatccaggactgttctggaagagaatatagttctaggtgttgcattggagggatcaaagagaacacttcccattgatgaggagattgacaatgtgacatgtcgagaggcaaaggaaatggctgctttgcagggtggaaatggatctccaaaggcttcagatggaaatgacaagtagttattaaagcagtgagttcaacttgtttgaaagctcaatgttccaagtccagtagtacactgctttgaaccagtttcccacccctaggaagttgtatatattatcacttcatgtgtcacacaccccttttacaaaggactcgagctgtattgtcatatcatttcattatttttgctgtttcagcaatatatggagaagggctttctccaatttttcgattat

SEQ ID NO: 7854 - DNA, 610 bp, Glycine max
  Clone ID: 700686070_FLI
gcaggggaaaatgcacttgcaagatatgaccgtgaagcttataatcaaatccttttaaatgctagaccaaatggtgttaaccaatttggtcctccaacactaaaaatgtatggtgtcacataccttcgtttgtcagataagttaatgcagcaaacaaactttaatatattcaaagcctttgtgagaaagatgcatgctaatctggaatattgtccagacccagagaagtactatcatttcacagtacctatggagcggtcgaagcccaagattccactagaagttcttcttgaagcaaccaaaccagtggagccttatccatggtataaggaaacagacatgagccttgatgttactggttttcttgattatatagttgctattattgtacgtatattcaagctaaaattaaactaaaaacgacaatgaaaaagaaggaaggaattaaggaacaatagaaaagtaaaggatatatatatgaaaggagaagcaaaatgtgaaaaagggagttacaattggttctgctccaagcctgctacactgccatgccaatcacaaagtggagatgagaaaatagcttaaaatagtttgcttccttgcagcacccaca

SEQ ID NO: 7855 - DNA, 1735 bp, Glycine max
  Clone ID: 700686073_FLI
gcataaccaataattgaatttgaatcatttgggtctctagacacaaacactaccccctctttccccctcctcaacattgttatgatcccttgttggtaaccattccatttgcacttgtctttgcaaccaaaaaacaagctctatgaccaacgaaatgaaagaagcaagtgccttaggagctagaacagcacgagcatgcgagagctgcctaaaagtaagagcacggtggtattgtgcagctgatgatgcattcctttgccatggctgtgacaacatggttcactcagcaaaccaattagcaagtagacacgaaagggttaagcttcaaactgcatcctctaaggtcaactactcagtgacccctaaggtagcatggcacagtggattcacacgcaaggcaagaacgccacgccacaacaacaacagacactcatcattgaaacaacaacaacaaaaaaaaccattacatgaagaacgaggagaggaagaagtgtttttcaataacactattagtcttcttccccttgtgcctgagcttggaagtgaagagccattgcttaatgatgagactgaggagcaactactgtgtcgcgtgccggtgtttgatgctgagctgtgtagcatatacaatgaagtgaaggacgaggttgtagctgctggtgaagaagccttggacttggaaaacttttcttccgagtttcttccatcagatacggaccttgctgagtttactgctgatgtgaaaagctttcttggaaacggggctgatgaggattcacctgatgatgatgagcacgtgaaagaatcagaactactgattcttgattgcaaagaagaagaaggagatgaggaaatggatgaatgtattgatggagtactaattggagccaaagatgcaatggtgaaggtcaaagatgaagaagaacttgatgctgatgatgacacagcttgccatttggattcgattcttgatatgaacggcgaggcatttaattggaatattgttgaatcagaatcacctgcacaggcacaagaagatgaagtgagtaaagtgggaactaagaaggacatatttttgagattaaactatgaagaagtcattactgcttgggcaagtcaaggttctccatggactaatgggaccccacctaagttcttcaactctgatgattgctggctagacttcttgggttcgaatggtgggaatgttcaatgctgttatggggcagtgggaagcttaagggtgcatgcagatgggggaagggaagcaagagtgtcaaggtaccgagagaagagaagaacgcgtttatttgcaaagaagataaggtatgaagtgaggaagttgaacgcggagaaaagacctagaatgaaaggtcgatttgtgaagaggacaccctttgttggagccactgcgttgccagcttaatcatcaatcaccactgacatgattgatcatcaaagtgatcaaataaatggttaacttttccaagtttgattttatggaaaagttagtttgattaattattagttactaggttttgccatgtatgtacattatcatcactaggtcaggtttctcttgcttgggatatttattgctttctctagcaggtctagctagtactaatggaaatggtagcccctctcagcatgttgaagactttggtaatcaatttcgggagccctttttcaatgttgcttaattatgatatatataagaatctgtaattaatct

SEQ ID NO: 7856 - DNA, 710 bp, Glycine max
  Clone ID: 700686108_FLI
gagaagtaggatggcctactgaaggggacaagaatgccaacgcaggcaatgctttgagattctataatggccttctgccaaggcttgcagcaaatagaggcaccccaggccgccctggatacattgaagtttatctatttggactcatcgacgaggatgccaagagcattgcgccaggaaacttcgaacgccattggggaatattcagatacgatggacaacctaagtttccaatggacctttctggtcagaaccaaaacaaatttctcataggtgcacagaacgtgaaatatcttgctcctaggtggtgcatgtttaatcctgatgccaaggatctcagcaaacttccagataacattaactatgcttgcacctttggagattgcaccgcgcttggatatggttcttcgtgcaacaatttggatgcaaatgggaatgcctcttacgcgttcaatatgtacttccaagtgcaaaatcagaaccccatggcatgcaattttcaaggtttggccaagcttacaacggataatatctcaacacccacttgcaattttatcgttcagatagttaattcttcagcctcttctttgatgatgccctcactagttgctatcttgtttgttagtttattcttgattctgttttcttaggatttctttgtacatacattagagatgttattttttatttatggtttcattatttcttgg

SEQ ID NO: 7857 - DNA, 787 bp, Glycine max
  Clone ID: 700686111_FLI
tgaaagcatgctgggtggtagtgctatgccagatcctgctttattgacccagctaatgcaaaatccagctatctcacaaatgatgcaaagtatgctttccaacccacaaacattgaatcagattcttggtgctaatactgagcagcgtggcatgcctgatttaaattctcttagagaagtaatgcaaaatccagaattccttcgtttgttttcttcacctgagacattgcagcaactcttgtctttccagcaaactcttatgtctcagcttggccagcaacaatcaacatgggaatctggtcaaactggcggaggcactggaccaatgaacaacttgggattggagatgttatcgagcatgtttggtggacttggagctggtagcctagctgttccaaatagatcaaatgagccaccggagcagctgtatgcctcccaactttcacagcttcaagagatgggattctttgattcacaagagaacattagagcccttattgccacttcaggtaatgttcatgccgcagttgaacggctattggggaactctggtcagtagcggacaatgttggcaagttctcttctgtcgatttccacggttggtcactatgaaatcagtggtgttcaagtgccttgttgaatattaaataaaatcagaaatctgtccaaattatagtggtcagagctgaaatggtgtaggttatatacattggactgtgattgtttcttctaatggtccacttttcttcatgtacatacttaaattgaaactagttttagacgcagc

SEQ ID NO: 7858 - DNA, 1134 bp, Glycine max
  Clone ID: 700686133_FLI
attgctccagcttttatggacaaacttgttgttcacattaccaagaacttcatgaccctgcccaacatcaaggttcctctcattcttggtatctggggaggcaagggacaaggaaaatctttccaatgtgagcttgtctttgccaagatgggaatcaaccccatcatgatgagtgctggagagttggaaagtggaaatgcaggagagccagcaaaactgatcaggcagagataccgtgaagccgcagacttgatcaagaagggaaagatgtgtgctctcttcatcaacgatcttgatgcaggagctggtcgtcttggtggaaccacccaatacactgtcaacaaccagatggtgaatgccaccctcatgaacattgctgataaccccaccaatgtgcagcttcctggtatgtataacaaggaagagaatccccgtgtgcccatcatcgtcaccggtaacgatttctccacactctatgcgcctctcatccgtgatgggcgtatggagaagttctactgggcaccaacaagggatgaccgcattggtgtctgcactggaatttttcgcaccgattcaattcctgaacaggacgttgtcaagattgttgacaccttccctggccaatccattgatttctttggtgcactgagggccagagtatatgatgacgaagtgaggaagtggatttctggtgttggtgttgacggcattgggaagaagcttgtgaactcaaaagatggacctccaacctttgagcagcccaagatgactctggagaagctcttgacgtatggtaacatgcttgtccaagaacaagagaatgtcaagagagtccaattggctgacaagtacttgaacgaggctgcacttggaaatgctaacgaggatgctattaacaggggaactttcttccaatcttgaattggaggcaaagcaaacttggcaagtaaatatttctgttcctgaaggttgtgctgatccaagtgctagaagttgtgatgggacttgcgtgtaacattcttagaattctcaatgtcttaggtgcaaagagaagatgccaagtttgagatgattttactatatttttcatattggactgtcttcctctataattttgagttaaagtgtccactt

SEQ ID NO: 7859 - DNA, 952 bp, Glycine max
  Clone ID: 700686151_FLI
cacgattctcccgctattccacactgtccaatatgtctttcgaaaccacaggtaccattgcctcctttgggggcaagcttctcaagttgaagcacaagtccgagagcacaaacacagacatggagcttaacatgttcctacctccgcaagcactcaagtccggagccaaggtccccgttctgttctacctctctggactcacatgtaccggcaacaactgctcggagaagggcttcttccagcacggcgcagctaagcacggcattgccgtcgtataccccgacacatcaccaagaggtcttcagatcgaaggtgaagatgaagcatacgactttggatctggcgcaggcttttacgtcgatgccaccaaggacccatggtcgaagggctacaagatgtactcttacatcaccaaggagcttcctgaagcgttgttctcatccttcaaagaactcgactcgagcaaagtcagcatcacagggcacagcatgggcggtcacggcgcattgacattgttcctcaagaaccctggcatgtacaagtccgtctccgcattcgcccctatcgccaaccctatcaactgtccgtggggtcagaaggcattcaagggatactttggcgaagaccagcaacaaaagtggaaagagcacgatgcgtcagagctggtaaagcaatggaagggtcctctggaggtgctcatcgacgtgggcaccggagacaacttctacaagcaaggccaactacttccagagaacttcgtcaaggcagctaaggaatctggcaacgacaagggcattcaactacgtatgcagcccgactacgaccacagctactacttcatggctacatttgccgatgaccacgtcgagtgggcggcgaagcatctgaacgcgtaaagcggttcgggtatcagagagaaactatagaacataatagaatccaattcgtacac

SEQ ID NO: 7860 - DNA, 684 bp, Glycine max
  Clone ID: 700686166_FLI
aaaccaggttcaaaggcgacttctagatgagtccatcgccgacgaaccttctgcagcagtttcaaagccgtggattgaactttattgtggtgcagtctcttcccacgtttcagttcaagaaaaacgagagagaacaagacaagacaattagtgtggagtgtgccatctgcctcggagagtttgaagaaggggagtggctgaaacgtcttccacactgcagccatagtttccatgtttcatgcattggtacgtggtttcagtcgcattcaaattgtcctctttgtagatcttttgtgcatcatcacatcctacagtgttctatagcttctcacacattgctacagcctttgaggagggaggactttgaaagggttcagagataaaagtagctaccctttttgttgtttgcttttagttttgatattttcgtgaggtgaagccttgttggaaaatagaatttggatgcaaagctaacagctaaagaaacctcattttaggtgggttataagagtgtctaagcgtacataacgaagcttctattgtgttttgtgagtattgtcaatcataaggcgtaggatgattatacaagatgtttcggagttcaatctcaaatttgtagatccacgaatcatgatcaacataactgttgaaatcaagatttagcatactttatagttacaacat

SEQ ID NO: 7861 - DNA, 860 bp, Glycine max
  Clone ID: 700686201_FLI
gaacagttacatgtcttctgtgaggaaaatggcatgtgagattcttgagctgatggcagaaggattgaagattcaacaaaaaaatgtgtttagcaagcttcttatggataaagagagtgactctgtttttagggtgaatcactaccctgcttgccctgaacttgtgaatggtcaaaacatgatagggtttggagaacacacggacccacaaatcatttctctacttaggtccaacaatacttcaggccttcagatttttcttagagatggaaactggatttcagtcccacctgatcacaaatctttcttcataaatgttggtgattctcttcaggttatgaccaatggaaggtttcgaagtgtgaaacacagagttttgacaaatggatttaagtctagactctcaatgatttactttggaggtccaccattgagtgagaaaatagtaccattatcttcacttatgaaaggaaaagaaagcttatacaaagagtttacgtggttcgagtataaaaatttaacctatgcttcaagattggctgataataggcttggacattttgagagaattgttgcttcataatatgctaaaggattacgggggcatttgtcaatacaaaatggggggttacaatatatagtctatatactatatatgtttttttttcaactttaaggttatttatcaattagaatgcttcatagacgatagaatatataccccttttgcttttgcttcaacactagtggatgacgtctgatgtagtcaacaatggagatttgttaatgattaaaagcttgattcaaattgcaataaaacattataagaataaagtatatattccatgcacaattctccc

SEQ ID NO: 7862 - DNA, 938 bp, Glycine max
  Clone ID: 700686205_FLI
gctaaaattgcagattttggtttggccaggtcctttcaagaggacaagagccacataagtacagctattgcaggaactttggggtatatggctcctgaatacctagctcatggtcagttaacagaaaaggcagacgtatatagttttggagtgttgctgctagagatagtcactgctagacagaacaacaggagcaaagcatcagaatattcagacagcttagttacagtggcatggaagcattttcaggcagggactgctgaacaattatttgatccaaacctagacttgcaggaagatcacaatagcaatgttaatgttaaggatgagattttaagagtggttcacataggacttctatgcacccaagaggtctcttctttacgaccaagcatgtcaaaggcactgcaaatgctaacaaagaaagaggaggatcttgttgctccctctaatccacccttccttgatgagagtaccatggaacttcatgacacaagtggtgacccattttatcctcttactgcacctgattcaattgccactatgtcccatagctctttttatcccaggtgaccaagagaatgcagagaaaatccctgacatgacatgtcggcagcgcagcttgtgattggcaaataacttggtctgcctcagaaatcagacctatgtcacttaaggttgttaacaaagcaatcgatcctttgctatttaaaatacatacttaagacacggggagattttgagccaaatgtccaatacggttatgggaagcaaacagtgtatactgtatagttccatgattaacattattaaacaattttagattaatctgatatatgtaacaagtcataaatactacgtttggatacaactattaattcatttgcgcaagaatagttttcaatgggaaaaatataaagcaaagattgtaagctttt

SEQ ID NO: 7863 - DNA, 2423 bp, Glycine max
  Clone ID: 700686212_FLI
gtagtgtgctatgaagacaccataacacagcttcacataataggtgaaagaagagatacacctctccctcgaaatttctcaatagattcctttgtcacaacactagtaaggcttcccagtttgaaagtcctcacattggtttctcttggtatatggggtcctttgcctagtaagatagctcgtttgtcatccctggaaatagttaacatgagttccaattttctctatggttcaattcctcaggaactttcatcactgtcaagtctccaaacactcatttttgacaacaacatgttggctgacacgtttcctcattggcttgattcacttcaagccttaactgtgttaagtttgaagaataacaagttcaatggatctctaccaaaatcgcttggtaatgtggagaatttgagaaccctttcactttctcataatcacttttatggggcggtgcctgatttgagccgtttgacgaatcttcaagtgcttgaattggatgataatgcttttggaccgcagtttcctcagctcggtaacaagttggttatactagttctaagaaaaaatagcttcaggtctggtattcctgctgaattgagttcatactatcagcttgagcgattggatatttcatcaaattcatttgtggggccttttcagccaggattgttgtcacttccttctattacttatctgaatatttctgggaacaaattaaccgggatgcttttcgagaatctttcttgcaattctgagcttgatgtagtggatttatcctcaaatcttttgactgggagcttacctagatgtttagtgtcaaattccagcgatagcactgtcctgtatgctagaaattgtctagacaccacgaatcaaaatcagcagccgcagcccttttgccacactgaagctttagctgtgggaatattacctgagacaaagaagcacaaacaagtatctaaggtagttctttcccttggcatagtaggggggactcttggaggagtagcacttgttttgctagttttctttattgttagaagaggaaatgacagaagcaaaacgaagaatcctccaactagattaatatcagaaaatgctgcgtctggttacacatctaagttgttttctgatgcaaggtatatatctcaaacaaagaagttgggagcagttggcctgccgacttatcgaagtttctcattggaagagattgaatcagctacaaactattttgacacagcttctttaatgggtgaagattcttatgggaagatgtacagaggtcagctgaagaatggctcacttgttgctattcggtgtgtagaaatgaaaaagagacacagcactcaaaactttgtgcaacacatagagctgatatccaaacttaggcatcgccatctagtcagcgctattggacactgctttgaatgttctttagatgattcaagcgtcagcaaagtatttcttgtcttcgaatatgtaccaaatggcacgctcaggaattggatctctgatgagcatgctagaaaatcctttagttggactcaacgcataggagctgcaattggagtggcaaagggaatccagtttttgcatacagggattgtccctggtgtatattccaatgatctgaagatagaagatgttttattggatcagaatcttgttgcaaaaatcagcagttatcacctgcctttgttgtcaaacatggggaaggttcggcgtggaaattcttccagtggattaaaaaattcaagcaatagtaaaagtgtaaagcaggaagataagtctgatatatacaactttggagtgatactactcgaacttattctaggaaggcaaataaagacagtaaatgatgcagatgcttttagggatctgttgcaagcaagcttaggaggtgatgaagagggtaggaggggcgttgttgatccagcatttcgcaaggcatgcttggatcaatcattgaagacaatgatggagatttgtgtgaggtgcctggttaaagagcccgcagataggccttctatagaggatgttttgtggaacttgcagtttgcatctcaagtacaagatgcatggagaggggattctcaaagtagtgaagggtcaccaggctcagaatctcgagggctacccttccattagtgtcaaaccacaggttttcactttttttattttgtatatttcactgtaagcctaaaaggttaatgcttgcagttgcagatacagcagcatcagaatagtataagttctttatgttggaacacctttgctaaaaaatctgctgagcttccaatgaaaaactatgttgtccgagctttgcactatgcagatttttttttgtttttaagtacatgcacccgtgcacatactatgtgagattacgtatatgaatcataagatgtcattaattaaaggtc

SEQ ID NO: 7864 - DNA, 1206 bp, Glycine max
  Clone ID: 700686353_FLI
tcttcattcatttattcttattcatcttttcattcactcactctcactcatggctgaagatgggaacaacaacgatgtacccttacacaaattcaaagacagcaatccaaaccctgaagagttcgatgcaaagggttacagcctcagcggaaaaatcatgctttcagcaataatccttcttttcttcgtcgtcgttttgatgttgtgccttcatatctacgcgcgctggtacctccggcgtgctcgccgccgccagctccggcgccaacgcgagctccgccgcacccagcttgtcttttacaacgacgacgccacccccgcagccgtgtcacgtggcctcgacgccgccatccttgccacgctccccgtcttcaccttcgacccggaaaaaaccgggccggagtgcgctgtttgcttgtcggagttcgaacccggtgaaacgggtcgggtcttgcccaaatgtaatcacagtttccacatagaatgtattgacatgtggttccattctcatgacacgtgtcctctttgtcgcgccccggttgaacgcgcgccggaaccggaagttgttgttataacagtacccgatccggtttccgaaaccggttcaggcgaaaatgagaaccgaaccggttcttcttcttcttcctcttcggttggattgagtaagcctaagccttcgttggttggtgtgacaattgaggtgcctccgagggacgagaattttcaaaacgagttgcaaccgagttgcgactcatcctcctcgtttcggtcgccgatgagtcgcatgctgtcgtttacgaggatgctcggcagggaaaagaaggggaacgtgtcgccgtcgtcgtgcggcggcggcgattgtagctccgccgcggagcgaggtgagcgagaggagactcagtgagtcggtgactcgggtgctgacgtggcacttgttggaagcggaaaaacttgggttgttggcgcgtggcggtgtgtaatagtgacgtttctggattttaatgtaggcggtgagcggcgcgtgagttaggtggcgcgagatactgacgtagaatggttttgggatgaacataaatgatgtacttattcgttgatatatatattttttctttatttgtttcttatcttcgggttccaaaaatagttaaatagaatacgaaaattgctaattgtaatgcttgcttacatagaaatgaaaccaatttt

SEQ ID NO: 7865 - DNA, 522 bp, Glycine max
  Clone ID: 700686371_FLI
gcctcagttgcatcgaagagagagagagcgagagagagagagagaatggcagcacttggtggcaatcgtgatgtggcaggaagccagaacagccttgagatcgatggtttagctcgctttgctgttgaagaacacaacaaaaaacagaatgcccttttggagtttgaaaaggtagtaagtgcaaaacagcaagtggtttctggtaccttgtacaccatcactttggaggcaaaagatggtgggcaaaagaaggtttatgaagccaaagtttgggagaaggcatggttgaacttcaaggaggtgcaagagttcaagcttgttggagatgcacctgcatagtctagtgcttaattaggttgcagaagagtgaagagtgagacagcctggctcgaaggggaaagcctaaggatatatcaaagcatgctatatgtataaaataaatgtagcttttctaccttcggtattgatatttgaaatcgtgatttggcatcttatatatgatctctgtgtttgtctatacct

SEQ ID NO: 7866 - DNA, 1321 bp, Glycine max
  Clone ID: 700686385_FLI
tgaaaaatgggaaagttgttgcagtgaaaaaattaatttcaggaaattccagcaagatagatgacgactttgaaagtgaagtaatgcttataagtaatgttcatcatagaaatctggttcagcttcttggttgttgcagtaaaggccaagatagaatccttgtctatgaatacatggcaaacaacagcctcgacaaatttttatttggtaactaattaacatgtcaatttccagtagaagcattaagttttactttgtttcccttctattcttctcttaagttttgagcatataaacatgagagacaggtaacagaagatgttcccttaactggaaacaacgctatgatataattttgggcactgcaaggggattgacttatctacatgaggaatttcatgtttctatcatacatagagatatcaagagttgcaatatcctcttggatgaagaacttcagcccaaaatttctgattttggcttggtaaagctccttcctgaagacaaatctcatctcagtacaagatttgcaggaacagtgtaagtcaataaattaccaatgactcagcttgaaatatttaaagggtaaaatgtattacaccgatatgctatgcgtaatagtctcatgatttcttagtattatatatggtataaatgaaatgcacttgtcaggggatacacagcacctgagtatgcactccatggtcaattatcaaaaaaggctgatacatacagctatggaattgtagtgctagaaatcataagtggtcaaaagagtactgatgtgagagttgatgatgatggtgaggaagagtcccttcttcgacaagcatggaagttgtatgagagaggcatgcacttggagttggtggacgaaaccttgaatgataactatgatgcagaagaagtgaagaaaatcatagaaattgctttgttgtgtactcaagcatcggctgcgatgagaccagctatgtctgaagtagtagtgctactcagtagcaatgcacttgagcatatgagaccttcaatgcctatctttattgagtctaaattaaagccccacagagatatttttgcctcaactagttcctctacatctaatgctactgcctccagttctatagtacctgctcgatgattaattatgtatatgatgcacatgttagaggggcagaatgatgttgtagagcatacagatgcatgataagtaattaaagtttgttgtgatgattaattggtagttgtaattagttattcctggtagcactctttggtagtgttggatgtttgtataaatgccatacatagatttgttgcactg

SEQ ID NO: 7867 - DNA, 1050 bp, Glycine max
  Clone ID: 700686419_FLI
attttgtttcttaatatggtgaggctgggggaatcaattggggataggtggatgaataaggaaagcttggtctgattagtctatactatatgccttgctattccactttttctgagtttttctctgcactcctttgctagctaccctctcttttgggcttttttgggccttcaaatcttgcttggagaaggctcaattttggtggaaacctctcacacaagaaagcatagtttcttttgggttcattctacttggtgtttagagatggtgagaggaaagactcagctgaggcgcatagagaacgccacaagcaggcaagtcaccttttcaaagcggcgtaatgggttgctgaagaaggcctttgaactttctgttctttgtgatgctgaggttgctctcatcattttctctccaagaggaaagctttatgaatttgcaagctcaagcatgcaggacacaattgaacgataccgcaggcataacaggagtgctcaaacagtgaacagatctgatgaacaaaatatgcagcatttgaagcaagaaacagcaaacttgatgaagaagattgagcttcttgaagcttcaaaacggaagctcttgggagaaggtttggggtcatgctctttagaagaactgcaacagatagaacaacagttggaaaggagtgtaagcagtgttcgtgcaagaaagaatcaggtttacaaggaacaaattgatcaactaaaagagaaggaaagagccctatatgctgaaaatgctaggctgtgtgagcagtatggtggtatccagccacagccagcaacaaaggatccgaaagaaattcaaccctatgcagaaagcagtccaagttcagaagtggagactgaattgttcattggactactcaggtctagctattgaacataatttaatccttgcctatgcaaatatcaaataagaagcccaactgcaatgtataaatatcacatgtttcctaatactgagatgaataatattatcgcttgtattatataaagaactttctagccttatgattagggtttaattatt

SEQ ID NO: 7868 - DNA, 452 bp, Glycine max
  Clone ID: 700686436_FLI
ctcaaagaggaggccaagaagggtctgagtttggggaacaaacccaaaatgcacgagtgttccatttgcggcatggaattctctctgggtcaggcactggggggtcacatgagaaaacacaggggtgccaccagtgagaataataacgaagcgttttcttcttctataaagcaagcaatttcaaaagttccagttttgaaacgatcgaatagcaagagggtcatgtgcttggagatggacctgaatttaacgcctttggaaaatgacttgaagttgttgttcggaaacaaggctcctagagtcgatctttctttgtagaggattattaattaattcctgtattctttggattcattactattgtttaaaaaattgtcattgacttctttcagttcttcgtgtagatcgattagttttggaattgatttcgttgtatagttgattgattgatt

SEQ ID NO: 7869 - DNA, 2285 bp, Glycine max
  Clone ID: 700686571_FLI
ctgacaatggagtatgttcctgggattaaaataaacaaaatacaagctttagaccaactgggtgttgaccgcaaaaggttagggagatatgcggttgagtcatacttggaacaaattttatcacatggtttcttccatgctgaccctgtgagtttgtacttttagaatcaatatcagaaatctctttatatattatgttacattatatatggattagctatctggtaaattgtatagtaaagccaaaatgttaactgtctttgaacttgctcttatgttgcaacgttagcatctattgtctgagcaatgagatgtacgctacttgtgttttacaattattattcttttgctagtctgcttggttgtattttgacaatctcaggctatctctctcactaccttagagcaactgttattgttaagcaatccttaagggtcctgattggttttggtctacgggtataaagcaaaagggctttagggaccttgggactcacaggtattggattcctatcagatgatcttgtgtgtaacccatagatgtttacattgttcctgcagcatcctggaaatattgcagttgatgatgtcaatggtggaagattgatcttctatgattttggaatgatggggagtatcagtccaaacattcgagaaggtttgctcgaaacattttatggggtttatgagaaagatccagacaaggttctacaagcaatgattcaaatgggagttcttgtccccactggagatatgactgctgttagaagaacagcacaattcttcctcaacagttttgaagagcgcctggctgcacaaaggagagagagagaggaagcaacaactgaacttggattcaaaaaaccattaagcaaggaggaaaaaataaagaagaaaaaacaacgtctggctgctattggtaatgcacctggtgtataattgaatgcatatttaagtttaggctatataaatgtgtgcttgtaagtattattgttgatttatctgctgtatgtgaagataaaaaatgtgttggggaagagtatataatatgcaggctatctcccacccagctacaatataggaaggaattgggagagattcggacctcttgaatgtccaggactgttcttaacaaaaatcattccttcatttgtatctgaaccagtttctatcagatactcagctgtcttgctttaagcaggtgaagatttattatctattgcagcagaccagcccttccgatttcctgctacattcacatttgttgttagagccttctcagtgttggatggcattggaaaggggcttgacccacgttttgacatcactgagattgccaaaccttatgccctggagttgctcaggtttcgtgaagctggggttgaagttgtcctaaaggacttcaggaagagatgggatagacaatctcaagcattttacaacttaatcagacaggctgatagggttgacaagcttgctaacattatccaaagactggagcaaggtgatctaaagctgcgagttcgaactttggaatctgagagggcattccaacgtgttgctgcagtccagaagactatagggaatgcagtagctgctgggagcctaatcaatcttgcaacagttttgtatctcaactcaattcgtgtgcctgccattgcagcatatatcttctgtgcaatctttggttttcaagtgctcttgggcattgtaaaggtcaagaagctagatgaacgggaacgattgataacagggattgcatgagcagctacatgatttaggaccgagaaatagcacatgttacggtcatggttgcaagtcaaccttcagaaaaggattaaatgacctggggagctgatagaaagcattacccaacatttcgaaagacttcagcaagtacaaaaatttcaagcagcaaatgatgggggctttctccattcacctgtttctgttaataaaaaaaatgtgctctacgatagccaaattggcttagagccacatttttgtcatacaccccacctctcccaaaaaattataaatataagttattgccgcatagtaacttgtataggtatgatatagagttttcatatattcacaattcacaattacattccacgcccgaattggaccaaaatctgtcaaaattcagctactagtatttttctatgtagcatgacccttattgtaattaccatacggtataatgcagcttccgacaaaaatttggagggaagctctgccccaaattgactaacataaatgaaaaaatgtctgcttgtgtc

SEQ ID NO: 7870 - DNA, 2021 bp, Glycine max
  Clone ID: 700686586_FLI
aagaaatattttacttgcaaaacatacttcaacatcatattctgaagcatgaacaattcagaaatattctcaacaacaaaaaagaaatctaggagctttggtattgagtcaataattgaacgagtttatttacacaaccaaaagagagagaaagggaaataatttctcaaagcatcaaaacctttaaattttccaaggataccatagattttcttcgccgctgaagacaacgacggctccctccactccttctacgtcaaatccgtcaaggaaatgccctactacatctccgtcctccaaatcagcgccgccgactccgaggcacccaccgccgccccctccgccatcgacccgatctccattatgtccaaacaaggctgcaaggccttcacggaccttctaagaggctccaaggcccttccatctttcaaggaaaacgttgacggcggcttaacggttttctgccccacccacagcaccgtcagcggtttcgcggcaaagtacaagaacctgaccgaagctcagaaggtttcacttctgttataccacacgactcccgtatacgagtcactgcatatgctcaagtccagcaacgaaatcatgaacattctggccatagagggagcgaacaagtacgacttcacggtgcagagtgaaggggaagacgtgaacctcaagaccaaagtcaacacaacagtgtacatgacactgaaattatcaataataatacagtgtgctaacacttatgtaaatataggaactactttttacatttcaaaaagatagaaactaatttgcaaaaatgagtataaagacaaattcattccaaattacaatacttggcctttgctattaagtgtcaagacttcattcaaatgttttgctaagaatcctatggcaaagtatcagaagaaataatagtcctacttgctctcattgtggggtccacggtcacactcattgttgatcattgcttaagttacatggattccctcccactcccaattataagttcaagtcaatatcttctcagacacaatctgtgaattccgatgctactgccactcagaatctttaccctttttgtccaaacaattatcacattgtccacttctattttgaattcaattcacaccacttcttggattctagattcagggacaacttccattatatgccatcttaggaatttctttctcactctccaaacattagacgtttcttatgtttttcttcccaacactacaaaagtacctgttgctggaaattgtcagcgttcaagttaaacaccttttaatatttagtgttctctacatacactctttcaaatttaatatgctgccattaagctcttcgttagactcttatacttaaagttttcacttccgagttcttagattgcgaagggtagcattcaagatggactctgtattcttcagactggttccactatattagtactcaagatttgttcatttggcctataaaattttcaatccaataaacaataaaaacaatataattttttataagcatcctacatatgcattccattgtcaaataggttaccgtttcattccgacaatcatttttttgatagtgtgtttgatttaatccacactgctagtagatgactatagcaggtttacctggctatttctaaagaaacacaaatcagaagctcctactataattacacagttttatgcctatgtagagaatcaatttgccactaacataaaaagtttctgatttcatagactataaatagaattagctatgacagacttttacaccaaaaggtgttacttatcagttctccggtgtggaaatgacctcagcaaaactccatagctgaaagaaaacatcatcatctccttaaagtggccatatctttacaattccaatcacatgtgcctatctcattttgggggtattgtgtctacacttctgccttcatcaccaattggcttccttcaacagttttgaacaagtctttatttgaacttctttatcaaaag

SEQ ID NO: 7871 - DNA, 1066 bp, Glycine max
  Clone ID: 700686588_FLI
atcaattttatggactcttctcagcttatgcacctcaaatttcgggacgtataatgctgccacttaacatgacatctgatgatgaaccaatttacgtaaatgctaagcagtaccatggaatcattagacgtcggcagtcccgtgccaaagctgtacttgatcacaaattgactaaacgtcgcaagccctatatgcacgaatcacgccatctccatgcaatgcggcgaccaagaggatgtgggggtcgcttcttgaacactaagaattctgttgacggaaatggtaaaattggaaatgaagtgcataaaactgttggtgaacaattgcagtctagtggctctcagagttctgaattccttcaatctgaggttggaacttttaattcatcaaaagagactaatggaagcagtccaaatatttctggttcagaggtgactagcatgtattcgcggggaggtcttgacagcttttctctcaatcatcttggatctgctgtccactcttttgcagacatgatagatggtgggcgcggtatgatcatacccaccaaatgggttgcagcagcaggtaactgctgcaaccttaaagtttgatttgcaaagaatcaagggtgggcttgctgtagcattgcaccaggcccatcctcgatgaggccagatgaagaagcttcgtttcagttgcgtgtgctgactgtgacaagtttcgctcggtaagatcgtcctcacatctggtctaggcaatccatccttggctcatactttggcaatccatccttggctcattgtaactgaaggcaactcatccttggcttgatgtacttgcagtaatttgtctttctgcacaggaatgttgttggcatggtacaaactaatgacttgatatcctgatgcagaagacaactatgtttctgtctttgtgtgaaaatgaaagcatgaaactctagttatgtgtgcttcgaataatgtctaaacgtggtgttgtattttgtatttctgacttcgaggaacaatgtattatagaaccttgttctgtggtctttgttagaaaaaataaagcattggtgtgt

SEQ ID NO: 7872 - DNA, 809 bp, Glycine max
  Clone ID: 700686618_FLI
cagagccattaaatcttctctcaaaatatttgtgattccatgcccaacgccctaccctgaaaatatggtagccgagagagaggttaacggtaacggcgtcggagagggaagaacaacgctaatattcacctacggaaccctgaagcgaggcttctccaaccacccccttctccaagacctcattcgctccggcgacgcctccttcgtcggaacctaccgcaccgccgccaaatatcctctggtctgtgggccctacaaggtccccttcctcctcaacattcccgggtcgggtcatggggtccatggggagctttactcggtctccacgcgcggcctcgagcgcatggacgagctcgagggaacctcacgcgcccactacgagcgtctcccgatcaaggtggttcctgcggccgaggaagaggacgacgacgggtttgatggggaggaggaggcggcggcggggctaacgtgcgccgaggcgtattatgcgcatgggaactacgcgatggagctgtggaagaaaaacgggaagcgtgggttgaggtgttattcgcagaaagagacaattggttatgtgaagcgcaaggataggcctcagcatttgaccttcctggatcacattcgcttcttcctttcctctaattagcctttctcgttaattaggttactccaatccattcctgcttcctgccctttttttcttcttagcttatgttatgcactactttgtattttgccaagaccaattcatgatcaccaggatctctgtctcttactcttttgtttagttctgtacgacgtgaaaaacc

SEQ ID NO: 7873 - DNA, 734 bp, Glycine max
  Clone ID: 700686636_FLI
gcacgggacatgttaaatcacataacgctgcaacatgggcatttatttaagttacagagaaggcgcaggttaagaagagtcgctattccaaacagtcagacattgtcacttttgggtcgagatcttcgtgaggctcatctacaggtgcttcttggtggtggtggtggatatcggtcaaacagtgcagcagtgtctaatgctgctgctactgatccattcctatcctcatttattttgaatttccctgcttgtgaagcagaagaaatttcaaaatctgtggtaacaagtgctgacgattcttcttccaaaaatgcaacacctgtgcatatttggaaatcaagttttgatccctccttgagtactgaagagcgcgagaaaaggatgagacaagctgctgggagatctggttttgtgcaggacctgtttctttcaactttgttaggcgaataatggaagctgtaaggtgcttacagaagaataatcaaaatgagatccatggttaaggatcttgaatgaaggattatacctctagtgggattcagtggttatttgacaatccatgttatagcctaattttggtatattgtcacagctgcacctttgacatatagtgctgaatctgatcatagttatccttttatcccacccttgtaagttgtaagcatcttcactggagatgtactactctctgaaaaacaagaagttttctagcttaagaaatgacctattttgct

SEQ ID NO: 7874 - DNA, 1319 bp, Glycine max
  Clone ID: 700686668_FLI
tcagaaccggcctgcagagttgattgccaagtttttggatgagaaacttcgtgcaggtaacaaaggcacttcagaagaagagttggagggtacacttgataaagtcctggttttattcaggttcattcagggcaaggatgtgtttgaggcattttataagaaagatcttgcaaaaagactactgttaggaaagagtgcttctattgatgcagagaaatctatgatctccaagttgaagaccgagtgcggcagccagttcacaaacaaactagaagggatgtttaaggacattgaattatcaaaagaaataaacgagtccttcaagcagtcatcccaggctaggacaaaactcccatcagggattgaaatgagtgttcatgtcttgacaactgggtactggccgacatatccacccatggatgttagacttcctcatgaattgaatgtttaccaggatattttcaaagagttctatctaagcaaatatagtgggaggcgtctgatgtggcaaaattcattaggtcactgtgtcctaaaggcagagtttcctaaagggaaaaaggagttggctgtctccctatttcagactgttgttcttatgttattcaatgatgctgagaaactaagctttcaagatatcaaggactctactggtatagagggcaaggaattgagaaggactctgcaatcacttgcatgtggaaaagttcgtgtcctacaaaagttgccaaagggtagagatgtggaggatgatgactcatttgtttttaatgaagggtttacagctcctctttatcgtataaaggtgaatgcaattcagttgaaggagacagtggaggagaacacaagcaccacagaaagagttttccaagaccgtcagtatcaggttgatgctgctattgtgaggataatgaagactaggaaagtgcttagtcacacgcttcttattactgaactcttccaacagctcaaatttccaataaaaccagctgacttgaagaaaaggatcgaaagcctgattgacagggagtatctggagagagacaagaacaaccctcaaatatacaattacctggcatagtttattttcttaaatgatgtgggtaaagctcgatgtttaatcctttgtcatatatgtacagtaacaacggattctccccactcccctttatttttttcttttcctttcatttatggaccgttgtactgtaattgtaaagcatattctcccccttgaatttcttttcatttagttgagaattcaaaattgttcccaaaaatgatcgagaaattaaaaaggaattggtgattaacaaggt

SEQ ID NO: 7875 - DNA, 822 bp, Glycine max
  Clone ID: 700686670_FLI
gacgacctttacagtgatggcctgcccttgcaagatgaaattttgaagaaaattccattgttacaagtgctcacaaagatacaagaatgcagccaggggcttcttaagtatgacactcccaagattatttctaaggacaagttttcctggctgcgagatgatgaattttcccggcaagcaatagcaggagtcaaccctgttaacattgaggggcttaaagttttcccactggtgagcaaactcgacccggaaacatatgaccaccaagattctgcactcaaaaaagagcatattctaggacaacttaatggcatgaccgtgcaacaggcaatagtggaaaataagctgtttatggtaaagtaacgcgatgtctatgttccatttcttgacgggatcaatgccctttatgggagaaaatcctatgctacccgcaccatatttttcttgataccgcttggcactctcaagcctattgctatagagcttagcctcggaccaagtttcggatgaaaacgtgtagttactcctcctgtggatgcaactacaaattggaagtggcagcttgccaaagctcatgtgtgtgccaatgatgctggggtgcaccaacttgttaaccattgtacctcttgaggttgtatcttatttatcctctatcatctgaaatcgtcaaggcaaatggggtaatgatggaaaaagcatggactgggacactggatcgtgtgcagacattttggggcctaagacgaaaatgttaaagggtcttttttttacaaaaattttaaagagacttagtacattatataaaatatcaatttttatatt

SEQ ID NO: 7876 - DNA, 1894 bp, Glycine max
  Clone ID: 700697910_FLI
cttaattattaacacttccttagttcaatatggggaagcccttcactctctctctttcttccctttgcttgctactcttgtcgagtgcatgctttgctattagctccagcaagctcaacgagtgccaactcaacaacctcaacgcgttggaacccgaccaccgcgttgagtccgaaggtggtttgattcaaacatggaactctcaacaccctgagctgaaatgcgccggtgtcactgtttccaaactcaccctcaaccgcaatggcctccacttgccatcttactcaccttatccccggatgatcatcatcgcccaagggaaaggagcacttggagttgcaattccaggatgtcctgagacgtttgaggagccacaagaacaatcaaacagaagaggctcaaggtcgcagaagcagcagctacaggacagtcaccagaagattcgtcacttcaatgaaggagacgtactcgtgattcctcctggtgttccttactggacctataacactggcgatgaaccagttgttgccatcagtcttcttgacacctctaacttcaataaccagcttgatcaaacccctagggtattttaccttgctgggaacccagatatagagtacccagagaccatgcaacaacaacaacagcagaaaagtcatggtggacgcaagcaggggcaacaccagcaggaggaagaggaagaaggtggcagcgtgctcagtggcttcagcaaacacttcttggcacaatccttcaacaccaacgaggacatagctgagaaacttcagtctccagacgacgaaaggaagcagatcgtgacagtggaaggaggtctcagcgttatcagccccaagtggcaagaacaacaagatgaagatgaagatgaagacgaagatgatgaagatgaacaaattccctctcaccctcctcgccgaccaagccatggaaagcgtgaacaagacgaggacgaggacgaagatgaagataaacctcgtcctagtcgaccaagccaaggaaagcgtgaacaagaccaggaccaggacgaggacgaagatgaagatgaagatcaacctcgcaagagccgcgaatggagatcgaaaaagacacaacccagaagacctagacaagaagaaccacgtgaaagaggatgcgagacaagaaacggggttgaggaaaatatctgcaccttgaagcttcacgagaacattgctcgcccttcacgcgctgacttctacaaccctaaagctggtcgcattagtaccctcaacagcctcaccctcccagccctccgccaattccaactcagtgcccaatatgttgtcctctacaagaatggaatttactctccacattggaatctgaatgcaaacagtgtgatctatgtgactcgaggacaaggaaaggttagagttgtgaactgccaagggaatgcagtgttcgacggtgagcttaggaggggacaattgctggtggtaccacagaacttcgtggtggcggagcaagccggagaacaaggattcgaatacatagtattcaagacacaccacaacgcagtcactagctacttgaaggatgtgtttagggcaattccctcagaggttcttgcccattcttacaaccttcgacagagtcaagtgtctgagcttaagtatgaaggaaattggggtcctttggtcaaccctgagtctcaacaaggctcaccccgtgttaaagtcgcataaatgacaagcatgatggtgtgaggatgaggccatcttatgaaataataacaaataaataaattttgtatgataataaaaagtatggcccatgtaccatcccagcgagcctatgtttatatctgagtggcgttgtacctttcaatcgccttaataaaatgtcagtcttcacgttt

SEQ ID NO: 7877 - DNA, 1534 bp, Glycine max
  Clone ID: 700697955_FLI
gcttttaatttggaagagagacaaaccagcaagagtggagatggcgacgtcgacgtgcttcctgtgtccgtctacggcgagtttgaaaggcagggccagattcagaatcagaatcagatgcagcagcagcgtgtcggtcaatattcgaagggagcccgaacctgtaacgacgctggtgaaagcgtttgctcccgccacggtggcgaatctaggtccaggcttcgacttcctaggctgcgccgtggacggactcggagacattgtgtcggtgaaggttgacccacaggttcaccctggcgagatatgcatatccgacatcagcggccacgccccaaacaagctcagcaaaaaccctctctggaactgcgccggcatcgccgccattgaagtcatgaaaatgctctccattcgatccgtcggcctctccctctccctggagaagggcctgcctttgggaagcggtctgggatccagcgccgccagcgccgccgcggccgccgtggcggtgaacgagctgtttgggaagaaattaagcgtggaggagctggttctggcatcactgaaatcggaagagaaggtgtcggggtatcacgcggacaacgtggcgccatcgataatggggggttttgtgctgatcgggagctactcgccgctggagttgatgccgttgaagtttccggcagagaaggagctgtatttcgtgctggtgacgcctgagttcgaggccccgacgaagaagatgcgggcagcgctgcctacggagatcgggatgccgcaccacgtgtggaactgcagccaggcaggtgctctggtggcgtcggtgctgcagggcgacgtggttgggttggggaaggcattgtcctctgacaagatcgttgagccaaggcgtgcccccttgattcctggcatggaggctgtcaagagggctgccattcaggccggtgcttttggctgtaccatcagcggcgccggccctaccgccgtcgccgtcattgacgacgagcaaactggacacctcattgccaaacacatgattgacgcttttctccatgttggcaatttgaaggcttctgcaaatgtcaagcagcttgatcgccttggtgctagacgcattccaaattgaaccttctcttctctatctctatgagaggcttgtagatttcaagaaccggatttcttccaacttgctcgtaacactctaagtgctgaccggtcacatgtatttgaaatttgatctgatcaatgaagcagcattctagtgtggaggtctgaataacaagagaaacattaaacccaagctgggagctctgtttgggtggtggaaatttaaatagatgaataattatgaaagacctagatcaggtcagtgttatggtgaactctgaagcatgttttagattttctttgctttgtttttatcatatttttatcttgctacttgagttgacaaagctcaaaaagaagtcatttttagtattttcttgtttcattatgctagttaatcttagcttttgaatagcatgtattgttcctt

SEQ ID NO: 7878 - DNA, 1027 bp, Glycine max
  Clone ID: 700698053_FLI
ctttgaagtagccattgctttgcttcaaagttgaaaacccagaatgtggttgtatctctctccctaaccttaaccttgctggtcagtagcaccagtaccaaggttaaggttagggagagagatacaaccacattctgggtactggtgctactgaccagcaaggcaaactcagcggaaactgtttctttcagctggaacaagttcgtgccgaagcaaccaaacatgatcctccaaggagacgctattgtgacctcctcgggaaagttacaactcaataaggttgacgaaaacggcaccccaaaaccctcgtctcttggtcgcgccctctactccacccccatccacatttgggacaaagaaaccggtagcgttgccagcttcgccgcttccttcaacttcaccttctatgcccctgacacaaaaaggcttgcagatgggcttgccttctttctcgcaccaattgacactaagccacaaacacatgcaggttatcttggtcttttcaacgaaaacgagtctggtgatcaagtcgtcgctgttgagtttgacactttccggaactcttgggatccaccaaatccacacatcggaattaacgtcaattctatcagatccatcaaaacgacgtcttgggatttggccaacaataaagtagccaaggttctcattacctatgatgcctccaccagcctcttggttgcttctttggtctacccttcacagagaaccagcaatatcctctccgatgtggtcgatttgaagacttctcttcccgagtgggtgaggatagggttctctgctgccacgggactcgacatacctggggaatcgcatgacgtgctttcttggtcttttgcttccaatttgccacacgctagcagtaacattgatcctttggatcttacaagctttgtgttgcatgaggccatctaaatgtgacagatcgaaggaagaaagtgtaataagacgactctcactactcgatcgctagtgattgtcattgttatatataataatgttatctttc

SEQ ID NO: 7879 - DNA, 3231 bp, Glycine max
  Clone ID: 700698063_FLI
caaaagtaagagaaaaagggattcccagttgacaccattgctcactcaggtgaagtgtttgtgtgtgtgactgagaagagaaagaaaagaagaatcttttgctgtctgtctctcatatcacaactcacacctctcttttgcttgttgttttcaagggttaggatttttcttcattgctgttgagaaaagtttcttcctttcttgctcttctgttcattcgttcattcatcttttgggctagtttggcctctcttgagcttcttcgttcatcaaaggaaggactgtgaagtgaacaattaatagaagcctgcttctgcatcttgtccaccaaagcttatcatttggccatcatcaaaatggtttcaaggtcatattctaacttgttagatcttacttcttgtggctccccgactttcagtcgtgagaagaaaaggctccctcgagtggcaactgttgctggagtactgtctgaattagatgatgaaaccagcaacagtgtttgctctgatactccatcctcagtctctcaagagaggatgatcattgttggtaaccagcttccattaaaggcacacagaaaagacaacggtacttgggagttcacatgggatgaggactcacttcttttacagctgaaagatggtcttggggatgatgtggaaactatctatattggttgtcttaaagaagagattgagccaagtgagcaagatgatgttgctctgtacttgcttgacactttcaaatgtgtgccaacgttcctccctcctgagctttttagtaaattctatcatggattctgcaaacaacatctatggcctttgtttcactacatgcttcccctgtcacctgatcttggtggtcgattcgataggtccctttggcaagcttacctttctgtgaacaagatatttgcggataaagtgatggaagtcatcagccctgatgatgactttgtgtgggttcatgactaccatctgatggtacttcctacatttttgagaaagagatttaacagggtgaggctaggattcttcctccatagtccatttccttcgtctgagatataccgaacccttcctgttagggatgaacttcttagagctcttctgaattctgaccttattgggtttcatacttttgattatgccaggcatttcctctcctgttgcagcagaatgcttgggatttcttaccaatccaagcgtggctacattggccttgagtactatggaagaacagtaagcattaagattcttcctgttggtattcatataggtcagctccaatctgtcatgagtcatcccgagacagaaagcaaggttgcagagttaaaaaaaacagttcagagatcaaactgtgctgctcggggtggatgacatggatatcttcaaaggaatcagcttaaaacttttggccatggaacaattgcttttacaacatcctgataagaggggcagagttgttctggtccaaattgctaaccctgcaagaggccgtggaaaggatgtgcaggaggtacaaagtgaaacttatgccacgatgaagaggataaataatgcatttggaaggcctggatacacacctgtagtcttgattgatacaccacttcagagttatgagcgaattgcttattatgtgattgcagaatgttgccttgttacagcagtgagagatgggatgaaccttataccctatgaatatatcatttgtagacaaggaaatgagaagatagatgagattttagggacagacctgcttactcaaaagaagagtatgctggtggtgtctgagtttattggctgctccccttcgttaagtggggcaattcgagtgaatccatggaacattgattctgtcgctgaagctatggattctgcgttgatggtcccagaggctgaaaagcagatgcggcatgagaagcattataggtatgttagtacacatgatgttgcgtattgggcacgtagcttcttgcaggatctggaaagggcatgtagagatcatctgaggaggagatgctggggaattggttttggtttaggcttccgagtgattgctttggatccaaactttagaaagctatctgtggaacatattgtttcagcttataagaggaccaagcaccgagcaattcttttggattatgatggcactatggtgcagcctgggtcgatgagtttaacacctaatgctgaagccgttagcatcttgaacatcttgtgcagggacaccaagaattgtgttttcattgtaagtggaagggagagaaagactcttactgaatggttttcttcttgtgaaaggatgggaatcgctgcagagcatggttattttgtgaggacaaatcgaaatgcagaatgggatacttgtattccagtacctgattttgagtggaaacagattgctgagccggttatgcagttatatatggaaacaactgatggttcaaacatagaggccaaagaaagtgctctagtttggaattacgagtatgcagaccgagactttggttcatgccaagctaaggagctttttgatcatctggaaagtgttcttgccaatgagcctgtttctgttaaaagtagtccaaacattgttgaagtgaaacctcagggtgtgagtaagggtattgtagcagaacgtcttctcttaacaatgcaacaaaagggagtgtttccagattttgttctatgcattggagatgacagatcagacgaggacatgtttggggtaatcatgaatgcaaaggcaaccctatctccagttgctgaagtgtttccatgcactgttggccagaaacctagcaaggcaaagtattatttggaagacacaagtgagattttgagaatgttgcaaggccttgccaatgcttctgagcactctactagaacttctttgcaaccagcttctcattaaggttctttttaatgtgtagagtgcaaacacacacacacacaatttggctacaatgtagtactatttttctatactatactgggatatctatcttgtgttagatttcgtgatctattttattttctggctgacttgccttcatttattgatatcccaactatgttgcaactatcaataggttgttttgaaagtagatgaattacatggggtactgtatttattgtttcttttcttgactattggtttgggccattttgatgtatgataaagtgatttttgattgggaatgaatgaatgctaggattgtgaatc

SEQ ID NO: 7880 - DNA, 1058 bp, Glycine max; identical to SEQ ID NO: 7755
  Clone ID: 700698096_FLI

SEQ ID NO: 7881 - DNA, 1617 bp, Glycine max
  Clone ID: 700698367_FLI
gtttaatctctctagggttattttctctctcttggattccattcctgcgtcttcatcagaggtagcagccaatggaagcggcggcgacggcaacggcaacagttctcgcaccaccgtcggctttcctcggaagaccctccgtactcgccttccgttccaatcttcgcttctccactaagttaagcacttctgtagctatctccaagcatggtcatgggagacactgtgttggaactagaaggggttttgtagttagagctgcatcatttacaccagagtcatccgaaccgagttccaagattgctccacttaagctggagtctccaattgggcagtttctgtctcagattttgataagtcacccgcatcttgtgccagctgcagtagagcagcagcttgagcaattccaaactgatcttgatggtgataaacaaaagaaagagccttctgcttcaggcaccgacttagttttgtacaggagaattgctgaggttaaggctaaagagaggaaaacagctctagaagagatattgtatgcattggtggtgcaaaagttcatggatgccagtatttctctgataccctccttaactccaaaccattctggtcaggttgattcatggccaagtgaagatggaaaactggaggagcttcactcaccggaagcctatgagatgatccaaaaccacttggctctcattttgggcaaccgtttaggggattcaacatctgttgctcagatcagcaaaatcagggtaggacaggtttatgcagcttcaataatgtacgggtactttctcaagcgagttgtgcaaaggttccagctggagaggacaatgaagattcttcctaatgcaacagaagagaatagcattcaacaaactgttgtagatgattcaagaatcagaggcggagagggccattctcatgttatgtcccatcctgaagtttctactttgcctggtggtggcatcagctctgggggatttggctatggttcaaaagtgtccaggttgcgtacctatgtgatgtcctttgatagcgagactttacagagatatgcaacaataagatccaaagaggctctcagcatcattgagaagcacaccgaagcattgtttggaagacctgaaattgttgtaacaccgcagggggtaattgattcttccacagatgataacatcaaaattagctttggtggtttgaagagacttgttttagaagctattacttttggttcttttctctgggatgttgagagctacgtcgactcaaggtaccattttgtcctgaactgagccctgctcactcccatgcaccccaaggcaaagtctgtacggactgaaagtacaaatatttttcacctgtttgatcagtgacattagaattggttttcactattgagaggatatcttaaaattagatatttgcacatttgtttgtccttcgttatcgtgatttttgttggagtattaagtgtgaaacagatatagaccaaaattcaaattacaaatgactgttgttggagcactttataataagtatggctgatgtaaaggaaaagtggctgactacaagatttctttgttagatgtatattttatcaattttttgacc

SEQ ID NO: 7882 - DNA, 1601 bp, Glycine max
  Clone ID: 700698384_FLI
tgttggtgaagcttgccagaaatatggcagcatctttatgcatcctcagggtctttatataagtttgaaagagaagggaaagatccgtgaagtactaaggaattggcctgagaagaacattcaagtcatagttgtaactgatggagaacggatcctgggtcttggggatcttggttgtcaggggatgggaataccagtgggaaaactttctttatatacagcacttggaggagtccgcccttcagcttgtttacccattacaattgatgtgggcacaaacaatgagaagctgctgaatgatgaattatatattgggctaaagcaaagacgagcaactgggcaggaatatgctgaacttatgcacgaatttatgacagcagtcaagcaaacttatggggaaaaggtcctaattcagtttgaagactttgcaaaccacaatgcttttaatctgcttgagaaatatagatctacacatctggtctttaatgatgatattcagggaacagcatccgtggttcttgctggactagttgcatctctgaagttggttgggggtaacttagctgatcacagattcttattccttggtgctggagaggctggcactggcatagcagaactcatagcacttgaaacatcaaaacagacaaatgctccactggaggaagtgcgcaagaatatttggctggtggactcaaagggattgattgtcagttctcgcaaagattcgctccaacattttaagaagccctgggctcatgagcatgaacctgttaaaaatcttctagatgctgttaataaaattaagccaacagtgttgattggaacatcgggacaaggaagaacttttactaaagaagtgattgaggcaatggcttctattaacaagagacctattattctttctctttccaaccctacgtcacagtcagaatgcactgctgaagaagcttacaagtggagccagggacgtgccatttttgcaagtgggagtccatttccccctgttgagtacgagggcaaagtgtttgtgcctggccaggccaataatgcatacatattccctggatttggtctcggtttaataatgtctgggaccattcgagtgcatgatgacctgcttctggctgcctctgaggctttggctgcacaagtgagccaagagaactttgataagggactcatatacccaccattcaccaacatcagaaagatttcagcacacatagctgccaatgttgctgctaaggcttatgaacttggcttggccactcgccttcctcaacctaaagatttagtgaagtttgcagagagctgtatgtataccccagcctacagaagctaccgatgaaaagtgataataataaataggcgcttttttctttttcatttatcatgatatcatttcattgtcaattttttaattttttaccttctttatgttcctgttatgttttttgtaagttatttgtattgggtgggttagtaggttaggacggtggtggtagtgaagtggtacttggaccaaaaggtagcttgaaaatttgtgtttcgctataaatgttgtgacagtaatctaaattagaaaaggaagcatttct

SEQ ID NO: 7883 - DNA, 835 bp, Glycine max
  Clone ID: 700698386_FLI
gcaaaagttgctgattttggactttcacgacttgccccagttccagatactgaaggaaatgtacctggtcatgtatcaacagtggtaaaggggaccccgggttatcttgatccagagtacttcttgactcgcaatttgactgacaaaagtgatgtttatagtcttggtgttgtacttctggaacttctgactgggaggccaccaatctttcatggtgaaaatattattagacaggttaatatggcatacaattctggtggaatatctttggttgttgataaacgtattgagtcttatcctactgagtgcgcggagaaatttttggctttagccttaaagtgttgcaaagataccccagatgagaggcctaaaatgtcagaagtggctagagagcttgaatacatctgttctatgttacctgagtcagatacgaaaggacatgattatgtcattacaagtgactcttctggtacaatattcagttcagaaccttcatcttctgttataaaaactccttttatttcaggagatgtttcaggtagtgaccttgttagtggaagtataccaaccatcaagccaagatagaagttgaaaagtatatgtggtttagaaaatatagttgattgatgtttgtgaatgttaagtagtaccctgtaaattgaagaattattgtgaactgaagagtgaaaccatatttaataattttcatttattctttttgtactacttgtaagataaattgatagaggactgacttgttagttgaatatatcgattttgtaacagtgacatattgtagtttatgatggagcattccaagtacttttgaagtacc

SEQ ID NO: 7884 - DNA, 675 bp, Glycine max
  Clone ID: 700698445_FLI
ggatcatctaaatgatcctttgaagactcccttggattggaggacaagattacagatagctaatggcgttgtggctgcactggaatacttgtttctcttcagtgacccaccagtatgtcatgtctctatcacctcaagcaatatcatgttagatgagaacttcacagccaaactatctgactttggccttcttacatctggtggaaattctgttatggtgccatattcagaagatttgaagcagaaaagttgtaagattatattccaacttggagtgctcatattggaactggtcaccggtcagtcatcagagatggaaggttcggatttaatcgaatggatccaagaatcccgtttttacaattccatagataagatgatagatcctgatcttggtaacaattatgactgtacggagctcaaaagtcttctagctgtggcaaaattatgtatcaaatcatgggacaagccttcatttacaattccacagttatttcggcatctccaaaagaagattgatattagcaattactaggattcttatatgttttgtttgaaaaccttgtggtttcttgggagagtatttagcactcccttgtgtgaatgctttcagttttcgtacctcttgaagagtcagttttgataactgcgataatgttcatttgaaattacatg

SEQ ID NO: 7885 - DNA, 998 bp, Zea mays
  Clone ID: 700704013_FLI
ttattcctcccccgcacgcgaaatccgcccgcagctcttcgtccccggaggaccaagcctgcgcaccagagatgtcgtacgcctacctgttcaagtacatcatcatcggcgacacaggcgtcggcaagtcgtgcctgctgctgcagttcaccgacaagcgattccagcccgtccacgacctcaccatcggcgtcgagttcggggcccggatgatcaccatcgacaacaagcccatcaagctccagatttgggacacggctggtcaagagtcattcagatccataactagatcatactacagaggcgctgctggtgctcttttggtttatgacataactaggagggagactttcaaccaccttgcaagctggctggaggatgcgagacagcacgccaatgctaacatgacaataatgcttgttgggaacaagtgcgatctgtctcacaggcgtgcggtgagctatgaggaaggcgagcagtttgcaaaagaacatggtcttatcttcatggaagcctctgcgaagaccgcacagaatgtcgaggaggcatttgttaagactgctggagcaatctacaagaagattcaagatggtgttttcgatgtatctaatgagtcctatggaatcaaagttggatatgcaatccctgggcaatctggaggtgctggtagctcgtcttctcaaggtggtggctgctgcagctaatctgctaacgccgttaacaaatgcatatctgtcgtgtgtcacataccagctgcgctgtgaaaaatagttattgctgctccagggtgccttgttatttgacgcaccaatggatcctgtgcctgatcgacttgagagattcagtttatttacgtcaggtgtttataaactccctgtaaatcactagattcttcactgttttccgtcattaggcactcaacaatcgtgtgtccgtttgcatgtgtaaataaggcacatctacatattgtttgatatgatattaatttgtcctgttcg

SEQ ID NO: 7886 - DNA, 800 bp, Zea mays
  Clone ID: 700704045_FLI
agcaattagctcatcgactccagattggagaactcgacaccatgaaggtgctgatcgttgcccttgctctcctggcgctcgctgcgagcgccgcctccagtacaagcggcggctgtggctgccagacaccaccgtttcatctaccgcctccgttctatatgccgcctccgttctatctgccgccgcagcagcagccgcagccatggcaataccccactcaaccaccgcagctaagcccgtgccagcagttcggatcctgcggcgtcggcagcgtcggcagcccgttcctgggccagtgcgtcgagttcctgaggcaccagtgcagcccggcggcgacgccctacggctcgccacagtgccaggcgctgcagcagcagtgctgccaccagatcaggcaggtggagccgctgcaccggtaccaggcgacatacggtgtggtcctgcagtccttcctgcagcagcagccgcagggcgagctcgcggcgctgatggcggcccaggtagcgcagcagctgacggcgatgtgcggcctgcagctgcagcagccaggtccctgcccttgcaacgcagctgccggcggtgtctactactgaggaaactatgtactgtagtaataatgtaatggagccgctgactagctacctagctcgctagtttactcatttagcggcgatgagtaacgtagtgtcacccatcaccatgggtggcagtgtgagcaatgacctgaatgaaccattgaaatggaaaggaataatatataaggaaaaaagatgattggaaactgataaaaataaaaaaat

SEQ ID NO: 7887 - DNA, 2262 bp, Glycine max
  Clone ID: 700724966_FLI
ttgtttcttagtgcacttttttttggcatcaaagaggttaaatccatggattctgattatggtattcccagggaactctcagatcttcaaaagattcggtcgttgtaccagccagagcttcctccttgtctccagggaaccactgtgagggttgaatttggtgatgcaaccaccactgctgaccccactgatgcactcaccattagcagggcgtttcctaacacctatggacaccctttggctcactttctcagggcaactgccaaagtccctgatgctcagatcataactgagttccctcctattagggtggggattgtcttttgtgggagacaatctcctggagggcataatgtcatttggggtctccacaatgctctcaaaattcacaatcccaacagtgttttgcttggatttcttggtggttcagaaggtctgtttgcccagaaaactctggagataactgaggatattctttcgacatacaaaaatcaaggtggttatgatttgcttgggcggacgaaagatcaaattaggaccacagaacaagttaatgctgcacttgctgcatgcaacaatttgaaacttgatggccttgtaatcatcggaggggtgacatcaaacacagatgctgcacagcttgctgaaacatttgctgtagcaaaatgccccacaaaggtggttggtgttcctgtcactctaaatggagatcttaaaaaccagtttgtagaaactaatgttgggtttgacacaatttgtaaggttaattctcagctcatcagcaatgtctgcaccgatgctctctctgcagagaagtattattatttcatccgtcttatgggacgcaaggcatcacatgttgctttggaatgcaccctccagtcccatccaaacatggtaattctgggtgaggaggttgctgcatcaaagcttaccctttctgaaattgcaaaacagattactgatgcagttcaggctagagcagagcaagataaataccatggagtaattctccttccagaagggctgatagagagtattcctgaagtgtatgcactcttgaaggaaattcatggtttactcagacaaggtgttgctgttgacaagatatcttctcagcttaccccatgggcatctgccctatttgaatttctgccaccctttattaggagacagttactcctttaccctgaatccgatgactcagcacagttatcgcagattgaaactgagaaattactggcatatcttgtggaagtagagataaacaagcgtctgaaagaaggcacatacaaggggaagaaattcaatgccatttgccacttttttggttatcaagctcgtggatctctgccatcaaaatttgactgtgattacgcatatgttcttggacacatctgctaccacatacttgccgctggtctaaatggatacatggcaactgtaactaacctgaagaatcctgtaaacaagtggcgatgtggggctgctccaatagcatctatgatgactgtgaagcgctggtctccaaatccaggagccacatcaattggaaaaccagctattcatccagctactgtggacttgagaggcaaagcatatgagctgttgagacaaaaggcacaaagctttcttatggatgatatctacagaaatccaggtccacttcagtttgatggtcctggtgcgggtgcgaaggttataactctttctgttgaagaccaggactacatgggccgcattaagaaacttcaggagtaccttgaacaggttcgaaccattgtgaagccaggatgcccccaggaggttttgaaagctgctctaagtgtcatggcgtcggttactgaagttctagctgcaatgtcaacatcttctactaacaccctgtcagccatgtgagagtaacaaatggatgttgtattctttccaaaattttctggcacgaggttttagtttctacattttattgccatggaagtagttgttgattggaaataagagttatagctgacatggtgcatgtcaacgtgagatgagatttactgtaatcaaagttttggctctctatgttccctactgggtcattttttttttacaaaacatgagggttccgtgtgacactgataatttagcttggtgcttgagattattattgttgttctatttttaggacatatctttttgtgatatcccgaactttatattagaggtgtttttattcgtaactttatttgttatcccacgatgaaattccaacccttt

SEQ ID NO: 7888 - DNA, 712 bp, Glycine max
  Clone ID: 700725037_FLI
gaaaaatggctgcaactttttacctaaaatgatgtccatgttatggcaaagaccttgctggaaaaatttgaggaaaaatggctgcaacttttacctaaagttgctgaggaggaaaagagacaattagaggaagaagcacaggcacaactagacattcagcttgctctggagaccacttatgccaataaggccaaggatataagtactgagctttgtgagattgatatgcatttgaagagtctcaaagaaatggtgattcaacagtgcagggcgttggatataattgccgagactaacccaatgttccaaccttcttctactgaagatgtggtccttgacttagatgctcagagtgactacactctatggaggttaaaggcttttgtaaaagattcactagaagagcaagtaaaggtcaatgcaggcgcaggtattaatcctaatgataaccctgatgacaagaaaaacaagaagaggcgagattctggtgattcttcgggcaagacaaacccaaaaaggaagaaactatctacattgtgattcattagttgcaacataagagacattagtttagtgtgattgagttaaagttgctgaagacaatgagttggacaataatgcaattggaacaatctggaaatccttctatagatattcactgctatgttgatgatgccaataaaattccttaatttacaacattgtttggcct

SEQ ID NO: 7889 - DNA, 2097 bp, Glycine max
  Clone ID: 700725047_FLI
tacttctccaaacaggcccaaaatttggactgagaactggcctggatggtttaaaacttttgggggaagagatcctcacaggccagcagaagatgttgcattttctgttgctcgtttcttccagaaaggtggaagtgtacataattactacatgtatcatggaggaacaaattttgggcgtacagcaggtggtccattcattactacaagttatgactatgatgccccagtagatgagtatgggttacctagacttccaaaatggggacatcttaaggaacttcacagagctatcaagttatgtgagcacgtattgcttaatggtaaatcagttaatatctcccttggtccttctgtggaggctgatgtctatactgactcatcaggagcatgtgcggcctttatttctaatgttgatgataaaaatgataagacagtggaatttcgaaatgcatcatatcacttgccagcttggtcagttagcattcttcctgattgcaagaatgtagtattcaacacagctaaggttacttcccagacaaatgtagttgcaatgattcccgagagtttgcagcaatcagataaaggtgtaaattctcttaaatgggacatagtgaaggagaagccaggaatctgggggaaggcagactttgtcaaaagtggttttgttgatctcatcaatactaccaaagataccactgactacctgtggcatacaacaagtatatttgtaagtgagaatgaagagttcttaaagaagggaagcaaaccagtccttctaattgaatccacaggtcatgctctccatgcttttgtgaaccaagaatatcaaggtactggtactggaaatggtacacattcaccattctcttttaagaatcccatctccctgagggcagggaaaaatgaaattgctttgttgtgcttgaccgttggcttacagacagcaggaccattttatgacttcataggggcaggactaactagtgtgaagatcaagggactgaaaaatgggacaatagacttgtcttcttatgcctggacttacaagattggagtgcaaggagaatatctaaggttataccagggaaatgggttgaataaagtgaactggacatctacttcagaaccacaaaaaatgcagccattgacatggtacaaggcaattgtggatgctccgcctggggatgaaccagttggattggatatgttacatatgggaaagggtctagcctggttaaatggagaagaaataggaagatattggcctaggaaaagtgaattcaagagtgaagactgtgtgaaagaatgcgattacagaggcaaatttaatcctgacaaatgtgacactggttgtggagaacctacacagagatggtaccatgttccacgatcttggttcaagccatctggaaatattcttgttctttttgaggagaaaggtggagatccagaaaagattaagtttgtgagacggaaagtatctggagcttgtgcccttgttcctgaggattacccctctgttggactcctttcccagggtgaagataaaatacagaataacaaaaacgttccttttgcccatttgacatgccccagcaacactcgtatatctgctgtgaagtttgctagctttggaaccccctctgggtcatgtggatcttacctcaagggagattgccatgatcccaattctagcacaattgttgagaaggcatgcctaaacaaaaacgactgtgtcataaaattaactgaagagaatttcaaaaccaacttgtgtcctggtttatcaaggaaacttgcagtggaagcagtctgtagttgattaataaactaacatactccggtgccagagactcgtcactttgtgactgtagttgattaattttactgtcgattcaggaggaacgttgcatctcaccatttattttaccagcttggctacatcaaaaaagcatatgaaaattttgcatgtattaattaatatgaatattgtcagcaaggtctctaatgtataatttatggcagagaattctgctgcaaatgcgttatctattaatcaatttggctttcacatgggggtgttagccattgagt

SEQ ID NO: 7890 - DNA, 1313 bp, Glycine max
  Clone ID: 700725110_FLI
ctctatgatctccaagataggcttggactcaaccaaccaagcaaggttgttgattggttgctcaatgcagcaaaacatgaaattgatgaattgccaccacttccaattcctccaggtaacttcacccttggttatccctctcttgtttcttgtaatgaagttagcacctctcgtgaaggttcaggccaaaacactttattatggaaaccaaagccaggagaaataatggttagtgatcatgataaggcaaattggatgaatagaagagaaggagatgatgatgatgataataatcataataatagtaatggtgataaacaaggaagcaataataattgtcatggtggtgcacttgttttgccaaataatctcttgccaacaagaccaaaccatccttcttttttgggtttgatgaacactatgccatcacttggttaccaatgggaacctaattcttcagctgctgatgttaatgttcaatggcaaaaccatggattttttaaccaaacagatgtacacagcatcgatgtggttccatttccgtcaacactggctctatcaactgggaatagtactagtactactactacttctcagattttggtgtgtcctcctcctccgggagcaacaacacagccatattttccttcttcacattttgcaacaatggagatgaatgcaaggcaaatcaaccactatcagatgctgagttcaagttctcatcaaaatctcttggcaaattctctcaatcatccatcatcacagcaactcatgagccaatccgggaaagcaccattcagcttgcgaattaggcctaaacttttccattctcctaatagcagtgaaagccattcccaaaaagatcaggatttcccttccaagtgatgcacaaatagagcaaaataaagttgtcaaaattcttcttctcctcacaaattatgcatggattgatatcttgagggctgtgtgggaattagttgcaagacatattattcaacgttttggggtttgaataaacattccgtttttgtcaaagttatgtttggttttatgattttccattcagtttgatctatatggatatgccatgcaaaggtctacaaaagaatggttttcttttcaagggtaagagctttttcctgaagtgatgatgtgattgctacactaaagagaacgcatgctcagataagttcacactctcttctatgcattgagaaaggttggaaggtggaataataatattatcattttgatagtgcgttttggatttgtttttgttttggttaagtaaacatcttatgtgtttgaatgag

SEQ ID NO: 7891 - DNA, 881 bp, Glycine max
  Clone ID: 700725149_FLI
ggttgaaatagcatgtgcatcaactcctaaccatttggtggctgtgaggcaggcttactgctctctctttgattgctcacttgaggaggacatcatagcctctgttgctccagccctcagaaagcttttagtgagcctagtaagctcattcaggtatgataaagtggctgtaaatttggaggtagccaaggaagaggcatcaaaactacatgaagctatcaacagcaagcaattagacaatgatcatattatttggatacttagcaccaggaatcttttccagctccgggaaacttttgcatgctacaataacctctatgggaatacattggaacaggacataaaaaaatgtggtaatggtgatttggaatctctcttacatacggtgatatggtgtatagactgccccgagaaacattttgcaaaggttgtaagagattctatagttgggtttggaaccgatgaagattccctcaacagagctattgtaactcgagccgaaattgatctgttgaacgtcagatttgaatatgctaacgtgtacaagtctagtcttgatgatgatgttattggggatacttcagggtactacaaagattttttgatgactttgctagggaaaggtccagatggagagtgatacattataaccaacaagcacagctcatggtattctaggattgcttgtaatctgcatttgatggtctagactctgtaatatatatgttgctcctttttatttcaaaagaatcagaattcaagattgaaaccaaaaccatttatttgttattctgcattgactttgtgtagattaattgtagcttgatgtcttggtgtatagtaaataacaagggatttatgatgtgaaacacagaatttgt

SEQ ID NO: 7892 - DNA, 2567 bp, Glycine max
  Clone ID: 700725166_FLI
ttggtgtgagtgaatagggatcagggatgtggaggctgaagatagcagatggaggaaatgatccatacatattcagcacaaacaatttcgttgggaggcagacatgggagtttgatcctgaagcaggcagtccagaggaacgggcccaggttgaagcagctcgtcagcatttctaccacaaccgcttcaaggtcaagccctgcgctgacctcctttggcgttttcaggttctcagagaaaataacttcaaacaaacaattcctcgtgtgactatagaagatggagaggaaatcacataccaaaaagtcacaagcgccgtcagaaggggcgcacaccaccttgcggcactgcagacctctgatggccattggcctgctcaaattgcaggtcctctcttctttcttcctcctttggttttttgtatgtatattacaggaaatcttgaatcagtatttccagaagaacatcgcaaagaaattcttcgttacacatattatcaccagaatgaagacggaggatggggactacacatagagggtcatagcactatgttttgtactgcactgaactatatatgcatgcgaatgcttggagaaggacctaatggaggtcatgacaatgcttgtgctagagcaagaaagtggattcgagatcatggtggtgtaacacatataccttcatggggaaaaacttggctttcgatactcggtgtatttgattggtgcggaagcaacccaatgcccccagagttttggatccttccatcttttcttcctatgcatccagctaagatgtggtgttactgtcgattggtatacatgcctatgtcttacttatatgggaagaggtttgtgggtccaatcacaccactcatcttacaattaagagaagagttgtttactcaaccttatgaaaaagttaattggaagaaagcgcgtcaccaatgtgcaaaggaagatctttactatccccatcctttgatacaagacctaatatgggatagtttatacatattcactgaaccgctacttactcgttggcctttcaacaagttgattagagaaaaggcccttcaagtaactatgaaacatattcattatgaagatgagactagtcgatacataaccattggttgtgtggaaaaggttttatgtatgcttgcttgttgggtggaagatccaaacggagatgctttcaagaagcatcttgcaagggtcccagattacttatgggtttctgaagatggaatgaccatgcagagttttggtagccaagaatgggatgctggctttgctgttcaagctttgcttgccactaacataattgaagaaattggtcctacgtttgcaaaaggacatgatttcatcaagaagtctcaggtgaaggataatccttttggagattttaaaagtatgcatcgtcatatttctaaagggtcttggacattctctgatcaagaccatggatggcaagtttctgattgcactgcagaaggtttaaagtgttgtctacttctatcaatgttgccaccagagattgtgggagaaaagatggaacctgaaagattatacgattcagtcaatgtcttgttgtcgcttcagagtaaaaaaggtggtttagcagcatgggagcctgcaggagctcaagagtggttagaattactcaatcccacagaattttttgcggacattgtagttgaacatgaatatgttgagtgcactggatctgcaatccaagctttagttttgttcaagaagctatatccaggacataggaagaaagagatagaaaatttcattaccaatgcagttcgattccttgaagatacacaaacagctgatggttcatggtatggaaattggggagtttgcttcacttatggctcttggtttgcacttggaggtctagcagctgctggtaagacttacaccaattgtgctgccattcgcaaagccgttaaatttctacttacaacacaaagagaggacggtggatggggagagagttatctttcaagcccaaaaaagatatatgtacctctagaaggaagccgatcaaatgttgtacatacagcatgggctcttatgggactaattcatgctggacaggcggatagagaccccatgcctcttcaccgtgctgcaaagttgctcattaattctcagttggaagagggtgattggccccaacaggaaatcacgggagtattcatgaaaaattgcatgttgcattatccaatgtacagagatatttatccaatgtgggctctagctgaatatcgaaggcgggttccattgccttccactgaagtttaatttagaatggtttgagcacgaaaaggcaaaggcattttcattaagattgaggcaaataagttgtgtgtaatcaagcttaatcaattttttcatattcctatgtttatttcctacatatattggtagaaaaattatttcatgtcggcttgtatagatgttcttaatgttcgtgttacgatacaaagataagtctagtaaaatactacgcacgtaacattagagggctgtgaagaagataaaaatgttaccaag

SEQ ID NO: 7893 - DNA, 641 bp, Glycine max
  Clone ID: 700725187_FLI
agacaaaacctaatggagcagagcacaagttttgtgcaaaatccttggaaacattaatcggttttgcaatttcaaagctgggaaagaacattcaagtactttcaagttcctttgtgaataagcaagagctatacaaagtggaaggagtgcaaaatcttggagacaaagcagtgatgtgtcataggctcaatttcagaacggtggcattttattgccatgaagttcgtggaacaacagctttcatggttccattggttgctggcgatggaaccaaaactcaggcacttgctgtttgtcactcagatacttctggcatgaatcgtcacattcttcatcaaactatgggagttgatcctggaactaacactgtttgtcatttccttggaagcaaggccattttatgggtaccaaatttagctatggacactgcctatcagactaacattgttgtttagtcaattcatcttgagaatgagattgtgtacgcagtaaaaaataaattattatgtgctgtgtgttctgcaagtacctagctatgtgcactcttaagatttgtttccctatagaagcatcatcctgtgatcagtgtgctttgatgatgctaatttgatgcaataaatatgcagtgtgtttgttggtat

SEQ ID NO: 7894 - DNA, 856 bp, Glycine max
  Clone ID: 700725212_FLI
gtggttctttgggaagttcaatgagatgaaatcaatgaaggcaaagtactacctagccgagaagccaagatcatcgttcgcaaagttttgccgggtcaagtattcgagacttgtccatcccaagatggagtcatcgttttttggcaaccagagtcataggaaccttgtgaatgcaggagggtttccagacactgaattctttgcctcattcgccgagatggcgaagagggtgtggcttctacactgcttggccttctcctatgagcctcaggcttcaatcttccaagtggggaaagggtgcagattctctgatgtgtacatggaaagtgtgaatgatgaagtcttcctctattcagaagtggaatcagatccacaagttgctttcacagtagttccagggtttaggattggtaaaactgttttacagtgtcaagtgtacctctcacagcaccaaaccaaggttaaaaaaaaaataacttcaacaaagcaaaggtagttgctgcaagcacttactgaccccacaactcaggtgattgaactggaaggcaattcattattttcttagtgaaaaagaaatttttggagggaaatgaaggggccttgttgtggggactgaactctgcctataggctaactcaccggggcatctttgtccatttgtattttggtcattttgaaaagaaaaagccattggaccgttgcattgggaactgcccttttctttggattttttttttaattttatgccagatttatcaaagagacatccccccaaaattttattattaggccggtgacagggattgtctagctgttatgcatcttttagtaaacactgcattttataatttataat

SEQ ID NO: 7895 - DNA, 1152 bp, Glycine max
  Clone ID: 700725239_FLI
atagggttttggagttgggtagggtgaattgcaatttcaattaattagaattcaacgtttgcaaattgcatattgttcttctcttcctctcttcctctgactccatgtcgtcgataacgggcatccaggggcaacctcttgaggttacggtggtttcgtgctccaagttgaaggacacagaatggatttcaagacaagatccgtacgtttgtgttgagtatggcagcacaaagttccgaaccagaacctgcacagacggcggaaaaaacccggtattccaagagaagttcatctttcccctcattgaaggccttcgggagctcaatgtccttgtttggaacagcaatactctcaccttcgacgattttataggaagcggaaagattcaattgcacaaggttctctctcaaggcttcgatgactctgcttggccacttcagaccaaaactggcagatacgctggtgaagtaaaagtcatattgcattacgcaattgcaaatcaaaggcataaattagtgtcaggccatgctccatcagcacctccgtatgtggcaacagcaactcctcccgtcccttcttcatattctacttcatacccgccacctccttctgctacttcctacccaccaccaccatcacctccctctgcaactccttaccatacaactggatcttattcttacccaccgccgccgccacctcctacagcttaccctccctattcctcacattcatctccctatccaccatcatcataccccccacagccctcctcgtatcctcctcctcctcccccatcatcatatccccctgcttcagcttatccatatccaccacctgcaggctatccttctggaatataccctccaccaccttactgactgagatcttctaccttctcaaccaaggaaccaacatcaacatgccttgtatgccaaaagggccttcagactccctttcaatgcttgttcaaacgccccgtgctttgaccttttgaggtgtcttgcttgtaaagtgtttattttatacacattcagatccaattaaagggcaccattttttttttcgcaattggatgttcactgaccattttccggttttcttttgtctccgtaaggatgaaatatctatgaatcgtttatcaggttgctc

SEQ ID NO: 7896 - DNA, 465 bp, Glycine max
  Clone ID: 700725249_FLI
tgcttatgtggctacctcaaaaacgctagcttgaagcagtatgttaactctcctaatgcccgaaaaaccgttgcttcttgtgggattccctttccaacttgttaattaattaagccttcttataattaaagtgtgggatatatatatatatatagataaacagtttaatttatacacactttgatcctacaaagcatcttgacacaagcattcaataggatttcaccactttatcgcaacattttaacatgatgcggtaataaagtaaattcttgttgaatatttggataacgatgttatatactcatagtttgtgtgtataaattaaacttatatttattatttactctatatatgtcactctacgtttgtgtgatatattatacagttaagtatttagctatctttgaatatgttaaggatgatcatatcagataaagctctctagagttgaatatgaccagt

SEQ ID NO: 7897 - DNA, 602 bp, Glycine max
  Clone ID: 700725253_FLI
tcatgtcggagatcgaacacatgaagaagctttacaacggcattatctacttcgttcagaaccatgtcaagcccgtggctccaagcaacaacaacactttcccttcttttctactctgcagtaataacattaatagcaatagcaacaacaacacatcatcacaaccacaagcctctcctatgagcaatgtttcaacgttgcaaaggcaagtgaagcaatttctggggtgttactccaacaacacaaagcaagcgcgtgctgtgaactcttctcccactaacagttccataaccattgttgaagaagaggctagcagtaacagctgcaagaccaagctttttggtgtgtctctccaatccaagaaaagggtgcaccctgatgagtacggatctaactatattcttcaaagctccgaaacgaataataaggcgcgtttggttttggaaaatgatgaactattaggcttgaatcttatgcccccttcaacttgttaattagttagttactagttagtcgtcgcaaaattcttaactttagaaccttgctattttctaattttaattgcttcatatatgtataaattaatattttttttcttcttt

SEQ ID NO: 7898 - DNA, 975 bp, Glycine max
  Clone ID: 700725312_FLI
gaatatatggagaagggaactctcaagggtcatttatatggttcaggtctgccaagcttaagctggaaggagaggcttgaaatatgcattggatcagctagagggcttcattaccttcacactggctatgctaaagctgtcattcatcgcgatgtgaagtctgcaaatatcctacttgatgagaacctaatggctaaagttgctgattttggattatcaaagacggggcctgaaatcgaccagacacatgtgagcacagctgtcaaaggtagttttgggtaccttgatccggagtatttcaggaggcaacaactaacagaaaagtcagatgtgtattcatttggggtagttctgtttgaagttctttgcgcaaggcccgtcatagatccaacacttcctagagaaatggtaaacttggcggaatgggcgttgaaatggcagaagaaaggacagttggagcaaatcatagatcaaacacttgcaggcaaaatcagaccagattctctgaggaagtttggagaaactgctgagaaatgcttggctgactatggtgtggacaggccttctatgggagatgtcttgtggaatttggagtatgctctccaacttcaagaggcagtggttcaaggcgaccctgaagaaaacagcaccaatatgattggtgaactctctcctcaggtcaacaatttcaaccaggatgcaagtgcttcggttacacaatttgcaggctcaggcctcgatgatctgtctggtgtttctatgagtagggtgttctcacagttggtgaagtctgagggtagatagatggttctggatatcctatcttataaattctgtgtgacagtactcttctgttataatttttgttgtttttcttctgatcactagctctccgccacgacttggaagattagaaacttcatatcatagatttgtaaagaaagatttgagttaatgaaacatatatgtttgctt

SEQ ID NO: 7899 - DNA, 1072 bp, Glycine max
  Clone ID: 700725317_FLI
gggtcataccaatagccaagagctacaacattccttgtgctcactacaacattaccccagctttcaacaaagtctttttcgatccaccaaaggacaaaatgaaggattactcgctcgcaagcatatgtggtcctcccacgtggcttcctttcaccacaacgatccatatcaggccttacgagtttttgagagcatacgaaggtaccaaagacgaggagacaggtgaaagggcttcttttgatctcaacaaggcatattcaagctgtgacctttttcttctaagaacctccagagagcttgaaggagactggttggattatcttgctggtaattacaaggttcctgtggttccagttgggttgcttccaccatccatgcagataagggacgttgaagaggaagacataaccctgattgggtcagaatcaaggattggttagacacacaagagtcgtcatccgtggtttatattgggtttgggagcgagttgaagctgagtcaggaggacctcactgagttggcacatggcattgagctttcaaatttgcctttcttttgggcattgaagaacctgaaagaaggtgtgcttgagttgccagaagggtttgaagaaagaaccaaggaacgtggcattgtttggaagacttgggcaccccagcttaagatcttggctcatggagcaattggagggtgcatgagtcactgtggctctggctctgtgattgagaaggttcattttgggcacgtgcttgtgactctgccttatttgcttgaccaatgtctgttttcgagggtgctggaggaaaagcaagtggctgttgaggttccaaggagcgagaaagatgggtcttttactagggtcgatgtggctaagacattgagatttgcgattgtggatgaggaagggagtgctctaagagagaatgccaaggagatgggcaaggttttcagttccgaagaacttcataataagtatattcaagatttcattgatgcgcttcagaagtataggattccttccgctagctaagcaggattcatgctttccatttttccccttcttcattagcgt

SEQ ID NO: 7900 - DNA, 1842 bp, Glycine max
  Clone ID: 700725374_FLI
ctttgttggttatatttatgaggtttctgaactctgaagtaaggttttttctttttcttttttcttatttttcatattacgttgggaactcctcaacagaagcctggttctttggggagtgaaagcagctttgcgctagtgacaggaaacacaactatggattcagcagagaagaggctcaatgagcttggttacaagcaagaactgagaagagaaatgactttgtttaagactctggcaatatcattttccacaatgacccttttcactggaattacacctctctatggttctagtcttcaatatgcaggccctgcaactcttgtttgggggtggatagtggtttctttcttcacttggtttgttgggattgcaatggctgagatatgctcatccttcccgacgactggttctctgtacttttgggctgcccatttagctggtccaaaatggggaccattttcttcatggtgctgtgcttggcttgagaccatagggcttatagctgggatagggactcaggtaatatggtgaaacttctattttctagtcaatattttcagagaatgtttacatggtataacccatgcttttcatggttggaaaaggcatatgcaggttcacaaacgttgcagagtataatcctactctcaactggcacaaataaaggtggaggatacttcgctccaaaatggctattcttatgtatgtatattggcctcactgttatatgggcagcactaaacacatttgcattggaagtgattgctttgatcgatatagtttcaatatggtggcaggttattggtggaattgtgatagtcataatgttacctctggtagcactgactacaaaatctgcttcatttgtattcacacacttagaattggcccctgaatcaacaggagtatcaagcaaaccatatgcagtcattctatcatttcttgtcagccagtattctctctatggctatgatgctgcagcacatttaactgaagaaaccaaaggtgcagacaagaacgggcctattgcaatactaggtagtattgggatcattacagtatttggatgggcttacatcttggcacttacattcagcattcaggattttggttacctttatgatccaaacaatgagactgctggagcatttgttccagcacaaatactctatgatgcattccatgggagatatcacaattctgctggagcaatcattctactatttgtcatttggggttcattcttttttggtgggctttcaattactacaagtgctgccagagtggtttatgctttgtctagagacaagggagttcctttttcacacttatggcggcaactgcacccaaagtacaaggttccttcaaatgcagtgtggctctgtgctgcaatctgcattcttcttggtctcccaattttgaaggtcaatgtagtcttcactgcaataacttcaatatgtactattggatgggttggtggttatgcagttcctatctttgcaaggcttgtgatgtctgagaagaacttcaagcccgggccattttatttaggcaaagcaagaagaccagtctgtctggtggcattcctatggatttgttacacatgttctgtattccttttgccaactctgtacccaattacttgggatactttcaattatgcaccagttgctttgggggtaggtttgggtctaataatgctttggtggcttttagatgctagaaaatggttcacagggccagttaggaatattgatattcaaaatggcaaagtctaacttttataagtttaaagaaggaataattggtggaatatcatttatctttttttcctgtgtt

SEQ ID NO: 7901 - DNA, 914 bp, Glycine max
  Clone ID: 700725419_FLI
ctctattggtattctggcaagactaggtggaggtcatggtggctataaccagcttcttccagttgttgttccagctcctaagcctgctgttaccaagcctcaaccaacccccagtcccaagacaactccttctccagcttcatggtcaggcccaatttccattgaacagaaaaggaccacctcatgggttgccaatggaaaaacttattacagatactcaacagtcgtgactaacaaatctaacaagagtctcaattctctcaatctttcaatatccaagctttatggtccaatctggggtgtcacaaagtcaggtgattcatacacattcccatcatggctcagctcattatcagctggcaaaagccttgaatttgtctacatccattctgcttctccagcagatgtctccgtggcgaactacgtgttggcctgaaagtggcatgggaatggtttattgctttcttgtgtaagactgtgtagccatacaaatgtgcagcgaggggagtgtctttacgtttttccttctataatttggtgtcaaatcttcttcttcttcttcttcccttgtgtattttgcatttcagtaggttagatcaaaataggtagattatataagatggaaggaccggagcagaaaggagtgaagagacaaaaggcagagctcatcctctttcttctccgctttacaacttatatacagtgagtgatacaagacaggtagtgaaacagtgttgttgagaagttaaaaaaaaaaaggtgaacttctcaatatttcagagaagagtcatcacttgtatttttcaacagctttggatgtcttttctgtgtttgatgttgtaagctttgcagcattttgtaatctctacagagaaacagtttgtgctatatagtattatgtttttgtgctgtgc

SEQ ID NO: 7902 - DNA, 881 bp, Glycine max
  Clone ID: 700725452_FLI
gagaattacaactgaaattaaattgctatctgaagatgcttctaagccctctgccacttgcaattatcaagaagctatttccatatataaaaggattgagaagctgcaaacagaactctttcatcctttatcaatcaacttgatgcatactagggagaagattttgaagtcactaatggagctggaacactggacagaagctttagcatattgcaaattgaccataccattctatcaaagagtgtatccagctgttcaccctctgcctggcttgcaatattatacttgtggaaaactagaatggtatcttggagacacagaggaagctgttaaatcactgaccaaggccgtggatatactacggattactcatggcacaaatacacctttcatgaaggacctcttgatgaagttggaagaagcccgtactgaagcttcttacaaattttcctctaaagagtagtagaatggcacaaatacaccttttaataaggacctcttgatgatgaagttggaagaagcccgtgcctaagcatcttacaaattgtgctctatagagtagtagaatacaagttgatgattacagttgctctgctgtttgtagaagctagtcattaaaactgaatcacacaaaaaggattaataggtgttttcattagtgcttgcctagttgctcagtgagtcgcatgaatctcaatcggatgaattgctaacggccaaagagatggatgggaattatgggacaatttactttctattggtaggaagggtgcctcttttttttccgcttttttatatctttttgccaacgtgaatgttttaaacctgaaaagatacatgaaccatatttttttagaaaaatctacacgcatgatttgttt

SEQ ID NO: 7903 - DNA, 1018 bp, Glycine max
  Clone ID: 700725477_FLI
ggaacatatggttatgctgctcctgagtatgtcatgactggacatttgacatcaaaaagtgatgtctatagttttggagtagtgctacttgaaatgctcactggccggcgatctatcgataagaatagaccaaacggggaacacaatcttgtggagtgggcaaggcctgtacttggggaccggaggatgttattacggataattgatcctcgccttgaaggtcacttctctgttaaagggtcacagaaggctgcgcagcttgctgctcaatgccttaaccgtgatccaaaatccagacctatgatgagtgaagttgttcaagctctgaagcctttgcaaaaccttaaagatatggctatctcatcttaccacttccaggttgcgcgagtagatcgtactatgtccatgcctaaaaatggtatgcaagcacagttagcatctttatcaaggaagggtcaaccagtgaggatcttgtcaagtccaaaaggtcctcatggttctccatatcatcactatatcaagtcaccgaaacctaatggataagaatcatgtttctctctttgatttgcttctctattcattcagttccctcacaacttaggctatcaacagaacagaaactgtttgtgttttgaaaattgctctgaaacatgaggaattactagagttttctgaccttatctcatctcaaataaggttggggggaccatgagacagttcactggattttaaagtttagcggggaccaagttgaccaaacttgaatagaaaactagaacacagttttcacatgtggaatttgttactgtggagttgctatactttttctaccatttcacaagctttcttcttcctttcagaatgtacttttgtaaagaaaatagttggtggtgttaactcatgttattcatagatatttttacatactcatctgtcaatgtacttttcaattaatacctgtcaatgtaattaaatgttgtacgagaaacatgctagagtttggaatttgagagacttc

SEQ ID NO: 7904 - DNA, 1010 bp, Glycine max
  Clone ID: 700725572_FLI
ctgaaggggttgatatcatgcttataagagaactcactggaggtatctattttggagaacccaggggctttggcaccaatgataatggtgaagagattggctttaatactgagatttatgctacacatgagatagatcgcatagctcattttgcatttaaggttgctcaaaagcgtcgtcggaaactttgctctgttgacaaagccaatgtactagaggcatcaatgttatggaggaagagatttttggcaatagcacaagaatatcctgatgttgagctctcacacatgtatgttgataatgcctcaatgcaactaatccgcgatccaaaacagtttgacaccatggtgacaaacaacatttttggcgatatattatcagatgaggcttcaatggtcactggaagtattgggatgcttccttctgctagcctgggggcttcgggacctggactttttgaacccatacatggttctgcacctgatattgctggacaggacaaggcaaatccatttgccactgttcttagtgctgctatgcttttgagatatggcctaggagaagaaaaggcagctgaaagaatagagaatgcagtgatggacactttgaacaggggatttcgaactggtgacatatattctgctggaacgaagctggtaggatgcaaacagctaggtgaggagatactgaagtcagttgaatctaacgttcctgctggtgctgctgcagtgtgattttgaaaccaactcgccatagcattttgggttctggtttaggttggaggccactatgactgccaaagccgagaaagtctccctagtctattaagttctggcttccttctgtatcatgtatttcggttaacacacccagcctatgtatgattgaattttagaaagtagcaaggttgtttatcttgtattcttgtacccgggattctagtttcccttgcatgcgaggtcgcttgtaatggtggaataatgattaatggagtttgtcttgttaaaaat

SEQ ID NO: 7905 - DNA, 457 bp, Glycine max
  Clone ID: 700725821_FLI
agaaggggcaagttgtatgcatcattgaggcaatgaaattgatgaatgaaatagaagctgatcagtcaggaactatagttgaaattgttgcggaagatgccaaatctgtaagcgttgacactcccctatttgtgattcaaccatagagctcaaagtattcgaatggatggatgaagatctaagtcggtagttgaagtgtgaggctcatcaaccccccccccccccccaccttcaaggtagagaggaagtgtaggaagattttgttctaaattgggatgacacggttgagaagaattattgcttacaatggatttattccttatttttcgcttttatatgattgcactatgttctagtgaaccttttttttgtttaggcaagttaaattgtatgatatttaatctcatgtagtttgtttttactttttgttttgaaagggtgggggagcatttgaacc

SEQ ID NO: 7906 - DNA, 681 bp, Glycine max
  Clone ID: 700725871_FLI
gttaccatttgctcccagcactgagcttaaccgagcttcacaaagatgaatcgggaaaaattgatgaagatggccggttcggttagaactgggggaaagggcaccgtgagaagaaagaagaaggctgtccacaagacaacaaccacagatgacaaaaggcttcagagcaccctgaagagaataggggtgaatgccatcccggctattgaggaggtcaatatctttaaggatgacgtagttatccagtttctaaatcccaaagttcaagcatccattgctgctaatacttgggttgtcagtggttctccacaaacaaagaagttgcaggatatactccctagcattatccaccaattaggaccagataacttggaaaacctgaagaagctggccgagcaattccagaagcaggctcctgaaggagccactggttcaaccaccgcccaagaggagaatgatgatgacgatgtcccagagcttgttccaggccaggattttgagacagctgctgaggagaccaaggctgcttcctagagtgttttgttattgtgccattgccatatatatcccgtgtttttaaatttttttcttcttgattttccattttaagtatttaaggtgttcagttctcctgtcatactttaaacagttcaaatactttattaaatatgctttccttcc

SEQ ID NO: 7907 - DNA, 602 bp, Glycine max
  Clone ID: 700725874_FLI
caagaactacagctttcaattcacttcttgaagaacttaatgaggagagacaaaaagcacgaagcaagatgaagatgatgtttaatagatcttttggagcaacattcctggctagcacaggacaagaatctgctttcgcttataacattcatcagtatgcagatgtttataccagtaagccagagaattttcttctgcactcacctgaagcatggcttcatgttccatttgatgtcaagatcatgcctcatcatgtgaaggttccatcaagcttgttcaaaaccgggtgaacggttctcgaaatcattcaaactattagtggcattccgcagttctaataacggagtaatgatgagctgcaactggaagacaattgttgcagtagtaacgtgcattcaattttattcttgtcattgattccctcatttcatctcgacatagctaactttatctggtatgcttcaattaatagagaaagaaattagaaaaatgaaagccttctaatcatgtatatcaatttttcataaattggatatttgttgctatgctgtctaacaatgaatatttatttatattttaaataatatattacctatcaagat

SEQ ID NO: 7908 - DNA, 1541 bp, Glycine max
  Clone ID: 700725908_FLI
ccagcttcttcaggtaacagtaatactggagctattgctggaggagttgctgctggtgctgctctgttgtttgcagcccctgcaattgcacttgcttattggcgaagaaggaaacctcaggatcatttctttgatgttcctgctgaggaggatcctgaagttcaccttggtcagcttaaaaggttttctctgcgtgagttgcaagttgcaacagataactttagtaacaaacacattctgggtagaggtggatttggaaaggtttataaaggacgcttagctgacggatctcttgtagcagtaaaaagacttaaagaggaacgcacgcagggtggagagctgcaatttcaaactgaagtggaaatgatcagcatggctgtgcatcgtaatttgcttcggcttcgtggtttttgtatgacacctactgagcggttgcttgtgtatccttacatggctaacggaagtgtagcatcatgtttacgagaacgtcaagaatcccaaccgccacttggctggccagaacggaagcgtattgcactgggatctgcaagggggcttgcttatttgcatgatcattgtgaccctaagattattcaccgtgatgtcaaagcagcaaatatattgttggacgaggaatttgaagcagttgttggagattttggtttagctaaacttatggattataaagatactcatgtcactactgctgtacgtggaacaattggacatatagcaccagagtacctctcaactggaaagtcttcagagaagactgatgtttttggatatggtgtgatgcttcttgaactaataactggacaaagggcttttgatctagctcgacttgccaatgatgatgatgtcatgttgctcgattgggttaaaggacttctcaaagacaggaaattggaaacactggtagatgcagatttacagggcagctataatgatgaggaggtagagcagttaatccaagtggccttactatgcacacaaggctctcctatggaaagacctaagatgtctgaggtggtcagaatgctagaaggtgatggtttggctgagaaatgggagcaatggcagaaagacgaaacattccggcaagacttcaataacaacatacatcaccctaatgcaaattggatagtagattcaacttcccatatccaggcagatgaactatcaggtcctagatgatccctttaacattctatggacaagagtgaatacacgatcttgcctgacaaggctttctgttggaaagagatatacttctgattttgattttgtgcatataattttcgtcccctctaccttttctcttgttttcatccttttgaaattatcttctgtgctcagattacgtgcccattggtcaggttgtgattattaaagaaagaagattgtaatttctattgggctgtcaagttacaggatgaagtgtatgttacaagcaacttttgtcatagtacgtatgaggaattagtatagagcttttatggaaataaatgcaattctattggcgattacagtttattatt

SEQ ID NO: 7909 - DNA, 1134 bp, Glycine max
  Clone ID: 700725928_FLI
atcgaccgcagctacaatgcaaggttaggtgattttggtttggccttaagaggccatgttgatgattacagactcaggtctactcctcctgctggcaccatgggctatcttgatccttgttatgtcactcctgataatttaagcaccaaaactgatgtttttagttttgggattttgttgttggagattataagtggaaggaaggctattgatatcacttattcacctccttccattgtggattgggctattcctcttattaagaaagggaaattgttggctgtttatgatcctagaatagcaccccccaaggatccgattgtgaggaagcagttggctgtgattgctgccaagtgtgtgaggtcttgtagggagagaaggccctctatgaaggagcttgttacttggctttgtgggttgtgtaaattggtgcctcttcattcgtggaatggttttaacaacccttgcatgatggctgagattgcagggcgcccagtggaagcggcggcggcggcggcaaggaattatggtcaattcagttctaggctggaaggtgtggaggaaggaaagtttgatgctttggatggcaggttgtcaaagtctgcaatgaggtattctaggagggtgtactctgatttggggttcagcagcaacttgatggacttgatggctaccactgaggagcccgaatttcttagagatgcggatggggtggaacatagttctaagtcagctgaacaagtttctggtagctccagcaggtttgggagtggaagatattccataagagggaggaatctgtaccggccttgttggagcgacaaggatgcattaggcttgagtaaaggccagattttaggtcagagtgagactacttcgaaacaggatggggtttctggttccaattcgaagaatttgaattctgttgctgctgaggttatctagtttgaatttaattgccgagacatttaattggagtgatgatgcctaggcttgtgagctttccttgcttgcaaattgtgtagatttgttgttggttcattatttgtggatttcagattcatttttagtaggtttttggattgaagggcacattcctgatgtccccttaacgttgttcaaaaagctttgcct

SEQ ID NO: 7910 - DNA, 1415 bp, Glycine max
  Clone ID: 700725965_FLI
ggcaaaaggccattcatcctaagtagatcaacttttgtgagttctggtaagtatgctgcccactggacaggagacaatgctgctacatggaatgatttggcatactcaatccctgcgatattaaattctggaatctttggaattccaatggttggagcagatatatgtggtttcggaggaaatacaactgaagaactttgccggcgctggatccagttgggggctttttaccccttcgcaagagatcattcagacaagaactccaataggcaagagctttatctttgggactccgttgcagattcagctaagaaagtgcttggcctccgttatcgtcttctcccttatttgtacacactgatgtatgaagcacacacaaaagggacaccaattgcacgaccccttttcttttctttccctgaggatgtcacaacttacgaaataagctcacaatttctattaggtaaaggggttctggtgtcacctgtgctacaatctggggcaacctctgttgttgcatactttcctaaaggaagctggtttgacctctttaatgtctcaaattcagtgaatgcagaatcaggcaagtatgttactcttgatgctccatctgatcacataaatgtgcatgttggggaaggtaatattttagctttgcaaggtgaagcaataacaactgttgctgcccggaaaactgcatttcaacttgtggtagttatcagtaacagcggaagtagttttggacaagtgtatttggatgatggggaggcacttgacatagcaggggtgaatgatcagtggacattggcaagcttttatggcgcattacacaacaacagtgttttagtaacatctaaggtcactaatgcaagatttgctctggaccaaaggtggatcatagacaatgtaagtttcttggggatacctaagaataagagatttaatggaatggatttggcaggaaatgagttgaaaattgtgaatggcatggattcaatgaggacggcagttgtgaagtcagaatttgatagctcttctcaatttgttaatgtacaagtttcaaaattgtcacttcctattggagaggaattcaagctggagatagaaatcaagtagaagggtactttaagatagcaaattcccacaaagaatttgtgctctctttatagttgcatcgttttggctcttcgttttatcactgctaaggttactatataaggatgtcattttcccaaaccacgacacaaacattcataaaatgtcatattttgtgtcaggaataaattttacagaatattgtcaacatggctatgaagttcaagcctaaacgtatgtctgcctatcaataacggggtgagtattacctagtactggtggtcgctcttaatttatgcaatcaatgtagcaattacctt

SEQ ID NO: 7911 - DNA, 2027 bp, Glycine max
  Clone ID: 700726075_FLI
taagcagaacacattcactgtgaagaggctcaaggcagtgctgcataacttgatcccaggtcttaaggctagcctttcttctagcaaccaagacttcaatgaattctcagatgttgatggcctttacagtgaagggttgctcataaagttggggtgggggttgcaagatgacgtgttgaagaaaattccatttgtcagcaaaatccaagagtccagccagggtcttcttaagtatgacactcctaagatcatttccaaggacaaatttgcgtggttgcgagatgacgaatttgcccgccaagcaatagcaggagttaaccctgttaacattgagaagcttcaagttttcccaccagttagcaaactagacccagaaatttatggcccccaagagtctgctcttaaagaagaacatattttgaatcaactcaatggcatgactgtccaagaggcaataaacgaaaataagctgtttatgattgattatcatgatatatatctacctttcttagaagggatcaatgcccttgatggtaggaaatcatatgccacacgcaccatctttttcttgacaccacgtggcactctcaagcctgtggctatagaacttagcctccctcatgctggacctaattcccggtcaaagcgcgtggttacacctcctgttgatgctactactaattggatgtggcagcttgccaaggcccatgtttgctccaatgatgctggggtgcaccaacttgttaaccattggttacgtacacatgccaacttggaaccatttatattggcggctcataggcaattaagtgctatgcatccaattttcaagttgttggacccccacatgaggtacaccttggagatcaatgccttggctagacagagtttgatcaatgctgatggaatcattgaaaattgctttactcctggtcgctatgccatggagattagttctgctgcctacaagaacttttggcgctttgacatggatagcctccctgcagatctcatccgcaggggaatggccgtacctgacccaacacagccacatggtctaaagctcatattggaagactacccttatgcagctgatggaatactaatctggtctgcaatagaagactgggttcgaacctatgtgaaccattactaccctcactcaagccttatatgcaatgacaaagagttacaatcttggtactctgagtcaatcaatgtaggccatgctgatctcaggcatgaaagttggtggccaacattgaacaatagtgaggatcttgtgtccattctttccacattgatttggaatgcatctgcacaacatgctgctctcaactttggccagtacccttatggtggctatgtgcctaatcgtccaccactgatgagaaggttaataccagaagagggtgatccagaatatgcaagtttccatgctgaccctcagaagtattttctgaatgcattgcctagcttgctgcaagccacaaagttcatggctgtggttgacacactctccactcactcacctgatgaggagtacttgggggagaggcaacaaccttcaatttggtctggagacgccgagatcgtcgaggcgttctacgatttctccgccaaggttcgacagatagagaaggtcattgatagcaggaaccttgatcggactctaaggaaccgttgtggtgcaggggtgttgccatatgagttgcttgctcctagctctgaacctggcgttacatgcagaggggtgcccaatagtgtgtccacataactatactaaactaataaataagggagtcactcccacattttgatacgcattaatatatatgtaatggttggcttactatttactaccatggacagtgactctcagtggatgcccattttgtacctagatttaataagttgttatagtatatattggtaacctagggctgtatagactgtatatgaaaatgagtttggtggggttggaggatgtgtgactgtttataaagttattatcacaatttatagtt

SEQ ID NO: 7912 - DNA, 883 bp, Glycine max
  Clone ID: 700726094_FLI
caatgtctttgatgccaaccatgatactctagtgtgggcactgcagaagaatggtttcggaaacatgcctataattgtgggagaagttgggtggcctacagatggagacagaaacgcaaaccttcaatacgcgcaacgcttcaaccaaggcttcatgtcgcgctacattgccggaaaagggacaccaatgaggcctggtcctatggatgcttacttgtttagtctcatagatgaagatttcaaaagcattcagccgggtaattttgaaagacattgggggttgttttactatgatggacaacccaagtacatgcttaacataggatcaagagccaatggcttagtagctgctactggggtggcatatctacccaaaaagtggtgcattttgaaaacctcagcaaacctcaatagtgatcaagtggcaccaagtgtgtcttatgcttgtcaaaatgcagattgcacaagtcttggatatcaaacttcatgtggtggtttagatgctcgtggtaatctttcttatgcattcaatagttacttccaagtgaatgaccagattgacagtgcatgcaaattccccggtctttctgttgtcactgacaaagatccttcaactggagattgcaagttcaaaatcatgattcagacagattctgctggtctacatgggaatgggagaatttggtctctcagaatagtactctttgtacttttgtttttcactcttatgtgacctttaaagattttagatttatttttggagaatgtcaacagtgcctgatttttcatattcatcatgtgggttagagctaatatatgtaaagcttgttgaagatcacagaaacttctttgcagtgttcaatagttgacaatattggttttt

SEQ ID NO: 7913 - DNA, 1875 bp, Glycine max
  Clone ID: 700726177_FLI
aggtgacctccctcagactatgagctcactttcacgcataaccaccatgtatctgcaaaataaccagtttacaggcactattgatgtccttgctaatctgcctctggataatctgaatgtggaaaataataattttactggatggataccagaacagttgaagaacataaacctacagaccggtggtaatgcatggagctcagggcctgcacccccacctcctcctgggacacctccagcacctaaaagcaaccagcaccacaagtctggtggtggaagcaccaccccctcagatactgccactggcagcagctcaattgacgagggaaaaaaatctggtacaggaggtggtgccatagccggaattgtgatctctgtcatagttgtgggggcaatagtagcattctttctggtgaagagaaaatccaagaagtcatcttctgatttagaaaagcaggataatcagtcctttgctccacttccttcaaatgaagtgcatgaagaaaagtccatgcaaacttcctctgtaacagacttgaagacgtttgatacttctgcctcaataaatcttaaacccccacctattgaccgtcataaatcatttgatgatgaagaattctccaagaggcccacaattgtgaagaagactgtaacagctcctgcaaatgtgaaatcatattctattgctgaactgcagattgctactggcagcttcagtgtggatcaccttgttggcgagggatcttttgggcgtgtttaccgtgctcaatttgatgatggacaggttcttgcagtgaagaagatagattcatctatccttcccaatgatttgacagatgattttatacaaataatttcaaacatctccaatttacatcatccaaatgtgacagagcttgtaggttattgctcagagtatggacaacacctcttggtctatgagtttcataaaaatggatcactgcatgacttccttcacctatcagatgaatatagtaaaccattgatatggaattcccgtgtcaagattgctttggggactgcacgtgctctagagtacctacatgaagttagttcgccatcagttgttcataagaatattaagtcagccaacatattacttgatacagaacttaatcctcatctttcagatagtggattggcaagttatattccaaatgccgaccagatattgaatcataatgttggatctggatatgatgcacctgaagttgccttgtctggtcagtatactttgaaaagtgatgtctacagctttggagtcgtcatgttggaacttctcagtggacggaacccttttgatagctcaaggccaagatctgagcagtctttggttcgatgggcaacacctcaactccatgatattgatgcattggctaaaatggttgatcctgcaatgaaagggttatatcctgttaagtctctttctcgatttgccgatgttattgctctttgcgttcagccggagccagaattccgaccaccgatgtcagaagtggttcaagcactggtgcgactagtgcagcgagctaacatgagcaagcgaacatttagtagtagtgatcatggaggatcccaacgagggagtgatgagccagttctacgagacatctaaatcccaaagcaaatgtagttatatttttctcccaagctagttcggttatttgtaatataatttccaatagttgcaaatttgaattgatgggttccatattctgttgatacctatgtaaacctgtccaaatcagcttattacaatgacagtaacggttgcactggcaatgtaaccagcctttcacactaagtaccaacgatagatgacaataaaattcaatagaggacaatactaacttt

SEQ ID NO: 7914 - DNA, 2629 bp, Glycine max
  Clone ID: 700726285_FLI
cggcacttgtttgagcctaaaacgcacctccaaaggacactctttctccctcactcacttaaaaactcaacactttcccaatgggttgcacggcgtccaagctagaaaacgaggacacggtgcgccgctgcaaagagcgccgccgcctgatgaaggaggcggtgtacgtgcgtcaccacctggccgccgcccattccgactactgccggtccctccgcctcaccggctccgccctctccaccttctccaccggcgaacccctctccgtctccgaccacacccccgccgtcttcctcaacaactcccaacacctccaacaccaacaccaacaccaacaccagcaccaaccttctccttctcctccgccgccgaaactcgaccccatcctaccccgccgccgcaaaccaccgccgccgaagctcccgcacatcctctccgactcaagcccctcctccaccccaagaagccacgtgtcaaacttcttccccaccgcacattctacttactcctccaccccttcccaaacctcctccgtttggaactgggaaaatttctaccctcctccacctcctcccgcttccggttacttccccgaagaacaacaacaaaaattctcccacactaaaacacaaacaccttctcattactctcacaaaacacaaacaccctctcattactctcacaagacacaacaacacaccaatctccaaatccacgacactgattctgagagatctgaatacgattacttcgacggaaaactcgaaaccgagaatgagaatgagaaaactgattctcattctcatcatcttccggaggagtatactgaaactgagagggaagaagttcagtgtagtgaatggggggatcattatagtaccacgagttcttctgatgatggtgatgatggggtggagggggatgtggagtcgcgctccgagatcgggacccggtcgaatttcgggtcgtcggtgcggaccgagtcggtggttggcggcggtggggcgaaggggttcgacgcggcgtcttcggtggcggcggagatgaagatggttgtgaggcacagggacttgagggagatcgtggaggctattaaggagaatttcgataacgcggcttccgctggggataaggtttctgacatgcttcagatcagtaaggcgcagcttgatcgcagcttcaagcaattgagaaaaaccgtgtatcactcgagtagcatattgagcaacttgagctctagttggacctcgaaaccgccgctggcggttaagtaccggctcgacaccggttcgctggacgaaccgggcggtccaaagagtctctgctccactttggaacgccttttggcgtgggagaagaagctctacgaggagattaaggctagagaaggtgtgaagattgaacatgaaaagaaattgtcagcactgcagactcaggaatacaaaggagaggatgaagctaagatattcaaaaccaaggcttccataaataggctgcagtcactaataagtgttacatctcaggctgtgtctaccacctcaactgccattattggccttagggactctgatcttgtccctcagcttgttgatctcatacatggattcatgtacatgtggagatcaatgcaccactaccatgaaattcaaagcaatatagtgcagcaagtccgtggtcttgtgaacagatcatcaagaggtgactccacttctgaactccacaggcaggcaactcgggaccttgaatcagccgtttcagcttggcacaacagtttttgtcgccttataaaatttcagcgcgaattcatcctgtccttgcatggctggttcaagctcagccttgttccagtccacaatgataacatcaacggcagggaaacctctgaaacataccaattttttgatgaatggaaactcgcacttgaccgtgtccctgacacggttgcatctgaagccatcaagagctttatcaatgttgtccacgtgatatcttccaagcaagtggaagagctcaagatcaaaaaacgaaccgagactgcatctaaggaacttgagaaaaaggcttcctctctgcgaaacctagagaggaagttctacagctcatattctatggtaggcattagccttcctgattctgcacctgacaatggacaagtgttggatgcgcgtgacccacttgctgagaaaaaaatagaactggcaacctgccaaaggcgtgtcgaagatgaaatgctgaggcattcaaaagctgtggaggtaacaagagccatgactctcaacaatttgcaaacaggcttgcctggagtgtttcaggcattgaccagtttctcttccttgttcgctgaggcccttgaatcagtgtgtacccgttcatatgccatcaagtaggttaggtaattcatttgttctgcatgggatctaagttcttcataagggatgggggatttttttggcggcaagctcttattgctctcactattttgagttatattttgaaatgtaaatatgaagaattttgaggttccacctattttgatggaaagaaagggaattttctcattgtacagggaaatttcttggtttattgtatcagagggttgcaatttttaatatgtcaataaattatacgc

SEQ ID NO: 7915 - DNA, 548 bp, Glycine max
  Clone ID: 700726289_FLI
caggaattgtggaaagccatcacagacactataccatgtaccgcgatcgtggttaaaaccaagtggcaacattcttgtattgtttgaggaaaagggaggtgatccaacacaaatatcttttgtcacaaaacagacagaaagtttgtgtgcacatgtatccgattctcacccaccacccgtagacttgtggaactcagatacagaatcaggaagaaaagtaggtcctgtgctatcactcacttgccctcatgataaccaagtcatctcttccattaaatttgctagctatggaacaccccttggaacctgtggtaacttctaccacggacgctgcagcagcaacaaggctctttctattgtgcagaaggcctgcattggatcaagcagttgtagtgttggagtatcaagtgagacattcggaaacccttgtagaggagtggcaaaaagtttagcagttgaagctacttgtgcgtagacagacatgtttcttcaataacacttcccaattttctgaagatgattccttctaataagcaaaagtagatttg

SEQ ID NO: 7916 - DNA, 654 bp, Glycine max
  Clone ID: 700726307_FLI
gcaagaacagcagttgtattcttctgctttgccatcgtgaaaacagttgatgatcactgtggattgtggttgcctggcaacatcttccatatctttttccagaataacacagcttaccatgacattcatcatcaactgcaagggctgaagtacaattattctcagccattcttttccatatgggacaaacttctcgggacatacatgcctttcaatcttgtaaagcggcctgaaggggggttcgaggcaaggctagcaaaggaatagtcacactgtaggcatctgatggcatcatttttccttaggaccagaccagaggctttaccactgtaggcatttctcaagttcattggagcttactggctttttcagttcatcgtgttactttaggtttgccaacccaccttgtgtagcataactatgatgatgtgattaaggagttttttcattatttattatgaatttatgatgtacttaaaacacatttttgaagctgtaagttgctaaaagagtaccgtaccgggtttttacgctggtattatttgtgattcctactactggttcacttgtataatttattatgaatttttattgtaatccagaaccattgggttgtcgaagatatcattataatccatttacttttgaatggtt

SEQ ID NO: 7917 - DNA, 866 bp, Glycine max
  Clone ID: 700726336_FLI
agcagcacttggccaaagaataaatttggagggcattctatgttcaactatggtgatcttaaaagacccgaaattggcaatgccccatatttctgttcctgatataaggtatgttgattgggctgagctgcgtagaaagggatttaagggtgttgtctttgacaaggataatactattacagcaccttactctttgaagtcctggcctccacttgagtcttcattggagtgttgtaaatcggagtttggtcatgatattgcagtatttagtaactctgcgggacttcatgaatatgaccatgacggttcaaaagctaggatgcttgaaggggcaattggaattaaagtcataagacatagggtgaagaagccagccggtacagctgaagaaattgaaaagcattttggttgtgaagcttcacaattaatcatggttggtgatcggccattcactgacattgtttatggcaatcggaatggatttctaactattttgacagagccattgagtcttgctgaggagccgtttattgttaagcaggtgaggaagctagaaacttcatttgtaagtttctggtctagaagagggttggatccacttagccagaagttattgtcagatccaaagccatgtgtcaaagagccatatcattgacaagactaatatccaaacactgcacaattttttggccatcagaagtactgctttttagtaaagtaatgccctttagttaagtaatgcatacatgtcaatatattttttttaaaagcctatctagtttattttttaccacatgttaaatacatatttctctgtcctttatctggtaaagttatctcctcagcttaaagcgtgttttttttgt

SEQ ID NO: 7918 - DNA, 1177 bp, Glycine max
  Clone ID: 700726366_FLI
atcagatagttgaacacctgattgtttgcttcctcaaactggtctctctcttccctcacattccatagtcgtgcttgaggaagcaaacaatcagatagttgaacacctgaaaataaaggaagatgaactttcaaaatcaatcagctcatgtagggttgaagcagatgttatcaaaacctggattaattttctggaagatacttgggttcttcagtggtcaaatgcagaaattaatgacaagcaggtcaatgatgaattggagagacatgaggactactttgtgaacttggccattcaacttcttactacttaccagaaagagttagagccttgcattaaccatatcaaaacatttgtcgtgaacctcaagaatttaagtcagagatacaggttagagatgacacccagtgcagatactgatgagtcagaagtattaagtccaaggagaaatcttgaggaggaatatttgacctatgaagccaagattattactaccttcagtgtagtggataacatgaaacaacagttttatgctcaacacgggaaaatttccaggaaagatgaggagagagttatagagctgtttgatgccattgaaaagttgcgaactcaatttgagtctattgagagaccaattcttgaaatagagatccctgcaaaagctgaaacgccacctttggagaaaaagtctgatgctactccttcagtttctgttccagctcaaggtgctgcagctcaaggtatcgagctttcaaagccagaaacagatgagcaaccaaaatcaccttcagttaagacagaccagatattggatcatgaagcggaattagctaagctggaatctgagtttgggaaggttagtaaggattattcagcagaggaaattggtgattgggaatttgatgagcttgaaagagaattaagcaagtagttaggttatttatgagtaattaatgcttgctgttgcattttgatgatgaagtgcaagtaccataaatttgtaagccataggtcggctgttaatgaagcttcaatctggatcggattcctttgaatttgtaaacattacatagcataatttctttattcttctgtaaattaacgggtttgcaacttgcagcccagtcaacaaaagatttgaaatgatcagtatggttagaattttgaacttcggatg

SEQ ID NO: 7919 - DNA, 1832 bp, Glycine max
  Clone ID: 700726391_FLI
ttaggagtttcacaacgcagctgcgcacagcacagtcctgaccctcccagaaaaccctaatcagcgtatcgaatagttggaatctccaattcttgtctttatctcttgaccagaaaaaatgtgcgaagccgtagaaattgaagaaaggcccaaatacaaagatatcagacgctattactgcgagtactgcggtatctgcagatccaaaaaaacccttatcacctcccacatcaatttgcaccacaaggaagagtatgaaaaagcaagagctgaaagagatcccgaagcagaggcttcgaaatcgaacagttgcgaggaatgtggtgccactttcaaaaaacacgcctatttgttgcagcacatgcaaagtcattcacttgaggtatttgaactcttgattaattattatataagaaaaataagttggatacagtcaaactctaaaagcacataagaaaactgtatttaaaagctatgtcttatagaccgttgtgttccttgagaaacatttgatttgcggaagacaggctttgggttgtgacttgattgtgctagttgttttatagactgaagatacatattttgcaggaaagtaatctataagtttctaaaatcattggaaaattatgggttaatagtgtgaagcattggatcccagagaaagatctccaaaatgcgcgaggcagcatatatggacttgatggattagtatcaggtagggtgacctcctgtgaagctccatcaaggatgcctcggtcacgctctgtccaaaattgagaggccatttgtgtgtgctgtcgatgattgtcaggcaagttacagaagaaaggaccacctgactcggcaccttctacagcatgaagggaagatttttaagtgccctgttgagaattgcaacagtgagttctctttgcaaagcaatatgaaaagacatactgaggagattcatgatgacagttctaccactaccagtagtgacaaaagtcacaaacagcatatgtgtccagagattggctgtggaaaggtttttagatatgcatcacagctacaaaaacatgaagattctcatgttaatttggaatcagtagatatggtgtgcttagagcctggttgcttgaaacatttcactaatgtccagtgccttcaagcccatgtgaagtcctcccatcagtatatgacctgtgacatttgcgggacaaagcaactgaagaagaatattaagcgccatcttcgatcacatgaagctgaaggcagttcatcagagacctttcaatgcgagtttaagggttgcagctgcacattctcaagaaaatctaatctagacaagcataagaaggctgtgcactttaatgtaaagccttttgcgtgtgggtttactgattgtggcatgagatttgcttacaaacatgtgcgagataatcatgaaaaaactgctaaacatgtttttacccttggggattttgaagaagctgatgaagagttcaggtcaaggccgaggggaggaaggaagagaacatgtcccactgttgaaatgttaattaggaagagggttaccccacctagtcaattggaacattggttatttatgcaggatagtgagtagagtgcatttagcactctgtgctcctaatactagtaggtaaaatgtaaatttaacatgttgacacgagtatataatatgtatacagtttggattattgttaacagatatataggatttaggacaacaacgtgtaataatgattgatgcttatgagttatgacagattccatagtgtagcgaatctattaaccgttgtaccaatttgcaatttaaacaactgcatttgttt

SEQ ID NO: 7920 - DNA, 886 bp, Glycine max
  Clone ID: 700726414_FLI
gttaatggccagatccttggggctgcagagtttgacaacacctttgggtgggataacaagcatgctggagcaagaatacttctttccaaggaattcctggttcaaagggtacaatccctccatgactacaaggggcatgcggacaatttcgtctgttccctaatttctgggacctctttgtcttccacccaatataccccaggtggccttcttttcaagatgagtgatagcaacatgcagtatgtcacatccacctccttcctactgctaacatatgccaaatacttgacccaatcccatatgcttgttaactgtggcggaatcaccgtaaccccaaggagactccggacaatagctaagaaacaggtggattacttgcttggagacaacccattgaagatgtcatacatggtggggtatggtccacggtacccacgaaggatacaccataggggctcatctctaccgtcgattgctgtacacccgggaaagatccagtgttccgcagggttcagtgtgatgaattcgcaatcccccaacccaaacattctcgtgggggccattgttggtggaccagatcggcatgataggttcccagatcaacggtcagattatgagcaatcggagccagctacatacattaactcaccccttgtaggagcactggcctatcttgcacactcatttggtcaactctaggaaccccaattatttcgtgtatcccatgttttatttcactagtctcgctagttacttgtgtctcctagaattattatgcacacactcatttgagaccagtaccacaccactaaaccttataaacttatcacaagctgcttaacttaatactattatgtgtaactcttatgatttcggaaagtggtat

SEQ ID NO: 7921 - DNA, 1160 bp, Glycine max
  Clone ID: 700726505_FLI
tcgggatggagagaatgaggtttgatggaagaagatggtcaggcttccggtcctccacatcaaacctcgggatggagagaatgaggggaaggatgccaattcagcaaccttctcatccaatgaagggagatgttgtcacaaacctagatttcatccggaagaggaagatttctagtgacttcaacatgatgatggatcagaaaatatacacatgtgagcacccccaatgcccttatagcgaagttcgccttggtttccatgataggtctgctagggacaatcatcaattgaattgtgcatacagaaacagttctgcagattatggtggtggtcccaatttccatgctactgaggataagccagtcatattcccccagtcctttgttcaacccaacactacaacacagtctgcaagtttggttgcaccttcatttgatctaactggtcttggagttccggaggatggacagaaaatgattagtgaccttatgacaatctatgatacgaatgttgtaggaaacaagaacttaagttcctccaactgtgtagctgtagaaaatcataacctttctcaggccagcttacaacaacaagaaagttatttccctggtcaaggaatggtgttggaagggaacttctttgcacgagaggaaggtcaatttgaccggttcaaggccaccatgaacatgaacactcataccccttttgataccaaccatagcaacaataataatatccatttgatgtttaattccccttgtgatttgtcatcctttgatttcaaggaggatatacaaggaggagtaggaatggatcctcttcacaaacagcaagaggtttcaatttggtaccagtgaaaatgacaagaggggaaactcgtgtatcaagggcttttattgtgtcattaaaaggggacatgtgaaagtcccttgactcaaaaggcagttaatgcatttttcttcccatgtaatcgtttaggtctttagatatttttatgctttggcaggtctggtctggtggtactatattatgggttaataaatcatgggtgttcccataatgtaacccttttaatgtgtgtctttatgtgttagccctatgttgttacttactatcatatgtacgactgtgacataaataaaagatttttattctcttat

SEQ ID NO: 7922 - DNA, 1514 bp, Glycine max
  Clone ID: 700726516_FLI
gttggccagttagacgctgcgcaagattcgctcaagtggatcactgattatctcatcaatgctcacccttctgagaatgttctctatattcaggtgggtgatcctgttgcagatcacaagtgttgggaaaaaccagaagccattactgaggaacgaccactcatacaagtgaatgcatcttgtcctggatcagacgttgcagctgaaactgcagcagccatggcctcagcatctttggtctttaaaaagactgatcctacatattcaagcactctactcaagcatgcaaaacagttgtttacttttgctgacaagaatagaggttcctatagtgagaatatacccgaagtccagacatattataactcaactggatatggtgatgagcttttatgggcagctagttggctctatcatgctacgggtgatgattcttaccttcagtttgtgactggccaagatggagaagactatgctcaatggggaagcccaacctggttcagttgggataacaagcttgctggaactcaggttttgttatctagattaagcttttttaaggcaaaggacatttcgaattcatatagctctgggctccatagttacaggaaaactgctgaggctgtaatgtgtggtcttcttccggattctccaacagccacaaaaagcagaacagatgatggtcttatatgggtgagccaatggaactctttgcaacatcctgttgcatccgcattcttagctgctgtttacagtgactatatgctaacatcgcagacaccaaaactaaaatgtggttcagattcctttaccccatcagatcttcgagactttgccaaatctcaggctgattacgtattgggcaagaatcctatgcatatgagttttctggtgggctatggagataaataccctcaatttgtgcatcataggggtgcttcaattcctgctgatgcaaaaactggctgcaaggatggcttccagtggcttgagtcatctgatcctaatcccaatgtagctactggagcacttgttggtggacccttcttaaatgagactttcattgattccaggaacaattccatgcaaacagaaccaagcacgtacaacagtgctgtcatagtcggtctcttatcaagtttagttaccacgtcttctgccgttcaatcctttacctaagctgtagcttcctatccgtcctgagttgcacttgttgacgtagatttatgttttttgttgctttattcacttcccaatccttacaaatgaagtgttgtcaaaagcacgaaacataatattgtaacgatatgcatgattgtatgagtgtaaaccctgaggtttggataggtttatcgtgaatatgtacgggtgtagtttgctttggcattattagctcagcaggtgtggagctattttgttgtagtatgtagagcaaatctttaaaatttattattattataaccactgcttttattattatcatcatcattagacagactatgatcacattattg

SEQ ID NO: 7923 - DNA, 1515 bp, Glycine max
  Clone ID: 700726640_FLI
gagaactcaagaaatggagagaataacagagaatggatcagatagtagtgtgagtttgaggagaaatacatctaacaatgggcgtcgagggttgccaatgatccaaacggattccgaagtgtgccacgacgacagcacccctctcagcaactccaatccatcaggtttatgtgaatgatcaatttctgaattgggatccagaacacagaatcaaagtccgaatagtatctgcaagagcttatcattccctatttatgcacaatatgtgcatccgacccactcctaaagagctagaggaatttggaactccagacttcactatatacaatgcaggactgttcccttgtaatcgttacacacactacatgacttcatcaactagtattgacatcaacattgcaaggaaagaaatggtcatccttggcacacaatatgctggggaaatgaaaaaaggtctctttggtttaatgcactacctcatgcccaagcgctatattctctccctgcattccgggtccaatatgggcaaagatggcgatgttgcactcttttttggattatcaggtactggaaagacaactctttctacctatcagaaccggtatttaattggagatgatgagcattgctggagtgaaaatggggtgtcaaatattgaaggaggttgctatgcaaaatgtgttgatctttcaaaggataaagaaccagacatctggaatgccatcaaatttgggacagtactcgaaaatgttgtttttgacgagcatacccgagagagaacactcgtgcagcatatcctattgagtacatacccaatgctaagataccgtgtgttgctccccatgcaaagaatgtcatcctactagcttgtgatgcatttggggtgctccccccagtaagcaagctgaacttggcccaaacaatgtaccatttcatcagtggctacacagccctggttgcagggacagaggatggtataaaagaaccacaggctacattctctgcttgtttcggggcagcatttataatgatgccccctaccaaatatgcagcaatgctggccgaaaagatgcagaagcacggggctactggatggcttgtcaatactggctggtcaggaggaagtcatggattaggcaatcgaattaagttagcgtatactaggaaaatcattgatgctattcagtctgacaagaagacctaccaagatacactcttgaaactagcaagcctattcaagaagaattttgatggattcacgacctacaagataggaggggatcaaaagttgactgaagagattgtctctgctggtcctatattctgatgagagcacttccaatttagcgaaacaaaaatgaagttcaaaagcatttggtgattacttctacttaaaggttttcactgtatttagcttgcttgactataagacgatccccttattattgacaagttcgacaatacgtaaatctgttaatttgccagtgtttaatgattgagaatttcggacttgtc

SEQ ID NO: 7924 - DNA, 845 bp, Glycine max
  Clone ID: 700726793_FLI
gtcctgcttattacaagcgtggggattatgttcctggattgaaggtagatggcatggatgctcttgctgtgaaacaagcttgtaaatttgcaaaggagtttgctttgaagaatggtcccattattcttgaaatggacacatacagataccatggccactccatgtctgatcctggcagcacataccgtacacgtgatgagatttctggtgtgagacaggagcgtgatccaattgagagagtaagaaagctactattgactcacgagattgctactgaaaaggagctaaaggacattgaaaaggaaataagaaaagaagttgatgaagccattgccaaagcaaaggaaagtcaaatgccagagccatctgatttatttaccaatgtatatgtaaaaggctttggtgtcgaggcttgtggcgctgataggaaagaagttagagctattttgccctgatggaaaacttttcctttgaatttcttttccttagttttggaccgatcaaaataatgaagaataaaaggttcagaagatcatctctgcctatttgttgagctttccccaaattgtatatgaaattgattcttcagtagcaatggggcggaaattaatgttttgccatgtaattttggaggatctaacactcatatgacctcaattgattaagcatgcaactagtgtcctgcaaatttggaggatttcgttatgcaaaacctccatgattggcaaaattttgccattattttatttttaggtattcacaagattgtgttccaattgaaaccattttttggctataagagtctttggacagttaaaaatttgatgcctgtacattgcagattg

SEQ ID NO: 7925 - DNA, 1728 bp, Glycine max
  Clone ID: 700726816_FLI
cgtggctcacctccgaagggaagtggcgaatcaccataggatcatccagtttttctctggttggacgatcctaacggtcctatgtactacaagggatggtatcacttcttctaccaatacaacccgaacggtgcagtttggggtgacatagtttggggacacgcagtgtcaagggacatgatccactggcttcaccttccactagcaatggtggctgatcaatggtatgacatgcaaggtgtgtggacaggctcagccacgatcttaccaaacggtgaaatcatcatgttatacacgggttccaccaacgagtcagtgcaggttcaaaaccttgcataccctgcagacccctctgaccctctccttgtggattggatcaaataccctggaaaccccgttttggtgccaccaccaggcattggtactaaggactttcgcgacccgacaaccgcgtggctcacctccgaagggaagtggcgaatcaccataggatccaagctcaacaaaacaggcattgcattggtttatgacactgaggacttcaagagctatgagctcaaggagggtttgcttcgcgctgtcgatggcaccggcatgtgggagtgtgtggacttcttccctgtgtccaagaagaatgagaatggattggatacatctgttaatggggatgaggtgaagcatgtgatgaaggtgagcctggatgatgatagacatgattactatgcaattgggacttatgatgagaagagtgtcttgttcacaccagatgatgctaagaatgatgttggtgttggattaaggtatgactacgggatattctatgcatccaagacgttttatgatcagaataaggagaggagacttttgtggggttggattggagagtctgacagtgaatatgctgatgtagccaaaggttgggcttcagttcagagtattcctagaactgtggagcttgataggaagactggcagcaacttgcttcagtggcctgttgctgaggtggagagtttgagattgagaagtgatgaattcaaaaatttgaaggctaaaccagggtcagtcgtgtcaatagatattgaaacagccacacagttggacattgttgccgagtttgagatagacaaggaaacccttgagaaaacacctgaatccaacgaggagtacacgtgtggcaacagtggtggatctaaacaacgtggtgccttaggaccttttggtcttttggttttggcagatgagggcctttttgagtatactcctcagtatttttatgtcattaaagggagcaatggaaatcttaagacttccttttgcgctgatcaatcaaggtcttctcaggcaaatgatgttcgcaagcaaatcgttggcagcgctgttccagtacttaaagatgaaaagttttccttgcggatactggtggaccattctattgttgaaagctttgctcaaggtggaaggacggttgtgacatctcgggtttatccaacaaaggcaatctatggagctgctaggttgttcttgttcaacaatgctactgaggccactgtgacagcctcactcaatgtttggcaaatgaattctgcatttatacgcccattccaccctgatcagaagaattaaaataaataattaaattggatataaaagacttgtagtcacaaaggatcggaaaacatcttggggtggcaatttgtactcatcaattgtttaccttcccataaacac

SEQ ID NO: 7926 - DNA, 1317 bp, Glycine max
  Clone ID: 700726923_FLI
gctgacaagcacgtgaggaaggcactggagaagggacaggtgcacgtggaacacatgtgcagcaacgcattggccatgacgaagaacatgaccgacagtgacatagctaactacgaatacaatatgagagttgaaaataatggacaaaatggtaatagcaataggaagttgttggtggagaatgatgttgagtggccggagtggatttcggcggcggataggaggctacttcaggcgtcgacggtgaaggctgacgtgacggtggcggcggacgggagcggggacttcaagacggtgacggaggcggtggacgcggctccgttgaagagtagtaagaggtttgttataaggataaaggctggggtctatagagagaacgttgaggtgcctaagaagaagaacaatatcatgttcttgggtgatgggaggaccaacactatcatcactgctagcagaaatgttgttgatggtagcaccaccttccactctgccaccgtcgctgtggtgggttcaaatttcttggcccgggacttaacattccaaaacacagcgggcccatcaaagcaccaagctgtggccctaagggttggtggggacctctcagcattcttcaattgtgacatcctagcattccaagacaccctttatgtccacaacaatcgccaattctttgtgaagtgcctaattgctggcacagtggatttcatctttggcaactctgcagtggtgttccaagactgtgacatccacgccaggcttcctagctcgggccagaagaacatggtcacggcccaaggaagagttgaccctaaccaaaacactggcattgtgatccagaagtgtaggattggtgccactaatgacttggagtctgtgaagaagaatttcaagacatatctagggaggccttggaaggagtactctaggactgtgatcatgcaaagtagtataagtgatgtgattgacccaattgggtggcatgagtggagtgggaattttggattgagcactttggtttatagggagtatcagaacactgggcctggtgctggtacttctaatagggtcacttggaaagggtataaggtcatcactgatactgctgaggccagggaatatacccctggaagcttcattgggggctctagctggttgggctcaactgggtttcctttctctcttgggttgtaaattatgttcaacttttgagcattataattgttacctattattgttatgttttttattagcaaaagggctgaagcccaagctagaaccctctacagaaaggcactccctagagaaacaaagttgacc

SEQ ID NO: 7927 - DNA, 1238 bp, Glycine max
  Clone ID: 700726925_FLI
gtgaatgattcgtgctaccatcaactcgtcagccactggctaaacactcatgcggttgttgagccattcgtcatagcaacaaacaggcatctgagcgtggttcaccctatttacaaacttttgtttcctcactatcgtgacaccatgaacattaattcacttgcccgcaaatccttggtcaatgcagacggtattatagagaaaacattcttgtggggtaggtactctttggaaatgtctgctgttatttacaaggactgggttttcactgatcaagcattgcctaatgatcttgtcaagagaggagttgcggttaaggatccatctgctccccatggagttcggcttttgattgaggactatccttatgcttctgatgggctagagatatgggatgccatcaagtcctgggtgcatgaatatgtctcattctactacaagtcagatgcagcaattcaacaagatcccgagctccaagcttggtggaaagaacttgtccaagtgggtcatggtgatttgaaagataagccatggtggcaaaagatgcaaactcgtgaagagttgattgaagcctcggctaccctcgtatggatcgcttcagcccttcatgcagctgttaactttggacagtatccatatggaggtttaatcctaaacaggccaaccattagcaggagattcatgcctgagaaagggtctgctgagtatgcagctttggctaagaaccctgagaaggagtttttgaagactattactggcaagaaggagaccctcattgaccttacaattatagaaatcttgtcaaggcacacatctgatgagttctaccttggggagagagatggtggtgactattggacttctgatgctggtccactagaggccttcaagaggtttggaaagaagcttcaagagattgaacaaaagcttatacagaagaacaaggacgagacgttgagaaaccgcagtgggccggctaaaatgccttacactttgctctatccttctagtgaggagggattgactttcagaggaattcccaacagtatctccatctaggggctctatggttgttgcagtactttccctggttttcaataaaagtgaatagaaggaatatgattccttcatctacctatgtatggttaagttatgtatttggggtgattgaatgttctcgtgtttgctgttaagtgttaatgaagaaattctgtttgtataaattgctgttaagtgtt

SEQ ID NO: 7928 - DNA, 2124 bp, Glycine max
  Clone ID: 700726944_FLI
cttagccgcaatgagctatctggagacatccctaatgagataactggcatgaggatattgaattacttgaatctttctaagaatcatttagtgggtagcattccctcttcgatatcatctatgcaaagcttgacttctgttgatttttcatacaacaacctgtctggtttggtgcctggtaccggtcaattcagctacttcaactacacgtctttcttgggaaaccctgacctgtgtggcccctatttgggtgcttgcaagggtggggttgccaatggtgcacaccaacctcatgttaaaggactctcctcttctttgaagctgctacttgttgttgggttgctattatgttccattgcttttgctgtggctgcaatattcaaggcccggtcattaaagaaggccagtgaggctcgtgcatggaagttgactgcgttccagcgtttggacttcactgttgatgatgttttgcattgcttgaaagaggataatattattgggaaaggaggtgctggaattgtctacaaaggggctatgcctaatggggatcatgttgctgtgaaaaggcttccagctatgagtagaggctcttcccatgatcacggattcaatgctgagattcagacattggggcgaatccgacacaggcacattgttaggttgttgggtttctgttcaaatcatgagacaaaccttttggtctatgagtacatgcccaatggaagtttaggtgaggttcttcatggaaaaaaggggggtcatttgcattgggacaccaggtataaaattgcggtggaggctgccaaggggctttgctatctgcaccatgattgttcgccactcattgtccatcgtgatgtgaagtcaaacaacatccttcttgattcaaatcatgaagcccatgttgctgattttgggcttgctaagttcctgcaagattctgggacatctgaatgcatgtctgctattgctggttcatatggatacatagctccagagtatgcctacacattgaaagttgatgagaaaagcgatgtgtacagttttggtgtggttcttttagaacttataacaggcaggaaaccagttggtgaatttggtgatggcgtggacatcgtgcaatgggtgaggaaaatgacggactctaacaaggaaggagttcttaaagttcttgatcctaggcttccctcagttccccttcacgaagtgatgcatgttttctatgtggccatgctgtgtgttgaagaacaggctgtagagagaccaacaatgcgtgaagttgttcaaatactgaccgagcttccaaagccacctggctctaaagagggagacttaacaataacagaatcctctttgtcatcatcaaacgctttagaatctccatcctcagcctccaaggaagatcaaaatcctcctcaatccccaccacccgaccttcttagtatttaaagtgctctgttgggtgtttcatcttattagttcccttggttgtgatagcttatccatttactttctttttctgtctctcttctggggttggggcttttcttcttcttctaactgaaggtattaatgctctgattttttaatggttttgtacagtaggattggtggggggggttattttcttatgaagtcactttcttcatcatgtagtactgctttttaatttttatgttacggccgttgttgtgcttcgcctaagctggggagtggggagggttcaagggaatggatactctttttttatgcgatcactgacaggtagacacaaaatgacgcaaacgggttgggtattaaacagtgggtatattgtatggtttagaatattattgatgaatcctgagtggattggcacagtgtgaactgtgagcctgagctgtgactgagtctatgagtcaggtttggataaaagcttatttgaagaagttaacctgtttcgagaaaatcagagtgaatcaggattcaggcgtgttttagctttagttcgttgttcatgccgtgacgcttttacagaagttaattcttttgctttagctttttcatttacgagactttgtagcgctaaaaaggatataatttttttcccttgttaaataacaaaagagaggcattggggatgac

SEQ ID NO: 7929 - DNA, 1849 bp, Glycine max
  Clone ID: 700727034_FLI
ctttcttttttctctctctctctctctgtgaaatggagccgtttgcttagagctgcttcttctgatctttgaatcttgatctagatatctagatacagaattggaaatggattcaaatgggagcctacgtgctaacacctgggcaaggtcgtcgtccttgacctctcctgcaagtggtttatcctcagatcctctttctttcccaggttttggtttgcagcataatcaacaaaaatgggatgttccctcaaattcagattttggaatcagggctgaagcacctttcaaagaattcaatcagccctctcaaacccagtctccgcttccttgcaactcaaacaatgagattgaaatccctggtcaagaaaactgtcatctgagtgaatcatcacaaaccaatacactccaagattgggaccccagtgtgatgttgaataacctatctttcttggaagaaaagattcatcagctccaggatctagtgcatttgattgctcgtcaaaaaggcattggacaacctaatgaacttgtaactcaggaacagcagctcgttacaactgatctcacatcaatcattattcaattgatctctaccgcaggtagtctcctcccttctgctaggcataaccttgtaaacactagttcattggttggacagattgaccagcttcgtgggacgaccattcctcctgggaccggtgcaagtaacggctgtattcaaccacagaataatggtggaaaaatattgtctgatcagtccatgcagactgatctacctaatagtggtgaaatggagcaaaagtacaatatggtagaacatgacttgaaagatgaagaagatgtagaggatggagaaaaccttgcccctggttcatatgagattctacaattagaaaaagaagaaatccttgctcctcatacccatttctgtacaatttgtgggaaggggttcaagagagatgcaaatcttcgaatgcacatgcgaggccatggtgacgagtacaaaaccccagcagcgcttgccaaaccgcacaaagaatctgcatcaccaaagcctatcaagaggtattcctgcccctatcctggctgcaagcgcaacaaggatcacaagaagttccagcctctgaagacgatcttatgtgtcaaaaaccattacaaaaggacgcattgtgacaagagttacacttgcagtaggtgcaacaccaagaagttctcagtcatggctgatctaaaaactcatgaaaaacactgtggtaaggataaatggctctgttcgtgtggcacaacattttctaggaaagacaagctttttgggcacattgctcttttccaagggcatgcaccagccattcctttggatgacactaaaggggcaggggtagctgaggcacccattcatgatagcaaagagaacaacagtaaggtgcagagcatgaacttcacttttggatcaaatccttcaaatgcaaatgaagttccaaatgccatggatgtaaaaggcgatagcgatgatcctatcaattatttctcatcattgaactttgaagccaactttggtgagtttaatgaattcaccagacctctatttgatgacccagaaggttcgttctcttttgtcatgcctggatctttcaaatctggaggagaatctagttctgacaatcttttataacaatggtactaccattggttctgtaataacttaatatctatgtttctcttaattgtgaagatataactttcgggtttgtgttaaatttgtaaagccggtttaatttcatgaccatgcaaatccttaagaaggatgttagattttcttgatgattttataaattataaattgcgcgtc

SEQ ID NO: 7930 - DNA, 904 bp, Glycine max
  Clone ID: 700727038_FLI
cggatcttcggattcttaatttttcttacaacaaattttccgggaatatccccaactcgatttcttccctggcgccgaaactgacgtacttggagcttgggcacaactcactttccgggaaaatccctgattttctgggaaaattcaaggcgcttgacacgcttgacctgtcatggaacaagttttccggaacggtccctgcgagtttcaagaacctgacgaaaatcttcaacctgaacctctccaacaacctcctggtggacccgttccccgagatgaacgtgaaagggatagaatcgttggacttgtcgaacaacagttttcacctggggagcattcccaagtgggtggcttcgtcgccgataatattctctctgaagcttgtgaattgcggaataaagatgaggctagaggattttaagccttcggagacttatttctatgattttattgatctttcggggaatgaaatttcagggagtgcaattgggttggtgaatagtactgagtatttggtggggttttgggcttcggggaacaagttgaagtttgatttggggaagttaaggtttggggagaggttgaagtttttggatttgtctggtaattgggtgtttgggaaggttccaaacagtgttgttgggcttgagaagttgaatgttagctataaccatctttgtggtcagcttcccaagaataagtttccggcaagtgcttttgttggaaatgattgtctctgtggttctcctttgccaccctgcaacaaagcataagtgtagtaagctttgttgttgatgatttcaagtgtttaatttccttttactgctaagttttccaataattatgtaatttaataagtaaattgtaattttaactttcaatatatactatatatatttacttt

SEQ ID NO: 7931 - DNA, 1442 bp, Glycine max
  Clone ID: 700727070_FLI
caaaggttgctgtaggagataagattgcagtagtgctaagtgctaacacctgcagtgaacaatggcctctgcatcagcatctctgctcaagtcttcacttgttcttgacaagtctgagtgggtgaagggacaaacccttcgccaaccttctgcatcagttgtgagatgcaaccccaccaccccatcaggcctcaccatcagagctggttcctatgctgatgagctcgttaagaccgcgaaaacagtggcttcaccagggaggggtattttggccatggatgagtccaatgctacctgtgggaagcgtttggcttcaattgggctagagaacactgaagctaaccgccaggcataccgtaccctcctcgtgacagttccaggccttggtcagtacatctctggtgccattctctttgaggaaacactctaccaatccacaactgatggcaggaagattgttgacgtgctgcttgagcaaaacattgttcctggtattaaagtcgacaagggtttggtgccccttgcaggttccaacgacgagtcatggtgccaaggtttggatggtctagcctctcgctcagctgcatactacgagcaaggtgcccgtttcgccaaatggcgtactgttgtgagcatccccaacggtccctctgctctggcagttaaggaagcagcctggggtctggctcgctatgctgcaattgctcaggacaatgggttggtcccaattgtggagccagagatcttgcttgatggggagcatggtattgatagaacttttgaagtagcccaaaaggtctgggcagaggttttcttctaccttgctgagaacaatgtcctttttgagggtattctccttaagcctagcatggttacacctggagccgagtccaaggacaaggccagtcctcagacagttgctgattacaccctcaagctccttcacaggagaattccccctgctgtccctggaattatgtttttgtctggtggacagtctgaggttgaagctaccctcaatttgaatgccatgaaccaatctccaaacccgtggcacgtgtcattctcgtatgccagagccctccaaaacactgccttgaagacatggggaggccgcccagagaacgtgaaggcagcacaagatgcactcgcattccgtgccaagtccaactcactcgctcagcttgggaagtacactggtgagggtgaatccgaggaagccaagaaggagttgttcgtcaaaagctactcctactaagatgtttgcagtgaatatgatacttgttaggcagcaacaccagcagttacagtaggtgttgacggacgatgaagtggaagactaatttgtctaaaatgtaatgtttttatagtcttggagactatttttgtttatggttaaatgcacctttacagcttaataaaccttttgctatgagttgtgt

SEQ ID NO: 7932 - DNA, 796 bp, Glycine max
  Clone ID: 700727090_FLI
agcagatccacctgttatctacagggacttgaaatctgcgaacatcttgttagataatgaattcaacccaaaactgtcagattttgggcttgctaaacttggacctgttggagacaatacccatgtttcaaccagagtgatgggaacatatggttactgtgcaccagagtatgccatgagcggcaaattaactcttaaatctgatatatatagctttggtgtgcttttgttggagttgatcactggacgtagggcaatagatactaatagaagaccaggagagcaaaacttggtttcatggtctcgtcaatttttcagtgaccggaaaaagtttgtacaaatgattgaccctctattacaagaaaacttccccttgcgctgtttgaatcaggcaatggctataactgctatgtgtatccaggagcaaccgaaattccgtccacttattggtgatattgttgttgcactggaatacctagcttctcatagtaatccctaaagtccatagacatggtggtgcagctcaccacaacaacctccttttgaaatggacataaattaatatttactggtatctgattctagcttgagctcccatttctgtatgattctgggtaatgatttccttaccggtttggtcagtgtaagctaccaacttggctatttaaagtgtcatatgttattgctttaattaacttattgccacagcagtagtgaagataaacttcttgatatagcactagtaaacatgtggattgatttaattgcaatggatgagtttatgcttatttaggct

SEQ ID NO: 7933 - DNA, 1400 bp, Glycine max
  Clone ID: 700727416_FLI
gcatggcaaaagaggagaggatagggtgcctttagattgggatactcgactgaaaatagccttaggtgctgcaagaggcattgctcgtattcatgttgagaatggtggcaagcttgtacatggcaacatcaaatcctcaaacatcttcctcaacaccaaacagtatggctgcgtgtctgaccttggcctggcaaccatatcaagctcacttgccttaccaatatcacgagcagccggttaccgtgcaccagaagttacaaacatctgagggctgtgctgcctttctggtgtcgtttctgctctgctagggtttcatcttcttccatcacctccgtcgcaatgaaaccaggcttcatctgaatccgattccccttcgccccttctcctccttcactttcaccttctccgaatcctctaccaattattatgatgaactccatcttcgtctctcacaaccttcgcgtctttggtcccggcttgaatcccttcgcaccttattgcatcgccaatcacaccctttcctctcgctaaataccaattcccctctccgattttcggggttactttacttggtcgttttgcttttttctttgtggtcgtttttgctttaattgctgagaaagatagaaacatgctcgaggaacagcctgttgttttgttcaggaagagcccttccaggaggcgcttgagatctgcctttgataccgatgataggggttggacctcgcttcatgttttcgctcgaaaaggcgaactcaaattggttaaaaaacttatcaatgaaggaatggatgtcaatgtgtctgcttggggccccaaatcaaaaggggtgacccctctccaccttgctgccgaaggtggtcacattggagtgatggatgtactacttgagcgtggtgctgacattgatgccagaactaagggtgcctgtggctggacaccgctccacattgcagccaaggaaaggaggagggatgctgtgaaattcttgttagagaatggagccttcatgccacctgatatcagtgatagcagatttaacccaccgcttcattactgtcccgggctggaatgggcctacgaggagatgaagcgacttcgtcaagaagatttgtctgctggagagacatcttacagctccgaaagttaatttgcttttcagggacttggttggtgtttgatagtgtgtgtttggatgccgttcagaggagatcaatgtgtgtcagatcagagttaatatgactagcttctgcgtcacctttataaatttgacatgaaaatttgttgatatgtgcattcagaaagcgtatccagacatgcactgaatctgtattgtgggaataaatgtagaattgaaataaaacaattatgtatgtgtaactattttagcatgttcgatc

SEQ ID NO: 7934 - DNA, 1775 bp, Glycine max
  Clone ID: 700727744_FLI
gatgctaccacaaccacctttcaaaccagtatattacacattggttattattgacctttgtaaggctcttcctggagcctttcctgcagttgtagctggagctgttcgtactctctttgagaggattgctgatttggatatggagtgtcggacgcgtctgatcctttggttctcacaccatttatcaaacttccagttcatctggccatgggaagagtgggcttatgtcctagacctcccaaggtgggcccctcaacgtgtctttgttcaagaggttttggagagggaagttcgcttgtcatactgggacaaagttaagcagagtattgaaaatgcacctggtttagaagaattgcttcctccaaagggtgggccgaactttagttttggtgcagaagatgataaagaaagcaatgaacatgtactgtctggacagctcaacaacatggttaaaggaaaggcacctgtccgtgaaataatctcatggattgatgaaagtgtgcttccaaataatggtctagaagttaccctcagagtggttgtacaaactcttctcaatattggatccaagagtttcactcatttgatgactgtcttggagagatatgggcaagtctttgcaaaattatgtcctgaccaggataagcaagtcatgctgatagctgaagtgagttctttctggaagagtaatacccaaatgacagcaatagctattgacaggatgatgggttatcggcttgtttcaaatctggctattgtgagatgggtcttctcagcagagaatattgagcaatttcatatgtcagatcgtccttgggagattcttagaaatgcagtaagcaagacacacaatcgtatttctgatctaaggaaagaaatattatctcttaaaaagaatatttcatcatctgaagaagctgccaaggaagcaaaagcagagttagatgctgcagagtcaaaacttacactagtggatggtgaaccagttattggcgacaatcctgctaggttgaatagattgaaatcacatgctgaaaagacaaaggaggaggtggtgtctcttcaagaatctttagaagccaaggaagctcttctttcccgagcaattgaggaaaatgaggcattgtttctcttgttgtacaaaagcttctcaaacgtgttgacagagcgccttcctgaaggatctagaacactgcatgagttgaagtctgcacaagttgatgtggtgatggcagtggaccctgaagagccatcgtcaatggaattagacaaccagaatcagagacctcaaaacagtcatacaaatggcgagaagaaaggtggtgcttataatgtaggtgaaaaggagcagtggtgtatcaccactttgggctatgtgaaggccttctctaggcagtatgctgctgagatatggccccatgttgagaagttggatgcagaggtattgacagaagatgcacctcttctttttcggtcagctgtttattctggtcttcgaagaccaattcacgaggcttgatcaatttgatatttcacttctaagttgtgtttttttagaattaactaaaattcattctttagtctgtcagttaagcattttcttagtcaaccaaaagcgtaaagctgtatgcaattgtaatgtaagtgacaaggttggtatgacgagtctccgctgtttagattctaacgggaacttgaccactgctactgtacattatttcgattatagctactaatttattggaccttaaatacaaagaatgaagtttgtacgc

SEQ ID NO: 7935 - DNA, 913 bp, Glycine max
  Clone ID: 700727763_FLI
agcatagtcaatccatggacgggtcaaccaccatcaagcctgagttgctggtctcgggttcggaagacatgtcggcggctgattccaaaaaagcaatatcagctgccaagcttgctgagcttgccttgattgaccccaaacgtgcaaaaaggatatgggcaaataggcagtctgctgcgaggtcaaaagagagaaagatgcgatacattgctgagcttgaaaggaaggtgcaaacattgcaaacagaagcaacatctttgtctgcacaattaactctcttgcagagagatacaaatggcttaaattctgagaacagtgaactgaagctgcggttgcaaaccatggagcaacaagttcacttgcaagatgcattaaacgatgcattaaaagaggaaattcagcatttgaaaatattgactgggcaagttatggcacctaatggaggacctatgatgaagcttgcttcttttggaggggggcagcaattctatcccaataatcatgtcatgcacactcttttagctgcacaacagtttcaacagctacaaattcaccctcaaaagcagcagcagcaacaacatcagcatcagtttcagcagtttcagcagcaacatcagcatcagcatcagcagcaccaacaatcaagtgacttgaaaatgagagaaacttcacctactccatgccccaaagacaatacttcgtcagatgtaaatccttctggagccaaggattgttgagagttgagactgctcattgtcttctctatttgcttcgtagattttcctttgtcttgtgtcttagtgtgtttagcctttgttatattttttcattcttaaacagtacaaatggtcctagttagagattgagaataatacatttgcatctttggtattgtgtaatattaaagttgttt

SEQ ID NO: 7936 - DNA, 796 bp, Glycine max
  Clone ID: 700727819_FLI
aacgaaacgaagcgtgccacaacgtcgttttcactgcagggttcaacgcctacggagggttaaagaaccagttcccctacgtcttaaaatggctagggctaagcggcgaaaagctccatgctgacctcgcgcgtgaggttcggcgcgtggtgaacgacgagggaggtgtcacgttcaccgcgttggagaacatgcctctcgtgaagtccgtggtgtacgaggtaatgcggatcgaacctgcggtgccgtaccagtacgcacgcgcgagggagaaccttgtcgtttcgagccatgacgcgtcgtttgaggtgaagaagggggagatgctgttcgggtaccagccgtttgcgacgagggatccgaggatcttcgaggatgctgaggtgtttgttccgcggaggtttgttggggagggggagaagatgctgaagcacgtgctgtggtcgaatgggagggagacggaggagccttcggcgagtaataagcagtgtcccgggaagaatctggtggtgctgctgtgcaggttgtttctggtggaactctttttgcgttatgatacgtttgagtttgagtatacgcaggctgggtttggtcctactattaccattaagtccctcactaaggcctctaccatctgagtttggggtttattatcttccttgtggcagcgtggttttagcttaatttttaaaaaaatgtatgtgtttttaactttttgtttttttctaaagacatgttgtaaaaaaaataagcgatgttttttttaaatttaatttggaccgaaaatattattatt

SEQ ID NO: 7937 - DNA, 1934 bp, Glycine max
  Clone ID: 700727849_FLI
gttccaaatttcactgccagcgaggcagagagagaaactagagagagagagagagcgaacacaccgttcatttctccttcgtcgtcgtcgtcgtttcgccgtcgcattttccggcgaggtttctctgttttgtttaaccgaaatggaggatccgtacgttctcggttggattctgtgctccgtcctgagcctcttggcgctctacagcctggccttcggcggagcgggccgtcgccgcgcttcgccggagaagaggaacgagttatcggagaccgtgacgacctccgccggagaatgcagatcggagaaacgaaacggcgacgctgacgtcatcattgtcggagccggcgtcgccggcgccgccctggcgcacactctcggaaaggatgggcgtcgagtacacgtcattgaaagagacctgagtgagcctgatcgaattgttggagagttgctacaacccggtggctatctcaaattaattgagctcggacttgaagattgtgtggacaaaattgatgctcagcaagtgtttggttatgcacttttcaaggatgggaaacatactcgtctctcttaccccttggagaagtttcactcagatgtctctggcagaagctttcataatgggcgctttattcagaggatgcgggagaaagccgcctccattcccaatgtacgattggagcaaggaacagtcacttccctaattgaagagaaggggacaattaaaggtgtgcaatataagaccaaagatggtcaggaattggcaacatatgcacctcttaccattgtttgtgatggctgcttctcaaacttacgccgttctctttgtaatcctaaggtggatattccctcatgctttgttggtttagttttagagaactgtgaacttccatgtgcaaatcatggccacgtcatactgggagacccttcgccaatcttattctaccctataagcagtacagagattcgctgtctggtcgatgtacctggacagaaggttccttctatttcaaacggtgaaatgggaaagtacttgaagacaacggtggctccacagattcccccccagctttatgatgccttcattgctgctgttgacaaaggcaacataaggacaatgccaaacagaagcatgccggcagatcctcatcctacacctggagcccttttgatgggagatgcattcaacatgcggcatccactaaccgggggcggaatgacggttgcattgtctgatattgtggtgctgagaaatcttctaaggcccttgtctgacctgaatgatgcacccacactctgcaaataccttgaatccttttataccttgcgtaagcctgtagcatccaccataaatacattggcaggtgctctttacaaagttttttgtgcatcccctgatcaggcaaggaaggaaatgcggcaagcttgttttgattatctcagccttggaggcctattctcggaaggaccagtctctttactctctggattaaatcctcgtcccttgagcttggttctccatttctttgctgttgcaatatacggtgttggccgtttattgttaccatttccttcacctaagagagtatggattggagcccggctaatctctggtgcatctgcaatcatcctccccataattaaggctgaagggattcgtcagatgtttttccctgccactgttccagcttattacagaacacctccagttgcacaatagtgagtatatgtgaaattagtgaatatattttgaaaaatttaaggtgctgtcgataacatatggtagcttatcctgctttttgtcagaattgagggaaggttcagttcgtagttctgtaagcattttggcttctttattgtgtattctttgtagtctgtaactcaatgttataagtgaatgtatgatctctctttcctttttggtacaccag

SEQ ID NO: 7938 - DNA, 2614 bp, Glycine max
  Clone ID: 700727869_FLI
ggaagcgcaggagttcggagagatgatggagcacgtcgacgaggtcaatttcgccctcgatgggcttcggaagggtcagcctctgcggatcagaagggccagcttggtgtcgctcttgacaatttgcgccaccacgcaccagagaaggctcctcaggactcaagggatggcaaagacaataattgattctattttgggcctcagtcttgatgattctcccagcaatcttgcagctgcaacccttttctacgttttgactggtgatggccaagatgatcacctccttgaatcacctggttctattcaatttctgatgaagttggtaaaaccaattatctcctcagctattaaagacaaagcaccaaaatttggctataaacttctatcattgcgtcagaatgatgacatgctgaaaaatacgaatacaacgggaagattggactccagttctgcagaagttttttctagagttcaagaaattctagtaaatttcaaagagctgaaaacatgtcagaatgacagtagggtggagaggccagagttatgcccaaaatggttagcattgctgactatggagaagggttgtttgtctgccatttctcttgatgaaaccagtggtgctgtacggaaggctggtggaaatttcaaggaaaaattaagggagcatggaggacttgatgcagtctttgaagtcaccatgaattgtcattcagatttggagaattggatgaaggatagttctctgtctaccaaagatttaagaaatgacaaacgaatcaagagcctaactttgcttctcaagtgcttgaagataatggaaaatgcaactttcctaagcaatggcaatcagactcatttgcttggaatgaaaagaaaattgagtcctcagggacccccaacttcatttacggagctgattataactgtcataaaaatcctctcagatctatgtttacatcgaagtgcctctgctgcatccaatgataacaagccttatgatcccttctctatgaccagtcatgattctgaactggatcagctcagagactataaagagaatgagactttatccatcagttccactggaaagtaccacggtgtggagagagcctcttctgttaagagttctaatgcttctcagatcaaccgaatattgacatgtaatcggttggaaagttcgctatccatttctgaaactcccagcacttcaactactgatacttattcactaaagacgagggtcagttcttccatgtctgggtcttgtagtggtgcatctaagagttcatactgtaaaacatccacgattcaaaatagttctgggaagaatgttcgctttatggaaggtaccccagttgtaatattggatgatagccaagatccctttgcatttgatgaggatgactttgcaccctctaagtgggatctattatcaggaaaacaaaaaaaatctcattctaaaaagcatctggtagcaaacagagagtttgaaaatgaatgtcaatctcacaccaatgtgagccaacgagaattaagtaatggagacatcaattgttccagttctgatgttggtgatgaaaaagattccagccttctagctgactgccttcttactgctgtaaaggtgctgatgaatttgaccaatgacaaccctgttggctgtcggcaaattgctaactatggaggattggagactatgtctatgttaattgctggtcatttcccttctttcagttcatcgtcatcctttgctcaaataaaggaaaatggtgcaggaacgacaaaagatcatcaatccgataggcatctgactgatcatgagttagatttccttgttgctattctgggcctgcttgtaaacctggtcgagaaggatggtcataacagatcacgacttgcagcagccagtgttctgctaccttcctcagtaagcttgcaccaggaggttcggaaggatgttattcaattattatgctccattttcttggctaacctgggtgaaagtgaaggagctggggaagataaacatttgcaactgaatgatgaggcagctgttctacaaggtgaaaaagaagctgagaaaatgattgtggaagcttattctgcgctgcttctagcatttctttccactgaaagtaagagcatccgtgcagcaattgctgacaatcttccagaccagaacttagcaagtcttgtacctgtgttggacagatttgtggaattccatctatcattgaacatgatttcgccggagactcataaagctgttagtgaggtcattgaatcgtgtagaattcgatgaaagctcaaagggaaactctgtacagccacggcataatttagggtttgttgttattccggaggaaatgggactctgttacacgagtctgaccaacttttattctctgctcacagcgcttatacccttattcttgtattaccatgctggtgatgacgctgagttgtttgtatacaaaaaaatcaatagtgagatacgtacctagcatagtttgtgtgtaatcaatagtggtaatttttttttcaatattcttgtttattcattcattttcttgtattggactttgtttcaagtgcccaagtccctttgtttcgg

SEQ ID NO: 7939 - DNA, 1393 bp, Glycine max
  Clone ID: 700727910_FLI
ttttggtattgtttttcaggctaagtgccttgaaactggggaatctgttgccataaagaaggtgttgcaagacaggagatataagaatagggaactccaggttatgcgcacagttgacaattctaatgttgtcaaactaaagcactacttcttttcaactaccgataaagatgagttgtaccttaacctggttttggagtatgtacctgaaactgtctacaaagtttcaaaacactatgttaggatgcaccaacacatgcctatcatttatgtgcaactgtatacctaccagatatgtcgtgcgttaaattatttacatcaagtgattggtgtttgtcatcgtgacatcaaaccccagaacctattggtaaatacgcagacacatcagttaaagatatgtgattttgggagtgcaaaggtgttggttcccggtgaacccaacatatcgtacatttgctctcgatattatagagctccagaacttatatttggggcaactgaatacacaactgctattgatatgtggtctgttggttgtgttttagctgagcttctcctaggacagccattgtttcctggagagagtgggattgatcagttagtagagatcattaagattttgggaacacccaccagagaagaaataaggtgcatgaatccaaactacaacgaatttaagtttcctcagatcaaagctcacccatggcacaaggtttttcacaagagaatgccacctgaagccgtggatcttgtatcaaggctgcttcaatattcaccaaatctacgttgcactgctttggctgcatgtgctcatcccttctttgacgatctgcgggacccaaatgcatgcttgccgaacggccgaccactacctcctttgttcaacttcacatctcaagaactggcgaatgcacctgaagagttgcggcaacgcctcattcctgagtatgcaaggagttgaatcaattccaaagttgaaacatctctagggcattgtaaatgggttttgaattattggacaccctcttggtcatcgcccctgaccagcctgttctgttctgttcttcagcctcttctctgcacaagtcacaactgtgactatacaaagtgagaaacctcgacaccttggaaagttctatcaagtaacttgtaaagatctgcaggtgactcaaatggataaagtggtactacctggtgatacagggttgcaagcctttttttttttgaagtagtttataaatttggtgcctcagttgtgaaagataatgagttctaagttctaacaatcttgtaagcatgttttcatatagttcaagttcgtttattaattattactttattccttgaagtggaccaagtggaatcctcaattgaataggcttcgcttcttcac

SEQ ID NO: 7940 - DNA, 687 bp, Glycine max
  Clone ID: 700727949_FLI
caattcttcgctttaacgaaaaaggacacattttcccttacaatggcacgaaccaaacaaactgcgcgcaagtccaccggaggcaaggcacctcggaagcagctcgccacaaaagccgccagaaagtcagctccggcgaccggcggagtgaagaagccgcatcggttccgccctggcacggtggcgctgagggagatccggaagtaccagaagagcacggagctcctgatccggaagctccccttccagcgcctggtgcgcgagatcgcgcaggatttcaagaccgatttacggtttcagagtagcgctgtttccgcgcttcaggaagcggcggaggcttacttggtagggttgtttgaggacactaatctctgtgccattcacgccaagcgcgtcaccatcatgccgaaggatattcagcttgcgcggagaattagaggcgagagggcttgaggattttttaatgatttgtcactgctaggatacgttaaaactggatctggtttatgtagtttgtggttttggtgtatttattcgaccgtaagggttgtggttgttagtatgaagatgtagagttaacattatctggctaattagttggttaatgtttactttgaatttgctgtttgtgtgaatgaattaaaagggttgattgcaatggattttggttatttttaaccctttttt

SEQ ID NO: 7941 - DNA, 1146 bp, Glycine max
  Clone ID: 700728002_FLI
tttggatagaagtaaatttggaagagggaggttgaagtgttgttttcagttagcaaggggttactttctgcaaagatgagtatgccattgttggtagagcttctcttgagtcagatgtcttcagttttggggtggttcttcttgaacttatcagtggtcgccatcccatccataaatctactggcaaagaagaaagccttgttatatgggctactcctcgcttacaggatagtaggcgagtaataagggagttggttgatccacaattgaaaggaaacttcccagaagaagaggtgcagataatggcatacttagcgaaggagtgtttgctgctggatcctgacactcgaccaaccatgagcgaggtcgttcagattcttttgagtatttccccgggaaaatctaggaggagaagaaacattccagccagcctctttcaggaaccagaggatgcagaaaagcaaaggcaatctacacccagtaaatttccaacacatagttcattgccaatatataatgatcacaatctttctgttgagaacaaaaacaaagcagaagatgcagtttcagctgagaatatggagagtttgatcctcttgacttcgaaatctgacggttctcgtgcatcagaagaggaaatagtagacctgactgagcctaggtttgaatcattttgcatcacaaatggcaatgccccatgaaaaatatacacccggcacgggcagagagatgcagatggcagaagcctgaggagtttatgttgtgtgaactggtggtacacctctgttgcttgttctaccacccgtcactgtgcatggctctatgagatatcataagagatgctgcaattattctgttttaattatcttggtctacatgtttttttcatgttttgaaaggaaaagctcacaggtgttgtttgatgagcactgaaaagtattcgtttgtttcttgtacagaaaatcataggatgataggaaattctggttcttctttatttggagaggaaccggatgacatacacattaaattaaaggttttggtcacagaaataattgtcttacaattatatttgataccaagtcttcttgaagtagatgaaataaactttcttaataatgcacaatcatatctttttgtgggact

SEQ ID NO: 7942 - DNA, 2816 bp, Glycine max
  Clone ID: 700728028_FLI
gatctttgaagtaagaagagtgtgttgtgttgaagtatcaaagatgttgattggttctctcttaaacaggcgtcctaagatcaaggggactgtggtgttgatgaccaagaatgtgttcgacgtcaacgacttcatggcgactactaggggcggaccagccgctgttgccggcggcatcttcggtgccgcccaggacattgttggtggaatagttgatggtgctacggccatcttcagccgtaacattgccatacagttgatcagtgccaccaagtctgagaatgcacttggacatgggaaagttggaaagctaacctatttggagaaacatcttccttcattaccaaacttgggagataggcaggatgcattcgatgtttattttgaatgggatgagagttttggaattccgggagcattttacatcaaaaactatatgcaatctgagtttttccttgtgagtttcaagcttgaagacgttccaaatcatggaaccattctctttgcttgcaactcatgggtttacaacgcaaaattgtacaaaaaagatcgcattttctttgctaataaggcatatcttccaaatgacactccaactccactagtaaagtacagaaaagaagaattggaaaatctaagaggagatggaagaggggagcgcaaggaacttgataggatctatgattatgatgtctataatgatttgggcaacccagacgagaatgacgatctagctcgtcctattcttggcgggtctagtaagcatccataccctcgcaggggaagaactggtagaaaaccaacaaagaaagaccccagatgtgagagaccaaccagcgacacttacatcccgagagacgaaaattttggtcacttgaagtcatcagacttccttacatatgcaataaaatccttaactcaaaacgttttacctcaattcaacactgcatttggtttcaataatgagtttgatagcttcgaggacgtgcgttgtctctttgatggcggagtttatctccctacagatgtactcagcaaaattagccccataccggtgctcaaagaaatcttccgcactgatggtgagcaagccctcaagtttccaccacctcatgtcatcaaagttcgtgagtctgaatggatgactgatgaagaatttggaagagagatgcttgctggtgttaatcctggcatgattcaacgccttcaagagttccctccaaagagcaagctagatcccacagagtttggagatcaaactagtacaataaccaaagaacacttggagatcaaccttggtggactcaccgtagaacaggcactgaaaggtaacaaattgttcatattagatcaccatgatgcattcataccgtttatgaatttgatcaatggcctgcccactgcaaagtcttatgccacaaggaccatccttttcttgcaagacgatggcacattgaagccattagccattgagttaagtttgccacatcctaggggacatgagtttggagccgatagtagagtagtcttgcccccagccgcagtcaacagcgctgaaggcacaatttggttaattgccaaggcttatgttgctgtcaatgacactggctatcaccaactcataagccactggttaaatactcatgccacaattgagccatttgtcatagcaacaaacaggcatcttagtgtgctccaccctattcataagcttctcttgcctcactaccgtgacacaatgaatatcaatgcacttgcacgacaatcgctcatcaacgcagatggcgttatcgagcgatcatttttgcccggcaaatactctctggagatgtcttcggcagtttacaagagttgggttttcactgatcaagcccttcctgcagatcttatcaagagaggaatggcaattgaggatccctgtgccccccacggccttcgccttgtgatagaggactacccttatgctgttgatggactagaaatatgggatgctattcagacatgggttaagaactatgtctccttgtattacccaacagatgatgcaattaagaaagactctgagctccaagcttggtggaaggaagctgttgagacgggtcacggtgacttgaaagacaagccatggtggcctaagttgaacactcctcaagatttggttcacatttgctccattatcatatggatagcttcagctctccatgcagcagtgaattttggacaatacccttatggaggtttgatcctaaaccgtccaactttaaccagaagatttctccctgaaccaggaagcaaagaatatgaggagctttcaaccaattatcaaaaggcttacctgagaacaattacaagaaagattgaggcccttgtggacctttcagtgatagagatattgtcaagacatgcttctgatgagatctaccttgggaagagggacagtgacgattggactgatgaccaaaaggcaattcaagcctttgaaaagtttggaaccaagctgaaggaaattgaggccaaaatcaattcgaggaacaaagattcaagccttagaaaccgtaatggaccggttcagatgccttatactgtgcttcttcctaccagtgaggaaggccttactttcagaggaattcccaacagcatctctatctaaggccagagtgcgtttatgtgtggttctctttccaaacctacgttacctttctcgttgacgagtaaatatgcaagcttatgcatgcatataataattgtcttatgcattcttaagtgttgtatgtggacgttatctagttttcgtatttaataagaatggtatcacc

SEQ ID NO: 7943 - DNA, 817 bp, Glycine max
  Clone ID: 700728048_FLI
attttattgtctgggacaacagtgaccttgtcacccatgagatcatgggtggcctgaaaaatgtctatgcaattggtgccggaatggtagcagcccttaccaatgagagtgctactagcaaatctgtctactttgcacactgcacatcagagatgatatttatcactcatttgttggctgaagagcctgagaaacttgcagggccactattggctgacacttatgtgactttactaaaaggtcgtaacgcatggtatggtcagatgttagctaagggtgaattaagcccagacatgggtgacagcatcagtggcaaaggaatgattcagggtgtctctgcagtggaggcattctttgaacttttgagccattcaagcctgaatgtgttgcacccagaagaaaacaaaccggttgctcctgttgaactctgccccatcctgaagacactgtataaaatattgatatccagggaacagtcatcagaagctattctccaagctcttagggatgaaaatctgaatgatccccgtgaacgcattgagattgcacaaagccatgctttctacatgccttcacttcttggacaaccttgaacgcattgagattgcacaaagccatattatctacaattaattattttattatttcataatagacgtgggataaatttttccactcctgtattgttgaaattaagaagtttatttgtgaaacaaacaaacacactgaactgactcggaaaaaaaattgacatatgcagaggccatcagttttagtacaatcttgagtaaaaataggaaatttaagttttttggat

SEQ ID NO: 7944 - DNA, 697 bp, Glycine max
  Clone ID: 700728090_FLI
ccttagatgagaaggacacaacctcagccttgttttcacaagatcgctttatagcatatgccattgcactaggatcttgtgaaaacaaggctgaggttgtgtccttagatgagaaggaaagtggactgagggcaacattgaacttgggtcatacatttggtcatgcaatagaaactggggttggctatgggcagtggcttcatggagaggctgttgcagctggcacggtaatggctgttgacatgtcatatcgcctaggttggattgatgattctctagtgaagagagttggagatattttaaaacaggctaagttaccttcagcccctcctgagaccgtgactgtggacatgtttaaatctgtcatggcagtggataagaaggtagcagatgggttgctaaggcttatccttctaaagggccctctaggcaattgcgttttcacaggggattatgacagaaaggctctagacgatacgcttcgtgcattctgtaaatcctgatctttgtgctccatgtttctattgcagctttatccaattccttttagtgagtttttgtatgttgtgataacctcacttgtatttttcttatgtactttggatgccaaccatggtccccattatatacgcaagagtctattacaaagttgtattattagaaattgaggcatgatcaataattatcatttgagcat

SEQ ID NO: 7945 - DNA, 1176 bp, Glycine max
  Clone ID: 700728123_FLI
gaaaagttcaagcgcatgtgtgaaaagtccatgataaagaagcgatacatgcacctgacggaggagtttctgaaagagaacccgaacatgtgcgagtacatggcgccatcgctggacgtgagacaagacgtagtggtgatggaggtgccgaagctgggaaaacaagccgcaacgaaagcgattaaggagtggggtcaaccaaagtcaaagatcacacaccttgtgttctgcaccacttcaggcgtggacatgcccggagcagattaccagctcacgaagcttctcggcctgaggccctccgtgaagcgcctcatgatgtatcagcagggctgcttcgccggcggcaccgtactccgcctcgcgaaggacctcgccgagaacaacaagggtgcgagggtgctcgttgtctgctccgagataaccgccgtgacgttccgcggcccctcggacacgcacctcgactcgctcgtgggacaggcactgttcggagatggcgccgcagcgttgatcatcggatcagaccccgacccagcagtggagcggccgatattcgagatgatatcggccgcccagacaatcctgcccgactctgacggtgctatagatgggcaccttcgggaggtgggactcacgttccacctcttgaaagatgtgcccgggatcatctcgaagaacattgagaagagtcttgttgaagcttttgagcccatcgggatcagcgactggaactctatcttctggatcgcacatcccggtggtcccgcgatcctcgatcaagtcgaggagaagctccggctcaagccggagaaactccagtccacccggcatgtgctgagtgagtacggaaacatgtcaagcgcgtgtgttttgttcattctggatgaaatgaggaagaagtctaaggaggaagggaagagtaccactggagaagggttagagtggggggtgctattcggattcgggccgggtctaaccgttgagaccgttgttcttcacagtgttcccttggagggataaatcatgctgatgcggtgactagtgatttaagagtgatcaataaggaaccctcggaaataccagggaaagtttgttattattactagtttcacttgtggatttatcgtagcataatgttgtacaagaataatttaatatgaacaagatcgtgtgtttgtt

SEQ ID NO: 7946 - DNA, 1679 bp, Glycine max
  Clone ID: 700728326_FLI
taagtcccttccctattgtaatttctgccagcctcaaaaaagacttgctctgcctctgccactctctgagtaggactacactgccatggctgcctcagtctccactgttggagctgtcaacggagctccactgagcttgaacagctctggagctggagcttcagttcccagttcagccttctttggcaccagcttgaagaaggttattgcctcaagggtccctaacgtcaagatttcttctggaagtttcaaaatcgttgccgcggaaaaagagattgatgagaaacaacagacagacaaggacagatggaaaggtcttgcctatgatgtttcagacgaccagcaagacatcacaagagggaagggtttggttgattccctcttccaagctccacaggatactggaactcactatgcaatcatgagctcttatgagtaccttagcactggacttaaacagtacaacttggataacaacatggacggtttttacattgctcctgcttttatggacaagcttgttgttcacatcagcaagaacttcatgaccctgcccaacatcaaggttcctctcattcttggtatctggggaggcaaaggtcaaggaaaatccttccaatgcgagcttgtctttgccaagatgggaatcaaccctatcatgatgagtgctggagagttggaaagtggaaatgcaggagagccagcaaaactgatcagacagagataccgtgaagccgcagacatgatcaagaagggaaagatgtgtgctctcttcatcaacgatcttgatgcaggagctggtcgtcttggtggaactacacaatacactgtcaacaaccagatggtgaatgccaccctcatgaacattgctgataaccccaccaatgtgcagcttcctggtatgtacaacaaggaagagaacccccgtgtgcccatcatcgtcaccggtaacgatttctcaacactgtatgctcctctcatccgtgatgggcgtatggagaagttctactgggcacctacaagggacgatcgtgttggcgtctgcaatggaattttccgcactgacaatgttcctaaggatgacattgtcaagcttgttgacaccttccccggccaatctattgatttctttggtgcactcagggctagagtatatgatgatgaggtgaggaagtggatttctgttgttggtgttgacttcattgggaagaagcttgtgaactccaaggaaggacctccaacctttgaccaaccgaagatgactttgagcaagctcttggagtatggtaacatgcttgtccaagaacaagagaatgtgaagagagtacaactggcagacaagtacttgaaagaggctgctcttggtgatgctaatcaagattccatcaacagaggaactttctatggcaaagcagctcagcaagtaaacattcccgttcctgaaggttgtactgatccaaatgcctcaaacttcgacccaactgcaagaagtgatgatggaacctgcttatacacaccctgagaacctaagcattctccacttggagagaagctaagagttgagataataaaataagttatcttgttcatattggattgttatcctgtataattttgagttacattgtctacattttacaatgtgtgcaatgttaaagtcttgatgtctttctctttcc

SEQ ID NO: 7947 - DNA, 1739 bp, Glycine max
  Clone ID: 700728416_FLI
cgatttagatgccgcttgtttatcaacaaataaacttaggcgcaaaccaataactaaataaaacaacaaactcaactatcttcgaatcccatctacacctaggttaagaagaaagatctcaaacctctgaaaaccctgaaccctctctttctcttcacatcattctaaacccattctgaaacccctcacattatttcctccaaccatgcttcgcatagcatcaaagctatcatctaggttttcttcctcttctactgccctcactgcaaacccactattccccacaagactctctccaattccctcttcatcgttccgaccattcaccaatggcttggaattggaggccaacatggtcgtccccgacgccatcaagatgatcaactacgccttgaggcactggaggaccgataggtcacttggggcgtacaggatgggcttgtctgtgttgaagatttgcattaccaatgagttgactgagggcaaggagccaaagcgcgagaattcgaagggaatggccatgcttgctatgtccactttgttgtttgaaagaggagagtacgcagaagcgattgagaagctagagggtgttcaagagttaacaaattcttacttgggtgttagagttgctgctcttgaaactcaggctgggcttcatctattgatgaggcaggatgatttggcagcagtggttgctgataagtgcatgaagatggtggagaatcaagagaaaccactagaatatgaggaacgatttgtagattatgaggcacaatttgttcgtgctaaagcactaaaagggctgattgaacttgtcaatggcaatgctgactcagctgaagatttcttcgacaagtctctccgcgagaagtattgtgatggtactgctggtctatcatatgcggaattcctacataagatagggaactatccaatggcaaaggaggtttaccgaaatgtcgtacaaggggctattgaagtaaaaaatgctggcagaccatacttaggagctggtaacatgagcgtggacgaattaattgtagggtccatgtttgctttaggacagctggaattacttatgggtaactactctaatgcagagtgccatttgacacaggcattaagtagggcagaggaagcctatggagactctaaacatcctacggtgggggttgccttaacaagcattgctcttttgtatcggcgtaaagcaatccaggaacattcaagttcgctgttagttcaagagggtctctaccgaaaagtgatagatattttgaaggttccaacaatggaaactgagtctgaagatgctgcaccattggtagatagaagtgatatagcagctcttgcaacaggtgcatatgcagaagtacttagtgtccaagaaaagagacaggcagaaggggagaagatgaagaacttggccgagtctctatggaaacaccgttggctatctctagctaatgctattgattcagacaagaatatcattgattctagaatttgcaggatcctgtaaattggtctattttctgggtacccttttgttactataggttctagttggaccgtgatacatgactaagaccatggattaatagtgcagagttactttctacagtattgcttggaatagaaatgtcgtgccgacatatactatgatatccacggtcggccgatgtatatttagaccgaattttaatgaggtctttttaatattcacttaaattatttgt

SEQ ID NO: 7948 - DNA, 569 bp, Glycine max
  Clone ID: 700728420_FLI
accggcttgcggacttagacttatccgcaaaccggttatccggttctgtcccgttcgaactcgggacaatgccggttctatccacactgaatttggatagtaactctttagagggcttaattccttcgagtttgttgagtaatgggggtatgggcattttgaaccttagtcgaaacgggtttgaaggctccatacccgatgtgttcgggtcacactcgtatttcatggctttggatttgtctttcaataatttaaagggtcgggtaccctcttcgttggcttcggctaagtttatcgggcatttggatcttagccataaccatttgtgtggatccattcctctcggagcacccttcgatcacctcgaagcgtcgtcgtttactagcaatgattgcttgtgtgggaaccccttgaagacttgctagttatagtgggtgacccgggatccgaatacgtacccggatagatacccgatttgtttacaaggtgtggtgtaataattttattttattttgttgttaagtggtgtaagtgtaatataacgttttagtgagaaagttgaaagagag

SEQ ID NO: 7949 - DNA, 684 bp, Glycine max
  Clone ID: 700728433_FLI
gacgaacacgttgaatgtgaaatcagagctggtaccaagaagtttcaaagctaaaggcaaagtatgagtctcttcaaaggacccagaggcatttgcttggggaagatcttggaccattgaacataaaggagctgcagaatattgagaaacagcttgaaggggctttagcacaagcaagacaaaggaagacacaaatcatgattgaacaaatggaagagcttcgcagaagggagcgccatcttggagacatgaataagcaacttagactcaagcttgaagcagagggatttaatcttaaagctacggaaagcttgttgagctttacttcagctgctggaaacagtggctttcactttcagcagcctcctcaaaccaatcctattgattaccagcagccagaaccctttttgcaaatagggtaccatcaatatgttcaatctgaggcatctaatgttccaaagagcatggcttgtgagactaacttcatgcagggatggatcctttgatcaatcttattaattgaattaagtatatgatgatttaccttattgtctatatcctttttagattttttgtgttttggctgttgttaaatgtacctttgtcaccagaaaagttgcaaacttgtttagctctttctgtaattggatacaagtactacagacaatggttttactatatgtt

SEQ ID NO: 7950 - DNA, 1183 bp, Glycine max
  Clone ID: 700728493_FLI
tgacagcctttttagcatggatggagattatgcaccaatggttgagctagcagaccttcgcaagaggcatggctttttgttagtcattgatgatgtaaaacctctttttctttatgaagacaatttatgacaatttattatatgctattatttacatggttctgaacttctgatccttggactaaggttagtacttacgaagagctgacgataataatcatagtacatgtatagcatagcattattgttcctagatagaaatcacctactccctctaccatatattataaaattttatgtcataaaagaaaaatgtggcttctccttgctacaaagtcttacacaactataaactatcaaaataaaaatcttgtgtatatccaggcccatggaacatttgtttgtggcaaaaatggtggtggtgttgctgaggaattcaactgtgagaaggatgtagacatatgcattggtacactaagtaaagctgctggttgtcatggaggatttatagcatgcagcaaaaagtggaaactattaatacagtcaagaggtcggtcattcatattttcaactgctgcactagttccagttgctgctgctggtcatgctgcggttaaagtggcaaaacttgagaaatggcgtagagaggctatttggaaccgggtgaaagactttcatttgcttacaggaatacccgttacaagtcacattatatccctagtagtaggcagtgaagacaaagcacttcaagcaagccggcatttattgcaatctggcttccacgtgactgcaatcagaccacctactgtgcctcctaactcatgcaggctgcgagtgaccctaagtgcagtccatacaagggaagatctggaaaaccttgcagctgcactctcacgttgcatcaatttccaagatacccgcatatatgattccaatgcctatgcaagactgtagctagctcttgatttttcaggatgaattgcgtcatcaacgattttgtgactatacaggaaataagtacacctttagttcctcattagcaagttcaagtcaattacattccaattagagtggtagcttatattacctcatgttatatcaaaatgacaagctattttgtcaacatctagataaatattgttaaatattgatatttatattttatatgtatttaattttgatt

SEQ ID NO: 7951 - DNA, 962 bp, Glycine max
  Clone ID: 700728502_FLI
cccttttaaaaggctggaatcccagatggtgtgcttaatatagtacctggatttggcccaactgctggcgcagcaataagctcacacatggacatagatgcggtcagttttactggttcaattgaagtagggcgtgaagtgttgcaggctgcagcttggagcaatttaaaaccggtttcacttgaattaggaggcaagtctcctctcattattttcaatgatgcggatatagacaaagcttccgagcttgctctctttggcatcatgtctaacaagggagaaatttgtgtggcaggttctcgtgtgtttgtccaggaagagatctatgatgaatttgagaagaagttggtggagaaggcaaaatcttgggtcgttggggatccttttgatcccaaatcgctgcaagggcctcaggctgacaggaaccaattggagaaaatactttcatatattgagcacggaaagagagaaggagccacccttttgacaggaggtaatacagtgggcaacaaaggttactacatagaacctacaattttctccaatgtaaaggaggacatgctaatagcacgggaagaaatatttggccctgtactagcgctgatgaagtttaagaccatggaggaagcaattaaaagtgctaacaataccaagtatggcctagcagcaggaattgtaaccaagaatttggatactgcaaacactatgtcaaggtccattcgtgcaggcattgtttggatcaactgctattttaccgtagggagtgatgttccttttggagggtataagatgagcggatttggaagagatttgggattacaggcccttcacaagtacttacaagttaaatctgttgtaacacctattcataattctctttggctttgaatagttgaatgtctcctacgtgagcacaaatgtgagtcttttcatttggaataaattacactttaattccttat

SEQ ID NO: 7952 - DNA, 565 bp, Glycine max
  Clone ID: 700728505_FLI
ttctgatcttcgaaactcagcagaagagagcagcagagctgaagtgccagtaactgcaaatgcacaacaaaatgcaggagttgcattgaacgaacggatgttgcagaccactaataggaatacacaaacccaatacaatactacgatggacctgagaaatgtagctgatgattctgcagtagaatcttcaagtggtaccaggagagaaagggatggaggtttagttccagtatggtctccaccagcttccagttactcagaacaatttgtaggagatgaaaatggtataacaagcagttcatcttacttgcaaaggcatcctcaatctcaccaaatgctgaattggaagcagctacctcaaactgggtaagatttcccaaacaaatgaaagcattgatgactttttatatatactattactgcctgttctgaacatttcagtaacatcgaattagttgtcaatgctttgcttgaagattatgttctatattatttaagagtaaatgatcattttgctccttgaatgtgtataccaatgagggaatgacaatttaatccttgaaat

SEQ ID NO: 7953 - DNA, 1357 bp, Glycine max
  Clone ID: 700728520_FLI
gaagaagatggagatgtatcagatctggagcaggagaatagcgttgggagcgttcgcgtttgttctgcttttcctatcggcctcagcagacgacgtcgttgtgctctctgaagataacttcgagaaggaagttggtcaggacagaggagctctcgttgagttctatgctccttggtgtggacactgcaaaaagcttgctccagaatatgaaaagcttggtagcagcttcaagaaagccaaatctgttttaatcggcaaggttgactgtgatgagcacaagagtttgtgcagcaaatatggagtctctgggtacccaacaattcagtggtttccaaaaggatctcttgaacccaaaaagtatgaagggccacgcactgctgattcacttgctgagtttgtaaatacggaaggaggaacaaatgtgaagattgctacagctccttccaatgtagtggtgcttacatctgaaaattttaatgaggttgtcttagatgaaaccaaagatgtcttggttgagttttatgcaccctggtgtggacattgcaaaagtcttgctcctacttacgagaaagttgccacagcatttaaattggaggaagatgtagtaattgcaaatctggatgctgataaatataaggatctggctgaaaagtatgatgtgagtggatttcctaccttgaagttcttcccaaagggcaacaaagctggtgaagagtacggagatggaagagacttggatgactttgtggcttttatcaatgagaaatctggaacaagtcgagatgtaaaaggacaacttacttcccaagctggtatagtagaaagcttggatgtcttggttaaggagtttgtagctgccagcgatgaagagaagaaattcgtgtttacccgaatggaagaggaagttgagaagctgaagggttctgcctcaaggcacgggaagatttacttgaaagctgccaagaattacttggaaaaaggttctgattatgctaagaacgaaatccagcgcctacagcgcatacttgacaagtccattagtcctgccaaggccgacgagttaactctaaagaaaaatatcttgtcgacatatgcggcttgactttctggtgcatcattaaccatctctcatggaagctcgtgatcaatcgcagctcctgatgattgtttgactttgatatcgaaaatgctgggagatattcaacgtggatacttgtagtgcttaatttgagtctgtactattgaccttatcttgcatggcgcttttggggttaaaaattccgaacttacgattcttctccccattgtagtctacctgagcggtttaaaattttgggagacgatagcttttgtcttt

SEQ ID NO: 7954 - DNA, 1566 bp, Glycine max
  Clone ID: 700728568_FLI
ctctctttatctcactgcgactcactctagtgagagaaagaagaagcgaagaaaaaaaacacacacacacaaacacaagcacagttgaaaatggctctgcttaccctctcttcgctgcaatgaagaaacgtttgtttttcttctccgaagaagaaaaatggctctcggcgacgatgcgcagcaccactctccctcgttcctcgatgcccttctctgcgaagagcgagaaaccttcgaggaagactttgatgagaacggttatgagcgtgagaccgaaaacaacgaaccctctgtgataaagtcgcaatctttgcccttggttttgcacgataatgacctgttctgggaagacgaagagctcgtgtcgttaatcgcgaaagagggagagacccatttgtgttttcatggtgtcgttgctaatggggccttggaagggcctcgtgttgaggctgtgaactggatttcgaaagtttgtgggcactatgggttctccgctttgacaactgttctcgctgttaactactttgataggttcatcacaagtttgaagtttcagaacgataagccgtggatgacacagctcactgctgttgcttgtttgtcccttgctgtgaaaacggaagagacccatgtgccactcctcttggaccttcaagtggaggagtcaaggtttgtgtttgaggcaaagactattcagagaatggagctgctggtgctgtcaactcttaagtggaggatgcatccggtgaccccaatttccttctttgaacacattgtgagaaggcttggtttgaagagtcgcttgcattgggagtttctatggcgttgtgagcgtgttcttctcaatgtcattgccgattcaagggttatgagttatcttccttctacattggctgctgcgacaatgatccgtgttattaaagagattgaatcatttaatgcgaccgagtacattgatcagcttctgggtttactaaagattagtgaggaacaagtgaaccagtgctacaaaatcatacagaaactattaggttgctatgaaggcatttacagccttcaccagaaacgcaagcgactatctgaaccgggtagcccaggtgctgtcactgatgcatctttcagttgtgatagctcaaatgattcatggaccgtgtcatcatcagtctcactttcactggagccgctgttgaagaggagaaaatctcaggaccagcaaatgcgactgccttctgtcaattgtgtgtcaattgatgttcttaatagccctcgctaataatgaacttagtatttacttcaaatgtggtagctttctttcatataaatctggcagttatgttattgaaatgctactaaattatgttcttagttatagacatttctagccataatttgaaaattaatgaggcagagactgagatacccttctccactttgtggtttaaggtggaaaagggatctggtactgagtagaaatataagttataaacttgtaattctacctgagttatactttcagtgcagtttttactcatcttacactgatatttgacaatatgtgcaatcatg

SEQ ID NO: 7955 - DNA, 874 bp, Glycine max
  Clone ID: 700728590_FLI
ggcagccatgacttccaatagagtgattgtcccagtcaagttgttgttatagtatagtaaaggtacttcaacccagtcggtgcacaccctagcggttgtattggggaggatccccgcggaattccaaacaatctcatgccatttgttcagcaagtagcagttggccgacggcctgcactgacagtttttggaaatgattataatacaactgatggcactggggttcgggattacattcatgttgttgatttagcagatgggcacattgctgcgttgcttaaactagatgatcctaatataggttgtgaggtttataacctgggaacaggaaagggaacatcagttttggagatggttcgagcttttgagatggcatctggaaagaaaattccacttgtgatggctggccgtagacctggtgatgctgaaattgtttatgcatcaacaaagaaagcggaaagagagcttaaatggaaggcaaaatatggcattgatgagatgtgccgcgatcaatggaattgggctagcaaaaacccttatggctatggagatcaggaggattccaccgtttaactatatatatatatagtgttctctttgggttcttttccgaactcccccacaccgtagtccgtaggtcttgtgaatttagttttctcaaaagcttttctttagtccgtaggtcaaggtgacaagtacttgtattattatgattcatagttacatggtaaataagtagtggtttactgcactgtaatttaatttaaaggttctataggttccttcttacaggttattgattattagattcgaatactctcatgttccacatgagcagcatcctgttttgtaaatctgaatcacatgtttgttt

SEQ ID NO: 7956 - DNA, 736 bp, Glycine max
  Clone ID: 700728637_FLI
cagagaccgaaatacttcgagatggcccgtacaaagcaaactgctcgtaagtcaactggaggaaaagctcccaggaagcagcttgcaaccaaggctgcacgtaagtctgcaccaacaactggtggtgtgaagaagcctcatcgttatcgccctggaactgttgctcttcgtgagattaggaaataccagaagagcactgagctcctaatcaggaagcttcctttccagaggttggttcgtgaaattgcccaggatttcaagactgatctgcgtttccagagccatgctgtgcttgcattgcaagaggctgctgaggcataccttgttgggctctttgaggacactaacttgtgtgccattcacgccaagcgtgtgactattatgcccaaggatattcagctggcaagaaggattcgtggtgagcgtgcttgagttggtgcgttctgtgtttgtgaagatggattgttggtggctgcggatggtgttttgttactaagttttctttttgttgaagcctataggttattagggaaaaataggtgtttacttggtagtcatattaattgtcattggcaaatactgcctaagacactgtgaaggtctggttgttagaaatttggcatgtatttgatttttttggatcctttatttctcgttttatttcgggttgggcagcccctttgggaattgtattgggcaactttctgttgccatctaatctagttgaagctagctt

SEQ ID NO: 7957 - DNA, 1482 bp, Glycine max
  Clone ID: 700728683_FLI
attcatggctagagagattcttattctgcgccatctggatcatcccaatgttgtcaaactggaaggtttggtgacttcaaggatgtcatgcagtttgtaccttgtctttgaatacatggatcatgatttggctggacttgctacaagccccacaattaagttcacagagtctcaggttaaatgttacatgcatcagctactttctggattggaacactgtcacaaccgtcatgtgctgcatcgtgatataaaggggtcaaatcttctcattgacagtgaaggaattcttaggattgctgattttggattagcttccttcttcgatcctaatcacaagcaccctatgacaagcagggtggttactttatggtatcgacctccagaacttctccttggagccactgactatggtgtaggagtggacctctggagtgctggctgcattcttgctgaattgttggctgggaagcctattatgcctggtcgaaccgaggtggagcagctacataagatatttaagctttgtggttctccttctgacgagtattggaaaaaattaaagttgccacatgctaccatttttaagccccgaatatcatacaagcggtgcatagcagagacatttaagaatttcccagcatcatccctgccactaattgagatccttctcgcaatcgatccagctgaacgtcaaactgccacagatgctttgcatagtgaattctttacatcaaaaccttatgcctgtgaaccctctagccttccaaaatatcctcccagcaaggagatggatacaaagctacgggatgaagaagctagaagattgagagctgctggcaaagctaatgctgctggtgtcaagaaatcacgtccacgtgatcgaggtggaaggggaatttcagttccagattccaatgctgagttgcaagcaaatattgatagatggcgactggtaacgcatgcaaatgctaagagcaagagtgagaagtttcctcctcctcacgaagatggaactcttggctatcctttgggttcttcacatcacatggatccaattttcgatcctcctgatgttccatttagttccacaaacttgtcatatcctaaagcaaatttccagacctggtctggcccattggtggaacctagtgtggatgcaccaaggagaaagaagaacatggcagggaatgggcacagacaatcaaagaaggattcttatagatagaatgtgtcaaagagtattagaaaataactaaagaattgcaatataacaccaattatttatcacaagcattggtgaagctacaaaaatgctgctgatttctttctcaattgtcaaaggtttattttctatcttgtataacaatcacccataattttcctcccttcaacctctgctttaatcatgggaattgtgtagaattttacagactttattttttattttttaaactttggaatatcatgtcttgttcattattc

SEQ ID NO: 7958 - DNA, 2405 bp, Glycine max
  Clone ID: 700728773_FLI
gagagatgaagatgtctttacgttctggatccgatctgtgaactgtgatccatcgtcaatctttcagtaacaaacatgagcggagctgttcttgttgctgtggctgctgctatcggcaacttgctgcaaggatgggataatgccaccattgcaggatctattttgtacataaagagggagtttaatttacaaagtgaacccacaatagaaggtctaattgtggccatgtcacttattggagccactgtcgttacgacatgctctggacccttatcagacttgctaggccggcgtcctatgttgatcatctcctctatcctttattttgttggttctctggtcatgctatggtctccaaatgtttatattctcctctttgcaaggcttttagatggattaggcattggtttggcggtcaccttggtacctctttacatatccgagacagctccacctgagattaggggattactaaatactcttccgcagttcactggttctgctggaatgttcttttcctactgtatggtctttgctatatcactcaccaaggccccaaactggagactcatgttaggtgttctttcaattccctctctcatttattttgcactcacactattcttcttgcctgaatctccaagatggcttgtcagcaaaggccggatgctagaggccaagaaggttttgcaacgacttcgcggcagacaagatgtcgctggtgagatggctttactagttgagggtcttggagttgggggtgataccgttatagaagagtacataattagtccagccaatgaattcagtgatgcagagcagatcaaattgtatgggacagcagaaggtcaatcctggattgccaaacctgtcactggacaaagttccattggccttgtatctcggaagggaagcatggcaaatcaaagtgctctagtggaccctctagtgaagctctttggtagtgtccatgagaagctcccagaaacaggaagcacacttttcccacactttggaagcatgtttagtgttgggggaaatcaacctaggaatgaagattgggatgaagaaagcattgccagagagggagatgattatgtatctgatgctgctgacaccgacgattctgatgacaatttgcagagtccattgatctcacgtcaagcaacaagtgcggaaagggacatgcctgctcctgcccagggaagcatgaggcaaggtagtcttttgcaaggagaacctgctggaaactcagggattggtggtggatggcagctagcatggaaatggtctgaaacagaaggtgttttcaagagaatatatttgcaccaagaaggtggtcctggatctagacgtgggtccatcatttcacttccaggctgtgatgcgccgacactaacagatggtgagattgtccaggctgccgctctagtgagtcaatcagccctttacaacaaggagcttatgcatcagcagccagttggaccagccatgattcatccatcccaaacagctgcaaaagggccgagttggagtgaccttttagagcctggagtgaagcatgcactgattgtgggggtggggattcaaattcttcaacagttctctggtataaatggggtgctctactatacacctcaaattcttgagcaggcaggtgttggttatcttctttcaaacctgggcctcggttctacttctgcgtcttttcttatcagcagcgtgacaaccttgttgatgttaccctgtatagctgtggccatgaggctcatggatatatctggcagaagacccttgctgctgactacaatccccgtcttgatagtatcacttctcatattagtaatagggagtcttgtggaattggacagtactataaatgcttttatctcaacttcgagtgttattgtctacttctgttgtttcgtcatgggctttgggccaattcctaatatcctttgttcagagatcttccctactcgagttcgtggtctatgcatagctatatgtgctcttacattttggatatgtgacatcatagtcacctactcgctcccagttatgcttaattctgtgggccttggtggtgtctttggtatgtatgcggttgtgtgcatcatagcttgggtgtttgtcttcttaaaagttccagaaaccaagggcatgccactggaagttatcattgagttcttctctgtcggggcaaagcaagctcaagttgccaataatacctgactttacaaacgacccattggattttttttaatataaaatcattttgaatctatggatttcttgttttgtttcctctttaggcaccttcatcgtgggttgggatctgggatttgagaaatgagaaagtccaaggaaactcgttagccaataaaattataagcatctactat

SEQ ID NO: 7959 - DNA, 657 bp, Glycine max
  Clone ID: 700728810_FLI
gtgaagggaattccttcacttatgtgtcaagcaacttctttgctggttacttcctgcccaacttgtcacagcctggagccacagctgcccccagagacagagttattatcctaggagatggaaaccccaaagctgtttttaacaaggaagaggatattggaacttatacaatcaattctgtggatgatccaagaaccttgaacaaaattctctacattagaccaccagctaataccttgtcgtttaatgagcttgttactctctgggagggaaagattggtaaaactcttgaaagaatctatgttccagaagaacaactcctgaagcaaattgaagagtccgcaccacccgtgaatgtgatcctgtcaattaaccactcttcttatgtaaagggggatcatactaactttgaaattgagtcttcttttggagtggaagcttcagctctatatcctgatgtgaaatacatcactgtggatgagtaccttaatcagtttgtctaaggtgcaaagcctagctgataagtttgtttaattggtaaaactttgttttctaaataaagagaatcatgtagtaagactgaattgctgcatgtgctcctcaaaagaacaatgtatgaaatacctatgctatgctatatgctatgatacctttatt

SEQ ID NO: 7960 - DNA, 958 bp, Glycine max
  Clone ID: 700728813_FLI
caactctattcttcttctttgggtgatgtgtttgcaatcacagctgctggtgattttgtagcgcatgtgttgaatgcttatactggagaggatgttgctggaaagatcttgtcatttgcccagaagggtccaagaggaatttgcattctctctgccaatggagctatctcgaatgtcaccatacgccaacctggttcttctggtggcattttgacttatgagggtcggtttgagattttatctttgtctggatcattcacagttgttgacaacagtggcatgaaaagccgaactggtggattgagtgtctcacttgctggccctgatggtcgggtcataggtggtggtgttgctggacttttaactgctgctggccccattcagattgttgtaggaagcttcatgcaaaattgttgcaagacccaaaagaggaagtatcaacgtgaacaacagatagtggcggccacccctacttcagctggtccagaaatagtgacagcagcaatacctatctcacaagcaaatgctgctgatggtgagaactttctgatacctatacctatctatcagattccagaccaaaaccagagagaatctatcagtgtttcaagtgacaaacagaacctagatgctactcctgatgctgctgctacttggaatggttctgaggaatattcagaccagaggacttctccagacatcaacatatctttgccagatgaatagaacaagggtgatgcagaggctgacatggtagtaatgaatgaaactaacaccggaaatctgtcatgacaactactgggttatatgacatgatgtacagttgtcagaaattagaaaggattattattattattaaggcctcattattttttcttattatagtttctgttgaacatttataagtttttctttcttttctttagaggtggaagagattaccaaaagacttcgtagt

SEQ ID NO: 7961 - DNA, 1577 bp, Glycine max
  Clone ID: 700728859_FLI
gaaaaagcatatggtctcccgtcacagatccaagaagtggtttcaaccgggaatccagaactttccacagcctcaagccccctctccgtctccctccccccaacgccgccgtctccgcagccgccttcgccctcttcctccgccgcaactcgcagttcccggactcctccaccgcctttatcgactctgccaccggccaccgcctctcctacggcgagctcctccaccgcgccaaaaccctagcctcgaatctcgccacaatcctcaaactcaccaaaggcgacacagcgctcgttctctcaccaaatattctccaagaaaccgatgaggcattcaaagctaagttccccaacgtcctcgtcatgcagggatacggtttaactgagtctgcagttacccgaaccactccagaggaggcaaatcaggtgggagcaacaggtaaactgataccaaatatagaagccaaaattgtgaacccagaaacaggggaagccatgtttcccggtgaacaaggagaactctggatcagaggaccttatgttatgaaaggtaattaatattattattattattattagaaattaattaacatgagagtataatgcaggactttgttgggttttcatctattacattatttttgttatgtaaaattgtattaatacgtgattattgtttgttgtcacacgcacaatgcatggatgatgatcaggttattctggtgacccaaaagcaacttcagcaactttggtggatgggtggttaaggactggggacctctgttattttgatagcaaaggtttcttgtatgttgtagataggttgaaagagttgattaaatacaagggctaccaggttgctccggcagagctagaagagttactcctatctcattcagagataaatgatgctgcagttattccataccctgatgaagtagcaggccaagtgcccatggcgtttgtggtgagacaacctcaaagttcccttggcgcagcagaagttattgattttgttgccaaacaggtgctttaatatttgataatatgtagcgatattaataatatttattcatattttttaataacatttttattaagtattaagttaaaaaatgttgttaagaatcacatactgtgttgtagtgaatttcccttgtgcttaatttcttttgcacatttagatttcagttttactccacatgacgcattgccccctcttgtttgcatgttgaattgagctagctactacatatcaatacttttattttggcatgtgttttcttggctgcaggtttcaccgtacaagaaaataaggcgtgtagcatttgttaattccatacccaagaatgctgcgggaaagatactgaggaaggacttaaaactggcgctctctaggttgtaatatgcttcattttcgttttataagtggtgtttgatttagtcttttgctccaaatgaaaaaaaaaaagaagaagcaatgcgtgtgttcagtttaagaatttatatgtaatgaaagaccttcttttgtaaaatagatcttgaactttatcaaatgatgtagtatagtaacttctc

SEQ ID NO: 7962 - DNA, 1031 bp, Glycine max
  Clone ID: 700728860_FLI
tctgactgctgcggctgccacagctttgcgtggggctgcgacattgaaagcgagggccctgaaggaagtgtggaatattgcagcagtgattcctgtggagaaaaatttggcagtagctggtggacataataacaacaataacgcaagtaatggaaattctaagagtagcttcagcggtgaacttgtccctgaagaaaatttcttgggtatatgcagtagagaattattagccagaggttgtgaactcctcaaacgcacacgcaaaggtgatcttcattggaaggttgtatctgtgtatgtaaacaggatgaatcaggttatattgaaaatgaagagcaggcacgttgctgggaccatcacaaaaaagaaaaagaatgtggtgcttgaagtgatcaaagatgtacctgcttggcctggtcgccacttgcttgaaggtggtgaggatcgccgctactttgggttgaaaacagtgatgcgtggtcttgtggaatttgagtgcagaaatcagagagaatatgatgtgtggactcaaggtgtttcaaggcttctctctattgccgcagaaaagaacaacaaaaacagaatttgagccttttgttttgggaatgtgtaaggagggagaagaaattttggcaatgggggaataggaggatcaatcaaggtggtgttagtagcattatagatgttttgtacattgtaaaaaggttaaaaaaactaaaggcaaagttaatgccatatggggtctcacactttactcttggggatctggatggtgttttttttttgaatgagaaagcgaaacatttgaactgaagtgtgagcccatagtgaaccaattgaccttttgttccttcattattctggaaagaaaatgagtatcttggacttgggggggagtggtagtcaaaaagaagtggaaagaatcatattggagggaaagtataatctttaaggacaaatatactcttgtttgatctttccttgtttgtacatatgggtttggactttatgaaaaaagtggtcaaaagtct

SEQ ID NO: 7963 - DNA, 1774 bp, Glycine max
  Clone ID: 700728866_FLI
cactggttctcttcctgatagtattgtgaatcttgggcagctcgggattcttgattttcataacaataagctctctggggagcttcctaaggggattcgttcgtggaagaagctcaacgatttgaatttggcgaacaatgagattggtgggaggattcctgatgagattgggggtttgtccgtgctgaattttctggatctttctagaaaccggttttcggggaaagtgcctcatgggttgcagaatctgaagctgaatcagctcaatttgtcttataatcggttatccggtgaattacctcctttgttggctaaggatatgtacaagtctagttttctagggaatcctgggttgtgtggggatttgaaggggttgtgtgatggtagaagtgaggagaggagtgtgggttatgtttggctgcttcgaacgattttcgttgttgccactttggttttccttgttggtgtggtttggttttactttaggtacaaaagtttccaggatgcgaagagggcgatcgataagtcaaagtggacattgatgtcgtttcataagctgggttttagtgaagatgagattttgaattgtcttgatgaggataatgtgattggaagtggatcgtctgggaaggtctacaaggttgtgcttagcagtggggagtttgtggctgtgaagaagatatggggaggggttaggaaggaggtggagagtggggatgttgagaagggtggtagggttcaggacaatgcttttgatgctgaggttgaaactttgggtaaaatcaggcacaagaatattgttaagctgtggtgttgctgcaccactagggattgcaagctcttggtttatgaatatgcctaatggaagtcttggtgatttgcttcatagcagtaagggagggtcgttggattggccaacaaggtacaagatagctgtggatgctgcagaaggcctctcttatctgcatcatgactgtgttcccgcaattgttcatagagatgtgaaatctaacaatattttgttggatggggacttcggtgcgagggtggctgattttggagtagctaaggcggttgaaaccacaccgataggaactaaatccatgtccgtcatagctggctcttgtggctatattgcaccagaatatgcatacactcttagagtgaatgagaagagcgacatatacagttttggggttgtcatactcgagttggtcaccggaaaacacccagtggaccctgaatttggggagaaagacttggttaagtgggtgtgcacaacctgggaccagaaaggtgtggaccatttaattgactcaaggcttgatacttgtttcaaagaagagatttgcaaggtcttcaacattggactcatgtgtactagtcctcttcccatcaaccggccttcaatgagaagagtggtgaagatgttgcaagaggttagcacagaggaccaaaccaagcctgccaagaaagatagcaagttatccccttattactatgacgatgcctcggatcatggaagtgttgtttaatgaagacttgcaagggttggactatttgatgatcctgaaagggggagttcgaagcttttcttttactataagagccatcttccctccatgttttccgcgcatgctttgctttacaaagttgactaaagaaaagagaattagagtataggatttttttcagggtggaaaatagaggcttgaggagttgatgttttaccctataaagtatgtcaatatcaagaagcttccctaccaaagtt

SEQ ID NO: 7964 - DNA, 1298 bp, Glycine max
  Clone ID: 700728881_FLI
ctttctgctgctggaatacggagagtgagagaatctgttagaaaattgttgaagaagcttttccatttcgagcattttattttttttaaattattgtttggttttagggtttgagaatcagcactgtgtcgcgatgtctaatcatcaccgttcttcctccaagaacggtcttccacctcaagaactccttgacgatctctgcagccgatttgtgctaaatgtgccaaaggaagatcttcagtcatttgaaaggatcttgtttcttgtggagtacgcacattggttttatgaagataattctgtagaaaataatccatctctgaagtcattaaatctgaaggagttcacttctttacatgatattttcaaggacttcacttcctataaggttcgagttcctgtaactggggcaataattcttgatgaaacatatgaaaggtgcttgctagtgaagggatggaaaggttcaagctggagcttccctcgtggaaaaaagagcaaagacgaagaagatcatgcatgtgccattagagaagtcatggaagaaacaggttttgatgtttcaaaacttctgaacaaggatgaataccttgaagttatttttggacaacagagagttaggctttacattattgctggagtgaaagatgatacagcatttgctcctcttaccaaaaaggaaatcagtgaaatagcatggcaccggcttgatgaacttcaaccagcaagtgatgaagtgatatcgcgtagcatcaccggccttaagctttatatggtggccccttttctagcatcattgaaatcatggatttcaacacaccaacctgctatggctccaaggcccgatttgcctcttaaaggaatttgcgtgtggaaagcaaaacccggttctattggaagtagctccacagtaatggatatccagccaacaaaacctgaacctgattctcacacccctgacctggggcctggcaagagctttaggaatttcagatttgatactgcctcgattttacaagcaatggaaacttccttttcttcttgaaagtccgtcaaccttcctgtaaagtttcctgtaacttaatcgatttcccatatttcatccgtacgccaaagttggtggtattcattctccacgctaattaggttgttgctgtacatcatcttcctcaagttgtctgattgattgagtatgtacattgtgtacaggaagtatttgcacctaaatagttttctctgttattttggtattatctgtaaaactagagtaaaggttcaatgtaaaagttacgctgctc

SEQ ID NO: 7965 - DNA, 1228 bp, Glycine max
  Clone ID: 700728945_FLI
ggtgttggaatcctactttgccggtggcccccaaaaaagcatcttgatgaagaatccaaaagcattgaaaaaagtgatcagcctattagcatggtgtggggaaaagatggaaaattcacattttctgatcttgttaaggccaccgatgacttcaatgacaagtactgcaccggaaaaggaggatttggaagtgtctatagagcacaattactcacaggccaagttgttgctgttaaaaggctcaatatatcagactctgatgacattccagcagtgaaccgccagagctttcagaatgagataaaattgcttacaagattgaggcaccagaatataataaagctttatgggttctgttctaggagaggacaaatgttcttcgtttatgaacatgtagacaaaggaggtttgggggaagtattgtatggagaggaaggaaaattggaactaagttggactgcaaggcttaaaattgtgcagggaatagcacatgcaatttcatacctgcacactgactgctccccaccaattgttcacagggatataacattgaataacatactactagactccgactttgaacctcgtcttgcagatttcggcacggcaaagctgctaagctccaacacttcaacatggacctcggtagctggatcctatggctatgtggctccagaactagcacaaacaatgagggtgactgacaagtgtgacgtgtatagttttggagtggtggtattggagatattcatgggaaagcatcccggagaactcttgactacaatgtcttcaaacaagtatttgacatcaatggaggaacctcagatgctactgaaggatgtgcttgaccaacggcttccacctccgactggccaattagcagaagcagtagtgttgacagtgaccatagctttggcatgcacgcgtgcggctccagagtccagacccatgatgcgtgctgtggcacaagaactttcggctactacgcaggctactcttgcagagccatttggcacgattaccataagcaagcttactgggtttcagaaatagcatatagtgtagtactgtgatttctgtgctgaatgtcgtcgtgtaatccatgttgctgaacttacctagtgggataaaactttgttgtagtacacaaatatgttaatctgtagtacaattatatttgaagttgacatttaaaattacaataaaggaaaggtttggtgattggagc

SEQ ID NO: 7966 - DNA, 703 bp, Glycine max
  Clone ID: 700728946_FLI
attctagccattcgaattcccaatctaaaaccctaataccttcaaagaacgaagtagtggatcagtgatggcacctaaggcagagaagaagccagcggagaagaagcccgcggaggagaagaagtccacggtgggagacaaggctccggcggagaagaagccgaaggccggaaagaagcttccgaaggagggaggagccggcggagaaggggggaagaagaaaaagaggaacaagaagagcgtggagacgtacaagatatacatattcaaggtactgaagcaggtccaccctgacattggtatctcaagcaaggccatgggaatcatgaacagcttcatcaacgacatcttcgagaagcttgctcaggaatcttccagacttgcccgctacaacaagaagcccaccatcacttcaagggaaatccagaccgcggtcaggcttgtgcttcccggtgaattggccaagcacgccgtttctgagggtaccaaggccgtcaccaagttcaccagctcatgaaccgactattatttggattttgtttctggttgcacacacaaatctgttctatgtatctggagacttatgtttggattttgatcagtaattgtgcatgaacgttgtagtggtgctgatatagttagtatattcttggtatggtacatggagtgggctgtttcagtattaatgcatttaagattctct

SEQ ID NO: 7967 - DNA, 753 bp, Glycine max
  Clone ID: 700729029_FLI
ggagatacagtgaggaaaaagccagaaatgtagtaatacttggttgctgaacatgcagctgcaaataacaagatcttcatgatgaacctttctgctccctttatatgtgagttctttaagggtgcactggacaaagttctgccatatatggattatgtttttggaaatgaaactgaagcaagaacattttctaaagctcaaggctgggagactgataatgttgaagaaatagctttaaagatttctcaattgccaaaagcatcagaaaaacataaaaggattactgttatcacccaaggtgcagatcctgtttgtgtcacggaggatggaaaagtaaaattgtatcctgtgatactattacctaaagagaaattaattgatacaatggagcaggagatgcttttgtgggaggatttctttcgcaattggttaagcagaagcccattgaagaatgtgtgagagctgggtgttatgcagccaatgttatcatccaaaggcctggctgcacatacccagagaagcctgattttcattaagtgatttctccttttctgttactgttatgaattattattattattttttatcattgagaagaattttaacagccacactctaactggtgtggggttttttaatcccccgtctagggaaaacaacgtgaaaaagttgcaggaaaagagataaaacttgaataagttcatatatttgaagtccgatcaggcatcaattctcatattgctgttcgtgatc

SEQ ID NO: 7968 - DNA, 1508 bp, Glycine max
  Clone ID: 700729047_FLI
cactctcacattatttctaggatccctttttttcatttcacttcacttcatccatctttcagctatgaacgctctagcagccaccaaccgtaacttccgacgtgcagctcacattctcggtttggacactaagcttgagaatagccttctcattcccttcagggaaatcaaagttgaatgcacgatcccaaaagatgacggaacactagtatcatatgtaggattcagaattcaacatgacaatgctcgtggaccgatgaaaggagggattcgttatcacccggaggttgaccctgatgaagtgaatgctctagctcagctaatgacatggaagacagccgtagcagacattccttatggaggagcaaagggtggaattggctgcaacccgagggacctcagcgtcagcgagttagaacgtctaactcgcgttttcacccaaaagattcatgatctcattggtattcagagagatgttcctgcccctgacatgggaactaattcacagacaatggcttggattcttgatgagtattctaagtttcatggacattcaccagcagttgtgactgggaaacctatagatcttggaggttcattgggaagagaggctgccacaggattgggagtgatttttgcaacagaggctttatttgctgaatacgggaaatcaatttctgatatgacatttgtaatccagggatttggaaacgtgggcacttgggctgctaagtcaatttatgagagagggggtaaggtgatagctgtgagtgacatcagtggtgctattagaaacccaaatggaatcgatatacctgctctgctgaaacacaaggaaggcaatggaaatttgaaggaattctcaggagcagatatcatggatcctgatgaattgcttgttcatgaatgtgatgttctcatcccttgtgccttgggaggagttctcaacaaggaaaatgctgctgatgtgaaagcgaaatttataatagaagctgcaaatcatccaactgaccctgatgctgatgagatattgtctaagaaaggagtcatcatattacccgacatatatgctaatgccggtggagtgactgtgagctactttgagtgggttcagaatattcagggatttatgtgggatgaagagaaagtgaaccgtgagctgaaaaagtatatgactaaagccttccgcaacataaaggcaatgtgtcaaattcataactgtgacttgcgaatgggagccttcagtctcggagtgaaccgtgttgctcgagctacacttctcaggggttgggaagcttaatagaacacatgcatcaccgcttgctaaacaagttttctagcttagtattatgttgttgccctttctccagtatgctcctttttttccgtttgttatttgatcggtttagtttaatttagtttagtaattgagtatcattgttgcctaagaaccacatgtgaagttacaggtggatgtgtttctttatccaagaacccaaattttctgc

SEQ ID NO: 7969 - DNA, 1018 bp, Glycine max
  Clone ID: 700729080_FLI
ggttccttgacaaagctgcaatcctagatgagaactgctcaaaggaggaaaacagggaaaacccttggatagtttccacagtgactcaggttgaggaggttaaaatggtaatcaagctccttcctatttggtctacatgtatcctcttctggacaatctattctcaaatgaataccttcaccattgagcaagctacattcatgaatcgaaaagttgggtctctagttgtcccagcaggatctctatcagcttttctcatcattaccattctcctctttacttccctaaatgagaaactcactgtgcccttagctcggaaactgacccacaatgcccaagggctcacaagtctccagagggttggaattggactcgttttctccagtgttgccatggcagttgctgcaattgttgagaaagaaaggagggcgaatgcagtaaaaaataataccataagcgccttttggctggtccctcaattttttctggtgggtgctggggaagcatttgcctatgttggacaactagaatttttcattagggaggcaccagagagaatgaaatctatgagcactggacttttcctatctacactatcaatgggttattttgtcagtagcttattggtggcaattgtggacaaagcaagtaagaaaagatggctaaggagcaatctgaacaagggcaggttagattacttctattggttgctcgcagtgctaggactactgaatttcatactttttcttgtattagcaatgaggcatcagtacaaagttcagcacaacataaagcctaatgacgatgcagaaaaagagcttgtgagtgcaaatgatgtgaaagttggagttgatggaaaggaagaagcataagatatagtcttaaaatctcattttgtgtggcccaatatatagtgtgtaagaacaaaacattgtgctccaaatttgttaatttttgggtgttttgtcgacctcatttaacgaggacaattgtaatgtattattaagtatttacagat

SEQ ID NO: 7970 - DNA, 1549 bp, Glycine max
  Clone ID: 700729112_FLI
gaacttttaaacaagaacttgataaagggtaatattcttctttgtggatattccttcaactttgttgttggctctgcatcaatcaagaaagtctcagaaacagcaaaggcccttggtgcagttggatttgttctttgtgttgaaaacaattccccaggaacaaaatttgatccagtccctgttggtcttcctgggattctcatcacagatgtcagcaattctaaggaacttatagattattataatatcactacaccaagagactggactgggcgggtaaagagtttcgaaggtaaaggtaaaatcggtgatggtttgatgcctattctgcataaatctgccccacaggtagcattattctctgctcgagggccaaatataaaggacttcagcttccaagaggcagatcttctcaaaccagatattagctcctggttcattgatttgggctgcttggtgtccaaatggaactgatgagccaaattatgttggtgaggggtttgccatgatatctggaactagcatggctgcaccacatatagctggaattgctgctctcataaagcagaagcatcctcattggagccctgcggccattaaatcagctttgatgacaacatcaacaactctagacagagcagggaatcctcttctagcccagcaaacttctgaatcagaagctatgaggctggtcaaagctactccttttgattatgggagtggacatgttgatccaacagctgcattggaccctgggctcatcttcgatgcaggatacaaggattatgtaggcttcttgtgcacaacacccagcattgatgttcatgagataaggcactacactcatacaccatgtaacaccaccatgggaaaaccatcaaatttaaacaccccatcaatcacaatttcctatcttgtgagaactcaagttgtcacgcgcactgtcacaaatgttgccgaggaggaaacctatgtgatcacagccagaatggaacctgctgttgccattgaagtcaaccctccagcaatgactatcaaagcgggcgcatcgcgtcagttttcggtgtcacttacagtgcgctcagtgacaagaaggtatagttttggagaggttttgatgaaagggagcagagggcacaaggtgaggattcctgttctggccaatggacaccgacgatagatagcttagtaaagtttggtcggcaaagggaaggaaagcagtgctgcttgtaatattctttgtaacttgtggggaataaggtatggtgctacatttattcgtctaaatatatatatgatgttaaattatgaataggtgtaaaggtaagcaggtgtaaggggtcactcccagtttcttccacatataaagttttgctttgttggaatgcttcatcacaagtgttaacctgtactgccccattccacaaaagtcccttgcttactgcatgtgtaatacatgaaataatttgtataacataaggtatcaatggcacggtgtaaatcctatcaaagctattggctagttaaattcaattgctctgatttcagc

SEQ ID NO: 7971 - DNA, 1278 bp, Glycine max
  Clone ID: 700729173_FLI
tgatgcttcaagtgcaaagaagtttgaagccaccgtcactcgccttcattcatcaactcagggattgaaggaattcataaatgatgttaatacccttgcatctgtgcaacatccaaacctctgtaaattgctaggatttcatgcacgtgatggttctgaaccaaggatgttggtttatgagaggctatgccatggaagcttggaccggcagttgtttgggagatctgatagcccttcaattgattggaactcacgaatgaaaattgccatatgtgctgcacaaggtcttactttcttgcatgaagaagggcctttccaggcaatgtataatgaattttcagcagccaacatacagattgaaaaagatttcaatgcaaagctttctggatatggttgtgctggacgtattcctgaggaagagatttcgagcagttcatgtgctgttggaaacctgtcagtggagacattggaaaaaggaattcttactccaaaaagcaatgtatggagttttggaattgttcttttggaactacttactggcagaaagaatcttgatagccatcaccccaaggaagagaggaacttagtcaagtggagccggcctttcctggccgatgattttcgactgtcactgatcatggatcctcaacttaaaggtcactttcctcccaaagcggcaagaacgatggctgacattgcacaaagatgcctccaaaaggagccatcagaaagacccaccatgagaaccattgttgaaaatctcaaaacggtgcaagatatgaagtactcttgttggttcccactgcaagagccagcaaaagaaatgtcaagatctccaagtcttaatggtatcatatgtcatgtaccacctaggttgagtttctctccctcagtagtagcaagaccatctgtttcatctccaagatggtctaccaggtctggtggtgtgcccacactgcatcttcctcttcgcgcttgttcctccactttctcatggaggagcttggtggaccggaaagcaggaagtcatcatcctcaaggtgtccgagagctagtgttgaaggatatggactgtctataatgttttgttcttatgtatttgtttgttgttattatcatttttggggtgattcaacacaagtgtatagtagataaatgtatggttcttccaccttgacatatatctccatgagacgatgttcttttgtagataatgcaaaggtttgttatactgggtccaattaattaactcattgatataaaaatttacacggtcac

SEQ ID NO: 7972 - DNA, 1269 bp, Glycine max
  Clone ID: 700729273_FLI
tgacattgttaatgagggaagatattctttctgaagatgttgctcgcttctacattgctgaaagcattcttgctattcactcaatacatcaacacaactatgtacatagggatattaaaccagataacctgatactagataaaaatggccatttgaagctttcagactttggcttatgtaagcctcttgatgataagtattcatcaattttattggaaaatgatgatcttaccagtcaagaatccactagtgaaactgaaggatattctgtctctccttggttgatgccaaaggaacaattacagcagtggaaacgtaatcgacgtgcattggcgtattcaactgttggaactcttgattacatggcacctgaagttttgctcaagaagggctatggaatagaatgtgattggtggtctcttggggcgatcatgtatgagatgcttattgggtatcctccattttgttccgacgatccaaggatggcctgccgtaagattgttaactggaaaacgtgcctgaaattcccggacgaacccaagatatcagctgaagcaaaggatctgatctgtcgcttactatgtgatgttgactcaagactaggaaccagaggaatcgaagaaataaaggctcatccatggttcaagggtgttcagtgggacatgctttatgaatcagaagcagcatataaacctacggtcactggggacttggatactcaaaattttgagaagtttcctgaagtcgatggcccaccatctgtaacagcaactgttggaccttggcggaaaatgctgacatccaaagataacaatttcataggatatacttttaagaagtcagacatccttaaatcacttgaaagttcagatgcagatatcagagtaaacggatcatcgaaaaccccttccttgattaccttgttaggtcggattgatttgcaagacaccatcataccagaaagtgagcagaagccagaagcttgaatcaaactaactttttttacatttactcgattttgtattctattctttatgcttggcgtttgagattgtagatgacaatgttagcaagcatattcatagttcaattacagggaaagactgggcactggagtaaggtcattgatcatggtgtggttaataccatgcagctctgttctactgctcaaaagatgatactatccttgacataagtgagacctgtgctgttcatatacagattcatttcaatctccagaaatccaatcatttatgctgttaagtaatg

SEQ ID NO: 7973 - DNA, 1314 bp, Glycine max
  Clone ID: 700729312_FLI
cctctatgatctccaagataggcttggactcaaccaaccaagcaaggttgttgattggttgctcaatgcagcaaaacatgaaattgatgaattgccaccacttccaattcctccaggtaacttcacccttggttatccctctcttgtttcttgtaatgaagttagcacctctcgtgaaggttcaggccaaaacactttattatggaaaccaaagccaggagaaataatggttagtgatcatgataaggcaaattggatgaatagaagagaaggagatgatgatgatgataataatcataataatagtaatggtgataaacaaggaagcaataataattgtcatggtggtgcacttgttttgccaaataatctcttgccaacaagaccaaaccatccttcttttttgggtttgatgaacactatgccatcacttggttaccaatgggaacctaattcttcagctgctgatgttaatgttcaatggcaaaaccatggattttttaaccaaacagatgtacacagcatcgatgtggttccatttccgtcaacactggctctatcaactgggaatagtactagtactactactacttctcagattttggtgtgtcctcctcctccgggagcaacaacacagccatattttccttcttcacattttgcaacaatggagatgaatgcaaggcaaatcaaccactatcagatgctgagttcaagttctcatcaaaatctcttggcaaattctctcaatcatccatcatcacagcaactcatgagccaatccgggaaagcaccattcagcttgcgaattaggcctaaacttttccattctcctaatagcagtgaaagccattcccaaaaagatcaggatttcccttccaagtgatgcacaaatagagcaaaataaagttgtcaaaattcttcttctcctcacaaattatgcatggattgatatcttgagggctgtgtgggaattagttgcaagacatattattcaacgttttggggtttgaataaacattccgtttttgtcaaagttatgtttggttttatgattttccattcagtttgatctatatggatatgccatgcaaaggtctacaaaagaatggttttcttttcaagggtaagagctttttcctgaagtgatgatgtgattgctacactaaagagaacgcatgctcagataagttcacactctcttctatgcattgagaaaggttggaaggtggaataataatattatcattttgatagtgcgttttggatttgtttttgttttggttaagtaaacatcttatgtgtttgaatgag

SEQ ID NO: 7974 - DNA, 795 bp, Glycine max
  Clone ID: 700729344_FLI
caaagttaatgagtcaaaatgtacacatatgaagtgcacttttggtgggatatggaatggtggggggggtgatggacagaaaaacctttttgttgcctcatttttctttgaccgggcagctgaggctggttttgccaatccaaatttacccgttgtgaaggttcgtcccgtggattttgaggctgcagctaagcaagcttgtaaaacaaaacttgaagatgccaaatccacttatcaacgtgttgaggaagggaaccttccatatttatgcatggatctcttataccagtatacattgcttgttgttggatttggcctagatccatggcaacagattacattagtgaagaaagttaaatatcacgatgcttttgttgaagctgcatggcccctaggcagcgccatagaagctgtatcatctacataatgacagacaccagtaatgataattacccacctgaaatcttctgggatgagttttatcacaagttcttttgaggtgaagttgcctccattcataaaatgatcagaaattgctatcaggtcaaattggaattaaatatggggatacatttcaagaataacaagaagacagattctttattttcatttgtaattattttacaaaagtatctgatttacagctttggaagactgattcaattcattttgttcatctattttttgtagtctttagagatgatggacataagggtgacgggggggtagtattttttttttttttttttgttgattcctgataatagttaattgagcaaattacagaaatttccc

SEQ ID NO: 7975 - DNA, 1176 bp, Glycine max
  Clone ID: 700729363_FLI
tccgacctttgccatgacaggtgcgcttgcttggcaggtcaaaatatgttaataaaaaaagttttattggtttagggagagatcgcacgggagttgcccggggtctctctctcgtgtggtgtgtggtgtttgctgtgctctccttttcgttatgccttttattattacctatctgtcgctccactccgtattacgactctggatcagagggatacatcagaggattcgctccaactcctatcgaataaggtattatctgtcaatttacattggaaagggttaggatattgaattttacataattaaagataaaatcaacgatagctatagttttaaaattaaccatcgatttagttgcaactggaacacaggtttctttcaatgaaataatattaatatcaatttaataagctggtaatgtaaaatactgctaatgttaatatgaagtttggatggtcttattggcagaagatgctaggtggtgttcatcaatattctgaaaggtaaaacgattttggtttttaatgataatataaccatgaatctaacatcagacattgaacgctacacatcaaaaataaatcgagccaacgtatttaattgtaagtgtcttcatattacctgtgttctgtgacatctttttgcataattttggcactaagtcttttttgatagaaattgtgaagatgtactgttatcattgtatcaactatattgtgcccttctttttttacttgatttggcaaacacggctacttttctccaaataagatggatcatttgtattgccggctttgtgcacaattatctacttgtaagatgtccaatttcgggcaacaacatttgtaatgcagaaataggtcattagcattgtaaatctccaggcgataaatggaatatcaaatggaagacgccgcatagcttctggtgtgacaatatcattgtgttgggcaaagcattttcgaagaaatatcgtggatttaggaagattctgattattcttctacatctacaattattaaggtgaagataatttcggctctttacaagtaaagaatgaaattttcatatggtagatttagttgatcagtataattattgttttaatttaattccttgaattattttaattattgttcttcgacactttattcagtatattattaatttttttag

SEQ ID NO: 7976 - DNA, 983 bp, Glycine max
  Clone ID: 700729434_FLI
atctctgaccactgtatgaaaaacctccctttataatgtttgcagcaaccaaatccaggtcagagatgcactgctgttaaggttgtcctggtaatggagtccgctgctgatgctttggttgagaaagtgaaggctaaggtggcaaaactaactgttggaccaccagaggatgactgtgatatcaccccggttgtgtcagaatcatccgccaatttcattgaaggcctggtcttggatgctaaggagaatgttgctcctttctccttagcatccaagaccaggccttcaaaagagaaggcaatctcatttggcctttgctactggacaatgttaggccagacatgagaattgcatgggaagagccatttggaccggttttaccagtaattaggatcaattcagttgaagaaggaatccatcattgtaatgctagcaactttggacttcagggatgtgtcttcacaaaggatgtcaacaaagcaataatgatcagtgatgcaatggaaacgggaacagttcagataaattctgccccagctcgtgggccagatcattttccctttcagggtataaaggacagtggcattggatctcaagggattaccaacagcataaacatgatgaccaaggtcaaaacgactgtgatcaacttacccagcccttcctatactatgggctagtagtgtaatacacacatgcatgggggaacatcattatatagcatgttccataaatcatagtgaacgtacaaccgtgtgagttcagcattgcattgtcttttgcagctgggaatcacagagatgaataacgagtttgattgatatgtcgcatagctacttcatatgtgactacttgttgtactcgtatttaggatgatatgaaactgaattttatcttgtgccttatcattaaggaatatcattgtgttccaattaaattgaatgtcaaatcaatgaaatgagggggaaaaacattggcttctg

SEQ ID NO: 7977 - DNA, 1685 bp, Glycine max
  Clone ID: 700729493_FLI
tttggacacatgccaaacatgggttttgtaatgcagcatccgagttcaccacttcctagtccagttttatctggatacccagaaggaagtccaggccttccaggagttaggaatgaaataaatctttccccggcttctggaagaaatggaggcataatatctggatggcaagttcagagatcttttgacagtgctcatgaccccaaaattgttaattttcttgaagacttaaaatctggcaaaagtcgaagatttgaactatctgatattattggacatattgttgaatttagctctgatcagcatgggagtcgatttatacagcagaagttggaaagttgtagtgtcgaagagaagacattagtgtttaaagaggttcttccacatgcttctaaattaatgactgatgtttttggtaactacgtaatacagaagttttttgagtatggaagcccagagcagaggagagaacttgcagatcgacttgttggccagatactgcctttaagtttgcagatgtatggctgtcgtgtaatccaaaaggcacttgaggttattgagcttgaacagaaagctcagcttgttcatgagctagatggaaatgtaatgagatgtgttcgtgatcaaaatggtaaccatgttattcaaaagtgcattgaatctattccaaccaaaaagattagctttatactatctgcatttcgtggtcaagttgctactctatcgatgcatccttatggatgccgagtcatgcagagagttctagaacattgcacagacgagagtcaatgccagtttattgtagatgaaatcttggagtcagtctgtgctcttgctcaggatcagtatggtaattatgttacgcagcatgtcttggagagaggaaagcctcaagaaaggagtcaaattatcaacaagttgtcaggacatattgttcaattaagccagcataagtttgcttcaaatgttgtagaaaaatgtttggagtatggtgataccaccgaacgggagttgctagttgcagagatatttgggcatgatgaaaaatgtgataatttattgacaatgatgaaagatcaatttgcgaattatgtggtccagaaggtcattgatatctgttctgaaaatcaacgagcaatgttgctttctcacgtaagaattcatgctcatgctttgaagaaatacacttatggaaaacacattgtggctcggttggaacatcaatttggagagaatcaaacacccagctcatgatgaaaatagagagacgaagccatgggtctccagcaatgctgctgtgacgtgcaaaccccgcagcatcaacatatgttctgttgatcacagaaaatagctgagacatcgatagcttccagttgtttttactcctgacttcatacctgcaccgtgatagtttccacattgatggcttcaggggttatactttgaaactcaatgtaattatgtcattcaaataattgtttgaaaaagttatttgaataattatttggaatgaaacccttcccttcctgatgtataatttactgggtcttccgtgcttagtgtgtggttttcttggagatacaagtattcaagaattcttaaactcaactagtccttggcaacttagaacctggtccttgtcatgcatgttttaattgggaatgattacattgaatgttggttat

SEQ ID NO: 7978 - DNA, 1218 bp, Glycine max
  Clone ID: 700729527_FLI
ataggctttccgttccggttcaaaaatcgccaaggcatttgacgccgcagcaacgaaaacccgaaaataactgcacagcataagcttgtagaattgtactgcatcgcaaagccccatgttgatcgtgttcatttgcatcttccttttcttcatctttctttacaagttcctcatcgcttatggcgatttcactttgatgtctaagaagcaacctaagcgccaagagattgaagataaggttgtttggattactggtgctagccgtggaattggggagattctggctaaacagtttgcaagtttaggggccaagcttattatctctgcaaggaatgaagctgagctaaaccgagtaaggacacagctgaaaggtaagcatgcaccttgacgtcaagatcttaccattggatttatcatccggagaggattctcttaggatagctgttgagaaagcggaatccttttttccggattctggtgttgattacatggtccataatgcagcttttgagcgtcctaaaacatcaattttagatgtaactgaggaaggtcttaaggctacctttgatgtcaatgttctggggacaataactctcacaaagctcttggcacctttcatgttgaagagggggcatggtcattttgtggtgatgagtagtgcagcaggaaagactcctgccccaggtcaggctgtatactctgcttctaaatatgcgctcaatggttacttccataccttgcgttcatagctttgtcagaaaggaatccaggtaactgtggtctgtcctggtccaatagaaacatcaaataatgctggatcaagggttccatctgagaagcgtgtgccatctgaaaggtgtgcagagctgactattattgctgcaactcatggcttaaaggaagcttggatatcatatcagcctgtgcttgctgtcatgtatctcgttcagtacatgccaactattggttattgggtcatggacaagattggcaaaagtcgagtagaagctgctgaacagaagggaaacacgtattctttgagcttactgctcggaaaaaagaaggccacttgatgcccatctgttcatgttctccaaaaatttgtatcaaatatttttagtcggaggttctctatcaaattgaataacaccctttctgacaattgacagaaaagttgtatggatttcctaattgaacaattaaggtttacaaatatcc

SEQ ID NO: 7979 - DNA, 1165 bp, Glycine max
  Clone ID: 700729688_FLI
ctgggaaacatttctcagagtatgctgcacgcttttatgctgcagaggtcctgttggcacttgaatatcttcacatgcttggagttgtgtatcgagaccttaaacctgaaaacgtactggtccgagatgatggtcacataatgctctcagacttcgatctttctctccgatgtgctgtttcacctacccttattagaaattttgacagtgacccctcaaaacgaggtggtggtgcattctgtgtccagccagcatgtatcgagccttcatcagtatgcatccagccttcatgtttcatgccccggctctttgctcagaaaaataagaaatcacgaacgcctaaagcagaacctggcatgccgtccagcacgcttcctgagcttgttgccgaaccaacaacagctcggtcaatgtctttcgttggcactcacgaataccttgcccctgaaatcatcaaaggagaaggtcatggaagtgcagttgattggtggacatttggaattttcttgcacgagttactatatggtaaaactcctttcaaaggatcaggaaaccgtgcaacactgttcaacgtagtaggccagcagctcagatttcctgaatctccggccacgagttatgccagccgtgatctgatccggggcttgctggtgaaggagccgcagcaccgacttggggtgaagaggggcgcgaccgagatcaaacaacaccccttctttgaaggcgtgaactgggcgttgattaggtgcagcacaccacctgaagttccaagaccagttgaatgtgatctaccagcaaagtttgaaccagttgatactgttggggttggcaacatcaacaatagcaacaatagtagtaagaggatggtgggtaataataatactgacatgaagtctgggggtaaatatctggactttgagttcttttaagtttgggttcctcaatctactttgtattgtattttccatcttcagttaattttacaagagatgaaagctacattatcacgttatatgtcagtttagtctcacttagcagaattccatttcagttggaaatgatacacctcatattcagagggtaggctcttgtctaatagaagcattcttaattatagataatccatgatctagtgtctcaatacaaaatctagatatttctaatc

SEQ ID NO: 7980 - DNA, 1153 bp, Glycine max
  Clone ID: 700729743_FLI
gtaagcactatagaaaaaacgacattcattcatctatggctacccttattgctcccagcaaccactctccccaagaagacgctgaggctctcagaaaggcttttgaaggatgggggactgatgagaaaactgtcatagtaatattgggtcatagaactgtttatcagaggcagcaaatcagaagagtctatgaggaaattttccaggaggatcttgtgaaacgcctagagtctgagatcaaaggagactttgagaaagccgtgtaccgatggatactagaacctgcagatcgtgatgctgttttggccaatgttgccatcaagaatggcaaaaactacaatgtcattgtggaaatcgccactatcctctccccggaagagcttttggccgtgagacgtgcttatctcaaccgctacaagcactccttggaagaagatgttgcagctcatacctctggccatctacgccagcttttagtggggttggtgacctcatataggtatgttggtgatgagatcaatccaaaattggcacaaactgaggctgaaattcttcatgatgctgtgaaagagaagaagggtagctatgaagagaccattagggtcttgaccacaaggagcaggacccaacttgttgcaactttcaactgctacagagagatccatggcacttccatctctaagaaactggtggatgaaggatctgatgagtttcaaagggcattgtacactgccattcgtggcatcaaggatcctattaagtactacgaaaaggtggtgcggaatgcaatcaaaaaggttggaactgatgaggatgcactcacccgtgtggtcgtgagccgggctgagaaggacttgaagataatctcagaggtttactacaagagaaacagtgttcttcttgagcatgctattgccaaggaaacctctggggactacaagaagttccttctcacactgttgggaaaagaagactaaaaacttttcttcgagggcatttgtgattatgagtttaggacagtaagctatacttgtgtgtgatggtttcatgtgtgttggttttccttgagtctgttttcaattttccttgatcatgagaacttggagttttatcttatagagtattaatatgatagctgctttgtggcttttac

SEQ ID NO: 7981 - DNA, 1010 bp, Glycine max
  Clone ID: 700729809_FLI
attcccattacctaccatataccatcaaccaatatcttctttgtcgcttttattatctgtttttccggcgatggattccggcgcgtggctcctgttcctggtggtcgtggctgtctcaacgtccggccacattcactctgaagcgatcctgagactcccgtccgagagcgaggagatctcgcgcgactactgcgacagctggatgctggcggtggagacgaacaacgccgggacgtggaaccgcgtgccggcgagttgcgtggacttcgtggcggaatacatcaccggagatcggtaccggcgggactgcgacgtgatccggaatttgtcggcggcgttcgcgaagagcgtgggattggccggagacggaagagacgcgtgggtgttcgacgtcgacgagacgcttctctccaatgtgccttactaccaaggcgtcggattcggatctgagatcttcaatgagacttcctttgataattgggtggacttagctgctgccccagctttgccagccattttgagtttgtataacgagcttaaggaattgggcttcaagatattcttcttaactgggagaagtgagtttcaaaggaatgccacagaaacaaaccttctgctttcagggtacagagattgggagaggctcatcttaagagggtcttctgatcaaggcaagccagccactacatacaagtctgagaagagagcagagttggagaatgaaggctacaggatccatgggaactctggggatcagtggagtgatttgtggggttatgcagtgtccgcacggtcttttaaactcccaaacccaatgtattatattccttaacatagaaatggcttctcagaaatctgtaatctttttcataattgcctgttctagtacttctgcccatgatttttcatggtactatgatacttgttacaacagggattcttagtgacactagtttctaatgtgttgtatgctacatttatacttattttgaggaataattattttttct

SEQ ID NO: 7982 - DNA, 1385 bp, Glycine max
  Clone ID: 700729819_FLI
tcaggccttcgaaagagggcctatgaccctgaattgtttttcaaagtcaatggcaagctttatcaaaggcttggcaagataggtagtggtggaagcagtgaggtacacaaggtgatttcatcagactgtacaatctatgcacttaaaaggataaaattaaagggtcgtgattatgccactgcatatggcttttgtcaagagatcgagtatctaaataggctgaaaggaaagaataatattatccagcttatagattatgaggtgactgacaaggctttgtttgagggagtcataaatggctccttcagtaataaggatggtagagtcaaggatgatggatatatatacatggtacttgaatacggggaaattgatttggctcatatgttgtctcaaaagtggaaggaactggatggaagcaaccagaccatagatgagaactggcttcggttttattggcagcaaattcttcaagctgtcaacacaattcatgaagaacgtattgtgcattctgacttgaagccagctaacttcctccttgtcaaaggttccttaaaactgattgattttggaatagccaaagcaataatgagtgatacaacaaacatccaacgtgattcacaggttggtactctaagttacatgtcaccagaagcatttatgtgcaatgagagtgatgcaagtggaaacatcataaaatgtggtcggccatcagatatctggtcccttggctgcattctttatcaaatggtatatgggagaacaccatttgcagattacaagacattttgggcaaaattcaaagttataactgatccaaatcatgaaattatgtacgcaccagtttcaaatccatggcttctggatcttatgagaaggtgtctagcatgggatcgcaatgaaaggtggagaattcctcagctgctacagcatccttttctagttcccccagtcccatgtcattcatctttttaccaagaacaaacctttaaattgctgcaacttatatctgaagcttgcataaatgacccagaatcatcacagctctgttgtcagctccaacaggtgcttggtaatcccatcaagtcaactagtattcattcattaaattcactagaccaacagcataaattgctgtcccgaatatcagaactttgtattctactacaggaacgattgacaaagacagataaactataggtgcttgttttgtttaagcttatattgaggaatttataaattattttgtcaaaagatgtcttaagaggtgaagtaagccagtggtttcttattgttcattccaatttccagtggtttttatccaatcatttttctctccaatgtactagtaactagaaaggaaggtataaccttgttgtcatgac

SEQ ID NO: 7983 - DNA, 671 bp, Glycine max
  Clone ID: 700729832_FLI
attggctcaaggcctgaggcagagtgagaagtgtgatgtttacagttttggagtcattcttttggagctggttacagggaggaagcctgtggaaagtccaaccacaaatgaggtagtggttctgtgtgaatatgtaagaggtttgttggagactggctcagcttcagattgctttgatagaaatatacttggctttgctgagaacgaattgattcaggttatgagattggggctaatttgtacttcggaggatcctttaaggagaccaagcatggctgaggttgtccaggtccttgagtccattagaaatggattggagtcccaatcccattaaccagtaagagcttttccatgcagtacagttcagaattgaagtgattgcttattttgttaaattctccatggaacggatgtatcagatttaggcattcaagcatacatggaaggagatttggatcgggatggactgtgtatacaagcgggcatggggaaggatgttacttggcattcacatcgtaaaaaaagatgaaggataaaattcttttgtattcattcttatattgccatttttttccataaaatttgtaacatctgcaaataaaggcatttgtttattccattacttcacgtgttttcagggggaatacaaaagatgcctttgattcatttcc

SEQ ID NO: 7984 - DNA, 344 bp, Glycine max
  Clone ID: 700729854_FLI
ctttggggtgataatatgggagctctgcaccttgaataggccttgggaaggcgtacctccggagagggtggtttataccgttgctaatgagggtgctcgattggatattcctgatggcccgctaggcaggctgatttcagagtgttgggcggaaccacatgaacggccaagttgtgaggagattctctctcgattggtggacatcgagtactcaatgtgttgatgccagtgtttttatcttttgtacatagtgaactttgggtagagttgtaactttgtgctttcggctgatgtgtaaactatgaatttttgttccttatctgaaaacatatatatttgaagtc

SEQ ID NO: 7985 - DNA, 1244 bp, Glycine max
  Clone ID: 700729858_FLI
ctctacttttactcggggcatagcagatgctgatacatgaaagcgaaacctagctatcatcatcatcacagaagaacaacaacagaggaaaaaagaaaaagaaaaatgttagaggtgaagagaatcggtgtggtggggagtggccaaatgggatcgggaatagcccaagtcgctgccatgcacggcatcgacgtttggcttcacgacctcgaccctcaagctctctccaaagcctcctcttccatctcttcctccatcaaccgtttcgtttccaaaaaccacatctctcaggttgcgggtgctgatgctttgaaacgactgcgtctcacgacggatttggaggatttacagctagcggatttgatcattgaggcgattgtggaatccgaagatgtgaaaaagagtttgtttgcgcaactcgataggattgccaagagttctgcgattttggcgtccaacaccagttccatttccgtcacgcgtctagccacctctaccagcaggccacgtcaggtgataggaatgcattttatgaacccacctcctgtgatgaaattgattgagattgtacgaggtgcagacacttctgaggagacattcgttgctacgaaagcattgtcagagaggcttggcaaggtagtgataacctcccatgattattcaggcttcatagtgaatcgaatccttatgcctatgataaatgaagcattttttgctctctacactggtgttgcaaccaaagaggatattgacacaggaatgaagctgggtactaaccatccaatgggtcctttagagcttgcagacttcattggattggatgtgtgcttgtcaataatgagagttcttcatgctggccttggtgacaacaaatatgcaccttgccctctacttgtgcagtatgttgatgctggaagacttggaagaaaacgaggtattggtgtgtatgaatatagtaaagatccaaggtctacaaaatcatcttcccgtctctaaaatgtttgtttcacttggaagaacaagttttcaacacccccattttaattaccttgtgtctgaccgtgggggtggtgcacacggctgaagttgaatacttgaatgtgtcttctatttcttttatgcatacaagcaaaaagaaaattgcaggaactaatagtaaaacatgcatagttaaatcttcatgcatagttaattttattttattgtgtttgactggaaaattctaaacctattaacttttgtct

SEQ ID NO: 7986 - DNA, 753 bp, Glycine max
  Clone ID: 700729859_FLI
ttcagcaagtgcgttttggaagcagagaccgaaatacttcgagatggcccgtacaaagcaaactgctcgtaagtcaactggaggaaaagctcccaggaagcagcttgcaaccaaggctgcacgtaagtctgcaccaacaactggtggtgtgaagaagcctcatcgttatcgccctggaactgttgctcttcgtgagattaggaaataccagaagagcactgagctcctaatcaggaagcttcctttccagaggttggttcgtgaaattgcccaggatttcaagactgatctgcgtttccagagccatgctgtgcttgcattgcaagaggctgctgaggcataccttgttgggctctttgaggacactaacttgtgtgccattcacgccaagcgtgtgactattatgcccaaggatattcagctggcaagaaggattcgtggtgagcgtgcttgagttggtgcgttctgtgtttgtgaagatggattgttggtggctgcggatggtgttttgttactaagttttctttttgttgaagcctataggttattagggaaaaataggtgtttacttggtagtcatattaattgtcattggcaaatactgcctaagacactgtgaaggtctggttgttagaaatttggcatgtatttgatttttttggatcctttatttctcgttttatttctggttgtgcagccactttgggaattgtattggacaactttctgttgccatctaatctagttgaagct

SEQ ID NO: 7987 - DNA, 1961 bp, Glycine max
  Clone ID: 700729877_FLI
gtctcagaggcctaattcatgtgctttggggttcctacagccacatgttttttctaaccagaaatcgacggattgttcaaaagggtgttgatttcaagcagattgacaaagaatgggactgggacaatttcttgattcttcaagcactagttgcctccatggcatgctatatgtttccctttcttcagcatcttcctctctggaatgtaaaaggtcttattgttgctttggttcttcatgtgggagtctcagagccactttattattgggtgcataggaagttccatggagactatcttttcacccattatcattcacttcatcattcatctcctgtaccagagtcttttactgctggaaatgcaacacttttggagcatcttattatgacggtaatcattggaatccctatccttggggcttctttgatgggatatggatcagcaagcatgatatatggttatgttttgatttttgatttcctgagatgcttgggccacagcaatgttgaaattgttcctcatcaattgttcgagaaacttccatttcttagatatgtgatatacacaccgacatatcaccacctacaccactctgataaggacactaatttctgcctcttcatgcctctctttgattcacttggcaataccctcaacaaaaattcatggcaatcacacaaactactaagttcaggttcaggaaacggtgacatggtaccccattttgttttcctggcacatatagttgatgtgtcatccagtatgcatgctcaattcgtctatagatcctttgcttcattgccatacacaacaaggttcttcttgctcccaggcttgcccattacttttctagttttgctagcaatgtgggcttggtccaagacctttttagttagtttctactatctcagaggcagacttcaccaaacgtgggttgtacctagatgtggctttcagtatttcttgccatttgctactgagggaatcaataatcaaattgagcaagctatcctcagggctgataaaattggggttaaagtcatcagccttgctgcattgaataagaatgaatcactaaatgggggtggaaagctttttgtggacaagcaccctaaccttagggtccgagttgttcatgggaacacgttaactgctgctgtcatactcaatgagatccctcaagatgtgaaggaggtgttcctaacaggagccacatccaagcttggaagagcaattgctctctacctttgccaaaagaaagtgaaagttctgatgttaactctctcaacagatagatttcagaggattcaaaaggaagcccctccagaaaatcaaagctatcttgtccaagtgacaaaataccaagctgcacaaaactgcaagacctggatcgttggtaagtggatcacgccaagagagcaatactgggcaccacgtggaacccattttcatcaatttgttgtcccaccaattttatcatttagaaaagattgcacttatggtgacctggcagccatgagattaccagaagacgtggaaggacttgggtgttgtgagtacacgatggataggggagtggttcacgcgtgccatgcaggaggagtggtacatagccttgaaggttggtctcatcacgaagttggggccatagatgttaacagaatcgatcttgtgtgggaagcagcactcaaacatggcctaagaccagtgtcaagtttcacacagaaagaaaattaaaatcagcttcagtcaaagtatttttctcaagttgtttcttatttgttttggtgtattgcatgcacatcacagtgaccttataagtgtgattatattctttcaagtctgtgtattacatttctaatgtttcctcttgtatgttcatatgatcacattgacagtgattcattcatggtataaattaagccaaagcaagatagctttgcttcctcttgtatgttc

SEQ ID NO: 7988 - DNA, 1992 bp, Glycine max
  Clone ID: 700729878_FLI
aagcaactcttgataacactacgaagttttaagcccctaggtgattttcacatgtccagtgttggatttaactatctatagcattttgtctgcggttatgctatacttacagttttatttatttatttatttatttttggtagtaagctgtagtttagggtaaaagaaacattagagaggatggacaatggtaaagtagttggaccaaaaatttccctgttatgaactgagtcaactgactattctcaaagcttaagctattagggaaggcacatgaatagtttggttgcatttatatctataactatagaagtttccaaatgttttggggagaaaagtattataacctggttcacaaagttgtttaacaagataatgaggtctaagaagatgctacatctacagaggaaaagtatgattatatataagaacaagggagatgttactagctaactaaagagggattaagcttgtgagtcatactatgaaaccatacgtgagggtaattgaacaagggggaatagaaagaattgccccagctatagagggattaagcttacgagcaatattatgaaactatagggaagggtaattggacaaagattaagacgagagttcattttttagtgtatgttaggctaaggagaaaacatagttaactatgcattttctttgtttggttaaaagaggaaatgaagagaaaaaagagagaaaaattggctttaagaaacaaaatttcaaatttttctctcattttgtttagttaaggagaaaacacatgtaacaatgcttctagtggatcaccagcttctggaccttgtgtaagcttctgctcacctttaataattttgggatgtgattcttttggagaggactcagaaatacactcaattccaacatgtcataaaatgtgagcggtgagctcgtgtgaccttatgtgagctcctggccacctatgagttactctctgtttttttcatactatgtgctgcataactttgtaggtattttcactcattttattttctcctctcaactatcttgaattattgatcctttattcttatagttcgcacaatattctcttgttaattatggtattttgtacaaaatatcaggtggtaagtgaacagaaacctgtggttggcatgcgcttgtacttggagggcaggaaatgtgacagacttgctttacatataaatcatctttcaagcctcccaaataaaatgatcctctcgtcaggaacctcaacctcgagtacaccatcgatgtggcgaggatctgatgataatgaatccagtgaacaatttctggaacgtatcagatggaagagattctcaaatgtgtgcacagcagttgttaagcatgaccctaactggttgattaattctggaggtgtttatattgtaacaggtgcacaactccttagcaaagggagctggccaaggaatgtgcttcatctacggcttctctttactcatatacccaattgcagtatccggaagtcagagtggactgctgcaccagaggcttcaagaaaatcttttctcacaaatttgagcacaacattttcgttcactcagcatggcaccaccggtcctccaaaacaggctccaactgcacttaactctggagtttatccagatggtcctcctgtgccagttcgcgccggtaaactacttaaatacgtggagacagctgaggtcgtgcgaggcccacatgatgctcctggccattggttggtaacagctgctaagcttgtgactgatggtggtaagattggattacaagtgaagtttgcattgttagattattggtgattccaggcaactgttcactctattcagggtatattggttgccatgtgttgcttaaaatggttttgaaactatagacacttgtatatattctttctacaggctgtgtacagtacaattacaaaatgagtggctgttgaaatcgggcaatagaaaattaaaatttgactattca

SEQ ID NO: 7989 - DNA, 648 bp, Glycine max
  Clone ID: 700729902_FLI
atggaatcttctcagctcaaaacttacaatctcacagaaagtgacttggtgaaagaccacttgcgttacttgatgggaggccgatcaaacattcagaatgaggttctctgtcgtttcacctttccagaaagacctggtgctttgatgaaatttttggaccccttcagtccacgttggaatatcagtttattccattaccgaggggagggtgaaactggagcaaatgtgctagttggaatacaggtacccaaaagtgagatggatgagttccacgatcgtgccaacaaacttggatatgattataaagtggtgaataatgatgatgacttccagcttctaatgcactgatgatggttttaggcacttgccattattgtgtattttagtcaacaagtttgccatatttaatatttccccggtcgtttctaaaagttggatggggaaaaaaggtggaaaggaagtggccttcagacatgtcattagttgattagaggaacaactagttctttttacctaatgcggcgtcttattacattttttataatctgtaatttatgtttttttgttgttgttaacattggaatcttataatgttgttgcctggtcttttgtgtctgtaatataagtgtcttcaaaaggttgtttgct

SEQ ID NO: 7990 - DNA, 845 bp, Glycine max; identical to SEQ ID NO: 7924
  Clone ID: 700729990_FLI

SEQ ID NO: 7991 - DNA, 1942 bp, Glycine max
  Clone ID: 700730041_FLI
gccagacattcgcttgtgatgttgggaagagccctgcagtggcaggttatggtttctgtgacaagtctttgggagtggaagcaagggtgaaagaccttgttgggaggttgacattgcaagagaagatagggaacttggtgaactctgctgtggatgtgagtaggcttgggattccaaagtatgaatggtggtccgaagcacttcatggagtgtccaacgttggccccgggacgcgattctccaacgtgattcctggtgcaaccagctttcccatgcctattctcactgctgcttctttcaacacttcgttgtttgaagtcattggaagggtggtgtcaacggaagcaagagcaatgtacaatgttggccttgctggtttgacatattggtcaccaaacattaacatattcagagatccaagatgggggagaggtcttgaaacgccaggggaagaccctgtgctcactagcaaatatgcagcaggctatgtcaaaggtcttcaacaaactgatggtggagaccccaacaagctcaaggttgcagcttgttgcaaacactatacagcctatgatgtggataattggaaaggaattcagcgttacaccttcaatgccgtggtgactaagcaagatatggaggacacattccaaccaccattcaagagctgtgtgattgatggcaatgttgccagtgtcatgtgttcctacaacaaggttaatggaaagccaacttgtgcagaccctgacctcctaaagggtgttgtccgtggcgaatggaaactaaatggatatatagtttctgactgtgactcggtagaagtgctttacaaagatcagcactacaccaagactcctgaagaagctgcagccatatccattctggcagggttggatttgaactgtggaagatttcttggccaatacacagaaggtgctgtcaagcaagggcttatagatgaagcatccattaacaatgctgtcgccaacaacttcgccacgttgatgcgtctaggattctttgatggtgatccaagaaagcaaccttatggaaaccttggtccaaaagatgtctgcactcaagaaaaccaggaacttgcccgagaagctgcaaggcaagggattgtgttgctgaaaaatagtccagcatcactgcctctcaatgccaaagccattaaatcgttggcagttattggacccaatgctaatgctactagggtcatgattggaaactatgaaggcatcccatgtaagtatatatcacccttgcaaggcctaacagcctttgctccaacaagttatgctgctggctgtcttgatgtgcgctgccccaatccagtactagatgatgccaaaaagattgctgcctctgctgatgccacggtgatggtagtcggtgcaagtctagcaattgaggcagaaagtctagacagagtcaacattcttcttccaggacagcaacaacttctagtctctgaagttgcaaatgcatccaagggacctgtgattcttgtcataatgtctggaggaggcatggatgtgtcctttgctaaaaataacaataaaatcacaagcattttgtgggttggttaccccggagaagctggtggagctgccatagctgatgtgatctttgggtttcacaatccaagtggaaggctacctatgacatggtatccacaatcatatgtagacaaagtgccaatgaccaacatgaacatgaggccagatcctgccacaggttaccctggtagaacatacaggttttacaaaggggaaactgttttcgcatttggagatggattaagctactccagtatcgtgcataagttagttaaagcgcctcaattggtgtcagttcaactagctgaggatcatgtgtgccgttcctcagaatgcaagtcaattgatgttgttggtgaacattgtcaaaagttctagatcgc

SEQ ID NO: 7992 - DNA, 2432 bp, Glycine max
  Clone ID: 700730047_FLI
ctttctttctcttctcattctctcacttcatctcatctcctacattttttttgtatcatcgtttgttttgatcaaatctctctttctctctctctctctctctctccaatcttcaacgtttctgttattctcattcccaaacctaaccccttttcccggaaaatttctttgctatttttctgggaaagaaaaaaaaaaggaaagaaaataaaagaagcatgaattcagctgaggaatgcgtgtaagcgaggttgcagtgctgagagcaacctccttctccataatgcagaatgcaatttcaacatttggagactctttcagcctcatttccaaaccctcaactctgacacagtgcaactaagcttaaaccctagctttgctcaaaagggtcaacaacttgatcctgttgtgtcagcagctcccatccccagcttcaacctttctgggttttgagcttatttgggaatctgggtctcagagagaatgccgttttggtgtcccaatgcctctcaaattgcaggctttggacgtggtttgagtgataccgagttcagtgcatatttgaggtgaaaatttgagatctgtttagaaacccacatcactgcacaccaggtgttcgccaaaagtttcgcaatggtcaagttttcttttgtatcttaagcttccaagagtggtgtttctgtgagttttctttctgggtagttgatggatagttagaagaaaaaaagacacaattctctgaaggggcaactggtgaagtaacaaacaaaaaaggaaattgaaccaaaaaaattgtgttaatgtcaggtcccagattgaggtctatgaatgttggtgactcagaggctgcaaggcctgtgtttggaccagctgggaacaagacggggccattgagttctcggaaaccagcttcaaagccactgaggaaagctgagaaattgtacaacgaggccaaagagaagaagtcctatgaagtgtctacggttgttgcttctcctcagtcatattctgcgagtgttctgcgccggcacgagcagttgctgcattgtaatttgtctctcaatgcttcgtgttcgtctgatgcatccactgactcgtttcatagccgggcttctaccggaagattgactcggtctaatagcttggggtgtacaaggaagcgctctgtgtcaaagcctagaagtgttgcttctgatggtgtgttggaatctcctcctcatggctcacaatccaagaagaggtgtgcttggatcactcccaatactgaaccatgttatgctaccttccatgacaaagaatggggagttccagtacacgatgacaagaaactatttgagcttcttgttctttctagtgcactgtctgaactcacttggccagctattctaagcaagaggcacattttaggggaagtttttgcggactttgatccagttgctatctcaaaatttaatgagaaaaagataatggcaccgggatccactgcaagctccttactttctgaccttaaattgcgtgctataatcgagaatgcacgtcaaatatcaaaggtcatagaagagtttgggtcatttgacaagtatatttggagttttgtgaaccataagcctataattagcagattccgatatcctcgacaggttcctgtaaaaacaccaaaagctgatgttattagcaaagacctggtgagaagaggtttccgaggcgtgggccctacagtcatatactccttcatgcaggttgtggggttaacaaatgaccacctcatcagttgcttcagattccaagattgtatggctgttgcagaagggaaggaagagaatgccgtcaaggatgatgctcaacaaaaggagggtgatcatgtggagtctgatctgtccattgccatcgacaatttgagtttatcctcagagtgaatgactgatgactcaacaattgtcttggctgatatagatcctggctctatttgcagttcatctagtagaccaattcatactacttaggccttagattgagtcatgatggaggagaacttgtgtacccatctcatgaaatcccggaaactgaaagcatagttagttgaattaaatcaattgagtacctaactacccatgctgttgtatgtggcttcttgagggaggcctagcaaattgttgtacaattttttgtacagtaaaaaatgtcggtgattagaaatatcttttattatattaagccagtggcagcaggtgatagatataaccttgctctttgttaccgtctcattctgattatagttacactcgttatgcatgcattgtgttggttagctagctagagtttgaactgattgatgagtcccacttgagatggatgacaatgatagaacagtggcgtttgtctatttgtcaccttggcagcaagactactcattcttgatagatatgtttgct

SEQ ID NO: 7993 - DNA, 908 bp, Glycine max
  Clone ID: 700730112_FLI
cgagccacgtgcaaagcgccgagcaacacaaccaagatgtgaactctctcgggctgatttcatcaaggaagacacatgaggctattgagatcctcaagctcatgtcctccactttcctcattgcactttgccaagccattgacttgaggcatttggaggagaatttgaagaacacggtgaagaacgttgtgagccaagttgctaagcggactctcaccacaggtgtcaatggagagcttcacccttcaaggttttgtgagaaggacttgctcaaggttgttgatagggagtacacatttgcatacattgatgacccctgcagtggcacataccctttgatgcaaaagctgaggcaagtgcttgtggactatgcattggccaatggggagaacgagaagaacacgaacacatcaatcttccaaaagatcgcaacatttgaggaggagttgaagacccttttgcctaaggaagtggaaggtgcaagagttgcatatgagaatgaccaatgtgctattcccaacaagatcaaggaatgcaggtcttaccccttgtacaagtttgtgagagaggagttggggacagcattgcttactggtgaaagggttgtctcaccgggtgaagagtgtgacaaagtttttactgctatgtgccaagggaagatcattgatccacttttggaatgccttggagagtggaatggtgctccacttccaatttgttagttttgttttcttctgttttcttcaagtggtttctttctgtatacgtgtttgtgttgatataagcatttggtttgtctataaaggctgtggcaaatcaatccacatacaacaacttccagttttccttgatatgccaatcaaggaacttgtaattcatattgtaatagaattccatttgtttgccgt

SEQ ID NO: 7994 - DNA, 1434 bp, Glycine max
  Clone ID: 700730125_FLI
caatctcatagcaccaaaaacatagtactatacagccccactttctctttctctttctcttcactctaaagtctaagcatccatggccatggcgtctgcaaagctcaacaccttgtcttcccagtggatcgcccacaattccttctctcctcgccgtggatcctcttctcgccgagtctctcttccgatccgcgcttcttcttaccaacacgaactcgtccaaaccgccaaatctattgcatctcccggtcgtggaattcttgcaattgatgaatcaaatgccacatgtgggaagcgtttagcatccattggattggacaatactgaggtgaatcgccaggcctataggcaacttctgctcaccacacctggccttggtgaatacatctctggtgcaattctttttgaagaaaccctttaccagtcgacaacagatggaaataaatttgtggattgcctccgcgatcagaacattgtgcccggcatcaaagttgataagggtctggtccctctgccagggtcaaacaatgagtcttggtgccaagggctggatgggttggcttctaggtctgctgaatactacaagcaaggtgctcgatttgccaagtggaggacagttgttagcattccatgtggtccttctgcattagctgtcaaggaagcagcgtgggggcttgcacgttatgctgctatctctcaggacaatggtcttgtgccaatcgtagagcctgaaattcttcttgatggagaccacccaattgagaggacgctggaagtggccgagaaggtctggtcagaagtcttcttctatttggctgaaaacaatgtcctttttgagggaattttgctcaaacccagcatggttacacctggggctgaacacaaggaaaaggcttctccagaaaccattgccaaatatactctaaccatgcttagaagaagagttcctcctgctgtccctggaatcatgtttttgtctggtggacaatccgaagtggaagcaacactaaatctaaatgccatgaaccaaagtcccaacccatggcatgtttctttctcatatgcacgggctcttcagaacactgtgcttaagacatggcaaggacaccctgagaatgtggaagctgctcaaaagtcccttttggtgcgtgctaaagcaaactccttggctcaacttggaagatactctgctgagggtgagagtgaagaggccaagaagggaatgtttgtcaagggctatacctactaaaacttttggagtctttggctttcagttgttttcttttagttatttatcattccttcttagcagtgaattcgaaggggacttagatgtgctgtattttattttttttcaacttctagcaaatgagtttgaataaattgaagctagaaagaaaggttttcttggtaaaatggaggttggggattagt

SEQ ID NO: 7995 - DNA, 848 bp, Glycine max
  Clone ID: 700730133_FLI
cttttctttctttctttcttcttttttctgccgaggaaaagaaagaaatagaaaaagaagaaaaaaacacagcgtcctagatttcctcttctctgcttcggaagaaagagaaaacaaacaaaacaatggcgttcgcttctttcctcggcagagtcctcttcgcttctgtcttcatactctctgcttaccaacaatttaatgaatatggagttgatgggggacctgctacaaaagcactcagacctaagtttgatgcctttacacatcgggtgcattctcaagtgggctttcaaattccagagattaatctgaaatttttaattgctggggctattgctctgaagggtcttggaggggttcttttcatatttggcagctcttttggagctttgcttctgctcctgcaccagctgattgctactccaatccattatgatttttacaattatgatagtgaggacaaagaatttactcaactgttcatcaaatttacacagaatatggctcttttcggggctgtattgtttttcattggcatgaaaaactccatccctaaaagggtacccaagaaggctccaaagacaaaaacatattagttttgcagcattgaggacccctttcaagaagtgggggctgtgggagctgttgtttcctggtttttcatcatatcctctccaatctggcaggatttgcaccgagtactctcttctctggttcagaaccaatcttcctccctttgagttttgtagttttggcttcacttggattatattattggctactattattatttttgtatgatctgttatcacggcgttaggaactatctttcaattgccaaacttgtc

SEQ ID NO: 7996 - DNA, 249 bp, Glycine max
  Clone ID: 700730152_FLI
gcagatcagagggcaacctgttggacaaaaaagtggttgctgctcttcctaaccaggtggtgctgcttggtctacacttaccttttgcatgtaaggggcatatgctatttcactaaatagtggaccagtgtcacgtaatccaacctgtggtttgggaattggcctagatgatcccattctttaccatatacttgaatgctatgattgtgcttagtacttgttaatgataaaacttttatatttctgctc

SEQ ID NO: 7997 - DNA, 1877 bp, Glycine max
  Clone ID: 700730174_FLI
ccaaattcccccaaaccccccctttccgaattatcgcggtggccttggagccgcaacaggacttccccagcgggaacagtccccagcgtctcctcaaggaactcgccgaacgcaagaaagcaacttccccaaagaagggtcccccaaggaggttcattctaaggcccccaatagacgataacaaattagcagaaaggtttctcaacagcccacaactttctctcaaatcgttccctttattaagttcgtgcttgccttcgtcgcgcctcaacaatgcggataaattgtggattgacgagtacttgctcgaagcgaagcaagctctgggatactctctggaaccctcggagacgctcggggatgataatgataaccccgcgaagcagttcgacacgctgctgtacttggcgttccagcacccgtcgtgcgagaggacgaaggccaggcacgtgcggtccgggcattcgaggttgtcttttctgggacagtacgtgctcgagttggcgctgacggagtttttcttgcagaggtatccgagggagtcgccgggcccaatgagggagagagtgtttgggttgatagggaagaggaacttgcctaagtggattaaagccgctagcttgcacaatttggtatttacgtttgatgatatggataagataaggaggacggagaaggaaggtcctgtcaagtcagtattttgggctttgtttggggctatctatctttgttttggtatgccagaagtgtatcgtgttctttttgaagtcttcggaatggatccagatgccgaagattgccaacccaaattgcgtagacaacttgaagatgtggattttgtatctgctgagtttgaaggcaagctaagctggcaagatatcgttgcatataagcctcctgcagatgctctgtttgaacacccaaggctattcagagcttgtgttcccccaggaatgcatcggtttaggggcaatatatgggattatgatacaagaccccatgttatgaaaacacttggatatccattggaaatggcagacagaatcccagaaattactgaagccaggaacatagagcttggacttggattgcagctttgtttcatgcatccatcgaagtacaaatttgagcatcctcgattttgctatgagagattagaatacgttggccaaaagatacaggatttggtgatggctgaaagattattgatgaagcatttagatgctccggggttatggctacaagagaggcaccgtcatcttcttatgaacaagtattgtggaagatatttgagggccaaacatctccaccgggttattatatttgatgataaggttcaagacacttatgagcataaccggagaaagagaaacccagccacaacagctgttcaacaagctcttcatgggctttcgtatcttgtttatgggaagcgtgatgtgaggcgtctgatgtttgaggtttttgactttgagcagatccagcctaaagaagtagtctaaatatagagacaaaagtgacaataataaaagctcttttgtttttcctttattatttacctcttgttttccttttctatccccttgatttgagcttttttcatattatgatttgatctgcctagttgtaggtgaattgcggattcttctttagaacttgagcttgtatataatcgttgtatttatttttttcggatattgcacgccctagacaagtagataacccaacgtacaaagatgaggatacatatgacttgttctacttgttggttctgactatggacgttggtattggtatggttattggtgaattaaactcaacattttcactacacaaatgagaatatagttgggattttgtacttttgtttattctcc

SEQ ID NO: 7998 - DNA, 1974 bp, Glycine max
  Clone ID: 700730185_FLI
cgacgacgaaggccgcgacaccttctggcactccagcgctcacattctcggccagtcacttgagacggagtatggatgcaagttatgcattgggccttgcactacaagaggagaggggttctattatgatgcgttttacggggacttgggtctcaatgacgatcactttaagcagattgaggctggagcattgaaggctgttgcggaaaagcaaccctttgagcgcattgaagttacacgcgatcaggcacttgagatgttttcagataataagtttaagatcgagattatcaatgatttgcctgccgacaaaactatcacagtatacagatgtggtcccttggtggatttgtgtcgtgggccccatatacctaatacatcctttgtcaaagcaattgcgtgtttaaaggcttcatcagcatattggaggggggacaaagatcgggaaagtttacaaagagtttatggcatatcttatcctgatcagaaaagtctgaaggaatacttgcatcggctggaggaggctaaaaagtatgatcacaggattttgggtgtgaaacaggagcttattcttcatcatgaatggagtccgggaagctggttttttcttccacatggcgctcggatctacaacaaactcatggacttcattcggaatcagtacagggacagaggctatcaagaggtcatatctccaaatgtatttaacatggatctatgggtgcaatctggtcatgctgcaaattatagggaggatatgtttatcttagaggttgacaaacaagagtttgggttgaaaccaatgaattgcccagggcactgcctgatgtttaaacacagggttcgatcatatagagaacttcctcttcgctttgctgattttggggttttgcatcggaatgaggctagtggtgccctgagtggattaacacgtgttaggagatttcagcaggatgatgcacatattttctgcagggagtcccagataaaggatgaagtgaggaatggcttgaatttcatcaattatgtctataagatatttggtttcacgtatgagctgaagctttcaacgaggccagagaaatacctaggagatattgcaacttgggacaaagctgaaagtgctcttaaagaagctttagatgattttggcaagccttggcagttgaatgaaggggatggtgcattctacggaccaaagatagacatcagtgtatctgatgcattgagtaggaaattccagtgtgcaactttgcagcttgacttccagcttcctgatcgttttaagttggaattctcagctgaggatgaagccaaaattgagagacctgtaatgatacacagagccatcctaggatctgttgaacgcatgtttgccatacttttagagcactacaagggtaaatggcctttctggctcagtcctcgtcaagcgattgtatgccctgtgtctgaaaagtcacaatcttatgcactacaggtgcgagatcagatccaccaagcagggtatcacgttgatgctgatacaactgataggaagattcagaaaaaggtacgagaagcacagttagcacaatacaacttcatattggttgttggagaggaggaagctaattcaggacaggtgagtgtacgagttagagacttggcagaacataaggttatgagtattgagaaactacttgaacatttcagagacaaaactgcagctttcgaatgatactttgcttgtgaaaactgaagaaaaatttcagccccaaataccttagttttacacagttgtgtgcatgtcacaattttatttttattttcaacctatcaatttatcctgattttattttatgatttgaatggtaacaatattttctttgtatcgtttttgtttacgttccgagctttttacatcagcattagagtttacatgtcacattttttttttcttttaagttggtggctgacatttgaggaaaatat

SEQ ID NO: 7999 - DNA, 896 bp, Glycine max
  Clone ID: 700730242_FLI
ggacatgagaggcgaacttgatgacactgctgctttcaagaacttcaagaaatggggaaacattgaatttccattgccatttggaagggttatgagtactacagaggctttcattcatggattagatgaaaagacaagtgcatctttgaaattcacagtattaaacccaatgggccgaatttggacaatggttgctgggggaggtgctagtgttatctatgctgatacggtaggagatcttggttatgctcctgagcttggaaactatgcagaatatagtggtgcacccaaggaagatgaggtcttgcagtatgccagagtagtgattgattgtgcaacttcaaatcctgatggccaaaagcgagcccttgtggtaggtggaggaatagctaactttactgatgttgctgctacattcagcggcataattcgtgctctgaaggagaaggaacaaaagctaaaagaagcaaagatgcacatctatgtgaggagaggaggtcccaactaccagaagggtctagcaaaaatgagggcactcggagaggaaattggcattcctattgaggtttatggacctgaggcaacaatgactggtatatgcaaacaggcaatccaatacatcactgctgctgcttaattatccattcttaggccaatgccttctattacaagtattttcatggctagtttgaagtgattgttgattcttggttccctttccaactctcagaattggtaactttggtgagttagagcataggctgttacaagtagtcatttagtcatcaaataaagtggtcaagagtgttttgtatcgtgtagaattctgatattacagtcttggcacaataaactggaatgtgtaattgttttatgctatgtcaagctggaatttt

SEQ ID NO: 8000 - DNA, 1095 bp, Glycine max
  Clone ID: 700730247_FLI
ggggtcagtggaggctgctgagaggaacaagctggtgtttatggagggtggagtgtacggatttgggttggaggatttgttgagggcttcggcggaggtattgggaaaagggagcatggggacttcttacaaggcgattctggaggacgggaccacggtggttgtgaagaggttgaaggacgtggcggctgcgaagagagagttcgaggcgcgaatggaggttgttgggaacgttaagcacgagaatgtggttcctctcagagcgttttactactccaaggatgagaagttgctcgtctacgattacatggccgccggcagcttgtctgcacttcttcacggaagcagagggtcagggcgaaccccgttggattgggacacccgaatgaaaatagcactgggagctgcaagaggcctcgcctgcctccacgtgtcaggaaaactggtccacggcaacatcaaatcctccaacatcctcctccacccgacccacgaagcctgtgtttcagacttcgggctcaacccgatatttgccaacccggttccctcaaaccgagttgccggttaccgggcaccagaggttcaggaaaccaaaaaaatcactttcaaatccgacgtctatagctttggcgtcttgatgctggaacttttaacaggtaaggcaccaaaccaagcctcgctgagcgaggaagggatcgacctaccacgatgggtgcagtccgtggttcgcgaagaatggaccgctgaagtgttcgatgcggaactgatgaggtaccacaacattgaggaggagatggttcagttgttgcagattgcgatgacgtgcgtttcgctcgtgccggatcagaggcccaacatggatgaggtggtgcacatgatccaggatattagccgaagcgagaccaccgatgacggcttacgccaatcgtccgatgatccttctaaaggatcggacggtcacacacccccgcaggacgctaggactacccctaggtcggacacgtcgtagtagtgaagctgtaaaggcaaaagaagaagaagaagaaaaaaaaaagaaggaaaagaaaaagaaaaattcgttggaattggaaaagg

SEQ ID NO: 8001 - DNA, 554 bp, Glycine max
  Clone ID: 700730303_FLI
attgacacaatttttgaacattattacctaggcatgaaatattctttgataatttccagggctgtgggacgtcagttattgtaggtgttgcagcatcagggcaggaaatatcaacccgtcctttccagttggtgagtggacgagtctggaaaggaacagcttttggtggcttcaagagcaggtcacaggtgccttggcttgtagacaagtacttgaagaaggaaatcaaggttgatgagtacattacccatactttgacactttcggagatcaacaaggcttttgatcttttgcatgaagggggatgccttcgctgtgtgctttctacacaagaatgaggtgatctgtgccagcctgcctggttttgtgaggaatggatgtgttgtgttgcttttccctcttgtagtggttgtagtttgaacttgaaataaatctcgagtggctatattttgtaagtaagatcattttggtctataatatggaattatggatgttatcttccgagtcttttggcaaacttgtgttcagaaagaaggtctttgcaattaatactt

SEQ ID NO: 8002 - DNA, 1302 bp, Glycine max
  Clone ID: 700730441_FLI
cttcaatgttggtaagtatcgtcgccttaagcatggttctagtcagtctgctgatttctttcgagctgacaatcctgaaggtgtggaggcacgtaatgaggtagcaaagatggcatttgaagatatgatatcttggatgcaagaaggtggccaggttgggatatttgatgccacaaacagtagcaagcagcgaagaaacatgctgatgaaattggctgaaggtagatgcaagatcatttttctggaaacgatatgcaatgatgttgacataattgagaggaatatacgctttaaaattcagcagagtcccgactatgcagaagtatcagattttgaggctgggttgcgagactttaaagaacgtgtcgccaattatgagaaggtttatgagaccgtagaagaaggatcttacataaaaatgattgacatggccagtggacatggagggcaaatacaagtgaaaaatatcagtggctacctacctggccggatagtatgtttcttggttaatacacatcttacaccacgcccaatattacttacccggcatggagaaagtcagtataatgtgagaggcagaattggtggagactctgcattaagtgaggctggagaactttataaaaagaagcttgccaaatttgttgaaaagcgtctcaaatcagaacgagctgcatgtatatggactagtacactgcagcgaacaattttgacagcaggtccaattgttgggtttccaaagatacaatggcgcgcacttgatgagataaatgccggtgtgtgtgatgggaagacatatgaagaaatcaagaagaacatgccagaggagtacgaatcccgcaataaggacaaacttaggtatcgttatcctcgtggagagtcttacttagatgttattcaaaggttagaacctgtaattattgagcttgagcgacaacgagcacctgttgttgtgatatctcaccaggctgttttgagggcattatatgcttattttactgacaggcctttgaaagaaattgcagatattgagatgcccctccatacgataatagagatacaattgggagttactggtgttgaagagaaaagatacaaactaatggactgaaatgaactgaagggaaagaatagatttaaatgaacatttttgtttttatgaggggaaaaaatgatgattatcaatttatcgtgtatattgtaatcttctaaaaccaccccttttaataatttttatgagcattccttagcttccaatttgaagaattttgaacatcaaaacaaaaacaatacttattactc

SEQ ID NO: 8003 - DNA, 1165 bp, Glycine max
  Clone ID: 700730484_FLI
gcgatctagcactccatgattttagtctcctctcggaaacttctagaaacaacaacaacctacagctcattttttttccgattccgatcctctttctgcttctccgttcgctgggtgcatgccctctcagtaaccctatcagatagatcaaggtaaccaaaataatcataaattatcattcttcacttattaatattatttatcttctttttggattggataatattaagaagaaccagcgttagctaaggatagataggttctagcctttctgttatcattttcgaaagaatctgtagcagtgtaagtaccaaattgaaatggttagattttgtttagaaagcagttatgaacgaaactttgaagcttagaaaagcggttaggtagctaggttgagttccagatctggtagagaagttcatcatggcgccgttaccggcggagcaaaccggtgaatcagcgccgacggagttgcagagatccattccgacgccgtttctgaccaagacgtaccagctcgtcgatgatccctccgcggatgacctaatttcctggaacgaagacggcaccagcttcattgtatggcgacccgcggaatttgcaagggatttgcttcctaagtacttcaaacacaacaacttttccagtttcgtccgtcaacttaacacctatgggttccggaaggttgtccctgaccgttgggaattcgccaacgactgtttccggcgaggcgagagagctcttcttcgcgacatacagcgccggaaattactgccggttccgcctgcagccgcggcaccggcagcagtcacagccaatacggtgacggtggctgtggcagcaccggcggtgagaactgtgtctccaacgacttccggcgacgaacaggtactatcttcgaactcatctccgattgctgggaataataataataatacagtacaccgcaccacaagttgcaccactgcgcccgagctgttagaagagaatgaaaggcttaggaaagagaacatacaactgagtaacgagttgagtcaattgaagggtttgtgtaataacatactctctttgatgaccaattatgcttctggttttagccgccagcagttagaatcctccacaagcgctgtgaggaccgtgccggtgccggacgggaaggcgccgc

SEQ ID NO: 8004 - DNA, 768 bp, Glycine max
  Clone ID: 700730567_FLI
gctaggagtctaggagggttaatgccagtgcctgttactgggatggttgccaagtgaaccatgaacacagcaaagccaattggaagtggagccaaaaccggcacatgagaatctctagcattaaccctgctaggagtctaggagctgctgtcatgtacaaccaacagaaggcctgggatgaccattggatcttttgggttggaccatttattggagcagcaattgcagccttctaccatcaattcatattgagagcaagtgctgctaaggctcttggatcattcaggagcaaccccactatttgagtcaatttcctcttcatggggggttagtggaaatggaaaaaaaaagataattggaggcaaaaaaagttgatattgcaacaataataataataatatggaactgtttgtgctttgatcctctgcagatagaaggttctttcaagaaaaggaagcctttggtaaatagtaaagaccctttagtacttcgaagcactttcctttgtatttccttgttagaattgatgagcttttttttgatatattggaagtaaaatctattagatatcttgttttaatattttgtgatatgtaataagtcgacttgttggtgaactagtgtggtaacccatgttttgagggatgctaggccaatgtcacactttttgcttgtgatattgaattttcacaaaaaaaataaaaaaatcaagtcactgtatgtatgttggaaaattcagaacgaaaatacactttcattccaccatag

SEQ ID NO: 8005 - DNA, 561 bp, Glycine max
  Clone ID: 700730584_FLI
gaagaagaccaactcatcatcaaactccatagcctccttggcaacaagtggtctctaattgctggaagattgccgggtagaacggacaatgagataaagaattactggaatactcacataagaaggaagcttctgagcagaggtattgaccctgccactcacaggcctctcaacgatgacaaggtattggaacgctgccctgacttgaaccttgagctaaccattagtcctccccgtcaacctcaatctgatcagcatcacttgaagcccgttgggagaaactcaaacctttgctttgcctgcagtttgggtttgcaaaatagcaaagatcattgtagctgtgcgctcaacactgccaacgctgcttctggccatgatttcttggccttgaaaaccagcgttttggaaatgaaatgattcaaattcattttggaatctttcttccctaattaattagttgttaatggatgcaaatgattgcctgcccaatttcctcgtggagccctttctattattcctatgttcatgtacatgtgcgtaagactacaaactttcttgttt

SEQ ID NO: 8006 - DNA, 1084 bp, Glycine max
  Clone ID: 700730632_FLI
accaaggccaacgttgactacgagaagatagtgcgtgacacctgcaggaacatcggcttcgtctcaaatgatgtgggactggatgccgacaactgcaaggtcctcgtcaacattgagcagcagagccctgatattgctcagggtgtacacggccaccttaccaaaaaacctgaagaaattggtgctggtgaccagggtcacatgtttggctatgccactgatgaaacccctgaattgatgccattgagccatgttcttgcaacaaaactcggtgctcgtctcaccgaggttcgcaagaacggtacctgcccttggctgaggcctgatgggaagacccaagtgaccgttgagtattacaatgacaatggtgccagggttcctattcgtgtacacaccgtgctaatctccacccaacacgacgagactgtcaccaatgacgaaattgctgctgacctcaaagagcatgtgatcaagcctgtgatcccagagaagtaccttgatgagaagaccattttccacttgaacccttcaggccgttttgtcattggtggccctcatggcgatgctggtctcaccggccgcaagatcattatcgatacttatggaggatggggtgctcatggtggtggtgctttctccgggaaggaccctaccaaggttgataggagtggtgcttacattgtgagacaggctgctaagagcattgtggcaagtggacttgccagaaggtgcattgtgcaagtgtcttatgccattggtgtgcctgagcctttgtctgtgtttgttgacacctatggcactgggaagatccatgataaggagattctcaacattgtgaaggaaaactttgatttcaggcctggtatgatctccatcaaccttgatctcaagaggggtggaaataacaggtttttgaagactgctgcctatggacactttggaagagaagaccctgacttcacatgggaagtggtcaaacccctcaagtgggagaaggcctaagtaattcattccactgctctatgctggaagttttttgagcgttgcccttataatatgtctaatatccataactttccacgtc

SEQ ID NO: 8007 - DNA, 884 bp, Glycine max
  Clone ID: 700730654_FLI
tgaaaacttcagattgctaagctgagtatgattccagtatcttgtttcctggaagttatcttggataatgtgcgatattcaagggacacaaaacttagcatttctctagttctccttggggttgctgtatgtacagtcactgacgtgagtgtcaatgctaagggttttatagctgctgcagtggcagtttggagcacctcactacagcagtattatgtgcattttcttcagaggaagtactctcttggatcgtttaacttgttgggccacactgcaccagtacaggcagcaagtttactactagtaggtccctttttggactattggctgacaaacaaacgagttgacgcctacaactatggtttcacatctactttgttcatcattatctcttgcaccatcgcagtagggacaaacctcagccagttcatctgcattggcaggttcacggctgtatctttccaagtccttggacacatgaagactattctggtactggccttaggattcgttttcttcggaaaagaaggcctcaatttacaagtgattctgggcatgaccattgccatagcgggaatgatatggtatggcaatgcatcttctaagccaggagggaaggaacgtcttagcttacccattaaccataccaccaacaagacacaagagtataatgtactgccagtgtcctctgaaacggatcaggaaatatagaagttgatgtaaataaagtggtgccctctaggacacctcatttggacacttctcctacccgtatggaacacaacatgcttagtcaaatcttcttctctctctctctgcttacttacagggtttgcaaaacagaaagcttgtgttctccgcaatgaaaaatgacttattgtctc

SEQ ID NO: 8008 - DNA, 1835 bp, Glycine max
  Clone ID: 700730662_FLI
cagcaagtgccattttattttgccctacctcctcgattctagggtttcaacaatggcgctgttccttctctacgaatccgcttcgggctacagcctgttcgaggttcacggcgtcgatgaaatcggccagaacaccgaagcggttcggaactccgtttcggacctcaacaggttcggcaaagtcgttaagcttcgctccttcaaccctttcacttccgctctcgatgctctcaaacagtgcaacgccgtctccgaaggcatattaactgatgagctgaggactgtcttggagaccaacttgcctaaagtgaaggaaggtaagaagtccaagttcagtttaggtgtgtccgatcctaagattggttcccagatatctgaagtgactaagattccttgccaaagtaatgagtttgtgagtgaacttcttcgtggtgtgcgattccattttgatacgtttgttggtgatctcaagtctggagatttggaaaaggcacaacttggtctgggacatagttacagcagggcaaaggtgaagtttaatgttaaccgtgtagacaacatggttattcaagctatcttccttcttgatacacttgacaaggatattaattcattctccatgagagtcagagagtggtattcttggcattttcctgagctggtgaaaattgtaaatgataattatctgtatgccaaagttgcaaaatttattgaggataaggcaaagttggctgaagacacgattccaggcttaactgacatagttggagatgaagataaagcaaaggagattgtggaagctgccaaagcctccatgggacaggatttgtccccagtggacttaatcaatgtccatcaatttgcacagagggtaatggacctatctgagtacagaaagaacttatatgattacctggttgctaaaatgaatgatattgcaccaaatttggccactttaattggtgaagttgttggtgctcgtttgatttcccatgctggtagcctcacaaatttggcaaagtgcccctcttcaactcttcaaattcttggtgcggagaaggctttgttcagggcattaaaaacaagaggaaacactcccaaatatggtttgatattccactcttcttttattggtcgggcatctgccaaaaataagggcagaatggctcgatatcttgcaaacaaatgctcaattgcatcacggattgactgctttgctgaaaggggtactactgtttttggggagaaactgcgtgagcaagttgaggaacgacttacttttatgacaagggagttgcccctcgcaagaacatagatgtcatgcaggctgctattgaaagtgctgaaaacaaagatacagagatggaaacagaagcacctgccgaagtttcaggcaagaaaaccaaaaagaagaaacaaaaagctgctgctgctgaaggtgatgacatggctgtagatacaaatggtgatgctgtggaggatcataaatcagagaagaagaaaaagaaagaaaagaggaaattggaacaggagatggaggtcgacgatcaggctgaagatgatggtgctaatggggtcacaagtgaacaagaaggaacagtgaaaaagaagaagaataaaaaggatagtaacggagaagctttggaggctggtggagagtctaagaagaagaaaaagaaatcaaaaaagaaggatacggagtaaactatgatgtattgcagctttaactgttgaaatcgaatcttttatgttatagttttggacaatgttaaatttgctttgtactttaccagttgctgcaccagtataaactttatgttgacttgtcatttggc

SEQ ID NO: 8009 - DNA, 1508 bp, Glycine max
  Clone ID: 700730716_FLI
caactacaaaggttgctgtaggagataagatattgaagtagtgctaagtgcctaacacctgcagtgaacaatggcctctgcatcagcatctcttctcaagtcttcacttgttcttgacaagtctgagtgggtgaagggacaaacacttcgccaaccttctgctgcatcagttgtgagatgcaaccccaccaccccatcaggcctcaccatcagagctggttcctatgctgatgagctcgttaagaccgcgaaaacagtggcttcaccagggaggggtattttggccatggatgagtccaatgctacctgtgggaagcgtttggcttcaattgggctagagaacactgaagctaaccgccaggcataccgtaccctccttgtgacagttccaggacttggtcagtacatctctggtgccattctctttgaggaaactctctaccaatccacaactgatggcaggaagattgtcgacgtgctcctcgagcaaaacattgttcccggtattaaagtcgacaagggtttggtaccccttgctggttccaacgacgagtcatggtgccaaggtcttgatggtcttgcctctcgctcggctgcatactaccagcaaggtgcccgtttcgccaaatggcgtactgttgtgagcatccccaacggtccctctgctctggcagttaaggaagctgcctggggtctggctcgctatgcagcaattgctcaggacaatggattggtcccaattgtggaaccagagatcttgcttgatggggagcatggtattgacagaacttttgaagtagcaaaaaaggtctgggcagaggttttcttctaccttgctgagaacaatgtcctttttgagggtattcttcttaagcctagcatggttacacctggagctgagtccaaggacaaggccagtcctcagacagttgctgattacaccctcaagctccttcacaggagaattccccctgctgtccctggaattatgtttttgtctggtggacagtctgaggttgaagctaccctcaacttgaatgccatgaaccaatctccaaacccgtggcacgtgtcgttctcgtatgccagagccctccaaaacactgccttgaagacatggggaggccgcccagagaacgtgaaggcggcacaagatgcactccttttccgtgccaagtccaactcgctcgcccagcttgggaagtacaccggtgagggtgaatccgaggaagccaagaaggagttgttcgtcaaaggctactcctactaagatgtatgtagtgaatatgatacatgttaggcagcagcaacaccagcagttatagtaggtgttgacggaggatgaagtggaagaagactaatttgtctaaaatgtaatgtttttatagtcttggagactatttttgtttatggttacatgtacctttacagcttataaaccttctgctgtgagtggtgtacttgattgattatgtctcaatatataacaaacatggttgaatctcggc

SEQ ID NO: 8010 - DNA, 1033 bp, Glycine max
  Clone ID: 700730731_FLI
gcaccatctcattcagaaaggaaaaacaacaactcatgcttgaagaacgttttcaagcctccaaaaaggggtgaggactacaccatcttccaagctctcttcagcattgacatgttaattctgttcattgcaacagtttttggtgttggtggaacactaacagcacttgacaatttaggacagattgggaactcattagggtaccccaaaaagagcctcacaacttttgtgtcccttgtgagcatatggaactatttgggaagagcatcttcgggctttgtttctgagtacttattgaccaaatacaagttccctcgtcccttgttgctcactctagtcatgcttctatcttgtgttggccacattctaatagcctttggtattccaaactctctttacttctcctcagtgattatcgggttttgctttggggccatatggccgttaatgtttgccatcatatctgaaatatttggcctcaaatactactccactttgtacaattttggggcagtggcaagccctgttggctcttacattctcaatgtgagagtgaccggttatttgtatgataaagaggctttgaagcaattgggggtgaagggactcataaggcaaaaggggaaggacttaacttgtgtgggagtgcaatgctataggatggcttttctcataatcactgcttcaactttggttggttgtgttgtttcttttattcttgtgttgaggactagaaatttttacaaaggtgacatttatgagaagttcagagttgttgaactagacacaggagaaagtcttccaacttttggcagcactggcaccaccactaccaccacaaaccgcactgaagaaccagataaaatcaataggaaataataatgtatgcttggtttaacttgtttggtttgagtaaaaaaaaaaaaaatcctcttacaaggtttgtctataaacaatcatgcaattatttttgcatcaacgatgttgaactctgtatatcaaagtttagttatatatttttatttcttatctt

SEQ ID NO: 8011 - DNA, 755 bp, Glycine max
  Clone ID: 700730781_FLI
cttccttttcttcaccccgtacattcacaactctggccctcttcaaatctaagaccaaagccgctcctgctaagactaaggttacaaagccaaagcaaaaggttgaagatggtatctttggcacttctggaggatttggttttactaagcagaacgagctctttgtgggtcgtgttgctatgcttggttttgcagcatcactgttgggtgaaggaataactgggaaaggaattctagcacaattgaatctggaaactggaattcccctttatgaagcggagcctcttcttctgtttttcatcctcttcaccctgctaggagccattggaggtttaggtgaccgtggaaaatttgttgatgacgaacctactactggaggtgttattcctccaggcaaaggcttcagggaagctcttggtcttggttcaggtcctttatttggattcacgaaagcaaacgagctatttgtgggaagattggctcaattgggtttcgttttctcattgattggagaaattataaccggaaagggagcactagcccaactcaacattgagactggggtaccaatcaacgaaatcgagcccctagtgttgttcaatgttcttttcttcttcattgctgctttgaatcctggaactggcaaattcgttacagatgagggggaggatgattagacactaacccttttgtttgtttgtgtttaaacaaatactcgtttgctcatctatcataaaatgcattgagttcatcat

SEQ ID NO: 8012 - DNA, 1009 bp, Glycine max
  Clone ID: 700730858_FLI
tactgaggaaccgagtttcagctcagcaagcaagggagaggaagaaggcatacttgattgatttggaaacaagagtcaaagacttagagaagaagaactcagagctcaaagaaagactttccactttgcagaatgagaaccaaatgcttagacaagtacattcatgttatcattgtcatcatcataacgttatatatacatgtctctagctcatcactgtcaccatgatgatgcaattgttctttaagtgggctgcctgatcttatttactttcgataaaattgacacaccaaaaccttttaaaatggaatcatgactaactcttgtctattgttgacttgtactctaaaaatttgttttagaaaggaacaaaggggatattcatgttatcttagctatgtccattatcattagtatcatattagactttagataggactttgtgatatcatatcaaatatggtttaggaaactgtgtgttggttcaagtggaaggaattcaagttcttttaaggatgttttactgggttatactgagattaatttgcatggaaaaaataccaagattcatatgcttgtaacttctcctatgtgccaataccaaaccataatttgcatactatgtgtcacttttgtctggctttattttgctcaatcaggcaattgctttgcagatattgaagaacacaacagcaagcaggagagggagcaataatggtaccaataatgctgagtgaacataatgtcaaaagatggcagagaaaacttatagatggaatagatttagaaagagagaatacattagccagaaagagaaaaaaaaattggacattagttgatgattctttctaggtgtgcgtttggaatacaatgaagtaaaggatgaaccttaagacatgctttatcctaaaatagtgtgatctgatattccattgttaatgagtaatgtaattatcatacaaacaatttgtagtctcattttaattaataattattaaactacttgatt

SEQ ID NO: 8013 - DNA, 1553 bp, Glycine max
  Clone ID: 700730986_FLI
actcattcaagtcgctaatcctagttccttcaactcctcgctggcaacaacagcagtactaccattagccgcgtttttcaaaagtgattttcgagaattagcgatgggaattgaaagaggaggcttcaagggattcaggagcgcctggagcgtgccgcccaagccgtgcgattcctgcaagctggcctcggcggcgcttttctgccgccccgattccgcgtttctctgcatcgcctgcgattccaacattcactgctcgaacaaactcgcgtcgcgccacgagcgcgtgtggatgtgtgaggtgtgcgagcaggcacccgctgctgtcacgtgcaaggccgacgccgccgccctctgcgtcacgtgtgactccgacatccactccgcgaaccccctcgcgcaacgccacgagcgcgtccccgtggaacctttctttgactccgctgagtccatagtgaaagcctctgctgccgccaccttcgggttcattgtcccatccgacgacggcggcgcctccgacgctttcgcccccgatgactccgacgccgccggtggctcatcccgaaccctaatttcgggtccaagctcatggacgccccgaaatcaagtccaaggagatattcttctctgaaatggaccccttcctcgattttgattactcaaactccttccaaaacaacaacagcgccggaaacgacagcgtcgttccagttcaaaaaccctctctcgcccctcccctaatcaataatcaccaccaccaccaatcagaaacttgcttcgacgtcgatttttgtcgctcgaagctctcctcctttaactacccttccaattctcttagccaaagcgtttcgtcgtcgtcgcttgatgttggagtggtgccggacgggaacacggtgtcagacatgtcgtattcttttggtcggaacagttcggattcgagtgggattgttgttgtgtcaggaaatagtgtggggcaaggtgcgacgcagttgtgtggaatggatcgggaagcgagggtactgcgatacagagagaaaaggaagaaccgaaaattcgagaagacaattcgatacgcatcgcgaaaagcatatgcggaaacccggcccaggataaaaggccgcttcgccaaacgaacagaaattgactcggatgtggagcgtctctatagccctggccctgcggtgctcatgctggacactccatacggcgtcgtaccatcgttttagttaatttcaaaatgaagaaacgatggagtgcatgaatcttagaataatgattagcgattctgtgggattgttaggggaaaaaggtgaagaatcgaatcggtacgaacgtgattcttagctggagcgcgatgggggaagattattgtgaagatttgtctcgatcgaccagaaaagcccgtttactttttataaaaaaaaaaaaaaaaacttttaaaagggggctgctgtttcatattcacctcgtgtagaattagaatctgtactgtaaactcttttcactgccttgccttctgtctttttttagtataaaagtgtcttttttctatc

SEQ ID NO: 8014 - DNA, 745 bp, Glycine max
  Clone ID: 700731028_FLI
gatgatttcaacgcttatctatctgactttggattggctagacttctggggacttcagagacacatgctacaactggtgtggccggaacattcggttatgttgctcccgaatatgccatgacgtgccgtgtttctgataaggctgatgtgtacagctatggtgtggtgcttctggagttgctctcagacaagaaggcattggacccttcattttcttcttatggaaatggtttcaacatagtggcatgggcatgcatgctactgaagcaaggaagggcaaaggagttcttcactgctgggttatgggaagcaggaccaggagatgatttggtagaagtgcttcacttagcagttgtgtgtactgttgactctctctctaccagacctacaatgaaacaggttgtaagaagacttaagcaacttcaacccccatcatgctagccccttgtgtggctgtgttcctttaacattattaatcttagaaatgttccctttggaatttaatttagcatttttgtggatttaggttgagctcccgatttgtacttattcccctccttgtacatttttatatagttgtattgtatccccaattttccatgctcttttcttgatttggtattatttaggtttggggccttggtgttgattctgctgaagaatgcagatatttgatttccccttcatacacgtgtattccatgtctatctgttcagtaaaattgaagaatagaatttgttttttg

SEQ ID NO: 8015 - DNA, 1513 bp, Glycine max
  Clone ID: 700731102_FLI
gacctacgcaacaataatctcaccgggaaaatcccgcaaatggggacccttttgaaccagggtcccaccgcgttttctggtaaccctggactgtgcggtttcccattgcagagtgcttgccctgaagcgcaaaagcctgggattttcgctaaccctgaagatggtttccctcagaaccccaatgcgcttcacccggatggaaattatgagagagtgaagcagcacggtggtgggtccgttgctgttcttgttatctccgggctctccgtcgcggttggcgcggtttcgctgtcgttgtgggttttccggcgaagatgggggggtgaggaagggaaattggtgggtccaaaattggaggataacgtggatgcgggagaggggcaagagggtaaatttgctgtggtggatgaagggtttgagttagagttggaggatttgctgagggcttctgcgtatgttgttgggaagagcaggagtgggattgtgtataaggttgtcggtgtcggaaaagggttgtcctccgcggcggcgaatgtggtggctgttcgaaggctgagcgagggtgatgccacgtggcggttcaaggagtttgagtctgaggttgaggccattgccagggttcgtcaccccaatgtcgttcctttgagagcttattactttgcgcgtgatgagaagctgattatcactgatttcattcgcaatggaagcttgcacacagccttacatggtgggccttccaattcattgccaccattatcatgggcagtaaggttaaaaattgctcaagaagcggcaagaggcttgatgtatatacacgagttcagtggtcgcaaatatatccatggcaacataaagtcaactaaaatcttgctggatgatgagctccatccatacgtatcaggttttggacttactcggctgggtttgggcccgacaaagtctgccacaatggcaccaaaacgaaacagcttgaaccaatcttctataaccactgcaatgagttcaaaggttgcagcttccttgaaccactacttggcacccgaggtgcgcaatactggtggcaaattcactcagaaatgtgatgtatattcttttggtatagtgctgttagaacttttgacaggtagaatgccagattttggagcagaaaatgatcataaggtactagagagttttgtaaggaaagcattcaaggaggagaagccattatctgatatcatagatccagcacttatccctgaagtttatgctaaaaagcaagtcattgttgcattccatattgctctaaactgcactgaacttgatccagagttgcgacctagaatgaaaaccgtgtcagagaaccttgatcacatcaaaatacagtgagaaacaagagatgtcttagtgtagtggggttgattttgtaactcacgggctagtagatgtatctctttcttccatttctcaatggaaattgtttcctttcacctttatttaaaatcaaggaacggcccaaattgattggtgtggt

SEQ ID NO: 8016 - DNA, 2438 bp, Glycine max
  Clone ID: 700731112_FLI
gttggaatgcccttttagtctcggaatccatcgatccaaaaccctaattgaagttgtcttgtctgcgttctcaaacgttgttgcttgctgctgctgcatagttgatcgaaagcatgacaacatcattgtccagcatccttttcaagggaattgcagctcgttctttcaccgcccctgtaacactgaagcaaaccctactctttcatcttctgcaactttgtttgtgttatctatatgtctcaattatataaagttgcatcctttctgctcttaacgcttatgggtgtcctttgttttgtcgtttttcccctgtgagttctatttaaagatggaatttctacatctgggttgttcagtagtcgaatttgaaattaagggagtgccaaaatgggggccgatgtgtcataatccagaaatctctttgttttcttctcacttctcagatcaatcagttatgttggtgtatctgatagtgagtggaatagaatggaatgaggtggaatcgaatggagtagaagaaggttaccattctattgtttgtatattttatgatggaataggttagtttcatctcattccacccaatttggaggggaagaaaaggagattatttggtggaatggaatagattaccttccatcaggttcattctattttaaacaatctaaacaattattgtttagattgtttaaaatagaatggaacttaccccccatttcatctcattccacgcctttgcatcattccaaacataatgtcttgttatgtcctatagaactatgagaatatgggaacagtttttgtttgtgtaagattggtcttttttattttttctttttctttttatgtctttcaatcaaatagattttcggcctttgcacttgttttttaaatcttattttttcattaaatgcgttcaatttggtattactatttatatgcccgtctacatgcattgatttttgagaagttggttatacgtattgcattgctttactatgttaattactgctataattgatagactagatgtttttgtttctcaagttgtaggtcatgttttccttttgtaacagtatttgtcttcctttaatgtcttcacagctaactaggtcctgttatcatggaatgagatactttgctactgtatcaaatgatcctgacacacatgatgacttcaagccagctaataaacttgagaattccaacatttctttggctgatgttattgagcaggatgtcaaggataatcctgttatgatttacatgaaaggtgtgcctgattttccacagtgtggatttagttctcttgcagttagagtgttacaacaatatgatgttcctttaagtgctagaaacattttggaggatcctgaactgaaaaatgctgtaaaagctttcaggtatgttcatttttactggttttattactcttgcttcataagagagtactctatttctcttacagtgagcacaatttttcaaaattcacatttgtggtggtaaatgagcagtttccagtcaaaggatataaataataatatagagttgttgctgataataatcagatatgaaatgaaacataaaatcattattttcacattgtattgtgtaaatccaaaaattgtagttggaatcagattttgaattataaatcttaaaaataattgttctgctgttcaaactttgaaatcaaaattgcttttcaaaactccaattgtgttagaattagaattatgttatgacaccctttaatggctatggaatccaatggacggatgtcccgtgtgaatgagctgaagatcatcaacatagtttaaagatcaaatgtgctttctgttttccttttctttaattgtggatttgttgtagttgatttcagtgtatctggtgaaggtttagtcatttattcgcttgaacactgtcttttagcatctgaacttgtacaatcatgttaaatcctctggaatttagtcagccaaaacctgtccttgcacttaaagcggtatatgggatcatattaattagttctcaaacatggtagtactagaagtgcaggtgctgccaagtttaattattgacagaaaagtcaaatatactttttgtgatgtcctactgttctctcgtgtgttctttctctgcagtaactggccaacatttccacaagttttcattaagggagagtttatcggtggatcagatattgttcttaatatgcatcagacgggtgatttgaaggaaaagcttaaagatattacgtccaagcagtaaaaggacgagtaatgtgatgaaattcaaagagagtgaggtagtttagacaaacttatttgatgtaatctgtttctgtagctgaaagatgtccttatgtaacttctttgaactagattttctggatggtattaagttattcggcaaataaaaaattgtacttttaagtt

SEQ ID NO: 8017 - DNA, 646 bp, Glycine max
  Clone ID: 700731134_FLI
gttgaaaattctgagttgagtgtgacaacacgcctggcttgtggtgctgctgctggaactgttggacaaactgttgcttaccctcttgatgttattcgtcgaagaatgcagatggttggttggaaccacgctgcttctgttctaactggtgatggaagaggcaaagtcccacttgaatacactggaatgattgatgcattcagaaaaactgttcagcacgagggatttggtgcattatacaagggtctggtgcccaactctgtaaaggtggtcccatcgatagcaattgcattcgtaacatatgaggttgtgaaagacgttttaggagttgagatcagaatatccgactaaagtttgataaccacacatctgttcacctggtgtggtttttcattttttttcttttttgtaggcaaggggatgcagagatggttacttacagttattttcttgtttttcatctctccaaggatgagtttagaaactcttagagatagtgtccataaatttattcccttgttctattcgttttccttgttctatttgtccataataagtgttgtggaaaaacaatgcaaggacatatcttcctagctttctgcactagttgagaaagcatttttcttagtggattttgcatcaactt

SEQ ID NO: 8018 - DNA, 789 bp, Glycine max
  Clone ID: 700731162_FLI
caagaccttcatcctggcaaaacaatgaatgtacaattcagcaaaagtccctttacacaaccttttacaatattgacatggttaaagggcttgaaaattaaagacattgataaagaaggatatacttttgatgagctatgcatcaagacaaaacctaatggagcagagcacaagttttgtgcaaaatccttggaaacattaatcggttttgcaatttcaaagctgggaaagaacattcaagtactttcaagttcctttgtgaataagcaagagctatacaaagtggaaggagtgcaaaatcttggagacaaagcagtgatgtgtcataggctcaatttcagaacggtggcattttattgccatgaagttcgtggaacaacagctttcatggttccattggttgctggcgatggaaccaaaactcaggcacttgctgtttgtcactcagatacttctggcatgaatcgtcacattcttcatcaaactatgggagttgatcctggaactaacactgtttgtcatttccttggaagcaaggccattttatgggtaccaaatttagctatggacactgcctatcagactaacattgttgtttagtcaattcatcttgagaatgagattgtgtacgcagtaaaaaataaattattatgtgctgtgtgttctgcaagtacctagctatgtgcactcttaagatttgtttccctatagaagcatcatcctgtgatcagtgtgctttgatgatgctaatttgatgcaataaatatgcagtgtgtttgttggtattct

SEQ ID NO: 8019 - DNA, 816 bp, Glycine max
  Clone ID: 700731193_FLI
agaagaagaagaagaaaagtgtgagtgcagaaaagaagagtggtgggcgagctcggaagaacgtgtacagaggaatcaggcaaaggccgtggggcaagtgggccgcggaaataagggacccacataagggcgtccgcgtctggctcggcaccttccccaccgccgaggaagccgcccgagcctacgacgacgccgccaagcgcatccgcggcgacaaggccaagctcaacttcccggccaccgctccgccaccctccaaaaaacaacgctgcctcagccctgacaccaccaccgaacaaagcagcagctcacaatccaccactggatccaccggatcgccgccttccgccgccttccacggcggaggagatgaactcgacctgaaacaacttgaacggtttctagggttggacaacatgggtgctgagtgggacaacatggatgacctgtggatgctggacgacgtcgttgtgcccaaccgtcacttaatttactagaagggagataattaattaattaataaatggcgttttcttaagttatagttttataaaactatgttggtgtatgtgttcttagttttctgttttgtcttgtcctctcgctttggtaatttctgttttgtacggtcgaattatttcaaaattaggtgcaacgtatcatgagagggatgattatatgttatcattatgattataaataaaggccaattagggtgtgttagcgtttgggtcgtgcatgtttatatgtagtttatgcgttgtatataatatatttggcatgacattatttggttctacttgttaagcaaatatt

SEQ ID NO: 8020 - DNA, 1654 bp, Glycine max
  Clone ID: 700731210_FLI
cttctacactaagtttattaggtgcaatcagagccaagtcaagctctttaaattttgttctatcttggtatgcaaaagcacagtgcaaacttcctccttctaccttggggtgtttagtatccaaagtgattcttaggatcgagagacaaccagtaaatccaaacaatgaacttaaaatttagcagtttccttgttgatggtaccgtggaacagaattttgacaatcacaaagtggaaggacaaaactcagcacctagcaaccaacaatgagagacataagatcatgattaagagccccaaagaagcagattttccattaaaacaggagggtcattctcaatcaattactgatcctgaaaaggcaaaggcttcagcgagctcagtagcacaatggccaagattgaaagatccaaggattgtgcgagtatctagagcctttggaggaaaagacaggcacagcaaggttttcacaataagagggttaagagacagacgggtgaggctatcagtaccaactgccatccaactctatgatcttcaagataggctagggctcagtcaacctagcaaggttgttgattggttgctcgatgcagctaagcatgaaattgatgaacttccaccacttcctgttgttccttcagtgaataacttcacccttggtcatccatctgctgttacctctaatgaagctaccacctcaaattctcagcctaatgagcaacttcttaatatcaacagaagcattcagtgggaaggttcaaaccagaattctacatggaaattaaagcctaaagaagtttcacgagaaatgattagcactgataaaccaaattggataagtagaagtgaagaggataagcaaggaagcaataatgaaggtcctagcacacgtgttataccaaatattaatctcttaccaagagcaaatcttaatcatccttcattcttgggcttgctgaatactatgccacatggttaccaatgggaaccttctgctggtgatgtttctcatcagttgggaaacaatggatttgcaaaccaaacagatatgcacagcattaacgttgtacctttcccaacatcaacattgtcattatcaactgggaattctcaaattctgctatgtcctccaggaacagcacaaccatatttcccttcacatgttacaatggacatggatccgagacaaatcaaccactatcagatgttgagttcaggttctcaaaatccattggcgaattatctcaatcattctttcagcttggctatgatgactcataaacctcttcattcacccaacagcagcaaaagcccctcccacaaagaccaagatttcccttccaactgatacacaaaatacaaagtatgtctcaattctcctctcgcaatttgcatggatcatgaagactgtgagaaagattcttcagttacaagatattccacggttaccacgggtttgaataatcattttgtttgtgaatgcatgtttggatttccttttatttttttgaattatataggtaagccttaaattttcccttcagttttttgagtttatatatgtattccctgaatcgatctaacatgaatagctttctaagggtataatgtaagagctctcctttaagtgacaatgaatagcttaagaact

SEQ ID NO: 8021 - DNA, 1279 bp, Glycine max
  Clone ID: 700731265_FLI
atggtgaactctttcacagtgtacttggagggctaggtcagtttggcattataacaagagcaagaatattcctggaaccagcacctgccatggtaataatgcatcaaggacaataataatataccagaaacaaggtcctatcaattttaattagtggtatgcaattaagtaccggttgtgatcatggagtatttctgtttttgaacaggtaaaatggatcagggtgttgtatgcagatttcacagcattcattagagaccaagagaaattaatatttgcagaaaaggcctttgattatgttgaaggatttgtgataataaacagaactggtctgctaaataactggagctcatccttcaacccacaagacccagttcaagctagtgagttcaagtcagatggaagaactctcttctgcctagaattggccaaatactacaatcttgaagaaacccttctagtgaatcaggaagttgagaaacatttgtcccgcttgaactatatcccatcaacactttttctaacggaagtcacatatgtagactttctagacagggtgcatacctcagaggtcaagttgcgttcaaaaggcttgtgggatgttccacacccatggctcaatctttttatacccaaaaccaaaatacaccatttcgcagaggttgtcttcgggaacatcgttaaagaaacaagcaacggccctgtccttatctacccagtaaataaatcaaaatgggacaacagaacttctgttgttattccagaggaagatattttctacttagtggcatttcttgcctctgcagtcccctcttccaatggtcctgatggccttgagcacattttgagtcggaacaaaaaaattttagagtattgtgaaagagccaatcttggggtaaagcaatatttgccccactactctacacaggaagaatggacggcgcactttggttcccaatgggagattttcaagaaaagaaaatcactttatgaccctttggctatacttgcccctggccaaggaatatttcaaaaatcaataaccttctcatgacggtagccacgttttagtaatgagaagaaaaaaaaaggcccttatggcatacatatgtgaatatattcctgcatatgcatactgtgtgtgttgcaccaagacagcacaagagttactgggtcaatacaagagaacaaaggtttcaaacgtgaattattattatagggtttcaaaaaatataccaatattatcagtgctagaaacgaatgtatatatcaattttgc

SEQ ID NO: 8022 - DNA, 1363 bp, Glycine max
  Clone ID: 700731292_FLI
gatggaacagcaggctggctacttggagttgtttgtgatctcaaattatctcatccgccacccattgccacggttccgttgggcacagggaataatctaccatttgcatttggttgggggaagaagaacccagggacggatgaacaggcggtcaagtcatttctagatcaagtaatgaaagctaaggaaatgaaaatagacaactggcacattcttatgcggatgagggctccaaaacaaggtccctgtgatccaatccctcctcttgagttaccacattctttgcatgccttccatcgtgtatcagaggcagatgaacttaataaggaaggtttccatacttttcgtgggggattttggaattacttcagcatgggaatggatgctcaagtctcttatgcgtttcattctgaacgaaaattgcatcctgaaaaattcaagaatcagttggtcaatcagagtacttatgctaagcttggatgcacacaaggatggttttttgctcctctgttccatcctccttccagcaacatagcacatcttgcaaaagtaaaagtcatgaaaacgcatggtggttgggaagacttgcaaattccttccagcatcaggtcaattgtatgccttaacttgcctagcttttctggtggattgaatccatggggtacaccaaacaagatgaagcggcgtgatagagatttgacacctccatatgtagatgatggccttatagaggtggttggttttagagatgcctggcatgggcttgttttgcttgccccaaatggacatggaactcgccttgctcaggcacacagaatccgctttgagtttcacaaaggtgcggcagaatatacattcatgaggattgatggggaaccttggaagcaacccctcccagttgacgatgatactgttttggtggaaatttctcaccatggccaggttaacatgctcgccactcatgattccaagtccaaaagtgagaatgatccgtcatcaccacaccataatgatgtcgaggaagatgatagtgatgatgaagaagctaaagcagatgaataccggaagtttggtgcggcagatacatttaaaatcccagatgaggtagaccttgctcatcttagttagatctttcattgtgaaagccattctttagagttatgcagttgacaacattgtctgcttagctgttagtaggatttttataaatatttgttagttgcctttatcaattgtatcacctatttgatctattctagcagcgttatgtctgtgaacatgtgaatagtaattaagaattgagatgcaataattcctttgatataaacgtttgtgctgttgaaatacataagaattgagatcc

SEQ ID NO: 8023 - DNA, 1679 bp, Glycine max
  Clone ID: 700731392_FLI
ccccatttgtgaaaccatgaagtggccaacatggaagtccaagtccaacaccatggcaatatctgtggtgtttcttcacctgagtttctccatggaggtgttctgtcacccttctcatgcagacacaattgctgcgcttcctggccaaccccacgtaggctttcaacagttctcaggatatgtcacagttgatgacaagaaacaaaagtctctcttttactattttgctgaggcagaaactgatccagcatcaaagcctcttgttctgtggctcaatggaggacctggttgttcttctctgggagttggagcattctcagaaaatggacccttcagaccaaatggagaatttctgattaaaaattattatagttggaataaagaggcaaacatgctgtatttggagacaccagttggagtggggttctcttatgctaaaggtagctcctcctatatgactgtgaatgacgaggcaacagccagggacaaccttatattcctgctacgctggttcaacaagttccctcaatacaggagcagagacttgtttctaacgggggaaagctatgcaggtcattatgttcctcaacttgcaaagctcataattgaaatgaacacaaagaacaagatattcaatctgaaaggcattgccttgggtaatccagttctagaatatgccaccgacttcaattcaagggctgagttcttctggtctcatggactaatatcagattcaacctacaacatgttcaccacagtgtgtaactattctaggtacgtgagtgagtactatagggactcggtttcgcctctttgttcaaaggtaatgggccaagtgagcagagaaaccagcaaatttgtggacaaatatgatgtcacacttgatgtttgcatttcctccgtgctatcacaatccaaggttatttgtcctcaatcccaagaagcaaatgagagcatagatgtgtgtgtagatgacaaggttacaaactacttaaaccggagagatgtacaagaggcacttcatgcaaagctcgttggcattcgcaagtgggatgtttgcagcaacatactggactatgatatgctaaacctggaagtgcctacactccctgttgttggatcactgataaaagctggagttaaggtcctaatttatagtggagatcaagattctgtaattccactgactggaagccgtaccttagttcagaagttggcaagacaattaggactgaattcaacagtcccttacagagtatggtttgaaggccaacaggttggtgggtggactcaagtatatggcaatatcctctcgtttgccactgttagaggtgcctcccatgaagcccctttctcacaacctgaaagatcacttgtgctattcaagtcattcttggaaggcaggcccttacctgacgctttctgacacaccctttgtgttttcacatttagtttagattgtaagtaagcatagcattatccttaattaataacatatcattagcaaatgaatgtattaactgtgcagaatgtcaaaagaaaagttgggaaaaacattttttttttttgggggttttcaacctctgtatgtgagtttttgtgtgcttggttgttctggagctgtcaaatgtaatggacccttgggttgaagagattctgtaaaaatgttgtgagagatt

SEQ ID NO: 8024 - DNA, 985 bp, Glycine max
  Clone ID: 700731432_FLI
ggcccaacaaattttcatccatagggatataaaaccatcaaacatcttgctcggggatgatatgcgggccaaagtgtcagacttcggattggttcggcttgctccagaaggaaaggcctcatttgagactaggcttgctggaacatttggatatttggctccagagtatgcagtcactggacgagttacaacgaaggttgatgtatacagctacggggtgattctcatggagatgataacaggaaggaaagcaattgacaacagccaaccagaagagaatgtccacctcgttacatggttcagaaggatgctactgaacaaagactctttcacaaagctcattgaccccataatggatgttgatgaggagaccttaccaagttttaggactgtggccgagttggccggccactgttgtgcgagggagccctaccagcgccctgacatgagccatgtggtgaatgttttggcacctcttgtcgagatttggaagccttctgaagcagatgatgatgacatttatgcgattgacttggatatgaccttacctcaagcactcagtaagtggcaggctattgaaggaaagaacacctttgatgtttcatgcacttcatcaatgcttactagtggagatactacacagtctagcatactaactaggccttctggatttgctgattcctttacttccaatgatggaaggtgaagtttgatttacatttacattatacttgtctatgttttttttttttacttcaccaaactttggagatctttataggcttgttttatagtgtctagttagcatatattacaccctgtactcattaaacttccttactgtatcttggtattttggtctattggtttttaatttagtagtgtctgggatgcaagaagacagaagctaaacacataggtgaacttgtgttttccttcttttagacttcattctaatgagaatgagaaacaggatttggttatt

SEQ ID NO: 8025 - DNA, 1618 bp, Glycine max
  Clone ID: 700731443_FLI
cctagtcaataagcggtgttggaatttctctccatagcatcgtttcctagctctacactcgcgctttgctacttgagctccccattcatcggaaactccattcttctctttctctctctatttttccgtttcgtttaccgatgccccttctcgatcgcggcgatgtttggaagagcaaggcgcgatccttgcagctacagctcagggaccgtttccgtgtcgccgtcgaccgccattggcgccgccgccacaaccaccacacctttatcccctccgccgatggctacttctcctccaccattcaacgctggctcagccgatttcgtgatttccgcagagactcgttgccgtcgtccacctctttttatcgcaaacgagtgattaaggatttcagttctgaagaagattcaactcttgttcgtatgatgcaagctgttgcggttcctgttcttggaaatgtctgtcacgtgtttatgaacggattaaacagtgtgcaggtatatggtttagaaaaactgcactccgctttactgcaaagacctaaaggaaaacctcttcttacggtcagcaatcatgttgcttccatggatgatcctcttgttattgcttcgctgcttcctccgagtgttcttttggacgctaggaatctcagatggacgctttgcgcaactgataggtgttttaaaaaccctgtgacttctgcattctttcgatcagtcaaagttttgccagtttctcggggtgatggcatttatcaggagggaatggacttggccatatcaaaattgaaccatggtggttgggtccacatattcccagaaggcagtcgctcccgggatggtggaaaaaccatgggctcttccaagagaggtgttgggaggttagtcctggatggagatagcatgcctcttgttgtcccatttgtacatacagggatgcaggagattatgcctgtaggtgctaactttcccagaataggcaagatggttacagtgctcataggtgatccgatcaattttgatgatataattgaatttgacaaagacaaaggctcaaatgtgcccagaagacgactatatgatgcagtagcatctagaattggtgatcggttgcatgagatgaaggtccaggttgacactatcgcaattgatcaagaaatgcagctacaagataagtcctcacacagcactgaacgaacatctaaaatactgcagcaggttgattgggaattatttggaatggatagcttcatgtctgtagaagatgattccaagcagagacaagaaacagttgccctctcaaatgttagtgtttctcagcatcatcaacaatctcatagtgatcagagttggagagctgggttctcatacaggatgcgtggttatattgatcagatggagcttgtgtcttttgctgcgagaggtatatttctgaataatgatacaaagaactctgctcgccctagcagagagatgggccccttaaaggcatggaagcagtttttggaagctaatctattaaggcagtggaattacgtccattactgaaaaaaacatagttctatagagggtgtaaattcaaatcttcggttttcaattaaaataattgagtttttgtt

SEQ ID NO: 8026 - DNA, 860 bp, Glycine max
  Clone ID: 700731455_FLI
cagcaagaagaagatgatgatgatgaggaagagcagccacagtgcgtggagacagacaaaggttgccaacgccaaagcaaaaggagcagaaatggcattgatgagaccatttgcacaatgagacttcgccaaaacattggtcagaattcatcacctgacatctacaaccctcaagctggtagcatcacaaccgccaccagccttgacttcccagccctctggcttctcaaactcagtgcccagtatggatcactccgcaagaatgctatgttcgtgccacactacaccctgaacgcgaacagcataatatacgcattgaatgggcgggcattggtacaagtggtgaattgcaatggtgagagagtgtttgatggagagctgcaagagggaggggtgctgatcgttccacaaaactttgcggtggctgcaaaatcccagagcgataactttgagtatgtgtcattcaagaccaatgatagaccctcgatcggaaaccttgcaggggcaaactcattgttgaacgcattgccagaggaagtgattcagcacacttttaacctaaagagccagcaggccaggcaggtgaagaacaacaaccctttcagcttcctggttccacctcaggagtctcagaggagagctgtggcttagagagccctttttgcatgtgctaccacacttttgtccttttgggctctagctagtgctggtagcagtaaataagaatgaataaaagaaacaaaggcttagatgccctttgttaagtgtagaataacgggtatagtaactatgtacccttgtgtaatgagtcactcaagtacctatgcgggaaaagcataaataaaagaagaaattccaat

SEQ ID NO: 8027 - DNA, 962 bp, Glycine max; identical to SEQ ID NO: 7792
  Clone ID: 700731464_FLI

SEQ ID NO: 8028 - DNA, 3427 bp, Glycine max
  Clone ID: 700731511_FLI
ggaaatgattggctgaacagctaccttgaagctatacttgacgtgggtcctggcctggacgatgccaagtcctctcttcttctccgagagagaggcaggttcagccctactcgctacttcgtccaagaggttattggcttcgatgagaccgatctctatcgctcttgggttcgggcttcctccaccaggagtcctcaggagaggaacaccaggctcgagaacatgtgctggcggatttggaacctcgctcgccaaaagaagcagctggagagtgagactgcgctgagagtcaacaagcgtcgtttggagcgcgagcggggtcgcagggaagccaccgctgatatgtcggaggacttgtcggaaggagagaagggcgatcccttgagtgacttgtccgctcacggcggcgtcggcgacttcaaccgatccaggttgcccagaatcagttccgctgatgccatggagacttgggccaacagtcagaaagggaagaagctctacattgtgctcatcagcattcatggcctaatacgaggcgagaatatggagctgggacgtgattctgacacgggtggtcaggttaagtacgttgtggaacttgcaagggcattgggatcaatgccaggagtttatcgggttgatttgctaactagacaagtgtcggcgccagatgtagattggagttatggggagccgacggaaatgttgtctccaagagacacagatgattttggagatgacactggagaaagcagtggttcttatatcgttcgtattccctttggtccaagagataaatatattccaaaagaacttctctggccttacattcctgaatttgttgatggagcgcttaaccacattatacagatgtccaagtctcttggggaacagattggcagtgggcatgctgtctggcctgttgccatccacggacattatgcagatgcaggtgactctgctgctcttctgtctggcgcattaaatgttccaatgctttttactggccactcacttggccgagataagttggaacaacttttaaagcaaggtagactatcaaaggatgaaataaacacaacttacaagattatgcgtaggattgaagctgaggaattggcccttgatggttctgaaatagtcatcacaagcactagacaggaaatagaagaacaatggcgcttgtatgatggttttgatcctgtattggagcgtaaactacgagcaaggatcaggcgtaatgtgagctgctatgggagattcatgcctcgcatggcgacaattccacctggtatggagttccatcatattgttccacacgatggtgatatagaaggtgaaccagaaggaaatttggatcatcctgccccccaagatccacctatttggtctgagataatgcgcttctttaccaaccctcgcaagcctatgatacttgctctcgctagaccagaccctaaaaagaacatcacaactttggtaaaagcatttggagaatgccgtcctcttcaagagcttgccaaccttacattaattatgggtaaccgagatggaattgatgagatgtcaagcacaaatgcttctgttcttctctcggtacttaagttgattgacaagtatgatctgtatgggcaagtggcatatcctaaacatcacaaacaatatgatgttcctgacatatatcgcctagcagcaaagacaaagggtgttttcattaatccagctttcattgagccatttggtcttaccttaattgaggcagctgctcatggtttgccaattgttgctactaaaaatggaggtcctgttgatattcatagggtacttgacaatggtctgctcgtagatccccatgatcagcagtctattgctgatgctcttttgaagcttgttagcaacaaacaactttgggcaaaatgtagacagaatgggttaaagaatattcatttattttcatggcccgagcactgtaagacttacctttctaaaatagccacttgcaagccaaggcatccacaatggcagcgaagtgaggatggaggtgaaagttcagaatcagattcaccaggtgattccttgagagatttacaggacttgtctctaaatctgaagttttcattagatggagagaagagtgagggtagtggaaatgacaattctttgaattctgatggaaatgctgctgatagaggggcaaaattagagaatgctgttttgtcatggtcaaagggcatctctaaggacacacgcaggggtggggctacagaaaaatccgatcagaatccaaatgctggtaaatttcctccattaaggagaagaaaacatctgtttgtcattgctgtggattgtgataccacttcaagccttcttgaaactattaaagccatctttgagtctgctggaaaggatagggcagagagcactgtaggtttcatattgtcaacatcattaacaatatcagagatacagtcatttctaatctcaggtggcttgagtcccattgattttgatgcttatatttgcaatagtggcagtgatctatactatccatccctcaatcccggagatcgcccatttgtggttgacttgtattaccactcacacattgaataccgttggggtggagaagggttgaggaagactttagtgcgatgggctgattcaatcactgataagaagggtgataatgacgaacaaattgtgagtcctgctgaacagctttctactgactactgttatgctttcaaagtgcgaaagccaggaatggctccccctgtgaaggagcttcgcaagttattacggatccaagctctgcgttgccatccgatatattgtcaaaatgggacaagactgaatgtcattccagtgctggcatctcgttcccaagccctcagatacctatatgttcgatggggttttgaactgtcaaagatggtggtgttcgttggagaatgcggtgacacagattacgaaggacttcttggtggcctacacaaaagtgccatactgaagggagtgggaagcagtgcaatcagtcaactccataataacagaagctaccctctttcagatgtcacgccattggacagccccaacatcgtcgaggcaactgaggggagtagcggtgctgatatccaggctttgatcgaaaaagtgggatatctcaatggatgaaaaaatttgaaagtcatttctagttatatgcctcttagtgtgtgtctgctatgaaacctacttctgagcaagcagatatctgaattttatccacaatgttcataaagcttttttcctcctctcttctctgtaacttctatatcattctcttcctcacaaacttccccatgaaacatatttcctctggtttccccacttatctccttgttggttctgtatctacatattacatttttaatgaaggccacttctc

SEQ ID NO: 8029 - DNA, 1383 bp, Glycine max
  Clone ID: 700731595_FLI
aaattccaatctagtcaaaatcttggaccgctttatcctacgccctcctccctacttatcctgcgcatatttcgccgttttctcgccgagatcttgaactatctcctccgtgttctcactttctcaactacacaatattcttattgaattccagcggaaagaatcatgagttgcttcggctgttgtgaggaagatgactaccagaagactgctgaaagtggaggacagcatgtggtaaaaaactcaacaggaaatgatggaaacagtcgtgcatccgaaactgcaaagcaggggactcaagctgttaaaattcagcccattgaagttcctgaattacaagtggatgaactcaaagaaatcaccgatggctttggagaaagttctttgattggagagggatcctatggaagagtatattatggtgttcttaaaagtgggcaggctgcggcaatcaagaaattagatgccagtaaacagcctgatgacgaatttttagcccaggtttcaatggtttcacggctgaagcatgacaattttgttcaattgcttggttattgcattgatggaaactcccgagttcttgcttatgagtttgcatctaatgggtctcttcatgatattttacatggcagaaaaggagttaaaggagcacagcctggtcctgttctaacatggactcagagagttaaaattgctgtaggggctgccaaagggcttgagtacctgcatgagagggctgatccccacattatccaccgggacatcaagtcaagcaatgtactaatctttgatgacgatgttgctaaaattgcagattttgatttgtcaaatcaggctcctgacatggcagcacgtctccattccacccgtgtccttggaacctttggttatcatgcaccagaatatgcaatgactggccaattgaatgccaagagtgatgtatacagctttggtgttgtccttctggaacttttgactggaaggaagcctgttgatcatacactaccacgtgggtagcagagcctggttacttgggctacaccaagactcagtgaggataaagtcagacagtgtgtagatgcaagactaggaggagaatacccacccaaagctgttgctaagatggccgctgttgctgccctgtgcgtgcaatatgaagctgatttcagaccaaacatgagcattgtagtcaaagctcttcaacctttattgaatgcaagacatgggcctgctggtgaaactccaaactaatctttgtctatatttatatctgtatcaatgagtatgtgcataagtgtgcacgtgagatataagaaagtgactgcttcagaagcggatggaaatttgcttgaacatgtttatatatcccattgtttacattgc

SEQ ID NO: 8030 - DNA, 1764 bp, Glycine max
  Clone ID: 700731617_FLI
taacactttccttagttcaatatggggaagcccttcttcactctctctctttcttccctttgcttgctactcttgtcgagtgcatgctttgctattacctccagcaagttcaacgagtgccaactcaacaacctcaacgcgttggaacccgaccaccgcgttgagtccgaaggtggtcttattgaaacatggaactctcaacaccctgagctgcaatgcgccggtgtcactgtttccaaacgcaccctcaaccgcaacggcctccacttgccatcttactcaccttatccccaaatgatcattgtcgttcaagggaagggagcaattggatttgcatttccgggatgtcctgagacgtttgagaagccacaacagcaatcaagcagaagaggctcaaggtcgcagcagcaactacaagacagtcaccagaagattcgtcacttcaatgaaggagacgtactagtgattcctcctggtgttccttactggacctataacactggcgatgaaccagttgttgccatcagtcttcttgacacctccaacttcaacaatcagcttgatcaaaaccccagagtattttaccttgctgggaacccagatatagagcacccagagaccatgcaacaacagcagcagcagaagagtcatggtggacgcaagcaggggcaacaccagcagcaggaggaagaaggtggcagtgtgctcagtggcttcagcaaacatttcttagcacaatccttcaacaccaacgaggacacagctgagaaacttcggtctccagatgacgaaaggaagcagatcgtgacagtggagggaggcctcagcgttatcagccccaagtggcaagaacaagaagacgaagacgaagatgaagacgaagaatatgaacaaactccctcttatcctccacgacgaccaagccatggaaagcatgaagatgacgaggacgaggacgaagaagaagatcaacctcgtcctgatcaccctccacagcgaccaagcaggcccgaacaacaagaaccacgtggaagaggatgtcagactagaaatggggttgaggaaaatatttgcaccatgaagcttcacgagaacattgctcgcccttcacgtgctgacttctacaacccaaaagctggtcgcattagcaccctcaacagtctcaccctcccagccctccgccaattcggactcagtgcccaatatgttgtcctctacaggaatggaatttactctccacattggaacttgaacgcgaacagtgtgatctatgtgactcgagggaaaggaagagttagagtggtgaactgccaagggaatgcagtgttcgacggtgagctaaggaggggacaattgctagtggtgccgcagaactttgtggtggctgagcaagggggagaacaaggattggaatacgtagtgttcaagacacaccacaacgccgtgagcagctacattaaggatgtgtttagggcaatcccttcggaggttctttccaattcttacaaccttggccagagtcaagtgcgtcagctcaagtatcaaggaaactccggccctttggtcaacccataaataacaacaagcatatatgaaggtgtggtgaggccatcttatatgaaataatatcaaaatatattttgtgtaataataaaactatggcctatgtatttaccaccctccgacccagcctatgttaatatctgagtggcgttgtacctttgaatcgccttaataaaatgtcagtcttcaagttttgtcttt

SEQ ID NO: 8031 - DNA, 1484 bp, Glycine max
  Clone ID: 700731628_FLI
acaaaacgtacttcacttcgtgccttcagaaaccctaattcccaaatctcaaacgaaccatggaattcaccaagaagcgcaaaaccgaagagaacggcgacaccaccgattatccgccgcagcaatccaccgaagaatccccaatcgccgccgtagcccccgcccccctcgccgccgaagacatccgcaagatcctacaaccgttctcccaggagcagctcctcgacctccttcaatcggcatcgctccgccaccccgacgtcctcgatgccgtgcgcgccgttgcggacctcgattccaccctccggaagctcttcgtgcgcggtctcgccggcgagaccacgacggagaccctccgcggcgtgttctcggcgttcggcgaattggacgaggccatcgtgatcattgacaaggccacggggaggtccaagggctacggcttcgtcgtattcagccacgtggacggcgcaattctcgccctcaaggagcccagcaagaagatcgacggccgcatgaccgtcacacagctcgccgccgccggaggccccggcggcggcgacgtgtccctccgtaaggtcttcgttgggaacgtccccttcgagatttcctcggagaggctcctcgacgagttcctcaagttcggagaagtcgaggaagggcctctggggtttgacaaatcgagtggcaaaagcagaggtttcgccttcttcgtttacaagaccgaggaaggtgcaagggcttcgttggttgaaccattgaaaacaattgaggggcaccaagtgatttgcaaattggctgtggataacaaaaagacgaaaccttttgttgcggatcagcatcagcagcaacatcatcagcaacatccgcagcaacagatgcagcagcaaggttcaatgatggtgcctcagtatggtggatatggtggtaatggttatgggatgcagcagcaacagcagcagcatcaggtgccaccgtataataatcaaattccggttgccggtgctggcgggtatggccatggatatggtaattcacagatgggcgggccggtttctggtgattatggtgcgagggtgcctcccagtactggtggggggtaccctgatggctcgcagtatggcttccctccttcatcgggccatccgccgcagccgcagattccgatggcgagacctcctggtggaatgtaccaaggcatgccaccctattattgagataatgaaatctttggttttggttacatggactgctgtaatttgttgctgcttcactacctctgcatctatgtgttatggttccatttgtgatgggtgttagttgaagcttacatgacttggcgtagtacttgaatgtagtacttatgtagaatttatgtagaatttttggttcatagtttttacctagtttagtttcataagttattgactaaatgccaaggtggttacattaaattttgaaatgtctcttattgtgctctttcgtgc

SEQ ID NO: 8032 - DNA, 768 bp, Glycine max
  Clone ID: 700731703_FLI
gtcgagggcctccaagtctttgttgatggaagatggtactctgtcgctcctaaagaagatgctttcgttgtcaatattggcgacacatttatggctctatcgaatgggatgttcaagagttgcttgcatagagcagttgtaaacaacaaaattgtgagaaaatcacttgctttcttcctatgtccaaatagagacaaagtggtcacccctccaaaagatctaatcagctacgaaaattcaagaacatacccagatttcacatggccaagccttcttgaatttacacagaaacactacagatctgacacaaaaacacttgatgctttctcgaggtggctactagaaaaaaacaatccgaacaggggtgcccccacaaatgttccatggccaacaaaatctataaactgagctttaacttgcatctgcttgaatgaggaagatatgacatcatataaagtgaaaaagagggtgcttttggtgggtcgacttgtgaagaaaaagataacagaaacatcaaaaagggaagggctaatcatcagtaattagttgtggtgttagtgttgggagaatcctatatggtgcaaatggaagaagaactgaggccatattctttggaataaagagagttgatttgtgtagtgaagttattcgatgttgtcactacttatgcattattagttgtcttgaactatgttgtagttatgtgatatgcatgtatgtagaacttttaattaattaataataaactgcattgcattttctgtcatc

SEQ ID NO: 8033 - DNA, 1892 bp, Glycine max
  Clone ID: 700731843_FLI
taacacttccttagttcaatatggggaagcccttcactctctctctttcttccctttgcttgctactcttgtcgagtgcatgctttgctattagctccagcaagctcaacgagtgccaactcaacaacctcaacgcgttggaacccgaccaccgcgttgagtccgaaggtggtttgattcaaacatggaactctcaacaccctgagctgaaatgcgccggtgtcactgtttccaaactcaccctcaaccgcaatggcctccacttgccatcttactcaccttatccccggatgatcatcatcgcccaagggaaaggagcacttggagttgcaattccaggatgtcctgagacgtttgaggagccacaagaacaatcaaacagaagaggctcaaggtcgcagaagcagcagctacaggacagtcaccagaagattcgtcacttcaatgaaggagacgtactcgtgattcctcctggtgttccttactggacctataacactggcgatgaaccagttgttgccatcagtcttcttgacacctctaacttcaataaccagcttgatcaaacccctagggtattttaccttgctgggaacccagatatagagtacccagagaccatgcaacaacaacaacagcagaaaagtcatggtggacgcaagcaggggcaacaccagcaggaggaagaggaagaaggtggcagcgtgctcagtggcttcagcaaacacttcttggcacaatccttcaacaccaacgaggacatagctgagaaacttcagtctccagacgacgaaaggaagcagatcgtgacagtggaaggaggtctcagcgttatcagccccaagtggcaagaacaacaagatgaagatgaagatgaagacgaagatgatgaagatgaacaaattccctctcaccctcctcgccgaccaagccatggaaagcgtgaacaagacgaggacgaggacgaagatgaagataaacctcgtcctagtcgaccaagccaaggaaagcgtgaacaagaccaggaccaggacgaggacgaagatgaagatgaagatcaacctcgcaagagccgcgaatggagatcgaaaaagacacaacccagaagacctagacaagaagaaccacgtgaaagaggatgcgagacaagaaacggggttgaggaaaatatctgcaccttgaagcttcacgagaacattgctcgcccttcacgcgctgacttctacaaccctaaagctggtcgcattagtaccctcaacagcctcaccctcccagccctccgccaattccaactcagtgcccaatatgttgtcctctacaagaatggaatttactctccacattggaatctgaatgcaaacagtgtgatctatgtgactcgaggacaaggaaaggttagagttgtgaactgccaagggaatgcagtgttcgacggtgagcttaggaggggacaattgctggtggtaccacagaacttcgtggtggcggagcaagccggagaacaaggattcgaatacatagtattcaagacacaccacaacgcagtcactagctacttgaaggatgtgtttagggcaattccctcagaggttcttgcccattcttacaaccttcgacagagtcaagtgtctgagcttaagtatgaaggaaattggggtcctttggtcaaccctgagtctcaacaaggctcaccccgtgttaaagtcgcataaatgacaagcatgatggtgtgaggatgaggccatcttatgaaataataacaaataaataaattttgtatgataataaaaagtatggcccatgtaccatcccagcgagcctatgtttatatctgagtggcgttgtacctttcaatcgccttaataaaatgtcagtcttcacgttttgtcttt

SEQ ID NO: 8034 - DNA, 751 bp, Glycine max
  Clone ID: 700731864_FLI
tctgaccaatgttttggcgaagtctcattgtgcagaattcatcacctgacatctacaaccctcaagctggtagcatcacaaccgccaccagccttgacttcccagccctctggcttctcaaactcagtgcccagtatggatcactccgcaagaatgctatgttcgtgccacactacaccctgaacgcgaacagcataatatacgcattgaatgggcgggcattggtacaagtggtgaattgcaatggtgagagagtgtttgatggagagctgcaagagggaggggtgctgatcgttccacaaaactttgcggtggctgcaaaatcccagagcgataactttgagtatgtgtcattcaagaccaatgatagaccctcgatcggaaaccttgcaggggcaaactcattgttgaacgcattgccagaggaagtgattcagcacacttttaacctaaagagccagcaggccaggcaggtgaagaacaacaaccctttcagcttcctggttccacctcaggagtctcagaggagagctgtggcttagagagccctttttgcatgtgctaccacacttttgtccttttgggctctagctagtgctggtagcagtaaataagaatgaataaaagaaacaaaggcttagatgccctttgttaagtgtagaataacgggtatagtaactatgtacccttgtgtaatgagtcactcaagtacctatgcgggaaaagcataaataaaagaagaaattccaat

SEQ ID NO: 8035 - DNA, 1441 bp, Glycine max
  Clone ID: 700731909_FLI
taaccatatactaatatttgcttgtattgatagcccctccgttcccaagagtataaaactgcatcgaataatacaagccactaggcatgggtctagcaaaggaaacaacaatgggaggtagaggtcgtgtggccaaagtggaagttcaagggaagaagcctctctcaagggttccaaacacaaagccaccattcactgttggccaactcaagaaagcaattccaccacactgctttcagcgctccctcctcacttcattctcctatgttgtttatgacctttcatttgccttcattttctacattgccaccacctacttccacctccttcctcaacccttttccctcattgcatggccaatctattgggttctccaaggttgccttctcactggtgtgtgggtgattgctcacgagtgtggtcaccatgccttcagcaagtaccaatgggttgatgatgttgtgggtttgacccttcactcaacacttttagtcccttatttctcatggaaaataagccatcgccgccatcactccaacacaggttcccttgaccgtgatgaagtgtttgtcccaaaaccaaaatccaaagttgcatggttttccaagtacttaaacaaccctctaggaagggctgtttctcttctcgtcacactcacaatagggtggcctatgtatttagccttcaatgtctctggtagaccctatgatagttttgcaagccactaccacccttatgctcccatatattctaaccgtgagaggcttctgatctatgtctctgatgttgctttgttttctgtgacttactctctctaccgtgttgcaaccctgaaagggttggtttggctgctatgtgtttatggggtgcctttgctcattgtgaacggttttcttgtgactatcacatatttgcagcacacacactttgccttgcctcattacgattcatcagaatgggactggctgaagggagctttggcaactatggacagagattatgggattctgaacaaggtgtttcatcacataactgatactcatgtggctcaccatctcttctctacaatgccacattaccatgcaatggaggcaaccaatgcaatcaagccaatattgggtgagtactaccaatttgatgacacaccattttacaaggcactgtggagagaagcgagagagtgcctctatgtggagccagatgaaggaacatccgagaagggcgtgtattggtacaggaacaagtattgatggagcaaccaatgggccatagtgggagttatggaagttttgtcatgtattagtacataattagtagaatgttataaataagtggatttgccgcgtaatgactttgtgtgtattgtgaaacagcttgttgcgatcatggttataatgtaaaaataattctggtattaattacatgtggaaagtgttctgct

SEQ ID NO: 8036 - DNA, 782 bp, Glycine max
  Clone ID: 700731911_FLI
cagaaatgcaactatggagcgcctgaggacaatgtggcaacaaaggaagccttggtattggagttaagcagtcaacaagaatacttgaggctgaaagcacgttatgaagctctacaacgttctcaaaggaaccttatgggagaagatcttggccctctaagcagcaaagagcttgaatcacttgaaaggcagctagattcgtctttgaagcaaatcagatcaataaggacccaattcatgctggatcagctttctgatctacaacgtaaggaacactttctaggtgagtcaaacagagatctcagacaaaggttggaagagtttcaaataaatccactccaactgaatcccagtgctgaagatatggggtatggacgccatccaggtcagccccaaggccatgctctctttcaaccattggagtgtgagccaaccttgcaaattggatatcatcctgatccagtatcagtggtgacagaaggcccaagcatgaataattacatggcaggatggttaccatgaaagagtgtcaaatgtggagcataattaaagatcctgccgtttaatttcaaatttatttgaagttaaggaaaacggaaatttgtaatagcacgtaatggacttacactagactctaccttctaattaagctaggaacaatataagcagtgattttgtgtgtgagctttcataaacagtacctagctagcctcttccttgtttcaataatcacttcttccttttcctaattaataaaactatcgtatgcaccctttgccttt

SEQ ID NO: 8037 - DNA, 1093 bp, Glycine max
  Clone ID: 700731980_FLI
cgtgtccatagttgcaagttatctaagcccagtttgtgtttcactcacacaccgtttccagtaacaacaaaacatcatgctttctcgcccctcacatcaatttttctgtttctgagatccgcgccttctcttcactttcagatggttctgtctctgtagctcggaatcagacgacaggagaatttgctgggggagagtttcaatttttcaaatcctgtcgttgattcatttgggggaggaggatggaaagaaagtgaataaccttctggaaatgaatagaggggaaggagcgaatgatggtttttctggacctggaccaaatgattcgcttcttcctggtcttattgatgatgttgccttgaattgtcttgcttgggttagtggatccgattatgccgcactatcatgtatcaataaaaggttcaataaactgatcaatagtgggtatctatatgggttgaggaaacaattgggggctgtggagcatttggtgtatatggtttgtgatccaagaggatgggtggcctttgaccccaagataaacaggtggatgtcattacccaagataccttgtgatgagtgctttaaccatgcagacaaggagtccttggccgtgggctgcgaactgttagtcttcggtcgggaactgatggagtttgctatttggaagtatagcatgatttgtcgtggttgggtgaagtgccaggagatgaaccagcctcggtgtttgtttggatctagtagtcttggatcgattgctattgttgctgggggaagtgataagtatggaaatgttctaaaatcagctgagttgtatgactcttcaacaggtatgtgggaacttttaccaaacatgcacacatcgcgtagattgtgttctggtttttttatggatggcaaattctacgtgattggtggaatgtcaagtacaactgtttcattaagttgtggagaggagtatgatctcaagacaaggagttggcggaaaatagaggggatgtatccatatgttaacgtgggtgttcaggcacctccacttgtggctgttgtggataatcagctatatgcagttgagcatctgactaacatggtg

SEQ ID NO: 8038 - DNA, 524 bp, Glycine max
  Clone ID: 700732039_FLI
aaatctagtgttgtatatcggtgcttagatgcttttggtgtaacaggaaatttgatgtgtttcttaaacattgtaattcttgtcccattgtgttgcttgtaggagtgagtttgctttattaatgaaaagtggaaaccaagagaaaatacaaaaatggtgatgatgaaactcaagacaggaatacatcaagaaaacaagatgctgtgcaaacatcataacatgcacatttatgagaggaaagagagacgggtaaaggtgaagtctcataatgaagaattaacagcaaagaggagatgttcaagaagtcgagagcgtgaggatagaaggtccccttctttttcaccaagggagcaaaaacgtacttatcaagatggagagcgcaaagagttgtcaatgcattccttgaaagatagttctagaactaagaaccctgatattgatagaaatagagtatcaactaatggttcaagtggtcaccatcatcgacatggtgtctccacaagtggacttggtgggtattctcc

SEQ ID NO: 8039 - DNA, 756 bp, Glycine max
  Clone ID: 700740186_FLI
atggatattgtgccccagactatgcaatgacgggtcaattgacgttcaagtctgatatttatagctttggagttgttcttttggagatcatcacaggcaggaaggcgatcgacaatacaaagcctgctaaagaacaaaatctagtttcatgggcaaagtctttattcaaaaaccgtaaaagattctgtgagatggttgacccattgcttgaaggtcagtatccaatgagaggtttgtaccaagctcttgctattgctgccatgtgtgttcaagaacagcctagtatgcggcctgaaacaaccgatgtggttacagctctagattaccttgcatcccagaaatacgatccccaaattcatccagtacaaaactgtagaaaaggtttatcttttccaagagaaagaagcagtggccatagacgtactgttagtaatgattctgatccaagagcaagaagcgatggtcatagacgaactgtttgtaatggttctgagacaagagcaagaagcaattgtcataaacgaactgttagtattagtaatggtcatagtagtagttctgagacagaaagctctagaaaaggtctatcttctccaagggtgagaagtgatggtcacagacattttgttagcaatggttctgagacagacagttctggagattagaaatgtgatgtgtttttggatattcatattgtaaaatgcttagctatccaattttgcttcatataaagaagattcttctttttggctcttc

SEQ ID NO: 8040 - DNA, 1177 bp, Glycine max
  Clone ID: 700740215_FLI
ttatcttttctctatagctccgtccaaacatgactctccgcaaccaccaagagctcttggttgctcttgcaattctatattttcttgccacctcactcccttcagtttcagctcatggcccatatgcatgggatggggaggccacatataaattcactacttaccaccctggccaaaactacaaaggtttatccaatgtcaaaaactacttccaccatctcggctacatccccaatgcaccacacttcgacgacaacttcgatgacaccctcgtatctgccatcaaaacctaccaaaagaattacaacctcaacgtcaccggcaagttcgacatcaacactcttaaacaaatcatgacaccccggtgtggcgtccccgacataataatcaacacaaacaaaaccacatcgtttggcatgatctcggactataccttcttcaaagacatgccgcggtggcaagctggaaccacacaactcacctacgctttctccccggagccaagacttgatgacactttcaaaagcgcgattgcaagggccttcagcaagtggaccccagtggtgaacatcgcgttccaggagacgacgtcgtatgaaacagccaacattaagattcttttcgcgagtaagaaccacggtgatccgtatccttttgatggtccaggtgggatattgggccatgcattcgctcccactgatgggaggtgccactttgacgccgacgaatattgggtggcgtctggcgatgtcaccaaatcgccggtgacaagtgcgtttgaccttgaatctgtggcagtgcacgagatcgggcacttgctcggattaggccactcgtcggacctaagagccatcatgtatccttctataccacctcgaactaggaaggtgaatctagcgcaagatgatatagacgggattcgaaagctctatggtatcaacccctaattattatagctaggtgttgtttgtactagaactagagttttatttcggtaatttgcattaaaggattttgaaagttatcgaggtgaaattattctaattcaagaacaacaaaaatagcatgtaagatattgtattttagttttctcttaattaagaataaaccagctgatactaggtgatgcatatatgataatgaataaatgtgacaaatttaccttaaaatgaaaaat

SEQ ID NO: 8041 - DNA, 1155 bp, Glycine max
  Clone ID: 700740303_FLI
gtgtgacaggtgcttttccacgtcttcaacgtctttctatggagtgttgtcccaagctgaaagggcacttgccagagcaactatgtcatttaaattatctaaagatttctgggtgccaacaacttgtaccttctgctctcagtgcccctgatattcatcaattatacctagcagactgtgaagagctgcaaattgatcatccaacaactttgaaagagcttaccattgaaggtcacaacgtggaggcagccttactcgaacagattgggcgcaattactcttgttcaaataacaatattcccatgcacagttgctatgatttccttctaagcttggacatcaatggtggctgcgactctctaacgacctttccgctagatatcttcccaatactcaggaagatttttatcaggaagtgtcctaatctaaagaggatttcacaggggcaggctcataatcatctccagagtcttggtatgagagagtgcccccaattagaatcattgcctgaaggaatgcatgtcctccttccatctcttgatcggctgcacatagaggattgtccaaaagttgaaatgtttcccgaaggaggtttgccatcaaatttaaaaggaatgggtctctttggtggtagttacaaacttatctacttattgaaaagtgcattgggaggcaatcactctctagaaagattatctattggaggagtggatgttgagtgtcttcctgaggaaggtgtactgccacactctcttgttaatctatggataagggagtgtccagatctaaaaagactggactacaaaggtctctgccacctctcctctctcaagacattgcatcttgttaactgccccaggctccaatgcttaccagaggagggtctgcccaaatccatttcaactttgtggacttacaattgtccgttgctcaaacaacgttgccgggaacccgaaggcgaagactggccaaagattgctcacattaaacgcgtgtcgttacacggtggttaatgagatgcagattagctacttgctatcctgggagatgcatgcttattctacattgttttaaacattagtttatgtacagctaaatttgtaacaggattatgggcattgcttttatcgggaattcactgacatgtacatttct

SEQ ID NO: 8042 - DNA, 1098 bp, Glycine max
  Clone ID: 700740321_FLI
gcaagaagaaagcagagcctctactacatcatcacattcacatttcagtaccttctctttctcccagtctctcacacacaacaattgaagaagaaaatggttgacaatgattcgctctcggaattcctcgcatctgcggtcgacgcggctcagaaagctggcgagattattcgaaaaggcttctaccagaccaaaaatgtggaacacaaaggacaggttgatttggtcacagaaactgataaagcatgtgaagaactcatatttaatcatctgaaacagctttatcccactcacaagttcattggggaagagaccacagctgcctatggcactacagaacttacggatgaacccacatggatagttgatcccctggatggaactactaactttgtgcatgggttcccctttgtttgtgtctccattggtctcacaattggaaaaactcctacaattggtgttgtatacaatccaataattaatgagctttttactggaatccatggaaaaggtgcctttttgaatgggaatcccataaaagtatcgtcacaaactgaactaatcagctctcttcttgcaactgaggctggaacaaaacgtgacaaagaaacagtagatgcctctaccgataggattaaaagcttacttttcaaggtgagatctcttcgaatgagtggctcctgtgctctgaatctgtgtggaattgcatgtggaaggctggatgtattctttgaacttggctttggtggtccttgggatgtagcaggtggtgctgtcattgttagagaagctggaggtgttgtatttgatccgtccggtgcagattttgacataacatctcagcgagtagcagcttcaaaccctttcttaaaggatgcacttgttgatactctgcgccaaatggtgtgagaaatttactattaatcaatggcaagaacttatcatataagccatctttgttagttcgtttagcttttgctcaaataattttttagattctcagttttaagtaaaagttgcatgataaaaatgttttagaatttttaacttcttctgtggattcagagtattcaataataaatcactttaaatcctttc

SEQ ID NO: 8043 - DNA, 683 bp, Glycine max
  Clone ID: 700740810_FLI
agctgccggagataaagctacaacatatactaaaaggatatggcttgaccttgctgatgcagtgtctttatcagcaggtgaggaagtaacattgatggattggggaaatgccatagtgaaggaaatagagaaggaccaagatggaaatatcatagggttgagtggtgttttgcatcttgaaggatctgtgaagaccacaaaattgaaactcacttggctacctgagatagatgaactagttagcctgacattagtggagtttgattatctaattacaaagaaaaagcttgaagaaggggaggatttcattgatgtggttaacccatgtaccaaaaaggagactttagcttatggagactccaacatgcgaaatcttcagcgtggagatttattgcaactggagagaaagggatatttcaggtgtgatttacccttcattcgcccctcacaaccaatcgtgctatatgcaatccctgatggcaggcaacagacaagtttgaagtaatctttttggtcttgaaactgtttgggccacattcacactcagaatagttggtaatggtgataacaagtttgtggaactacttttatgtttaccatcacattgtactgtttatatgcaaaccattatatctggattttttactagtaattggaaaattcgtctttgttatttttgggac

SEQ ID NO: 8044 - DNA, 1198 bp, Glycine max
  Clone ID: 700740866_FLI
aaatcatggagttccagagggtgtgattgaaaagataatgaaggtgacaagggagtttttcggtttaccagagagtgagaaattgaagagttactccactgatccattcaaggcaagcaggctgtccactagtttcaacgtgaatagtgagaaggtttccagctggagggacttcttgagacttcactgtcaccctatagaggattacataaaggaatggccctccaaccctccatctttaaggtaagagaaggtaataggcatatataaaattaaagggtaggccatatataattaattttggtatgtatatatatggtgagcagagaagatgttgcagaatactgcaggaagatgagaggagtatcattgaaattggtggaggcaatttctgaaagcttaggtttggagagggattacattaacagggtagttggagggaagaaggggcaggaacaacagcacttggcaatgaactactatccagcgtgtccagagccagagctgacatatgggttgccagggcatactgatccgacggtgataaccatactcctccaagatgaggtaccgggattacaggttctcaaagatggcaagtgggtggctgtgaatcccatccccaacaccttcgtagtgaacgtgggtgatcaaattcaggtgataagcaatgacaagtataagagtgtactgcatcgagcagtggtgaattgcaacaaggacaggatttccattccaacattctattttccctcaaatgacgcaatcataggacccgctccacaactcatacatcatcatcaccatccgcctcagtacaacaactttacgtacaatgaatactaccagaatttttggaacaggggactttccaaagaaacttgcctcgatatcttcaaggcctaagtttgatcattccaatgtatgtgtggtgtgtttctttatttatgatagaaaaatgagaaataaacaaactcattgcaaaataaagtgtgtaatgtcttatgggacataattttgtaccactaggctgggccagttgtttgatgattaaggcactctcaatcttaatcatttatgctaaggcactcgagattgtgagattgtgcttttttttctatcgacaatattaattgttagtttgtttgaatgaataatttgtttgaattagataagattcgatgatttttttttcttg

SEQ ID NO: 8045 - DNA, 602 bp, Glycine max
  Clone ID: 700742778_FLI
gaaaggcggagtggcaccatcaagatttctgacgtatcatatgatacccttcatgcttttgttaattatttatacactgctgaagcgtcccttgataatgaattggcctgtaacctgttggttttaggagaaaagtatcaggtgaagcatctcaagacatattgtgaaaagtatttgatcgccaaaatgaattgggataaagctatttctaactatgcctttgcatatcaatacaattgcaaacaattacaaagtgtgtccttggcagtgatcttggaccacatggactcgctcactcaaaatgaatgttatgcggagctggtggacactaatcctcgtcttgttgtggaaatatatgaaacatacattggcaggctattaaatactgcaggcgcattttaggttataggaacagagctaaggaagctagtgaaatcatctttaagctggggtttgatacttcagttgggattatattcttgattggtaattagtctgttttagtattttaattgtacattatcatgcactaacagttaaacatgcaattggacctaacacctctttcattatagtattgttacttactagattaaaaaagg

SEQ ID NO: 8046 - DNA, 712 bp, Glycine max
  Clone ID: 700742801_FLI
cagaggcctgttgaaggaaatgcaacaatgaaacaggatttaagaagctttaagcttatattggaatatattaaagccttgcctactgggcaagaaaccgattttgtattagtttcatgttctggactaggaattgagccttccaggcgggagcaggttcttaaagccaagagggctggtgaagattccttaagaagatctggccttggatacacaatagtccgtcctggtccattgcaggaagaacctggagggcagcgtgctctaatatttgatcaaggaaacagaatatcacagggcatcagctgtgctgatgtagctgatatatgtgtgaaggcactacatgatacaactgcaagaaacaaaagctttgatgtatgttacgagtatattgctgaggatggaagggagctttatgagctggttgcacacttgcccgacaaagcaaataactacttgacaccagcactctctgtcttagagaagaatacctgatcatcccttgttgagacaaaatacttcccagaagatttcataaatttgctacctacgttcttctacttctgcattggatcaatgcagaagtgattcatgtaactatttttcctgtatatatattcttgtgtagcacaaatctacgacttgagaaattaatttatttataaattcttcctttgaaaattggaattatacaaaaaatatagatttcaat

SEQ ID NO: 8047 - DNA, 957 bp, Glycine max
  Clone ID: 700742805_FLI
gttccgggcagaagaatggatcaggaggttgttttcttagtggaaggaaattgagggtgaaaaaggagagagcagcaattggaggacgatcgatgcgcacactgtagtgcccatcgatcgtcctccaattgctgagcctgacagacctctatggttcccaggcagcacccctcctccatggcttgatggcactctacctggagacttcggctttgaccctcttggtcttggatctgacccggagagtctgagatggaatgttcaggcagagctagtgcactgcagatgggcaatgttgggtgctgctggcattttcattccagaattcctaacaaagattggtgtcttgaacactccttcatggtactcagctggagagctggaatacttcacggacactactaccctcttcatagttgagctctttttcattggctgggccgagggtagaagatgggctgacataatcaagccaggctgtgtcaacactgaccccatctttcccaacaacaagctcaccggaaccgatgtgggttaccctggtggcctttggtttgacccccttggttggggaaccggttctcctcagaagatcaaggacttgagaactaaggagatcaagaatggcagactggccatgcttgctgtcatgggtgcatggttccagcacatctacactgccaccggtcctattgacaacctctttgcccaccttgcagatcctggccatgctaccatttttgctgctttcacccctaagtgaaaaggctaagatcaacaatcagattaccagctgtttgggatgagaggagtgtttatatatgtctgtagaaattaagcttgtaatatggctacttctatgtcatatatgcacataatatcataatccaacgtgccgacacctatttaagttttagatgccatgaatgtaagttcaggtaataatcccatttgtgc

SEQ ID NO: 8048 - DNA, 482 bp, Glycine max
  Clone ID: 700742807_FLI
tataattaacattcaccatggtctgttgccatcattcaagggtggtaatccatctaaacaggcctttgaagcaggtgttaaattaatcggtgcaacaagtcactatgtgactgaagaacttgacgcaggacctataattgaacaaatggttgagagagtttctcacagggataacttgcagagctttgtacagaaatcagaaaacctagagaaacaatgcctttccaaggctatcagatcttactgtgaacttcgggtgttaccttatgaagaaaagaggactgttgtattttgagggaaacagcaaataaccaaaatacagtgcaccaaaatggtgtgcatctacattcatattcaaataatgtcccacttcagttgtaaaatatgagcataaggaagattgagttgattctttgggtccttgtaacattgctaattgcctaattcagtgaaatgaattcagcaactttatgagcttcatt

SEQ ID NO: 8049 - DNA, 873 bp, Glycine max
  Clone ID: 700743009_FLI
gctttcccaggctgagcatggtcctgatagtcaggttgtgcttgtgatttctggtgaaggtgtggatctgaatgttatagaagaggaactcaacaagcagtgccagagtctcccaagaggagagtttgctgctaaggccctaagccacagttttattgtttatgcacatgatatgcttgagtcaatcaagttctcaaacttatatgcacccgaacatctaattgtcaacacgaatgatgcagagaagtgggagggttttattgagaatgcaggttctgtatttttagggccgtggacaccagagagcgttggtgattatgcaagtgggacaaatcatgttcttcccacttatggttatgcaaggatgtatggtggtgtttcattggattctttcttgaagttcataactgtgcaatctctcacagaagaaggcctaagaaaactcgggccatatgtcgttaccatggcagaagttgaaggtcttgatgcccacaagctagcagttaccctaaggcttgaggacatagaagtcaggcaggtatcaacatgacatgataatctacgagtcaacgttaatcattgttgagtttttcgaagatcgtaagggagaaagtggtcagtgcaaagcaaagagctttgataccatatttgagatctagagttcagagaaactagaaagaaagtgagataaaattgagaaaaatgtatttctatattgaatcagttacaattgttgagttactcatatttactgttgagctcgactcataagtacagttataactgaattagagagaccaacagtcactgtagctcaactgtcgataactactactaaataatagaaatggtccccgagtaaattactattct

SEQ ID NO: 8050 - DNA, 1173 bp, Glycine max
  Clone ID: 700743039_FLI
cttatctttcttcttcttcttcttctcaaccgtcgtcgattctcagtttccgattgcagaatttgatttcagaatccaaaaaaatgaacacgttaatctcaccgccttctacaaaccgttacctttgtggggtcccttactctttcctctctccgcttcgacacaacaacaacaccaaccttaaccttccgaggttccattccacagttgctaccaacttcttgtcacactctccggttcgggccacgctctccgcacgtgccacttccgatgaagtagacacgcaaacggtggttgaggaactttcagaggagaataaagtggaagagaacaccaacgaggacaacacaaacacgtccactttttctgctccaattgacaaagaacttaaaaaggttgctcagaagactgctgctacctttgcaccaagggcttccacggctacaaaaaaccctgcagtgcctggaactgttttgtacagtgtttttgaggttcaagggtatgtttcaatgttgttgggaggagctttgtcttttaatctcatattcccttctgatgaacctgacatttggagattaatgggaatgtggtccatttggatgttcacaattccttcattacgagctcgagattgctcaaagaatgagaaagaagctctcaactatctttttctcctcgtcccattgatcaatgttataatcccattcttttggaagtcctttgctgttgtttggtccgcagatgtagtagccttcttgggaatgtacgcatggaagtttggatggcttcagagaacggattaaggaacccaaatttggttagtaaaagttatcaatgcttgttggctttgtctttctcatggatctcaattttgtataacacgcagcaatgagatgtgacattccttgtagcacttcatggcccccaactcatggatgagtgatttctgtgttaaaagtttgagtagcctttgcatctactaggggagcaagataccatgttgcattcgttaaacatcaaatgaagagaatgttataggttctttaaaaagtttagcatgttgtattattgccgtgtctcacgttgcaggaaatttgaaattcccgaatgtaatcaagaacctccaaaagatgaaatgtgaagtcatgatacatatatttttgtaccactgag

SEQ ID NO: 8051 - DNA, 950 bp, Glycine max
  Clone ID: 700743077_FLI
gagaaacaatggccaatgtttcaattccactcccacgaaacggtttctccaaacccaattactcgacaaaacgcccatgtttcaccccttcagcttcaacactcagaatttcttgctctggagtggctgagtttgatggatctcatcagaaaaaaggaggtttgtttaatttcaatggaatcaagggcgtggcttgtggtattcttgcagcttgtgctgttacttctgctgcatttcctgttactgctgctactcagaggcttcccccattgtcaactgagcccaatcgctgtgagcgtgcatttgttggcaacacaattggtcaggcaaatggtgtatatgataaaccattagatctccggcaatgtgatttcacaaatgagaaaaccaaccttaaggggaagtccctgtctgctgcactcatgtcagatgctaagtttgatggagctgatatgacagaagttgtaatgtcaaaggcttatgctgctggtgccagctttaaaggggtggacttctcaaatgcagtcttggaccgtgtgaactttgagaaagctgatcttgaaggagctatatttaagaacacggtattgtcaggatccacctttgatgatgctaagctggacaatgcagttttcgaggacactatcattggttacattgatctccagaaactatgcacaaataagaccattggtgatgaatggagagttgaactaggatgtcgatgaaaagcaaagtcttcactgtcttctatttctagtatgctgctatgctatgacatgacacaaatattttgatgagggtaactagtggatgaatgctacgtccagaagtaaattcaattccttgcttttcctgtatgatattgtataacttatattattccctgtgattttaacatacaaattgaagacgctggtataattaataattctacttgtatttttttt

SEQ ID NO: 8052 - DNA, 1374 bp, Glycine max
  Clone ID: 700743136_FLI
cggggataagattaaagattcaacaatggcctctgcttctgctactcttctcaagtcatctcctgttcttgacaagtgcgagtgggtcaaaggccagacccttcgccaacctctcgtgagatgtaacccttcctcagcatcagctctcaccatcaaagctgcttcctatgctgacgagctcgtcaaaaccgccaaaacagtggcctcaccggggcgtggtattttggcgatggatgagtcaaatgcaacctgcgggaagcgtttggcatctattgggttagagaacacagaagctaatcggcaggcataccgtaccctacttgtgacagtacctggtcttggtgaatacatctctggtgccattctctttgaggaaactctctaccaatccactgtcgatggaaggaagatcgtcgacgtacttgttgaccaaaacattgttcccggtatcaaggtcgacaagggtttggtgcccctagctggttcgaacgatgagtcatggtgccaaggtcttgatggtcttgcgtctcgctcagctgcatactaccagcaaggtgcccgtttcgccaaatggcgtactgttgtgagcatccccaacggtccctctgctctggcagtgaaggaagctgcctggggtctagctcgctatgctgcaatttcacaggagaacgggttggtcccaattgtggagccagagatcttgcttgatggtgagcatgggattgacaggacattcgaagtagcccaaaaggtgtggtcagaggtattcttctacctggctgagaacaatgtcctgttggaaggtattctcctcaagcctagcatggttactccaggagccgagtccaaggacaaggccactcctctgcaagttgctgattacaccctcaagctccttcacaggagaatcccacctgctgtccctggaatcatgtttctgtctggcggacaatctgaggttgaagcaaccttgaacttgaatgctatgaaccagtctccaaacccatggcacgtgtccttctcctacgccagagctctccaaaacacctgcttgaagacatggggtggactccctgagaacgtgaaggctgctcaagatgcactccttttccgtgccaagtccaactcactcgctcagcttggaaagtacactgccgagggtgaatctgaggaagccactcggggaatgttcgtcaaaggttactcctactaagatcatcttgccacacatgctacagtaacccaaggatccaacattaatttgtctaaattgtgtttgtggtttatatagtcttggacactatttttaatgatgattattacttgtaccttttctacttaatgaacttctagccaatcaattacgaatcttgg

SEQ ID NO: 8053 - DNA, 840 bp, Glycine max
  Clone ID: 700744504_FLI
ctggattattgccattcacaaggaatcatgcatcgtgatgtgaaaccacataatgtaatgattgatcatgagcagcgtaagcttcgccttatagattgggggcttgcagagttctatcatcctgggaaagaatataatgttcgcgtggcatcaagatatttcaaaggtcctgagcttcttgttgatcttcaagactatgattactctctagatttatggagtcttggttgtatgtttgctgggatgatattccgtaaggagccattcttttatggacatgataactatgatcaactggtcaaaatagctaaggtacttgggacagacggattaagtgcatatttagataagtatcgaatagagttggacccacatcttgcagcacttatcgggaggcatagccgcaagccatgggcaaagttcattaatgtagaaaatcatcacatggctgttcctgaggctgttgactttgttgacaagttattacgctatgatcaccaagaacgtcccacagcaaaagaagccatggcccatccatacttcaatccagttagaaatgcagaaagtagtagaactcgtgcacattgagttgctggtgcttgttgtgatatggtgttcgttcttgtcagggggccttcaacagtctgaactgttatttctagtggaacttgcttttagtagattcccctgttctgttgtgaaactcatttcaattagttctttatctaatcgttttgtttctggtttttaaaattatttttgggtggaaaattcagctctcaacaattttatttgattgtgtgccaaaatttggaaatgaaatgttgattcaatttcagt

SEQ ID NO: 8054 - DNA, 1683 bp, Glycine max
  Clone ID: 700748156_FLI
cagggacatcaaaggatcaaatcttttggtgaacaatgaagggatattgaaggtagcggattttggattggcaaatttctccaattctgggaacaagcagcccctcactagtcgtgttgtcaccttatggtaccgtcctccggaacttttgctcggttcaacagcttatggtccatccgtggatctctggagtgttggctgtgtatttgcagaattactaattgggaagcctatacttcaggggagaactgaggttgagcaattgcacaaaattttcaagctttgtggctccccacctgaagaatactggaaaaagaccagacttcctcatgcaacattgttcaagccacaacaaccatatgatagttccctccgagagacatttaaggattttcatgcatccactgtaaatcttctacaaactcttctttctgtcgaaccaagcaaacgtggaactgcctcttctgctctctcattggagtatttcaaaataaaaccttatgcatgtgaaccatcaagtttaccaatatacccgcctagcaaggagattgatgcgaaacatgaggaggaatcaagaaggaaaaagataggtgggcgagcttgcaaaccagaatcaagaaaaccatcaagaaagccactagcactcagtaaattagccccagcagaggatttgacaagtcaaactcaaacttcacataagatgaatgatagatctgtccacatcattaaacaagaggacactaacacgtgtgaggaggcaccaaagcagtctagtggtaaaccagaagatgcttcttcttatatgaagaatgcatctcaagtagatattccctttcctggaccattgcaagtttcaaaatcaagtggctttgcatgggcaaaaaggcgtagagatgacacttcagttagatcccacagtcggtctatttctagaggatttatctttaattcattagaaacttctacactaaattcaagggataattctgaatccagaaaccatgaaaataaggaatttttcggggcacgcaccaactctaggggcaatcacctacttgaaatttctaagcttgccatgcaaaatcaatggagtaagtttgatcgtccagattcatttgatacttgtgatgagtaccattcacaagaactgtccctggcaatttataacaggcaagattcgctatccaagagaagtaacctgagttaccaggatcaagaagaaaaggtagagttttcagggcctctgctatctcaaatgcacacagttgatgaactcttagaaagacacgagcgtcatatccggcatactgtcagaagatcatggtttcagagaggtaagaagcaagggaagtaagtaactgcaactgtaacattcattcatggaaggatatagatcctcgtacatcaaatcaaatgtccttgtgaaagggccatctacattgtcgaagctcacttgctgctgtgactttgagcaacaatgaacattatcatgtacacatagacacagtaaccagcagcatgaattgttacctagaagcttggaaactaaccaatttgaggagtgtaattcaatttatagaaatcagaaggccgtggagaagagaagagaagcttttttttccttcttttcaccatggattttctatttttgatcaattataatatataaaagtttatttctgt

SEQ ID NO: 8055 - DNA, 2065 bp, Glycine max
  Clone ID: 700748186_FLI
gaagttgagaagatagcagaagaagaagggaagagatccattccatggcgtcgtcgtcttcaaactgaagaccggagagagtcaccgtcgtcactttccggagaacagaacagaacaagtgcataagagaatcatcgaattttcattcctttgtatagaagatgaagcgcaagcgtgggcataagaaagggaaggcaaaaggcagcactaaccatggaagcagtggtgctgatgctaacaaggaagaaacctctggtttggaggttgacacaccttcttccacggggaccgggatggatcagcagcagcattacaatcttgctaacataaatcctgatggttctgttgataaggctattgggcgtgttaaggtgaagctcaagacacctaaaatcttagactcccaacccacctcatctgatgctcccagtcccacacaaagcgatactgagagaatggaagatagtgcaaattctttgcctgatatgaaactcagtactctgtctaagagagctgctagcattaaaattaagtcttcatcaaaccacacattgtcggcttccactgagatcaccctcccaaaagaaagaaagaataagcaggaattggatgcttccttagtggttttaaggaaggtaatgaaaatggatgcagctgaacccttcaatgttcctgtcaatcctgaagctctgggaattcctgactatttcgatatcataaacacaccaatggattttggaactatatgtaacaatcttgaaaagaatgaaaagtatatgaattccgaggatgtatttaaggatgttcaatacgtttgggacaactgttacaagtataacaataagggtgactatatcttggatcttatgaggcgagtaaagaagaactttatgaagtactggacagcagctgggctatacagtgaacaatcaaaagggaccaaggagaggacttcagcagaagatattgcactttctggtgatggaaaagcagggaagggtggtcaattgaagcagaagacaaaaaagcgtcatggaagacaccataaacatgattgtttatgtgctatttgtgttctaaagcgacgtaggaaggaacgggaggagaatgctcgaattgctagaagcaattttggatctggtggtgataagcatgctaacgagtttaagcacgaggaatcaatacaagtagagagtcctggtggtgaagattcatcatcaaatatagatgaatctatgggcactgatggagatgttgatgaagacaaaggagaggtggcaaagatggagattagtgagaagcagtgtagcccttctgagagaaagcatgtgagcattgatgttgataatgatgatgacaatgatgaccatggcctagaggaaggggaggaggaggagaatggagaggaagaagatgaggaagagattgaaatgaacagccagaagggagagatgaatgaaactttaaaacatggtggaaccttggaagagaaatcaaatgttggtgatgcaaccgctctacatgatgaatatagaacaaagcaacaagaaggacaatctgcggcagtccagcaacagaagaaacacaaggggtcacaagataaacagcagaaagctaagctccttgagagcttatatagtgaaaaccacaagctttcaagtttatgtggaattctcttcccccaaaatagtcagtctgtctggagtggaccacactcactaatacagaagagaaattctgctcgtactagttcaattcacgctgctattaggactttcatggggtagcttttatcttgatcagtttattacacttcccagcagcctatgtcattaatattttagttgacatcccttcgttacatgatgtgtgtattatagtcacaatttcttggtagcaacagcagattttgtaatttttctttctgttctttttattttctcgttatgctatggaatgacgtatatgaaagaatttgtgcttcaaacccgttttactttataaatcatgaaagtaaaagtaaactgccacttgcagtcatagctcaagtggtcaagtttcgttt

SEQ ID NO: 8056 - DNA, 1124 bp, Glycine max
  Clone ID: 700749096_FLI
attgaacaactcttcacacaacaaaacttttttctggcattgtagcatcatgactggcagagaaatcctccatatgatgaaggtgaaagcagggtttggaacaccagacacagggaatggaaaaggcaaaatatcaaaacacattacacatggctttcacttgatgaagggcaaatcagcgcatcctatggaagattatttagtttcagaatttaagcaagaaaaggacagagaattaggcttgtttgcaatatttgatggccacttaggcatgatgtagcaagctatttgcagaaccaccttttccaaaacatcttgcaacagcatgacttttggactgagacagaaagcgcagtgaaaaaagcttacgttgaaacagatgagaaaatattggaacaagaacttgtgttggggcgaggagggtcaacagctgtgactgcaatacttattgatggtcagaagcttgtagtagcaaatgttggtgactcaagagctattatctgtgagaatggaaaggcaagacaactatcagtggatcatgaaccaagcaaggaaaaaaaatcgattgagaggcgtgggggttttgtatcaaacattccaggagatgtccctcgagtagatggacagctggcagtagcaagggcttttggtgacaggagcctgaagatgcatcttagttcagaacctgatgtgattgtacaggaagtagatcaacatacagagtttcttattctggctagtgatggaatatggaaggttatgtcaaacgaagaagcagtggaatctattagacaaataaaggatgctcaagctgcagcaaagcaattgattgaagaggcagtttgcaagaaaagtaaggatgacatatcttgcatagttgtgaggttccaatgacatgtttttggttaagcacaggaatcctttccgaaacccaagaatgaaggccctgctggacatttagctagcactgattgcatgtataaatgattcaataataacttttgctttttcaagagatttttttttttaaactgtttgcatcttaatgagtagttgttaccgccacaatttccatgtataagtgtatcttctcacctgttgaatggtagatgagagaattaaat

SEQ ID NO: 8057 - DNA, 1345 bp, Glycine max
  Clone ID: 700732127_FLI
gcagggtgttattggtgggtgtagaaagtagcaggaaatggctgtgatcccgtgtcactgttaccgtaccgtcggatcagacaaaccctacctctccggtcagagtctccgccgtcgcgctcctttccccgccgtctctgtttcatttcgacgccgaatatcatgcgtcgcctcttctgccatcgctcacaaagttgggctgaaagattttcttcacttagatgattttgataaggacactattctgaagatgctggaccgggcacttgaggtcaaggccttgctgaagtcaggggacaggtcgtttcgaccttttgaggggaagacaatggcaatgatatttacaaagccgtccatgagaacgcgtgtttcgttcgagactggctttacattgttaggtggccatgctatttatttaggacctgatgatatccaaatgggcaagcgagaggagactcgtgacattgctcgtgttttgtctcgctataatgacatcattatggctcgtgtttttgctcataaggacatacttgatcttgcaaaatatgcaactgtgccagtcatcaatgggttgacagactacaaccatccctgccagataatggctgatgcccttaccatggttgagcacattggtcggtttgaaggtacaaaggttgtctatgttggagatggaaataatattgttcactcatggttgttgatggcatctgtaattccgtttcactttgtctgtgcgtgtcctaaaggatttgaacctgatgcaaaaacagttgagaaggcaaggaaagctggaatcagcaagattgagataactaatgatcccaaagaggctgttaaaggagctgatgttgtgtattcagatgtctgggccagcatgggccaaaaggaagaagctgaataccggcgccaagcttttaaaggatttcaggtgaaccaaaatcttatggatttggctggttcaaaggcatttttcatgcattgcttaccggcggaaagaggggtggaggtgactgacgaagttattgaagctccaaattcaatagtcttcccgcaagctgagaaccgaatgcatgcacagaatgccgtaatgcttcatgtacttgccaagtagatagctgaatgaatgatcatctgaggtttttgagcaatattagcgtgcactcgcaatagttggttttaggccttcagctagtgaatacactttgcaacagttagtttttggcattcagctgtatgtatgttcggtctagtaagttggatttttgagttgcttcggtattattactagcaattgaaaaacaggtaaatcgtataaagatgctagtattgggttttctttttc

SEQ ID NO: 8058 - DNA, 962 bp, Glycine max; identical to SEQ ID NO: 7792
  Clone ID: 700732134_FLI

SEQ ID NO: 8059 - DNA, 1898 bp, Glycine max
  Clone ID: 700732183_FLI
cttaattattaacacttccttagttcaatatggggaagcccttcactctctctctttcttccctttgcttgctactcttgtcgagtgcatgctttgctattagctccagcaagctcaacgagtgccaactcaacaacctcaacgcgttggaacccgaccaccgcgttgagtccgaaggtggtttgattcaaacatggaactctcaacaccctgagctgaaatgcgccggtgtcactgtttccaaactcaccctcaaccgcaatggcctccacttgccatcttactcaccttatccccggatgatcatcatcgcccaagggaaaggagcacttggagttgcaattccaggatgtcctgagacgtttgaggagccacaagaacaatcaaacagaagaggctcaaggtcgcagaagcagcagctacaggacagtcaccagaagattcgtcacttcaatgaaggagacgtactcgtgattcctcctggtgttccttactggacctataacactggcgatgaaccagttgttgccatcagtcttcttgacacctctaacttcaataaccagcttgatcaaacccctagggtattttaccttgctgggaacccagatatagagtacccagagaccatgcaacaacaacaacagcagaaaagtcatggtggacgcaagcaggggcaacaccagcaggaggaagaggaagaaggtggcagcgtgctcagtggcttcagcaaacacttcttggcacaatccttcaacaccaacgaggacatagctgagaaacttcagtctccagacgacgaaaggaagcagatcgtgacagtggaaggaggtctcagcgttatcagccccaagtggcaagaacaacaagatgaagatgaagatgaagacgaagatgatgaagatgaacaaattccctctcaccctcctcgccgaccaagccatggaaagcgtgaacaagacgaggacgaggacgaagatgaagataaacctcgtcctagtcgaccaagccaaggaaagcgtgaacaagaccaggaccaggacgaggacgaagatgaagatgaagatcaacctcgcaagagccgcgaatggagatcgaaaaagacacaacccagaagacctagacaagaagaaccacgtgaaagaggatgcgagacaagaaacggggttgaggaaaatatctgcaccttgaagcttcacgagaacattgctcgcccttcacgcgctgacttctacaaccctaaagctggtcgcattagtaccctcaacagcctcaccctcccagccctccgccaattccaactcagtgcccaatatgttgtcctctacaagaatggaatttactctccacattggaatctgaatgcaaacagtgtgatctatgtgactcgaggacaaggaaaggttagagttgtgaactgccaagggaatgcagtgttcgacggtgagcttaggaggggacaattgctggtggtaccacagaacttcgtggtggcggagcaagccggagaacaaggattcgaatacatagtattcaagacacaccacaacgcagtcactagctacttgaaggatgtgtttagggcaattccctcagaggttcttgcccattcttacaaccttcgacagagtcaagtgtctgagcttaagtatgaaggaaattggggtcctttggtcaaccctgagtctcaacaaggctcaccccgtgttaaagtcgcataaatgacaagcatgatggtgtgaggatgaggccatcttatgaaataataacaaataaataaattttgtatgataataaaaagtatggcccatgtaccatcccagcgagcctatgtttatatctgagtggcgttgtacctttcaatcgccttaataaaatgtcagtcttcacgttttgtc

SEQ ID NO: 8060 - DNA, 1383 bp, Glycine max
  Clone ID: 700732184_FLI
ggcgcgtttcatttgatcagatcataacaatggtgtccgaaggcactctcctgggcatgggtaaccctctcctcgacatctccgccgtcgtcgatgaagacttcttaaaaaaatatgatatcacctcgaacaatgcgattcttgcggaggacaagcacaagcctatgtatcaagaattggctgagaaatataatgtggagtacattgctggaggtgccactcagaattcaatcaaggttgctcaatggatgctccaagttcctggtgcaacaagttacatgggtggcataggaaaggataagtttggggaagagatgaagaagaactcaaagcttgctggtgtaaatgttcactattatgaagatgaaactacacctactggaacttgtgctgtttgtatagttggtggtgaaaggtctcttgtggcgaacttagcagctgccaattgctacaagtctgatcatttgaagagaccagaaaattgggcactagttgaaaaggccaagtatatttatattgccggctttttcctcactgtatcaccagattccatccagttagttgctgagcattctgctgcaaataacaagatcttctcaatgaacctttctgctccttttatctgtgagtttttcagggatgtacaggagaaagctctaccgtatacggactttgttttcggaaatgagactgaagcaagaacattttctaaagttcatggctgggagactgataatgtcgaggagatagctgtaaagatttcccaatggccaaaggcatcaggaacacacaaaaggataacagttatcacacagggtgcggatcctatttgtgttgctgaggatgggaaggtgaaaaagttccctgtgaaacttttgcctaaagagaaactagttgatacaaatggagcaggagatgcatttgttggaggatttctttctcaattggttcaggagaagcccattgaagaatgtgtgagagctggctgttatgcagcaaatgttatcatccaaaggtctggctgtacgtacccagagaagcctgattttcattgagtgtttctctcggttctgttcccattatgaagttttgattgttaggaaaccttttgttgtatttcgatagttgcagtataacaactgcatttggattttttcaatcccgactggggaaagcggggaaaaagtttcagtgaaaggaaacaaataattaatctgttatattatagtactaccattagagatttagagcatcgtttcatatttttgctgagtttgttattgagtcttttttattcgatattaaaccttgttattgtgcttagactgatgtctaacttgtcacttggagtatcatttaacgacctattggttaagcaaggtt

SEQ ID NO: 8061 - DNA, 1209 bp, Glycine max
  Clone ID: 700732219_FLI
ttgtctttgaacactcatcaccatggccaagcttgttctttccctttgtttccttcttttcagtggctgcttcgctctgagagagcaggcacagcaaaatgagtgccagatccaaaagctgaatgccctcaaaccggataaccgtatagagtcggaaggtgggttcattgagacctggaaccctaacaacatattgagtggcttcgcccctgaattcttgaaagaagcgttcggcgtgaacatgcagatagtgagaaacctacaaggtgagaacgaagaggaggatagtggagccattgtgacagtgaaaggaggtctaagagtcacagctccagccatgaggaagccacagcaagaagaagatgatgatgatgaggaagagcagccacagtgcgtggagacagacaaaggttgccaacgccaaagcaaaaggagcagaaatggcattgatgagaccatttgcacaatgagacttcgccaaaacattggtcagaattcatcacctgacatctacaaccctcaagctggtagcatcacaaccgccaccagccttgacttcccagccctctggcttctcaaactcagtgcccagtatggatcactccgcaagaatgctatgttcgtgccacactacaccctgaacgcgaacagcataatatacgcattgaatgggcgggcattggtacaagtggtgaattgcaatggtgagagagtgtttgatggagagctgcaagagggaggggtgctgatcgttccacaaaactttgcggtggctgcaaaatcccagagcgataactttgagtatgtgtcattcaagaccaatgatagaccctcgatcggaaaccttgcaggggcaaactcattgttgaacgcattgccagaggaagtgattcagcacacttttaacctaaagagccagcaggccaggcaggtgaagaacaacaaccctttcagcttcctggttccacctcaggagtctcagaggagagctgtggcttagagagccctttttgcatgtgctaccacacttttgtccttttgggctctagctagtgctggtagcagtaaataagaatgaataaaagaaacaaaggcttagatgccctttgttaagtgtagaataacgggtatagtaactatgtacccttgtgtaatgagtcactcaagtacctatgcgggaaaagcataaataaaagaagaaattccaat

SEQ ID NO: 8062 - DNA, 635 bp, Glycine max
  Clone ID: 700732237_FLI
gcaatttctcttacatacattgcttcagaaaggatcattcctggatatggtggtggtatgagttctgcaaaagctgctttagaaagtgatacaagagtgcttgcttttgaagctggtagaaagaaaagaatcagagtcaatactatatctgcaggtccattgggaagccgtgcagcaaaagcaattggcttcattgacatgatgattgactattcgtttaccaatgcaccactgcagaaagaactacatgctgaggaggttggcaacactgctgctttcttgtcatcacccttggcatcagctatcacaggtgctgttatatatgttgacaatggtctaaacgccatgggggttggagttgacagtccaatatttaaagaacttgacattccaaaagagcatcattgaagtgcatagtatatctctacaccaactaaagatttatacggcctagtatgatgaaaaaaagctgaggaagttagtttttgcaatttcataaattagtaaacggttgtttgaactttgctaccattgattttcattaattactatccacttttcattatcctctacaaagtgtatcttaaccatttgaagagttatttataccttgaggttaaattattttagttctt

SEQ ID NO: 8063 - DNA, 1471 bp, Glycine max
  Clone ID: 700732264_FLI
ccttgctctatactacacagtacacacactagaagaataatggcttccatcctccactactttttagccctctctctttcttgctcttttcttttcttcttatccgactcagtcacccctacaaaaccaataaaccttgttgttctacccgttcaaaatgatggttccacagggctccattgggccaacctccaaaaaagaacccctctaatgcaagtaccagtcctggtggacctcaatggaaatcacttgtgggttaactgtgagcagcagtactcatccaaaacgtaccaagcacccttctgccactccacccaatgctctagagccaacacccaccaatgcctcagttgccccgcggcatcaaggccagggtgccacaaaaacacgtgtggcctcatgtccactaatcccatcacccaacaaaccggtttgggtgaactaggagaagacgttcttgcaatccacgccacacaagggtcgacccaacaacttggcccattggtcacagtcccacaattcctcttttcttgtgcaccttccttccttgttcaaaagggtcttcctagaaacactcaaggtgtggctgggttaggccatgcaccaatttctcttccaaaccaactcgcttcccactttggcctacaacgccaattcaccacttgcctttctcgctaccctacttcaaagggtgctataatattcggggatgcacctaacaacatgcgacagtttcaaaaccaagatattttccacgatttggccttcaccccattaaccatcaccctgcagggagagtacaacgtgagagtcaactcaataagaatcaaccagcacagtgtgttcccactgaacaagatatcatccaccatcgtagggtcgacctctggaggaaccatgattagcacctcaactcctcacatggttctccagcaatccgtgtaccaggctttcactcaggtgtttgctcagcagctgccaaagcaagcacaggtgaaatctgtggcaccatttgggttatgcttcaactccaacaagatcaatgcatatcctagcgtggaccttgtgatggacaagcccaatggtcctgtttggagaatctctggtgaggacttgatggtgcaggcacaacctggggtcacgtgtttgggtgttatgaatggaggaatgcaacctagagctgaaattaccttaggggcacgtcagttggaagagaacctggtggtgttcgatcttgcaaggtcaagggtcgggtttagcacctcatcactgcactcgcatggagtcaaatgtgctgacctcttcaactttgccaatgcatgatgagccaagatcgcgagactttttataatatgcttatttataattaagcaagcatctactacatgttatggttaataaaagtaataatgtaagaataaagactttgaactaaataataatatgaacgattctctttcgttgttcaatg

SEQ ID NO: 8064 - DNA, 938 bp, Glycine max
  Clone ID: 700732307_FLI
ctcttacacatacatagctagcttcaattcctcccatggcagacccacagcaacaagacaactacatgaagcgaaagccttccaattccaatgttctcgtcctcgccgccctcgtgcctttcggcgtctctcttctcatcctcgtcggcctcaccctctccgccaccgtcatcagcctcaccgtcgtcaccccactcttcgtcattttcagccccgtcttgctccccgcggccctattcatcgctctcgccgtcgccggcttcctcacatccggagtcttcggcatcacctccatctcttcctttgcttggttagccaccaatctccgccgctcacactcaccggaacacccgcaacgtcctcgggacgacgcggaccgcgtggcccagaaaaccgatgaagccgtgcgtcaggcccaggaaacagtccatcaggcccaaaaagagaccgcaaccaaggcccagaaagacattagtgaaacaagaaaagcccacaaagaaagcgtagcaacctcgtgagtgagtttgttcggttatgctatggccacgaaggagtcatgttcatgagggaggcttttgcttaatgcactcccaaattgtttcctgcacttcctatttcattatgaaaagttcattctgaaatgcaactcctattttggaataagcttttcataatacaacaggaagtgcagggagtaacaataggagtgcggaaagttttaacccatgaaggaaaagagggtttccttagtgtaactattctaaagcctgctttactgtggattgtgatgtcaaagtgttggtattagtatgtagtaaacctaaacctagtgtgttgtatgcaatagagtttaaatgcaatgcaatgcttatgctttccaattactgttacttaatttgtaaagtgtactacacttcaatttcaattttagttgattg

SEQ ID NO: 8065 - DNA, 1701 bp, Glycine max
  Clone ID: 700732312_FLI
tgtctttgaacactcatcaccatggccaagcttgttctttccctttgtttccttcttttcagtggctgcttcgctctgagagagcaggcacagcaaaatgagtgccagatccaaaagctgaatgccctcaaaccggataaccgtatagagtcggaaggtgggttcattgagacctggaaccctaacaacaagccattccagtgtgccggtgttgccctctctcgctgcacccttaaccgcaatgcccttcgtagaccttcctacaccaacggtccccaggaaatctacatacaacaaggtaatggtatttttggcatgatattcccgggttgtcctagcacttatcaagagccgcaagaatctcagcaacgaggacgaagccagaggccccaagaccgtcaccaaaaggtacatcgcttcagagagggtgatttgatcgcagtgcctactggtgttgcatggtggatgtacaacaatgaagacactcctgttgttgccgtttctattattgacaccaacagcttggagaaccagctcgaccagatgcctaggagattctatcttgctgggaaccaagagcaagagtttctaaaatatcagcagcagcagcaaggaggttcccaaagccagaaaggaaagcaacaagaagaagaaaacgaaggaagcaacatattgagtggcttcgcccctgaattcttgaaagaagcgttcggcgtgaacatgcagatagtgagaaacctacaaggtgagaacgaagaggaggatagtggagccattgtgacagtgaaaggaggtctaagagtcacagctccagccatgaggaagccacagcaagaagaagatgatgatgatgaggaagagcagccacagtgcgtggagacagacaaaggttgccaacgccaaagcaaaaggagcagaaatggcattgatgagaccatttgcacaatgagacttcgccaaaacattggtcagaattcatcacctgacatctacaaccctcaagctggtagcatcacaaccgccaccagccttgacttcccagccctctggcttctcaaactcagtgcccagtatggatcactccgcaagaatgctatgttcgtgccacactacaccctgaacgcgaacagcataatatacgcattgaatgggcgggcattggtacaagtggtgaattgcaatggtgagagagtgtttgatggagagctgcaagagggaggggtgctgatcgttccacaaaactttgcggtggctgcaaaatcccagagcgataactttgagtatgtgtcattcaagaccaatgatagaccctcgatcggaaaccttgcaggggcaaactcattgttgaacgcattgccagaggaagtgattcagcacacttttaacctaaagagccagcaggccaggcaggtgaagaacaacaaccctttcagcttcctggttccacctcaggagtctcagaggagagctgtggcttagagagccctttttgcatgtgctaccacacttttgtccttttgggctctagctagtgctggtagcagtaaataagaatgaataaaagaaacaaaggcttagatgccctttgttaagtgtagaataacgggtatagtaactatgtacccttgtgtaatgagtcactcaagtacctatgcgggaaaagcataaataaaagaagaaattccaataaattttctgtcc

SEQ ID NO: 8066 - DNA, 1726 bp, Glycine max
  Clone ID: 700732423_FLI
caacactacactagcaagcacacacctttagcacaatcaccaatggcttcttccgacagcaagcttcccctgaaacccatccctggaagctacgggcttcctttctttggacccatgagtgacagacatgactatttctacaaccaaggacgcgacaagttctttgccgaacgaattaaaaagtacaactctacggttatacgaaccaacatgccaccgggtcctttcatttcctctaatcctagagtcatcgctctcctcgacggtgtctccttccccattctattcgacaactccaaggtcgataagcgcgatgttctcgacggcaccttcatgccttccacctccttcaccggcggttaccgcgcgtgtgccttccaggacaccaccgaaccctcccacgcgctcctcaagcgcttctaccttaacttcctcgcctccaagcacgaaaccttcctcccactcttccgcaacaacctctccgaccacttctctgatctggaagacaagctggccggcaaatccggcaaggccagcttcaactcctccgtcggctccgccaccttcaacttcctcttccgtctcctctccgacaaagacccctccgaaaccataatcggctccgacggccccagcctggtccaaacctggctggcagctcagctggctcctctggccactctaggcttacccaggatcttcaactacgtggaggatttcttaatcaggtcaatcccctttccagcatggactgtcaaatccagctacaagaaactctacgaaggtctctcgacagcaggtactgcgattctggacgaagcggagcgcgtggggataaagagggacgaagcgtgccacaatcttgtgttcatgttatcgttcaacgcgcagggtgggttagtgaaccagtttccgattttgatcaagtggctaggactggctggggagggtttacacaagcagctcgcggaggagatcaggaccgttgttaaggacgaaggaggggtgagtctccgggcgttggatcagatgactttgaccaaatcagtggtgtatgaggtcctgaggatagagcccgcggtgccgttccagtacgcgaaggccagggaggatctggtggtggagagccacgatgcggcgtacgagatcaagaagggagagatgatcttcggatatcagccgttcgctaccaaggatccgaagatcttcgagaacgccgaggactttgtggcccacaggttccttggccacgacggggaaaagctcttgagacacgtcttgtggtccaacggaccccagacggaggagcccacaccggatgataaacagtgtcccgccaagaatctggtggtgctcatgtgcaggctctacttggtggaattcttcctgcgttacgacacgtttacgttcgattttaaaccagttgttctgggtcccgatgttaccatcaagtcactcgccaaggcttcttccttctgatcctcctcatcacctactctacctcaaacttaaaatcaatcttctttttaatgtgtattagttaattaataattaaataaaacaaagtaaatatatatattaaaagtaggatgtgcactggacagcacagcagtactcatgaattgccgcttgttgcattttgtgagagaggtgtgtacattatttgctacctgtaacttttgcagagtgctctctatatatataatgttaaagttttacttgtttt

SEQ ID NO: 8067 - DNA, 721 bp, Glycine max
  Clone ID: 700732485_FLI
gtagactgtgtggaagaaagcgaaggttgttacaatggatggcactatcaatcgttcgaatgggttttagaacatggtgggattgccactgatgatgattatccttacagagctaaagagggtagatgcaaagccaataagatacaagacaaggttacaattgacggatatgaaactctaataatgtcagatgagagtacagaatcagagacagagcaagcgttcttaagcgccatccttgagcaaccaattagtgtctccattgatgcaaaagattttcatttatacaccgggggaatttatgatggagaaaactgtacaagtccgtatgggattaatcactttgttttacttgtgggttatggttcagcggatggtgtagattactggatagcgaaaaattcatggggagaagattggggagaagatggttacatttggatccaaagaaacacgggtaatttattaggagtgtgtgggatgaattatttcgcttcatacccaaccaaagaggaatcagaaacactggtgtctgctcgcgttaaaggtcatcgaagagttgatcactctcctctttgagccgtaaaggttcaatacaacgagtgcttgttttcttagggacaagcattgtacttatgtatgattctgtgtaaccatgagtcttccacgttgtactaatgtgaagggcaaaaataaaacacagaacaagttcgtttttctc

SEQ ID NO: 8068 - DNA, 1577 bp, Glycine max
  Clone ID: 700732503_FLI
aaattccctttatttgtttattttcctatctctctctctccacataccaaaccccaagatcacttataaatacacagaaagagagtgaggaagttgccccagttgagtagtaagtgatgatggagatggattccatgtgtatgtgggtggtccttgtggccattgctggtgctcttttagtcctaagatctatgctcaagaatgtcttatgaagaacataaacgccttaggcgtttgacatcctcttcaatcaatggcatggaatcactgtccctctacttgacatatattgaagaaaatgtgaaaaattcattggagaaatgggccaacatgggacaaattgagttcttaactgagatcaggaagcttactttcaaaatcatcatgcatattttccttagctcagaaagtgaacctgttatggaggctttggagagggaatacacagcacttaatcatggagttagagccatgtgtattaatattcccggatttgcataccacaaagcattcaaggcaaggaaaaatctagtggccatatttcaatctattgtggatgagagaagaaacttaaggaagggatatctgccaggaaaagccaaagatatgatggatgctctgatagatgttgaagatgatgatggaagaaagttgagtgatgaggacatcattgacattatgttgatgtacttgaatgcgggccatgagtcttcaggacatattaccatgtgggcaacctttttcctgcagaagcacccagaatatctccaaaaggctaaggcagaacaagaagaaataataaggagaaggcctccaacacagaaagggttaacacttaaggaagtccgggagatggattttctttacaaggtgattgatgaaacattgcgtgtgattacattctcactagtggtctttcgggaggcaaaatctgatgtcaatatcaatggatacacaattccaaaaggttggaaagcgcttgtgtggttcagatcagttcaccttgatcctgaaatatatcctaatccaaaggaatttaacccttatagatggaataaagaacacaaggccggagaattccttccctttggaggaggaagtagattgtgtccggggaacgatcttgccaagatggaaatagcagtttttcttcaccatttccttctgaattaccgatttgaacagcataatcctaattgccctgtgagatacttaccacatacaaggcccatggacaattgcttgggaagggtcaggaaatgttcatctacaacaacctaagagcacatgtctatggctatttttaatttgaaaatccatctccatgttttccctcagctaaatgcttccaggtccactttgagctacgttggcatagcttcaacaaaatggacaaaaaaaggaaaaaaaaaagtttttcacagcacatacaaataagtataatttcgaaagctccatctaccaccctctttaagcactagctagtaagtcttccatctggtccatatgttctgaaaaatggacaaaaataactttgtttcattaggtatttgtttaaaggaaagaatctagtttct

SEQ ID NO: 8069 - DNA, 1262 bp, Glycine max
  Clone ID: 700732655_FLI
cttctcttctgtgtttcttagaagaattaagatggctaccttgactgtacctccagttcctccttcccccagagatgatgccatgcagctttaccgtgcttttaagggatttgggtgtgatacaagtgctgttatcaatatacttgctcatcgagatgctacacagcgtgcctacatccagcaagaatacaaagcaatgtattctgaggaactttccaagcgcttagcttcggagcttagtggaaagttagagactgcagttctgctctggttgcatgaccctgcaggacgtgatgcaacaatcattaggaagtctctaacagcagacaacaaaacccttgaaggtgctactgaagttatatgttcacgcactccatcgcagctacaatatttaaaacagatctatcattctatgtttggtgtttatcttgagcatgatattcaaacaaacaccagccccggcgatcatcaaaagctcttgcttgcatatataagcacacctcgtcatgagggccccgaggttaatagagaaattgctcagaaggatgcaaagggtctttacaaagcaggggagaagaaactgggaactgatgaaaagacttttatccacatattcagtgaacggagtgcggcgcatttggctgccgtcagttcttattaccatgacatgtatggtcattcactgaagaaggcagtaaagaatgaaacatctggggcctttgaacatgcacttttgacaataatccaatgtgctgttaatccaggaaagtattttgcaaaggtgttgcataaggcgatgaaaggcttggggactgatgattccacactcattagggtcgttgtgacaaggactgaggttgatatgcagtatatcaaagctgcatatttaaagaaacacaagaagactctgaacgatgaagtacactcagaaacatccagtcactacaggacttttcttctctcacttttgggccctaatcactagccaagatgttcaatgatgtaagtggaataaattcacccttgatgtgtaaatttgactgtttttagtgctttgtgatcaatgtagccgacaacttgtagaataaggcctttgttgttgttgttgttgttgtagtgctttgtgagtgttaatttatcagcctatagcacagatgaagatttgttgtgtattatttaagtatgcttaactattttcatttcttgtttcaacaaatcaaacattgacaatcaaatagaggttagagaagctactattttcc

SEQ ID NO: 8070 - DNA, 983 bp, Glycine max
  Clone ID: 700732741_FLI
attcaatgaagtcttcaagtcaattggtttgaatggtgtttatctatttttattggtggatgaccttgccaattttctcaggacttactcttctacagattttgtgggattcagtgttaccattcctcacaaggagacagcacttaagtgttgtgatgaggttgatccagtggctaagtcaataggagctgtgaattgcattgtaagaagaccaactgacgggaaattgattgggtataacactgattatgttggtgctattactgcaattgagaatgggttacgaggtaaacataatggtagtagcacaactatttctccattagctggtaagctgtttgttgttattggggctggtggtgctgggaaggcacttgcttatggtgcaaaagcaaaaggagctagggttgtgattgcaaaccgtacctatgaccatgccagaaaacttgcttatgcaattggaggagatgctttagcccttgctgatttagataattaccatccggaggatggtatgattcttgcaaacacaacatcaattggaatgcaacctaaagttgatgagacgcctgtttctaagcacgctttgaaatattactccctagtttttgatgctgtctacacgcccaagattactagactcttgaaagaagcagaagaatcaggagccactattgtaacaggattggagatgtttatggggcaagcatatggacaatatgagaatttcaccggattaccagcaccaaaggagctcttcagaaaaattatggaaaactattgaagagtgatcggttatctttgcaacacaatcaaagaatctaatggcgaggtactttaaagtgtttaggatgtgaatgaggaggtatcctccccgttctacttccaatttttcaaagtcttgttaattgaaatcaacaaatgattttgtatctcaattagagtgtatttggatagagaattttaactgaggagactaattt

SEQ ID NO: 8071 - DNA, 663 bp, Glycine max
  Clone ID: 700732754_FLI
caggatgtgaaatccaacaacatattggttgatgcagagtttgtggcataaattgcagattttggagttgccaaaatggttactggagtcagccaaaggacatgatcaatgtctgtgattgcaggatcctatggctacattgcaccagaatacgcgtacactcagggtgaatgagaagtgtgacatatatagctttggcgtggtccttttggagttagtaactggaagacccccaattgatccagagtatggtgaaagtgatttggtgaaatgggtttcctccatgttggaacatgaaggactggatcatgtgattgatcctacattggactccaaatacagggaagaaatcagcaaggtattgagcgtagggcttcattgtaccagctccatcccaataactcgccctacaatgagaaatgtggttaaaatgcttcaggaggtaacaacaattccaaaatgtagaagtgtaaacgatggaaacgttccatgtttccatgaaggggcatctcataatatcagtgaaatgaaatgtagtttgagcaataatgtgctcaaagttaatatattagacagcttaactttttctattgcattgtgagaagggtgaaatatttgaagacatcaacggctcaatatatatcatcttatttgacaagggtg

SEQ ID NO: 8072 - DNA, 1077 bp, Glycine max
  Clone ID: 700732853_FLI
caagcttaatctcgcatgcgctgctgttgctatgactcggggatctttggtcaaatctcaaaaccctgacagtggaccacaggcatctaatttttctgaagttggatcgcatgctaccttaaaaggatctggcccttttggaaatgatgatccctctaaattacaaaataaagatatcaaagcacaaattgggattccttcctcaccttccatgcaaaacaaatccgctgtcgtcgcaatgaggccaacaataagtggatcatcaggagaacaatcagatgatgaggaagcggaaggagagattaatatgactggaaacatgactcctgttgatgcaaaacgagtaaggaggatgctttctaatagggagtcagccagacgctcaagaagaagaaagcaggctcatttaactgagctggagacacaggtctcccaattaagaagcgaaaattcttctttgttaaagcgcttcacggatgtgagccagaaatacagtaatgctgcagttgacaacagagtactgaaagctgatgttgaaacattaagagcaaaggtgaagatggctgaagagacagtgaaaagaattactgggttgagcccaatgctccatgccatgactgagatgtcatcactgggaatgccattgtttgatgaaagtccttctgagacatcagctgatgctgctgttccagtgcaagaagacccaaatcatcacctttgtcaacccacttctaataatgggttgggaggcatttcttcaattgaaactgtgcagcagaatgttgcagcagtggtaggtggcaacaaaatggggagaacaacttccctgcatagagtggctagcctggaacatcttcagaagcggattcgtggtggtgcagattcacgtggaactccttctaattgagaacaataacataatagctaaatttacattatgctttccatgagggaattattccaaaactcttgtttctgctagttgtaagtaagagcaaattcttgttgacttgttgtaaatcaatttgatgtatgtgaatcttattgagcatattctgctggataatcctatttttc

SEQ ID NO: 8073 - DNA, 1890 bp, Glycine max
  Clone ID: 700732890_FLI
aacacttccttagttcaatatggggaagcccttcactctctctctttcttccctttgcttgctactcttgtcgagtgcatgctttgctattagctccagcaagctcaacgagtgccaactcaacaacctcaacgcgttggaacccgaccaccgcgttgagtccgaaggtggtttgattcaaacatggaactctcaacaccctgagctgaaatgcgccggtgtcactgtttccaaactcaccctcaaccgcaatggcctccacttgccatcttactcaccttatccccggatgatcatcatcgcccaagggaaaggagcacttggagttgcaattccaggatgtcctgagacgtttgaggagccacaagaacaatcaaacagaagaggctcaaggtcgcagaagcagcagctacaggacagtcaccagaagattcgtcacttcaatgaaggagacgtactcgtgattcctcctggtgttccttactggacctataacactggcgatgaaccagttgttgccatcagtcttcttgacacctctaacttcaataaccagcttgatcaaacccctagggtattttaccttgctgggaacccagatatagagtacccagagaccatgcaacaacaacaacagcagaaaagtcatggtggacgcaagcaggggcaacaccagcaggaggaagaggaagaaggtggcagcgtgctcagtggcttcagcaaacacttcttggcacaatccttcaacaccaacgaggacatagctgagaaacttcagtctccagacgacgaaaggaagcagatcgtgacagtggaaggaggtctcagcgttatcagccccaagtggcaagaacaacaagatgaagatgaagatgaagacgaagatgatgaagatgaacaaattccctctcaccctcctcgccgaccaagccatggaaagcgtgaacaagacgaggacgaggacgaagatgaagataaacctcgtcctagtcgaccaagccaaggaaagcgtgaacaagaccaggaccaggacgaggacgaagatgaagatgaagatcaacctcgcaagagccgcgaatggagatcgaaaaagacacaacccagaagacctagacaagaagaaccacgtgaaagaggatgcgagacaagaaacggggttgaggaaaatatctgcaccttgaagcttcacgagaacattgctcgcccttcacgcgctgacttctacaaccctaaagctggtcgcattagtaccctcaacagcctcaccctcccagccctccgccaattccaactcagtgcccaatatgttgtcctctacaagaatggaatttactctccacattggaatctgaatgcaaacagtgtgatctatgtgactcgaggacaaggaaaggttagagttgtgaactgccaagggaatgcagtgttcgacggtgagcttaggaggggacaattgctggtggtaccacagaacttcgtggtggcggagcaagccggagaacaaggattcgaatacatagtattcaagacacaccacaacgcagtcactagctacttgaaggatgtgtttagggcaattccctcagaggttcttgcccattcttacaaccttcgacagagtcaagtgtctgagcttaagtatgaaggaaattggggtcctttggtcaaccctgagtctcaacaaggctcaccccgtgttaaagtcgcataaatgacaagcatgatggtgtgaggatgaggccatcttatgaaataataacaaataaataaattttgtatgataataaaaagtatggcccatgtaccatcccagcgagcctatgtttatatctgagtggcgttgtacctttcaatcgccttaataaaatgtcagtcttcacgttttgtctt

SEQ ID NO: 8074 - DNA, 753 bp, Glycine max
  Clone ID: 700732904_FLI
catttgcacaatgagacttcgccaaaacattggtcagaattcatcacctgacatctacaaccctcaagctggtagcatcacaaccgccaccagccttgacttcccagccctctggcttctcaaactcagtgcccagtatggatcactccgcaagaatgctatgttcgtgccacactacaccctgaacgcgaacagcataatatacgcattgaatgggcgggcattggtacaagtggtgaattgcaatggtgagagagtgtttgatggagagctgcaagagggaggggtgctgatcgttccacaaaactttgcggtggctgcaaaatcccagagcgataactttgagtatgtgtcattcaagaccaatgatagaccctcgatcggaaaccttgcaggggcaaactcattgttgaacgcattgccagaggaagtgattcagcacacttttaacctaaagagccagcaggccaggcaggtgaagaacaacaaccctttcagcttcctggttccacctcaggagtctcagaggagagctgtggcttagagagccctttttgcatgtgctaccacacttttgtccttttgggctctagctagtgctggtagcagtaaataagaatgaataaaagaaacaaaggcttagatgccctttgttaagtgtagaataacgggtatagtaactatgtacccttgtgtaatgagtcactcaagtacctatgcgggaaaagcataaataaaagaagaaattccaat

SEQ ID NO: 8075 - DNA, 1563 bp, Glycine max
  Clone ID: 700732968_FLI
tgtaaagattatgcatctagagaacaacaaattgactggtccattgccatcttacttgggtagcttgccaagtttacaagcactgttcatacagaataactcatttagtggggtaataccatcaggattactgtctggaaaaatcattttcaactttgatgataatcctgaactacataaagggaacaagaagcattttcaattgatgctaggaatttctattggagtactagtgattctattaatattgttcttaacaagtttggtgctattgcttattctgcggagaaagacatctcaacagaaacgtgacgaaaagggtgtttctggacgcagcagcactaaacctttaactggatactcatttggtcgggatgggaatataatggatgaaggtactgcttactatattacactctcagagctgaaagaagctactaataatttttcaaagaatattggcaagggaagctttggatctgtttactatgggaaaatgaaagacggaaaagaggtggcagttaagactatgactgatccatccagctatgggaaccagcaatttgtaaatgaggtagccctcttatcaagaattcatcacagaaacttggttcctctgattggatattgtgaagaagaatatcagcatattctagtttatgaatatatgcacaatggcactttaagggagtacattcatgaatgttcgagtcagaagcaattagattggttagctcgccttcgaattgcagaagatgcagctaaaggtcttgaatacttacacacaggatgtaatcctagtatcattcaccgcgatgtgaagacaagcaatattcttcttgacatcaatatgagagcaaaagtgtctgactttggactctcaaggctagctgaagaagatttaactcacatatcaagtgttgcaaggggaactgtaggttacctggatcctgagtactatgcaaatcaacaattgactgaaaagagtgacgtgtacagttttggagttgttctgctggaattgctatcaggaaaaaaggctgtatcatcagaagactatggtcctgaaatgaatatcgttcactgggctagatctttaattcgtaaaggagatgtgataagcatcatggatccttcccttgtggggaatctgaaaactgagtcagtttggagggttgcagaaattgccatgcaatgtgtagaacaacatggtgcatgcaggccaaggatgcaagaggtaattttggctatacaagatgcttctaacattgaaaaggggacagaaagtcaactgaagctatcttcttcaggtggtaattcaaagccacagtcttcacgtaagactttacttgcaagctttcttgaaattgagagccctgacttgtcaaatagttgcctcccctcagccagataatttttctttttcttttttcatatcaaggtgggttttgtacattacttaatatcattactaatatgttaatactagtgacactcactgacttgtgacggtataatcttcaattcttagaacaaatcaacgaaagtgtaatattcttactc

SEQ ID NO: 8076 - DNA, 1457 bp, Glycine max
  Clone ID: 700732991_FLI
gaccgagctagctagctagcaagcaagcacagagatggaggcaaagcgaggccatgccctcatgtgcttggcacgtgtttcactcttcctctgcgctctaaccctatccgctgctcacggaagcaccacggttcaagacatcgcgagaaagttgaaactcggggacaacgagcttctgcgcacggagaagaagttcaaggttttcatggagaattacgggaggagctactccacagaggaggagtatttgcgccgtttggggattttcgcccagaacatggtcagagcggcggagcatcaggcgctggaccccaccgccgtccacggcgtcacgcagttctccgatctcaccgaggacgagtttgagaagctctacactggcgtcaatggcggcttcccgtcatcgaataatgccgccggcggtattgcgccgccgttggaggtggacgggctgccggagaattttgattggagagagaaaggagctgtcaccgaagttaagttacagggtagatgtggatcatgctgggctttcagcaccacaggatctatagaaggagccaattttcttgccaccggaaagctcgtcagtcttagtgaacaacagctccttgactgtgacaacaagtgtgacataacagaaaagacttcatgtgacaatgggtgtaatggaggtcttatgacaaatgcctacaattatttgctcgagtctggtgggttggaggaggagtcttcatatccctacactggggagagaggtgaatgcaagtttgatccagagaaaatagcagttaagatcacaaatttcaccaatatccctgctgatgagaaccaaattgccgcatatttagtaaaaaatggtccacttgctatgggcgtgaatgcaattttcatgcaaacatacattggtggtgtctcatgccctctcatatgtagcaagaaaaggctgaaccatggtgtgttacttgtgggatatggtgcaaaaggcttctcaattcttaggcttggcaacaaaccatactggatcatcaagaattcgtggggggagaaatggggagaagatggctattacaagctctgcagagggcatggcatgtgtggaataaacactatggtttctgctgcaatggtgcctcaaccacaaacaacacctacaaagaattatgcttcttattagctatgcacttaaggaaatctaaataaatatttttcattctaggtgatgtatcatgtatgtaccaaaatattttggtacgtaagtcttttaaaaagtttgcatctcctctttggttttccttagttctgaaagttatctcctaagaagacaatcatatgtactgtacgtagtgtgaagatatagtattgtatgctgcagaatatgattgtctaataaggtggactagctgtaataaaagatatttccaggttgaaaacagagcaaatcatgttaaagagct

SEQ ID NO: 8077 - DNA, 2166 bp, Glycine max
  Clone ID: 700733055_FLI
ttcatggcgaacccagaaaccgacgaagtgttcgcgaagctgagtttgcttcctctcagaaactcggaactcggtgctgactcggacggtgctggtggtgatgacgtggcagaaccttcttgttgtgaaaagcctgcgtctttcgctaagactctgactcagagcgacgccaacaatggtggggggttttcggttccgcggtactgcgcggagacaattttcccgcgtctggactacacggcggagccgccggtgcagacggtggtggcgaaagacgtgcacggcgagacctggaggttccggcacatctaccgagggacgccacgtaggcacttgctgaccacagggtggagcagtttcgtgaaccagaagaaactcgtggctggggattccgttgtgtttctgagggctgagaatggtgatttgtgtgttgggattcggagggcaaaaaagggaattagcgagggttcaggttcaggttcatcatctgtgtggagttcagcttctgggtctggaaatggaaattgtgggattgggccttatgggcctttttcttttttcttgaaagaagaaaacaaaatgttaaggaatggttgtggtgggaatttgagtggaagggtgaaagtgagggctgaggatgttgttgaagctgtgactcttgctgctagtaataagccttttgaggttgtgtattacccaagagctagtactcctgagttttgtgttaaggcttctgctgtgagggctgctatgaggattcagtggtgttctgggatgaggttcaagatggcctttgagactgaggatgcttcaaggataagttggttcatgggaaccattgcttctgttcaggttgttgaccccatccgctggcctaattccccttggaggcttcttcaggttacttgggatgagccagatttactacaaaatgtgaagcgtgttagcccgtggcttgttgagttggtatctaacattccactcattaatttcacacccttctctccaccaagaaagaagctgcggccacaacacccagacttcccccttgatgttcaatttccaataccaatgttttcaggcaaccagcttgggcctaacagccccttgtgtggtttttcggataatgctcctgcagggatacagggagccaggcatgctcaatttggaaaatctctatcagatctccaccttaacaataaactgcagttggggatgcttccaactaatatccatcaacttggagtgtataatgagatttcaaatggtaacatgatgaccaaccatgataagagcaaagaaagtttatcatgctttctgaccatggggaaatctaccaagagtttggagaaatctgatgatgttaagaaacaccagtttttgctttttggtcaaccaattctcactgagcaacaaatttctagctgttctggagatgtgttgtctcaccgaaaaagatcggtaagtgatgataaggacaaagcgaagtgccttatggatgactcgcaatctacactctcacagcagttttcaccaggaaaagcatcttctgctgagttctcttggcaacttggcttggatactggtcattgcaaagttttcttggagtcggaagatgtaggaaggaccctagacctatcgctgtttggttcttatgaagatctgtataggagacttgccatcatgtttgggattgaaaggtctgagattttgaaccatgtgctctaccatgatgcagctggtgctgctaagaaaaccggagaagaacccttcagtgacttcatgaagacagcaaaaagattgacaattctgacggattcaagcagcaaaaacattaaaagggcctttattacaggaactcgtaatggtgaacatggactagatgcatcaaacaaaacaggccctctgagcatatttgcttaaaatatgctatagatagcatctgagacattgttgagatctgagtagttgaaggacagtcctaactctatttacctctgcaaagactgaacatgagctgaatcttttatcatggttgttactattgtgtactaaaaacaatatctatcaaggttggcttagttgtttattagtgtacaaataatgatgccattatcatggtcaactgttattgtaatattaaccaagatttggaccccatttggc

SEQ ID NO: 8078 - DNA, 1396 bp, Glycine max
  Clone ID: 700733071_FLI
agcgaagagaatggctcccaagggtttaatctttttggctgtgttatgcttctcagcactgtcactgagtcgttgtcttgcggaggataatggacttgttatgaacttctacaaggaatcatgccctcaggctgaagacatcatcaaagaacaagtcaagcttctctacaagcgccacaagaacactgctttctcctggctcagaaacatcttccatgactgtgctgttcagagttgtgatgcttcactgttgctggactccacaagaaggagcttgtctgagaaggaaacagatagaagctttgggttgagaaatttcaggtacattgagaccatcaaagaagctttggaaagggaatgcccaggagttgtttcctgtgctgatatcctcgttctctctgccagagatggcattgtttcgctaggaggtccccatatccctcttaaaacaggaagaagggatggtagaaggagcagagccgatgtggtagagcagttcctcccagaccacaatgaatccatttctgcagttcttgacaagtttggtgccatgggaattgacacccccggcgtagttgcattgcttggagcacacagtgttggtcgaacccattgtgtgaagttggtgcaccgtttgtacccagagattgatccagctctgaaccctgaccacgtccctcacattctgaagaagtgccctgatgccattccagaccctaaggccgtgcagtacgtgagaaacgaccgtggcacccccatgattctagacaacaattactacagaaatatattggacaacaagggcttgttgatagtggatcaccaactagccaatgacaagaggaccaagccttatgtgaagaaaatggccaagagccaggactatttcttcaaggagttttctagagccattactttgctctctgagaacaaccctctcactggcacaaagggtgagatcagaaagcagtgcaatgctgccaacaagcaccatgaggagccttaattgcttcccgcttaatttgggccttgaattttcttccccttctctatgtggaagaaatctgtaagatattatgcaaaaaataattaaggtgtttttctttaaatgggttggttgattggttcaatgaaccgatcaagaccacagcaggttcatggggatgcgaggattaagacgctttgttttttaatcttccgatgtcactcttgtttgttagtttgtttttttattttttatttcaataagtactgtgcaagtaggttagagttgggtagaagggcatgttcatggtgttaattactatgttatgtatgcatgtgagtgctgctatcgatggcaagatgtcaatgtatgcgtgtagtgctgttatcgatgagagtgaaaatgtttatg

SEQ ID NO: 8079 - DNA, 1438 bp, Glycine max
  Clone ID: 700733146_FLI
tgcagaccgagctagctagctagcaagcaagcacagagatggaggcaaagcgaggccatgccctcatgtgcttggcacgtgtttcactcttcctctgcgctctaaccctatccgctgctcacggaagcaccacggttcaagacatcgcgagaaagttgaaactcggggacaacgagcttctgcgcacggagaagaagttcaaggttttcatggagaattacgggaggagctactccacagaggaggagtatttgcgccgtttggggattttcgcccagaacatggtcagagcggcggagcatcaggcgctggaccccaccgccgtccacggcgtcacgcagttctccgatctcaccgaggacgagtttgagaagctctacactggcgtcaatggcggcttcccgtcatcgaataatgccgccggcggtattgcgccgccgttggaggtggacgggctgccggagaattttgattggagagagaaaggagctgtcaccgaagttaagttacagggtagatgtggatcatgctgggctttcagcaccacaggatctatagaaggagccaattttcttgccaccggaaagctcgtcagtcttagtgaacaacagctccttgactgtgacaacaagtgtgacataacagaaaagacttcatgtgacaatgggtgtaatggaggtcttatgacaaatgcctacaattatttgctcgagtctggtgggttggaggaggagtcttcatatccctacactggggagagaggtgaatgcaagtttgatccagagaaaatagcagttaagatcacaaatttcaccaatatccctgctgatgagaaccaaattgccgcatatttagtaaaaaatggtccacttgctatgggcgtgaatgcaattttcatgcaaacatacattggtggtgtctcatgccctctcatatgtagcaagaaaaggctgaaccatggtgtgttacttgtgggatatggtgcaaaaggcttctcaattcttaggcttggcaacaaaccatactggatcatcaagaattcgtggggggagaaatggggagaagatggctattacaagctctgcagagggcatggcatgtgtggaataaacactatggtttctgctgcaatggtgcctcaaccacaaacaacacctacaaagaattatgcttcttattagctatgcacttaaggaaatctaaataaatatttttcattctaggtgatgtatcatgtatgtaccaaaatattttggtacgtaagtcttttaaaaagtttgcatctcctctttggttttccttagttctgaaagttatctcctaagaagacaatcatatgtactgtacgtagtgtgaagatatagtattgtatgctgcagaatatgattgtctaataaggtggactagctgtaataaaagatatttccaggttgaaaac

SEQ ID NO: 8080 - DNA, 1900 bp, Glycine max
  Clone ID: 700733187_FLI
cttaattattaacacttccttagttcaatatggggaagcccttcactctctctctttcttccctttgcttgctactcttgtcgagtgcatgctttgctattagctccagcaagctcaacgagtgccaactcaacaacctcaacgcgttggaacccgaccaccgcgttgagtccgaaggtggtttgattcaaacatggaactctcaacaccctgagctgaaatgcgccggtgtcactgtttccaaactcaccctcaaccgcaatggcctccacttgccatcttactcaccttatccccggatgatcatcatcgcccaagggaaaggagcacttggagttgcaattccaggatgtcctgagacgtttgaggagccacaagaacaatcaaacagaagaggctcaaggtcgcagaagcagcagctacaggacagtcaccagaagattcgtcacttcaatgaaggagacgtactcgtgattcctcctggtgttccttactggacctataacactggcgatgaaccagttgttgccatcagtcttcttgacacctctaacttcaataaccagcttgatcaaacccctagggtattttaccttgctgggaacccagatatagagtacccagagaccatgcaacaacaacaacagcagaaaagtcatggtggacgcaagcaggggcaacaccagcaggaggaagaggaagaaggtggcagcgtgctcagtggcttcagcaaacacttcttggcacaatccttcaacaccaacgaggacatagctgagaaacttcagtctccagacgacgaaaggaagcagatcgtgacagtggaaggaggtctcagcgttatcagccccaagtggcaagaacaacaagatgaagatgaagatgaagacgaagatgatgaagatgaacaaattccctctcaccctcctcgccgaccaagccatggaaagcgtgaacaagacgaggacgaggacgaagatgaagataaacctcgtcctagtcgaccaagccaaggaaagcgtgaacaagaccaggaccaggacgaggacgaagatgaagatgaagatcaacctcgcaagagccgcgaatggagatcgaaaaagacacaacccagaagacctagacaagaagaaccacgtgaaagaggatgcgagacaagaaacggggttgaggaaaatatctgcaccttgaagcttcacgagaacattgctcgcccttcacgcgctgacttctacaaccctaaagctggtcgcattagtaccctcaacagcctcaccctcccagccctccgccaattccaactcagtgcccaatatgttgtcctctacaagaatggaatttactctccacattggaatctgaatgcaaacagtgtgatctatgtgactcgaggacaaggaaaggttagagttgtgaactgccaagggaatgcagtgttcgacggtgagcttaggaggggacaattgctggtggtaccacagaacttcgtggtggcggagcaagccggagaacaaggattcgaatacatagtattcaagacacaccacaacgcagtcactagctacttgaaggatgtgtttagggcaattccctcagaggttcttgcccattcttacaaccttcgacagagtcaagtgtctgagcttaagtatgaaggaaattggggtcctttggtcaaccctgagtctcaacaaggctcaccccgtgttaaagtcgcataaatgacaagcatgatggtgtgaggatgaggccatcttatgaaataataacaaataaataaattttgtatgataataaaaagtatggcccatataccatcccagcgagcctatgtttatatctgagtggcgttgtacctttcaatcgccttaataaaatgtcagtcttcacgttttgtctt

SEQ ID NO: 8081 - DNA, 1690 bp, Glycine max
  Clone ID: 700733269_FLI
attgtctttgaacactcatcaccatggccaagcttgttctttccctttgtttccttcttttcagtggctgcttcgctctgagagagcaggcacagcaaaatgagtgccagatccaaaagctgaatgccctcaaaccggataaccgtatagagtcggaaggtgggttcattgagacctggaaccctaacaacaagccattccagtgtgccggtgttgccctctctcgctgcacccttaaccgcaatgcccttcgtagaccttcctacaccaacggtccccaggaaatctacatacaacaaggtaatggtatttttggcatgatattcccgggttgtcctagcacttatcaagagccgcaagaatctcagcaacgaggacgaagccagaggccccaagaccgtcaccaaaaggtacatcgcttcagagagggtgatttgatcgcagtgcctactggtgttgcatggtggatgtacaacaatgaagacactcctgttgttgccgtttctattattgacaccaacagcttggagaaccagctcgaccagatgcctaggagattctatcttgctgggaaccaagagcaagagtttctaaaatatcagcagcagcagcaaggaggttcccaaagccagaaaggaaagcaacaagaagaagaaaacgaaggaagcaacatattgagtggcttcgcccctgaattcttgaaagaagcgttcggcgtgaacatgcagatagtgagaaacctacaaggtgagaacgaagaggaggatagtggagccattgtgacagtgaaaggaggtctaagagtcacagctccagccatgaggaagccacagcaagaagaagatgatgatgatgaggaagagcagccacagtgcgtggagacagacaaaggttgccaacgccaaagcaaaaggagcagaaatggcattgatgagaccatttgcacaatgagacttcgccaaaacattggtcagaattcatcacctgacatctacaaccctcaagctggtagcatcacaaccgccaccagccttgacttcccagccctctggcttctcaaactcagtgcccagtatggatcactccgcaagaatgctatgttcgtgccacactacaccctgaacgcgaacagcataatatacgcattgaatgggcgggcattggtacaagtggtgaattgcaatggtgagagagtgtttgatggagagctgcaagagggaggggtgctgatcgttccacaaaactttgcggtggctgcaaaatcccagagcgataactttgagtatgtgtcattcaagaccaatgatagaccctcgatcggaaaccttgcaggggcaaactcattgttgaacgcattgccagaggaagtgattcagcacacttttaacctaaagagccagcaggccaggcaggtgaagaacaacaaccctttcagcttcctggttccacctcaggagtctcagaggagagctgtggcttagagagccctttttgcatgtgctaccacacttttgtccttttgggctctagctagtgctggtagcagtaaataagaatgaataaaagaaacaaaggcttagatgccctttgttaagtgtagaataacgggtatagtaactatgtacccttgtgtaatgagtcactcaagtacctatgcgggaaaagcataaataaaagaagaaattccaat

SEQ ID NO: 8082 - DNA, 744 bp, Glycine max
  Clone ID: 700733382_FLI
gggaggggtgctgatcgttccacaaaactttgcggtggctgcaaaatcccagagcgataactttgagtatgtgtcattcaccagccttgacttcccagccctctggcttctcaaactcagtgcccagtatggatcactccgcaagaatgctatgttcgtgccacactacaccctgaacgcgaacagcataatatacgcattgaatgggcgggcattggtacaagtggtgaattgcaatggtgagagagtgtttgatggagagctgcaagagggaggggtgctgatcgttccacaaaactttgcggtggctgcaaaatcccagagcgataactttgagtatgtgtcattcaagaccaatgatagaccctcgatcggaaaccttgcaggggcaaactcattgttgaacgcattgccagaggaagtgattcagcacacttttaacctaaagagccagcaggccaggcaggtgaagaacaacaaccctttcagcttcctggttccacctcaggagtctcagaggagagctgtggcttagagagccctttttgcatgtgctaccacacttttgtccttttgggctctagctagtgctggtagcagtaaataagaatgaataaaagaaacaaaggcttagatgccctttgttaagtgtagaataacgggtatagtaactatgtacccttgtgtaatgagtcactcaagtacctatgcgggaaaagcataaataaaagaagaaattccaat

SEQ ID NO: 8083 - DNA, 1691 bp, Glycine max
  Clone ID: 700733405_FLI
cattgtctttgaacactcatcaccatggccaagcttgttctttccctttgtttccttcttttcagtggctgcttcgctctgagagagcaggcacagcaaaatgagtgccagatccaaaagctgaatgccctcaaaccggataaccgtatagagtcggaaggtgggttcattgagacctggaaccctaacaacaagccattccagtgtgccggtgttgccctctctcgctgcacccttaaccgcaatgcccttcgtagaccttcctacaccaacggtccccaggaaatctacatacaacaaggtaatggtatttttggcatgatattcccgggttgtcctagcacttatcaagagccgcaagaatctcagcaacgaggacgaagccagaggccccaagaccgtcaccaaaaggtacatcgcttcagagagggtgatttgatcgcagtgcctactggtgttgcatggtggatgtacaacaatgaagacactcctgttgttgccgtttctattattgacaccaacagcttggagaaccagctcgaccagatgcctaggagattctatcttgctgggaaccaagagcaagagtttctaaaatatcagcagcagcagcaaggaggttcccaaagccagaaaggaaagcaacaagaagaagaaaacgaaggaagcaacatattgagtggcttcgcccctgaattcttgaaagaagcgttcggcgtgaacatgcagatagtgagaaacctacaaggtgagaacgaagaggaggatagtggagccattgtgacagtgaaaggaggtctaagagtcacagctccagccatgaggaagccacagcaagaagaagatgatgatgatgaggaagagcagccacagtgcgtggagacagacaaaggttgccaacgccaaagcaaaaggagcagaaatggcattgatgagaccatttgcacaatgagacttcgccaaaacattggtcagaattcatcacctgacatctacaaccctcaagctggtagcatcacaaccgccaccagccttgacttcccagccctctggcttctcaaactcagtgcccagtatggatcactccgcaagaatgctatgttcgtgccacactacaccctgaacgcgaacagcataatatacgcattgaatgggcgggcattggtacaagtggtgaattgcaatggtgagagagtgtttgatggagagctgcaagagggaggggtgctgatcgttccacaaaactttgcggtggctgcaaaatcccagagcgataactttgagtatgtgtcattcaagaccaatgatagaccctcgatcggaaaccttgcaggggcaaactcattgttgaacgcattgccagaggaagtgattcagcacacttttaacctaaagagccagcaggccaggcaggtgaagaacaacaaccctttcagcttcctggttccacctcaggagtctcagaggagagctgtggcttagagagccctttttgcatgtgctaccacacttttgtccttttgggctctagctagtgctggtagcagtaaataagaatgaataaaagaaacaaaggcttagatgccctttgttaagtgtagaataacgggtatagtaactatgtacccttgtgtaatgagtcactcaagtacctatgcgggaaaagcataaataaaagaagaaattccaat

SEQ ID NO: 8084 - DNA, 831 bp, Glycine max
  Clone ID: 700733463_FLI
attctcccatttcctctcagaaccctcgatcactcccacgcgctcctatatcctctccttcaccgtcgctctctccaacgatcacaacaacatcgtcatcccatggcaaacgccgcatctggtatggcagtccatgatgactgcaagttaaggtttttggagctgaagacaaagaggacacaccgtttcatagtttttaagattgaggagcagcagaagcaggtcattgtggagaagcttggtgagccagcccaaggctatgaagatttcactgccagccttcctgctgatgagtgccgttatgctgtttatgattttgagtatctgactgaagggaatgtccctaaaagcagaatttttttcattgcatggtcccctgacacatcaagggtgaggagcaagatgatctatgcaagctccaaagacagattcaagagggagctggatggaattcaagtagagctgcaagcaactgatcctactgagatgggtcttgatgtgttcaaaagccgggccaactaaaatgattatagaaaatagtaggctttctggtgggagcagcactccttaagccttagttactcatggaaaatatcctagtttgtgggatggtcaacttgggtagttatggtcccaaactctctcaattttccaagttgtggcataaattctattgcaccttttaacaagctttgcttgttccagtgtgttttattatgatttgtgatttatacaaccttgcgtttgagtgccattttagtcgtcttatcccttactagttgaatttgtaactgtttgtgttatcagacaaaaaatggggtttcttcactt

SEQ ID NO: 8085 - DNA, 952 bp, Glycine max
  Clone ID: 700733488_FLI
atggaaagcgtgaacaagacgaggacgaggacgaagatgaagataaacctcgtcctagtcgaccaagccaaggaaagcgtgaacaagaccaggaccaggacgaggacgaagatgaagatgaagatcaacctcgcaagagccgcgaatggagatcgaaaaagacacaacccagaagacctagacaagaagaaccacgtgaaagaggatgcgagacaagaaacggggttgaggaaaatatctgcaccttgaagcttcacgagaacattgctcgcccttcacgcgctgacttctacaaccctaaagctggtcgcattagtaccctcaacagcctcaccctcccagccctccgccaattccaactcagtgcccaatatgttgtcctctacaagaatggaatttactctccacattggaatctgaatgcaaacagtgtgatctatgtgactcgaggacaaggaaaggttagagttgtgaactgccaagggaatgcagtgttcgacggtgagcttaggaggggacaattgctggtggtaccacagaacttcgtggtggcggagcaagccggagaacaaggattcgaatacatagtattcaagacacaccacaacgcagtcactagctacttgaaggatgtgtttagggcaattccctcagaggttcttgcccattcttacaaccttcgacagagtcaagtgtctgagcttaagtatgaaggaaattggggtcctttggtcaaccctgagtctcaacaaggctcaccccgtgttaaagtcgcataaatgacaagcatgatggtgtgaggatgaggccatcttatgaaataataacaaataaataaattttgtatgataataaaaagtatggcccatgtaccatcccagcgagcctatgtttatatctgagtggcgttgtacctttcaatcgccttaataaaatgtcagtcttcacgttt

SEQ ID NO: 8086 - DNA, 1208 bp, Glycine max
  Clone ID: 700733495_FLI
ggagaattcccgtatactgcaaatgaaggtcctgtcaatcttatgttgcagatcctggatgatccatcaccatcaccattgaaaaacaagttttcacctgaattctgctcttttgttgatgcttgcttacaaaaggatccagatactaggccaacagcagagcagctgctttcgcacccctttatcacaaagcatgatgatgccaaggttgatttggcaggatttgttcgaagcgtttttgatcctacacaaagattgaaggatttagcagatatgttgacaatacattattacttgctatttgatggacctgatgatttgtggcaacatacaaagaatttatatagcgaaagctcaattttcagtttctctgggaaacaacattgtggtccaagtaatatctttacatctctatcaagtattagaactacattagttggtgactggcctcctgaaaagttggtgcatgttgttgagaggctccaatgccgcgctcacggtgaagatggagttgcaattagggtatcgggatccttcataattggaaatcagttcctcatatgtggagatggcattcaagtagagggcttgccaaacttcaaggatcttggaattgacattcctagcaaaagaatgggtatatttcatgaacaattcattgtggaaccaaaaagccttattggatgctacaccattgtcaaacaagagctatacattaaccaataaccagtaatgttatattacattatggtgtcacttggtcacacaattcgacacacataacaccaagaatcttgattttcacagaatcctgttctcccacgtgtaaaaacttacaaatttgccatgtatccattttttgaaaaattgtttatagtgatatgaattcatttaaatttagcatttgattttgttacaactactttagtacttcctcttgcttctgttgagcaaacagcagatatctttaccaaagcttgttgcctaggctctttcagtcctttctatccaagctgggcatggttgacatttatcaaccctaaactcacggtggtggggctgttacctgatacgttgccacgtgtatcagttagttaaaacagttaattagatgcgcatgtatctgttaatagttagctctttgtatataaaccaagtttgtaccattactgactcattcattcagattttaatgaatcagttttctc

SEQ ID NO: 8087 - DNA, 2704 bp, Glycine max
  Clone ID: 700733503_FLI
catagtagtgttggtgggttgcaaagatgcttgggggtcttctccataggggtcataagataaaagggacagtggtgttgatgcgcaagaatgtgttggacgtgaatagcgtaaccagcgttgggggaattattggtcaagccaacggaaaagggaaacttggaaaggctacctttttggaaggtatcattacttcattgccaactttgggagcaggccaatctgcattcaaaattaattttgaatgggatgatgggagtggaattcctggagcattttatatcaagaattttatgcaaactgagtttttccttgtgagtttgactcttgaagacattccaaaccatggaagcatccactttgtttgcaattcgtggatttacaatgccaaactcttcaaaagtgaccgcattttctttgccaaccagacatatcttccaagtgagacaccagctccactagtcaaatatagagaagaagagttgcataatttaagaggagatggaactggagaacgcaaagagtgggaaaggatctatgattatgatgtctacaatgatttaggtgatccggataaaggtgaaaatcatgcccgtcctgttcttggaggaaatgacacctttccttatcctcgtagggggagaactggtagaaaaccaacaaggaaagatcctaatagtgagagtaggagcaatgatgtttatcttccaagagatgaggcttttggacacttgaagtcatctgactttcttacttatggactaaaatccgtatctcaaaatgttcttccattattgcaatctgcttttgatttgaatttcacaccccgtgagtttgatagctttgatgaagttcatggactctattcaggcggaattaagctgccaacagatataatcagcaagattagtccactacccgtgcttaaggaaatcttccgaactgatggtgaacaggcccttaagtttcctcctcctaaagtaattcaagtgagtaagtctgcatggatgactgatgaagaatttgcaagagaaatgcttgctggtgtaaatccaaacttgattcgttgtcttaaggagttccctccacgaagcaagctagatagccaagtctatggtgatcatactagtcaaataaccaaagaacacctagagcccaacttagaagggctcactgtagatgaggcaattcaaaacaagagattgttcctactagatcatcatgacccaatcatgccatatttgaggcgaataaatgcaacctccacaaaggcttatgctaccagaaccatccttttcctgaaaaatgacggaactttaagaccacttgccatagagttgagtttgccacatcctcagggagatcaatctggtgcttttagtcaagtttttctgcctgcagatgaaggtgttgaaagttctatttggctgctagcaaaggcttatgtagttgtgaatgactcgtgctatcatcaacttgtcagccattggttaaacactcatgcagttgttgagccattcatcatagcaacaaacaggcatctcagtgttgttcaccctatttataaactccttcaccctcactatcgtgacaccatgaacataaatggccttgctcggttatcactggtcaacgacggtggcgttatagaacaaacatttttgtggggaaggtattctgtggaaatgtctgctgtagtttacaaggattgggtttttacagatcaagcattgcctgctgatcttataaaaagaggaatggcaattgaggatccatcgtgccctcatggcattcgccttgtgatagaggactacccttatgctgttgatggacttgagatatgggatgctatcaagacatgggtccatgaatacgttttcttgtactacaaatcagatgacacacttagagaagatcctgaactccaagcctgctggaaagaactcgtagaggtgggtcatggagacaagaaaaatgagccatggtggcctaagatgcaaactcgtgaagagctagttgaagcttgcgctatcatcatatggactgcttcagcacttcatgcagctgttaattttggacagtatccctatggaggtttaatcttaaaccgtccaactcttagtaggcgattcatgcctgagaaaggttctgctgagtatgaggagctgaggaagaatccccagaaggcttacttgaagactattacaccaaagtttcagacccttattgacctttctgttatagaaatcttgtcaaggcatgcatctgatgaggtgtaccttggggagagggacaatccaaattggacatctgatacaagagcgttagaggcttttaaaaggtttggaaataaactggcacaaattgagaataaactctcagagagaaacaacgatgagaaactgagaaaccgttgtggaccagttcaaatgccttatactctgcttttgccttctagtaaggaaggattaactttcagaggaattcccaacagtatctctatctgaagaggtttgtggttccttaagttttgtggctttgaataaaagatagaagagaaggaatctgaatttcttcatccaacctgcacatggtaatctagtgtgtttgagtgctttcatgtttggctttaataaaataaaagcagttgttttgtaaaatgttcagaatcaataaaagcatttactgctttgctttgtgcgct

SEQ ID NO: 8088 - DNA, 1478 bp, Glycine max
  Clone ID: 700733554_FLI
tcaaaccttgctctatactacacagtacacacactagaagaataatggcttccatcctccactactttttagccctctctctttcttgctcttttcttttcttcttatccgactcagtcacccctacaaaaccaataaaccttgttgttctacccgttcaaaatgatggttccacagggctccattgggccaacctccaaaaaagaacccctctaatgcaagtaccagtcctggtggacctcaatggaaatcacttgtgggttaactgtgagcagcagtactcatccaaaacgtaccaagcacccttctgccactccacccaatgctctagagccaacacccaccaatgcctcagttgccccgcggcatcaaggccagggtgccacaaaaacacgtgtggcctcatgtccactaatcccatcacccaacaaaccggtttgggtgaactaggagaagacgttcttgcaatccacgccacacaagggtcgacccaacaacttggcccattggtcacagtcccacaattcctcttttcttgtgcaccttccttccttgttcaaaagggtcttcctagaaacactcaaggtgtggctgggttaggccatgcaccaatttctcttccaaaccaactcgcttcccactttggcctacaacgccaattcaccacttgcctttctcgctaccctacttcaaagggtgctataatattcggggatgcacctaacaacatgcgacagtttcaaaaccaagatattttccacgatttggccttcaccccattaaccatcaccctgcagggagagtacaacgtgagagtcaactcaataagaatcaaccagcacagtgtgttcccactgaacaagatatcatccaccatcgtagggtcgacctctggaggaaccatgattagcacctcaactcctcacatggttctccagcaatccgtgtaccaggctttcactcaggtgtttgctcagcagctgccaaagcaagcacaggtgaaatctgtggcaccatttgggttatgcttcaactccaacaagatcaatgcatatcctagcgtggaccttgtgatggacaagcccaatggtcctgtttggagaatctctggtgaggacttgatggtgcaggcacaacctggggtcacgtgtttgggtgttatgaatggaggaatgcaacctagagctgaaattaccttaggggcacgtcagttggaagagaacctggtggtgttcgatcttgcaaggtcaagggtcgggtttagcacctcatcactgcactcgcatggagtcaaatgtgctgacctcttcaactttgccaatgcatgatgagccaagatcgcgagactttttataatatgcttatttataattaagcaagcatctactacatgttatggttaataaaagtaataatgtaagaataaagactttgaactaaataataatatgaacgattctctttcgttgttcaatgag

SEQ ID NO: 8089 - DNA, 486 bp, Glycine max
  Clone ID: 700733562_FLI
gcccatgcagagcattgatacgatcatgcagataatttcagaagctaccatacccgctgcagggacctattctttagaccagtttatggctgataacataatagatgatgacatggatgaattagactccgactttgagcttgatgtagatagcagtggggagatagtgtatgccatataatttaatcatcgtctgcattttagagacagcataatgaaagtacagcatcttaatattcaacacgacgatctcccttaatttaatcatggaaaaagaaatgtgtggagatcgtatttcctgtaagattggatgatacacaaagttcatcatgttaatttgtatgttgtatgcttcttggaactgccgaggaagggaacatgattcttactctctagaagacttggtggctgagaaatcataactacccttccctcttctcctgttgaatacttgttatatatatatatatatacacacattaggct

SEQ ID NO: 8090 - DNA, 735 bp, Glycine max
  Clone ID: 700733616_FLI
attctacatccattgtgatggggctttgtttggtctcatgatgcctttcgtgaaactagctccaaaagttacttttaagaagcctattggcagtgttagtgtttctggccacaaatttgtagggtgtcccatgccttgtggtgtgcagataacaagattggagtatgtaaatgctcttgccagggatgtggaataccttgcttctagggatgccacgatcatgggtagtcggaatggccatgctcccatattcctttggtataccttgaatcggaaaggatatagaggttttcagaaagaagtacagaaatgcttgcgaaatgcccactacttcaaaggccgccttgttgaggctgggattggtgcaatgcttaatgaactgagcagcacggttgtgtttgagaggccacatgatgaggaatttatacgcaagtggcagttagcatgcaaagggaatatcgcacatgtggtggtgatgccaaacatcactattgagaagcttgatgattttctgaacgagcttctggacaagcgtgctacctggtttcaagatggaaaggatcaaccttactgtatatcatcagatgtaggtgaaaagaattgcctttgtgctttgcacaagtaattgcagcatcccatctagagtttactgctgtagttggtttttggagtgtttatgcagttacgtcactatgttctatcaggattttgatgcaattaataacatttagaatc

SEQ ID NO: 8091 - DNA, 282 bp, Glycine max
  Clone ID: 700733738_FLI
attttattataatgcataaaaatgcactctcctataaattattaagtgtgctttcatatgatttttaataatttttttttaattttttaaccagattttaggacactggttaacaagattctttttgttttattctctatgctgatactctctttcctaatttgatgatggaatggaattttatctagttcggttgtcccaactagaacattactaagttacataaagatgagagaaaaagagaagaaaaactagagtttgatacactcattgtctggttgc

SEQ ID NO: 8092 - DNA, 1671 bp, Glycine max
  Clone ID: 700733752_FLI
ggcaaaggagcttccagatgattactttgttgttctggtcggagacatgatcacagaggaagccctgcctacttaccaaacaatgttaaatactttggatggagttcgtgatgaaacaggtgccagccttacttcctgggcaatttggacaagggcatggactgctgaagaaaacagacacggtgatcttcttaacaaatatctttacttgagtggtcgagttgacatgaaacaaattgaaaagacaattcagtaccttattgggtctggaatggtaagatcctatacaactgtagtctattttggtcttccgcaatggtagttttattaatgaatcacacaatcatgcaatgtcaaagaaactcttgctacccatttatggatactttatttgtttgagagggtggggggataactgcctgaaatataaattttattgattaattcctctggatgcattaatgtgtcactgtcagcaactttcatattcacatgaatgtctttaaactattgaaggatcttcacagaatgaagggctagatttcaaagaatacgatgacactttcctgaaattcattattaaaatagattattatgttgctctgaagttattacactaattgattcttcatagctgctgcttttgtcactttttgagtattgacctttcttgactgattgaaattgatggataggatcctcgaaccgagaacagcccctaccttggtttcatttacacttcatttcaagagagggcaaccttcatatcccacggaaacacagccaggcttgctaaggagcacggcgatataaagttggcccagatctgcggcatgattgcctcagatgagaaacgccatgagactgcatacacgaagatagtggaaaagctatttgaggtcgatcctgacggtacagttatggcgtttgccgacatgatgaggaagaagattgccatgccagcacacctcatgtatgacggccgtgatgacaacctgtttgatagctactcttcggtcgcgcagcgcattggggtctacaccgccaaggactatgctgacatacttgagtttctggtggggaggtggaaggtggagcagctaactggactttcaggcgagggaagaaaggctcaagaatacatttgcgggctgccgccaagaatcagaaggttggaggagagagctcaagcaagagtcaaggagtcgtcaacacttaaattcagttggattcatgacagggaagtactactctaaatgcaccaagggaggagcatggtgaaatcttccggcaataccgttctgagaaatgttgaatagttgaaaattcagtttgtcatttttatcttttatttttcctccttttttggtctttgttatatgtcactgtaaggtgaagcagttgttcttgcatggttcgcaagttaagcagttaggggcagctgtagtattagaaatggtatttttttttttttttgtttcgcttttctctgtggtagtgatgtctgtcgaagtataagtaaacgtttttttttctctggcaattttgatgataaagaaaatttagttcttctgtggttggttcaattttgccatcgggtaactgaaatatatgctttactaggtaattttgttgtgtatcattctgaaatatatggtttgttactatgtt

SEQ ID NO: 8093 - DNA, 524 bp, Glycine max
  Clone ID: 700733778_FLI
cttagacaatctccatggatgccagttttcaccttgtgatgctattttgcaaatgcaattgatgcgacatcggtgatctatacaagtggtgcagggattagagttttgaagttagatggaaggtttgtgtgagctagcatccgatgttcatcttcctatataggcagccaggagttatctgcagatcgccctgaggaagaggagctatctcttgcctttttaaaagatgcttcaaataaatatattcagttccaagtatacataaagaattaaataaaggcatcaatcatgttgatgtactagtggtgtaatataaaacaatttggactgttaatttttataaccctatattaggagtgtatttcaagccataaagttatgattataccagaaagattttccaagtgtggtgaggagttggacagagctttggtcctcatgtaaaaatgtgatcataaagcatttgatatgaaacataatgtcttggaagcatttgttccacaacatggtggacattaagatcc

SEQ ID NO: 8094 - DNA, 879 bp, Glycine max
  Clone ID: 700733889_FLI
gttctgcaagtgaaggaattattattagtgttagccctaaacttcaccttcaaccatgaccacagtgccaccacacagtgtccaagtgcacacaacaacacaccgctacgaagccggcgtcgtcccgccggctcgttttgaggcgccgcgttacgaagccggcatcctcctgctcctggcaggactgaccctggctggaactctcaccgggctggtggtggcaacaccgctcttcatcatcttcagcccggtgctgattccggccacggtcgcaattggcctggccgtggccgggttcctgacgtcgggagtctttgggctcacggcgctgtcgtccttctcctggatcctgaactacatccgggagacccagccggcgtcggagaatctggccgctgcggcgaagcaccatctggcggaggcggcggagtacgtggggcagaagaccaaagaagtagggcagaaaaccaaggaagttgggcaggattcagagcaaggcacaagatacaagggaagcagctgcaagagatgcaagagatgcaagggaagcagctgcaagagatgcaagggatgcaaaggtggaggcgagagatgtaaagagaacaacagtgacagcaacaaccgcaaccgcatgaacgtgatgagtattaatgtgttgttatgaacttatgatgttggtttatgtggggaaataaatgatgtatgtacctcttcttgcctatgtagtaggtttgggtgttttgttgtctagctttgcttatttagtaattagtagaagggacgttcgttcgtgtctcataaaaaggggtactaccactctggcaatgtgatttgtatttgatgaattcaatgtgaaatgtgttttgcgttggtgtatgt

SEQ ID NO: 8095 - DNA, 934 bp, Glycine max
  Clone ID: 700733917_FLI
tcctacgtggtgttaattttattcagattcctaccactgtgatggcccaggtcgattcttcagttggtggcaaaactgggatcaatcaccgccttgggaagaacctgattggtgccttttaccaacctcagtgtgtgctaatagacacggacacattaaatacgttgccggatagggaactggcatcagggcttgcagaggttataaagtatgggctcattagggatgcagagttttttgagtggcaagagaaaaatatgcacttattactggcaagagatcctagtgcaatggcatatgctataaagcgatcttgtgaaaacaaggctgaggttgtgtccttagatgagaaggaaagtggactgagggcaacattgaacttgggtcatacatttggtcatgcaatagaaactggggttggctatgggcagtggcttcatggagaggctgttgcagctggcacggtaatggctgttgacatgtcatatcgcctaggttggattgatgattctctagtgaagagagttggagatattttaaaacaggctaagttaccttcagcccctcctgagaccgtgactgtggacatgtttaaatctgtcatggcagtggataagaaggtagcagatgggttgctaaggcttatccttctaaagggccctctaggcaattgcgttttcacaggggattatgacagaaaggctctagacgatacgcttcgtgcattctgtaaatcctgatctttgtgctccatgtttctattgcagctttatccaattccttttagtgagtttttgtatgttgtgataacctcacttgtatttttcttatgtactttggatgccaaccatggtccccattatatacgcaagagtctattacaaagttgtattattagaaattgaggcatgatcaataattatcatttgagcat

SEQ ID NO: 8096 - DNA, 518 bp, Glycine max
  Clone ID: 700733935_FLI
gaaaaacagaatcaagtatcgccttgttgtcttcctgttgttgacattatcgatgatgaaaaacagaatcgagtatcagaaaaggaagagaattggaaattgaccccacatggtgccaagagagatgccactttagaccttcttcaacttgataattcaactgtcaagaagatgagggagaccaaagaatttggtgaattaaacaatgaattgccattgcaaggggagaaaggatgtctcgtggtaggtggagtttggaagaaacttacagaagaagagctactagtcattgagtcttctgtaaggattttagtttaatttatactttactgcttagttcttgtcaagatttaattcatgttagttatttttatgcttatttgtttgatttattttagaaggtatggtacctataagatacaggtgcctggccttaaaatatgcaattccacaaacataagagaatcctgtagcttaattacctgaaccacattcatgcaataagaatttcattctac

SEQ ID NO: 8097 - DNA, 906 bp, Glycine max
  Clone ID: 700733946_FLI
ttcgtcatcaaatcagtggcttgtaagacctgttttagaaactcatggatgggatcatgatgtgggttatgaagggttgaatgtagaaagattgttcgttgtcaaggaaaagattcctttatctttctccggtcaggttactaaagataaaaaggatgctaatgttcagatggaaatatccagttcagttaagcatgggaaagggaaagcaacttcattaggttttgatttgcaaactgtggggaaggacttggcttatacattacgcagtgagacaagatttactaattttagaagaaataatgcaactgctggtctctcatttactttacttggtgatgccttatcatctgggttgaagattgaagacaaattggttgctagtaagcgattcaagcttgttgtcagtggtggtgcaatgacagggcggggcgacattgcttatggtggcagtttggaggcccaactgagagataaggattatcctcttggtcgtttcttaactacgcttggcctttctgttatggattggcatggagatcttgctgttgggtgcaatgtgcaatctcagatcccagtaggacgacatacaaaccttgttgcccgggcaaatttgaataatcgaggggcagggcaaataagtattcgattaaatagttcagaacagcttcaaattgctttgattggtctcatccctctcctaaagaagctagttggttatcatcaacaaacgcagtttggacaatactgataatgatagttttagtttatttgagctggagcactttcatggtattagggaatgatttcaagatggcatctttcatgaaatgagtgatactgaatttcgttatgttttttatactcaaaagtttgtcttatttgatcataaagcagtacttttct

SEQ ID NO: 8098 - DNA, 1495 bp, Glycine max
  Clone ID: 700733990_FLI
gctatttgcttttgctgcatcacgtcgtcgcaggcaaggaaaggattctggtacaagtgaagggccatctggctggcttccactttctctttatggtaattcacactctgcagcttctgccaagaccaacacaacaggaagctatgcatcctctctaccatcaaacctttgtcgtcatttctcatttgctgaaatcaaggctgccacaaacaactttgacgaggctttgcttcttggtgtgggaggattcggtaaggtttacaaaggagaaattgatggtggaacaaccaaggtagcaattaaacgtgggaatccactatctgagcagggggtgcatgagttccaaactgagattgaaatgctctcaaaacttcgtcaccgccaccttgtttcactgattggctactgtgaagaaaacactgaaatgatccttgtctatgactgtatggcctatggaacactcagggagcatctgtacaagacccagaaacctccacgtccatggaagcagaggcttgagatatgcattggagctgcccggggtttacactatctacacactggtgctaaacacactattatccaccgtgatgtgaagacaacaaacattttactagatgagaattgggtggctaaggtttctgattttggactgtcaaaaacaggtccaactttggataatacccatgtaagtactgtggtaaagggtagttttgggtacttggatccagaatacttcaggaggcagcaactgactgacaaatctgatgtttactcgtttggtgtggttctctttgaggtattatgcgctcgcccagctttgaaccccacccttgctaaggagcaggtgagtctggctgagtgggcagctcattgctacaagaaaggcattcttgactctatcattgatccttatctaaagggcaagatagcttcagaatgcttcaagaagtttgccgagactgcaatgaagtgcgtggctgaccagggcattgataggccatccatgggtgatgtcttgtggaaccttgaatttgctttgcagctgcaagaaagtgccgaggaaagtggcaacggctttggtgacattcactgtgaagtggagccattatacacagattctaaaggaaaggactccaatccgggttatgatggtaatgcgaccgactccagaagcagtggtatttcaatgagcattggaggtagaagcttggctagtgaagactctgatgggctaacccctagtgctgtgttctcccagataatgaatccaaaaggtcgttaaggttatgcagcagtaacaacactttcaatacatacacagtcaacccactcaagttctgtagtacaatctgctttcaccaaatttgaatgttactcgttattcattttcttaatattgctattcctttgtatgttgtttctaattttttatgattatgtaagttgtaatttgtgaccatgttatataaagattgaagagcaaacatgttgt

SEQ ID NO: 8099 - DNA, 1491 bp, Glycine max
  Clone ID: 700734243_FLI
gtcgcagaagcagcagctacaggacagtcaccagaagattcgtcacttcaatgaaggagacgtactcgtgattcctcctggtgttccttactggacctataacactggcgatgaaccagttgttgccatcagtcttcttgacacctctaacttcaataaccagcttgatcaaacccctagggtattttaccttgctgggaacccagatatagagtacccagagaccatgcaacaacaacaacagcagagaagtcatggtggacgcaagcaggggcaacaccagcaggaggaagaggaagaaggtggcagcgtgctcagtggcttcagcaaacacttcttggcacaatccttcaacaccaacgaggacatagctgagaaacttcagtctccagacgacgaaaggaagcagatcgtgacagtggaaggaggtctcagcgttatcagccccaagtggcaagaacaacaagatgaagatgaagatgaagacgaagatgatgaagatgaacaaattccctctcaccctcctcgccgaccaagccatggaaagcgtgaacaagacgaggacgaggacgaagatgaagataaacctcgtcctagtcgaccaagccaaggaaagcgtgaacaagaccaggaccaggacgaggacgaagatgaagatgaagatcaacctcgcaagagccgcgaatggagatcgaaaaagacacaacccagaagacctagacaagaagaaccacgtgaaagaggatgcgagacaagaaacggggttgaggaaaatatctgcaccttgaagcttcacgagaacattgctcgcccttcacgcgctgacttctacaaccctaaagctggtcgcattagtaccctcaacagcctcaccctcccagccctccgccaattccaactcagtgcccaatatgttgtcctctacaagaatggaatttactctccacattggaatctgaatgcaaacagtgtgatctatgtgactcgaggacaaggaaaggttagagttgtgaactgccaagggaatgcagtgttcgacggtgagcttaggaggggacaattgctggtggtaccacagaacttcgtggtggcggagcaagccggagaacaaggattcgaatacatagtattcaagacacaccacaacgcagtcactagctacttgaaggatgtgtttagggcaattccctcagaggttcttgcccattcttacaaccttcgacagagtcaagtgtctgagcttaagtatgaaggaaattggggtcctttggtcaaccctgagtctcaacaaggctcaccccgtgttaaagtcgcataaatgacaagcatgatggtgtgaggatgaggccatcttatgaaataataacaaataaataaattttgtatgataataaaaagtatggcccatgtaccatcccagcgagcctatgtttatatctgagtggcgttgtacctttcaatcgccttaataaaatgtcagtcttcacgttt

SEQ ID NO: 8100 - DNA, 273 bp, Glycine max
  Clone ID: 700734292_FLI
caaagacatgcttgataggcacttcaagggtgaagactttccagaacaaaactacattgtcaaggagggtcaacttgcaagccaataccggtgaagtagtgtgtgtcaatgcggcctttgaatcttccatttttaaggccaatcgatgagcaaataaagatctagaagtcactttaattatgtaatgtacttgctttgttgtgtctgaactcgtttaattgatctcagaaataaaattttgaggaacactctccatgttccatgtattgttct

SEQ ID NO: 8101 - DNA, 1697 bp, Glycine max
  Clone ID: 700734320_FLI
tctctccattgtctttgaacactcatcaccatggccaagcttgttctttccctttgtttccttcttttcagtggctgcttcgctctgagagagcaggcacagcaaaatgagtgccagatccaaaagctgaatgccctcaaaccggataaccgtatagagtcggaaggtgggttcattgagacctggaaccctaacaacaagccattccagtgtgccggtgttgccctctctcgctgcacccttaaccgcaatgcccttcgtagaccttcctacaccaacggtccccaggaaatctacatacaacaaggtaatggtatttttggcatgatattcccgggttgtcctagcacttatcaagagccgcaagaatctcagcaacgaggacgaagccagaggccccaagaccgtcaccaaaaggtacatcgcttcagagagggtgatttgatcgcagtgcctactggtgttgcatggtggatgtacaacaatgaagacactcctgttgttgccgtttctattattgacaccaacagcttggagaaccagctcgaccagatgcctaggagattctatcttgctgggaaccaagagcaagagtttctaaaatatcagcagcagcagcaaggaggttcccaaagccagaaaggaaagcaacaagaagaagaaaacgaaggaagcaacatattgagtggcttcgcccctgaattcttgaaagaagcgttcggcgtgaacatgcagatagtgagaaacctacaaggtgagaacgaagaggaggatagtggagccattgtgacagtgaaaggaggtctaagagtcacagctccagccatgaggaagccacagcaagaagaagatgatgatgatgaggaagagcagccacagtgcgtggagacagacaaaggttgccaacgccaaagcaaaaggagcagaaatggcattgatgagaccatttgcacaatgagacttcgccaaaacattggtcagaattcatcacctgacatctacaaccctcaagctggtagcatcacaaccgccaccagccttgacttcccagccctctggcttctcaaactcagtgcccagtatggatcactccgcaagaatgctatgttcgtgccacactacaccctgaacgcgaacagcataatatacgcattgaatgggcgggcattggtacaagtggtgaattgcaatggtgagagagtgtttgatggagagctgcaagagggaggggtgctgatcgttccacaaaactttgcggtggctgcaaaatcccagagcgataactttgagtatgtgtcattcaagaccaatgatagaccctcgatcggaaaccttgcaggggcaaactcattgttgaacgcattgccagaggaagtgattcagcacacttttaacctaaagagccagcaggccaggcaggtgaagaacaacaaccctttcagcttcctggttccacctcaggagtctcagaggagagctgtggcttagagagccctttttgcatgtgctaccacacttttgtccttttgggctctagctagtgctggtagcagtaaataagaatgaataaaagaaacaaaggcttagatgccctttgttaagtgtagaataacgggtatagtaactatgtacccttgtgtaatgagtcactcaagtacctatgcgggaaaagcataaataaaagaagaaattccaat

SEQ ID NO: 8102 - DNA, 473 bp, Glycine max
  Clone ID: 700734368_FLI
aaaacataaacgaagaagttagtaatatgtttccctctgagtcactagagaaagagagagggaaatggctttcacgatatccagatctgaatctgctttgaaagatagagagaagaaggagtgtgcaacaacagagggtatgatatcgagccagctttgtcatcgtcgaaagcatcttctcatcaaagcatggacaaacatgcaatcctccgacgcatcaggcaacgcaggtttaataacagagccaaaaccgctctggaagctctcataggcacctcagaagccaacaacaacaccaccactgggcaagaacacttgtggcttcaactgggtgactctttctcttctccttaactcatgaatcacccctcagctacccatctataaataccatccctagatcactacttatgcagctatgaccttgtgaataccacgttcaattgttatataaaaaatgtgtgtattatatt

SEQ ID NO: 8103 - DNA, 1328 bp, Glycine max
  Clone ID: 700734434_FLI
atccgtctctggttgaaagccatgagcatgatggctgcgtatttgcgtgtacccacatccacgcccattactccgcaatctcccacagctacgaggaccaaatgcagaaatctgaaaacctcttgctccgttaatgccgccaaaattccaatgccccctctaaaccctaaagaccccttcctctccaagctcgcttccatcgctgcctcttcccccgacacgctcctcaacactcccaaaaactccgacacccctccttttctcgacatcttcgactcccccaaactcatggccactcccgctcaagttgaaagatctgtttcatacaacgaacaccgacccagaaggccaccgcctgacctgccttcgctgcttctccatggtagaattgtttacattggcatgcctttggtgccagctgtcacggagcttgttgttgcagaattgatgtacttgcagtatatggatcctaaagagccgatttttatttacataaattccactgggactacgcgagatgatggtgaaacggtaggcatggagactgaaggttttgccatttatgatgcaatgatgcagttgaaaaacgagatacacacagtggctgttggatctgctataggtcaagcctgtttgctactttcagcagggactcctggtaaacgctttatgatgccacatgctaaagccatgattcagcagcctcgtattccttcctctgggttgatgcctgcaagtgatgttcttattcgtgcaaaggaggtgataattaacagggacaatctggttaaactacttgccaaacacacgggaaattcagaggaaacagttgctaatgtgatgaagagaccgtattatatggatgcaacaagggcaaaggaatttggggtcattgacagaattctttggcgtggccaggaaaaggttatggcagatgttgcttctccagatgactgggacaagggagctggtatcaaaattgtagatggattctagttcctcttttgtggatacgtttctctttgtcaatgtgacatgtttcggtaggattttttttttcatggtataccggtccagaaatgttccacagctattcacagaaaactagagctgtcaactgggtttcggcccgtgggccagcccggtccagtgcgggttagagatgaagttaatggtgatgttgaaaaagaagaggaatgactcatgtttaatttcaatagtttaaaagtttatttttgatgatatttaaattttaattatcttaatgttgaatgtttattttgaagacttcaatcactttaatattgaatgtttattttgaagacttc

SEQ ID NO: 8104 - DNA, 1429 bp, Glycine max
  Clone ID: 700734472_FLI
atttctctctctcccgtgctttctagagctggtgctctgggaggagtagcgattcggcggttgaagatgcgaaggaaggcaccacactaagtaaggttgcgtgaatggaaagcattttagagagtgtcatgggggcacaaaaaaagttttatttttgttgatagagggttttactcgattgaaacgtcgctgcttctgctcgctcttaaggacccaactgagcatactgctattgacaacttaatggttcaacagcttgatggaactgttaacgaatgaggttggtgcaagcaaaaggtgcttagctggtggaactgttattccacgttaccacgggtttgaataatcattttgtttgtgaatgcatgttaggatttccttttatttttttccaattatataggtaacccttaaattttcccttcagtttatgcatgtttggatttccttttattttttccaattatataggtaacccttaaattttcccttcagttttttgagtttatatatgtattccctgaatcgatctaacatgaatagctttctaagggtactcttctcgggatgaggcaaaccatttttgagtttatatttgattccctgaatcaaaggtacccatccttcagttttttgagtttatatatgtattcccttttgtgatcacaacaatttggtgctgtcaagtgggttggtgttctttttctcaggggattgcaacagccgtagacgtttcaacacatagattgctaaccaagatagcattgctggaatttctcgcatgagatttgtctgcacaactccaggatccgcagcactaatatgcaacaatacggaaactgaatgtaaaagatgttatcccggacagtgatttcccgatacattagtcagagggactattattttcagagaaaccttcccaactggattccaatcctctatgtattcagaggatgcagttcatgatggaactagagattgaccttctagctttggatcaaccggagaggctgcaaacgtatttttcgggttggaatctcaatgattttctcacccaagctgccactgatagaggtgagttactatattccttgtgatttcccaaattacatcaactctcttcatacatcttaattttagctttcgagagcatcactctttatattgtgctgttgcctttaaatctcactgttatggttgacgggctctcaaccaactgtaatttgtaagtatgttagaccaggtttcttcggtggtgattggaaatagtttgagttggaaaaccagcccttcattcttttaatgagaagggtgcagaggaaaattatctcccggaacaacaagcggatcaaaaccttactaaatttgacatcctgtataccttggttggatctaatgatttattaattgacatctttgatattgaaac

SEQ ID NO: 8105 - DNA, 1230 bp, Glycine max
  Clone ID: 700734476_FLI
tgatttgatcgcagtgcctactggtgttgcatggtggatgtacaacaatgaagacactcctgttgttgccgtttctattattgacaccaacagcttggagaaccagctcgaccagatgcctaggagattctatcttgctgggaaccaagagcaagagtttctaaaatatcagcagcagcagcaaggaggttcccaaagccagaaaggaaagcaacaagaagaagaaaacgaaggaagcaacatattgagtggcttcgcccctgaattcttgaaagaagcgttcggcgtgaacatgcagatagtgagaaacctacaaggtgagaacgaagaggaggatagtggagccattgtgacagtgaaaggaggtctaagagtcacagctccagccatgaggaagccacagcaagaagaagatgatgatgatgaggaagagcagccacagtgcgtggagacagacaaaggttgccaacgccaaagcaaaaggagcagaaatggcattgatgagaccatttgcacaatgagacttcgccaaaacattggtcagaattcatcacctgacatctacaaccctcaagctggtagcatcacaaccgccaccagccttgacttcccagccctctggcttctcaaactcagtgcccagtatggatcactccgcaagaatgctatgttcgtgccacactacaccctgaacgcgaacagcataatatacgcattgaatgggcgggcattggtacaagtggtgaattgcaatggtgagagagtgtttgatggagagctgcaagagggaggggtgctgatcgttccacaaaactttgcggtggctgcaaaatcccagagcgataactttgagtatgtgtcattcaagaccaatgatagaccctcgatcggaaaccttgcaggggcaaactcattgttgaacgcattgccagaggaagtgattcagcacacttttaacctaaagagccagcaggccaggcaggtgaagaacaacaaccctttcagcttcctggttccacctcaggagtctcagaggagagctgtggcttagagagccctttttgcatgtgctaccacacttttgtccttttgggctctagctagtgctggtagcagtaaataagaatgaataaaagaaacaaaggcttagatgccctttgttaagtgtagaataacgggtatagtaactatgtacccttgtgtaatgagtcactcaagtacctatgcggg

SEQ ID NO: 8106 - DNA, 1842 bp, Glycine max
  Clone ID: 700734511_FLI
tacctctcctgtaagcttcagttcagcagataaggtaatctcaaagctcgtcgtgttttcgcatcaatggccatggccatggctgaggcttcaagaatcacgttacactccactctcctccctttttttacccccaaaacccacgttggtcaccgccacttaagcctctcgtcatcacgcaagcaccaagtccagtgctcggtgtctgcaggcgcggcggctcagacgaacccagtggcttggggctgcgagattgactcgctggagaactcttcggctctgcagagatggctgtcggagtcggggcttccgccgcagaagatgggaatagagagagtggaggtgggagagagagggctggttgctttgaagaacattaggaaaggggagaaactactctttgtgcctccctcacttgtcattactccagattctgagtggagctgccccgaagctggtgaagtattgaaaaggaattcagtgccagattggcttttgcttgcaacttacctcataagtgaagctagcctcatggaatcttcaagatggagcaattatatatcagccttacctcgtcaaccttactcacttctttactggacgcaagcagaactagatcgctacttggaagcttcacaaattagggagagagcgattgaaaggattaataatgttattggaacatacaatgatttgaggctcagaatattttccaaataccctgatttattccctgatgaggtgttcaacatagagtccttcaaatggtcatttggtattcttttctcccgcttggttcggttaccctcaatgggtggaaatgttgccttggttccttgggctgatatgctgaatcatagttgtgatgtggagacatttttggattatgataagacatcaaagggaattgtcttcacgacagatcggccctatcaaccaggtgagcaggtatttatttcatatggaaaaaaatcaaatggggagcttttgttatcttatggatttgttccaaaggaaggcgctaatcctagtgattcagttgagttgtcactgtcactgaagaaatctgatgcgtcctataaggagaagttagagctgttgaagaattatggattatcagcatctcagtgttttcctatacagattactggttggcctttggaattaatggcttatgcttatttagctgttagtccttcaagcatgagaggagattttgaagagatggctgctgcagcatcaaataataccacctccaagaaggatttgagatatcctgaaatagaggagcaagcattgcaattcatactagatagttgtgaatccagcatatcaaaatacaacaagttcttacaggcaagtggatcactggatctggatgtgacttctcctaaacaactcaaccgaaggctctttctgaaacagctagctgtggacttgtgtactagtgagcgaaggatattatttcgtgctcaatacatactgcgaagaaaactgagggacatgagggctggtgaattaagggccctaaaaatattcaacggtttccggaatcttttccaatgaggccattcactggtgcattattttctgccctggtttgcccttggttgttttgaaaaaacctatctcacccttgagcatcatgaactttgttcaatggtaccacctaattgtgggaaacaggtccagtcttcagtttttattgatcaatatagaagaagcaagataagaaatagaaaaggtaaggaatgattgtaatataggcttgctatgtatttattgatccaaataaatttttcttttcctatgttaaattttcgatgaaaaaatcttctttgg

SEQ ID NO: 8107 - DNA, 265 bp, Glycine max
  Clone ID: 700734539_FLI
gcacaagagaagtggtggaacatgcagctttggaggaactgccatgttgataaattctgacccaagtttccttcactgtcggtttattcttagctaagtgaatagaagtggcgtggcgactttctgtttttgttgcagatagtgtggaggattttatgttaaggtgacttttcttttgattaactagcaatcggtttatgtataatgtatggaccaacttaaaacttctatattgggatcttgttggactaacttaatactttct

SEQ ID NO: 8108 - DNA, 1685 bp, Glycine max
  Clone ID: 700734555_FLI
ctttgaacactcatcaccatggccaagcttgttctttccctttgtttccttcttttcagtggctgcttcgctctgagagagcaggcacagcaaaatgagtgccagatccaaaagctgaatgccctcaaaccggataaccgtatagagtcggaaggtgggttcattgagacctggaaccctaacaacaagccattccagtgtgccggtgttgccctctctcgctgcacccttaaccgcaatgcccttcgtagaccttcctacaccaacggtccccaggaaatctacatacaacaaggtaatggtatttttggcatgatattcccgggttgtcctagcacttatcaagagccgcaagaatctcagcaacgaggacgaagccagaggccccaagaccgtcaccaaaaggtacatcgcttcagagagggtgatttgatcgcagtgcctactggtgttgcatggtggatgtacaacaatgaagacactcctgttgttgccgtttctattattgacaccaacagcttggagaaccagctcgaccagatgcctaggagattctatcttgctgggaaccaagagcaagagtttctaaaatatcagcagcagcagcaaggaggttcccaaagccagaaaggaaagcaacaagaagaagaaaacgaaggaagcaacatattgagtggcttcgcccctgaattcttgaaagaagcgttcggcgtgaacatgcagatagtgagaaacctacaaggtgagaacgaagaggaggatagtggagccattgtgacagtgaaaggaggtctaagagtcacagctccagccatgaggaagccacagcaagaagaagatgatgatgatgaggaagagcagccacagtgcgtggagacagacaaaggttgccaacgccaaagcaaaaggagcagaaatggcattgatgagaccatttgcacaatgagacttcgccaaaacattggtcagaattcatcacctgacatctacaaccctcaagctggtagcatcacaaccgccaccagccttgacttcccagccctctggcttctcaaactcagtgcccagtatggatcactccgcaagaatgctatgttcgtgccacactacaccctgaacgcgaacagcataatatacgcattgaatgggcgggcattggtacaagtggtgaattgcaatggtgagagagtgtttgatggagagctgcaagagggaggggtgctgatcgttccacaaaactttgcggtggctgcaaaatcccagagcgataactttgagtatgtgtcattcaagaccaatgatagaccctcgatcggaaaccttgcaggggcaaactcattgttgaacgcattgccagaggaagtgattcagcacacttttaacctaaagagccagcaggccaggcaggtgaagaacaacaaccctttcagcttcctggttccacctcaggagtctcagaggagagctgtggcttagagagccctttttgcatgtgctaccacacttttgtccttttgggctctagctagtgctggtagcagtaaataagaatgaataaaagaaacaaaggcttagatgccctttgttaagtgtagaataacgggtatagtaactatgtacccttgtgtaatgagtcactcaagtacctatgcgggaaaagcataaataaaagaagaaattccaat

SEQ ID NO: 8109 - DNA, 175 bp, Glycine max
  Clone ID: 700734586_FLI
cttctgagtgtagaggaaaattgggcatactgcagtttgtaactttgtatatctgttgtaatgttatctttcagttgataatgacgaggaattttattagtttctccagaggcctggacataattgtattattattctcctttgcattttaatgttgaaacgaaaatttcctgtc

SEQ ID NO: 8110 - DNA, 315 bp, Glycine max
  Clone ID: 700734625_FLI
aaagagtatacttaaactatgaatgataccaaaaagataaaactatgagcttgaggggttaaatataggttgtgaagggtttttgttttcactgggtgcccatttgttagattaacatgggtatgtttactgctgcgcgtgattgtatgagtgtttggggttgtccctttgtgtagtgttttattccccttgtgttgtggttaccaacttgatatttgcattgtgcatgacccctgttactatgctattgctattaagttttggcgaactatgccatattagaaattataaaatatttcttctattattttcttc

SEQ ID NO: 8111 - DNA, 1893 bp, Glycine max
  Clone ID: 700734647_FLI
ttaacacttccttagttcaatatggggaagcccttcactctctctctttcttccctttgcttgctactcttgtcgagtgcatgctttgctattagctccagcaagctcaacgagtgccaactcaacaacctcaacgcgttggaacccgaccaccgcgttgagtccgaaggtggtttgattcaaacatggaactctcaacaccctgagctgaaatgcgccggtgtcactgtttccaaactcaccctcaaccgcaatggcctccacttgccatcttactcaccttatccccggatgatcatcatcgcccaagggaaaggagcacttggagttgcaattccaggatgtcctgagacgtttgaggagccacaagaacaatcaaacagaagaggctcaaggtcgcagaagcagcagctacaggacagtcaccagaagattcgtcacttcaatgaaggagacgtactcgtgattcctcctggtgttccttactggacctataacactggcgatgaaccagttgttgccatcagtcttcttgacacctctaacttcaataaccagcttgatcaaacccctagggtattttaccttgctgggaacccagatatagagtacccagagaccatgcaacaacaacaacagcagaaaagtcatggtggacgcaagcaggggcaacaccagcaggaggaagaggaagaaggtggcagcgtgctcagtggcttcagcaaacacttcttggcacaatccttcaacaccaacgaggacatagctgagaaacttcagtctccagacgacgaaaggaagcagatcgtgacagtggaaggaggtctcagcgttatcagccccaagtggcaagaacaacaagatgaagatgaagatgaagacgaagatgatgaagatgaacaaattccctctcaccctcctcgccgaccaagccatggaaagcgtgaacaagacgaggacgaggacgaagatgaagataaacctcgtcctagtcgaccaagccaaggaaagcgtgaacaagaccaggaccaggacgaggacgaagatgaagatgaagatcaacctcgcaagagccgcgaatggagatcgaaaaagacacaacccagaagacctagacaagaagaaccacgtgaaagaggatgcgagacaagaaacggggttgaggaaaatatctgcaccttgaagcttcacgagaacattgctcgcccttcacgcgctgacttctacaaccctaaagctggtcgcattagtaccctcaacagcctcaccctcccagccctccgccaattccaactcagtgcccaatatgttgtcctctacaagaatggaatttactctccacattggaatctgaatgcaaacagtgtgatctatgtgactcgaggacaaggaaaggttagagttgtgaactgccaagggaatgcagtgttcgacggtgagcttaggaggggacaattgctggtggtaccacagaacttcgtggtggcggagcaagccggagaacaaggattcgaatacatagtattcaagacacaccacaacgcagtcactagctacttgaaggatgtgtttagggcaattccctcagaggttcttgcccattcttacaaccttcgacagagtcaagtgtctgagcttaagtatgaaggaaattggggtcctttggtcaaccctgagtctcaacaaggctcaccccgtgttaaagtcgcataaatgacaagcatgatggtgtgaggatgaggccatcttatgaaataataacaaataaataaattttgtatgataataaaaagtatggcccatgtaccatcccagcgagcctatgtttatatctgagtggcgttgtacctttcaatcgccttaataaaatgtcagtcttcacgttttgtcttt

SEQ ID NO: 8112 - DNA, 856 bp, Glycine max
  Clone ID: 700734653_FLI
gccaagttacagttcagaatgtcaggatccttgctcctcatgattcaccaaacacggatggaattgatccagattcttctgacaacgtatgcattgaagactgttatataagcactggtgatgatctgattgccatcaagagcgggtgggatgagtatggcattgcatacggtcgcccaagcacaaacattatcatccacaggctagttggtaaaactcaaacaagtgggattgctattggaagtgagatgtctggtggtgtatctgaagttcatgcagaagatattcaattctatgattcatataatggaatcagaataaagacttctcctggcaggggtggttatgttagaaatatctatgtctctaacgtgagcttggctaatgtagatattgctatttggttcactggttcatatggggagcatccggatgatgcttatgacccaaatgctctacctgtaatagaaaaagttacaatcaaggatgtggtaggagaaaatatcaaaactgcaggtcttatagagggtatagaaggtgacaattttgtcaacatttgcctgtcaaacattatccttaacgtgacctcaaactatccatggaactgctcctacgttaaaggatattctgacttagtccagccagaagcttgtgagcctctcaaggagagaatattccctgatcattgttcagattgttactatttgacaaatcaaattcagagttcgaatagtcaaaatagagcaggacaaacttcaggtgacataagaggttgagtggagttgcccaactgtgattgtccatctgcagaaagataccgagaaatgattggtttttgtaacttgtgtgcagtaac

SEQ ID NO: 8113 - DNA, 995 bp, Glycine max
  Clone ID: 700734688_FLI
cttcgctggccactgtggggactggaacccttgttccatactagaaccccaaatacaatactgccagcagaaaggtgtcaaagtcttcctttccctcggtggtgctaaaggaacctactccctctgctcacccgaggacgcaaaagaagttgccaattacctttatcaaaacttcctcagtggcaaacccggtccacttggaagtgtaacattggaaggcatcgatttcgacattgaacttggttccaacctctattggggcgaccttgccaaggaactagatgctctcaggcaccaaaacgaccactacttctacttgtccgcagccccacaatgttttatgcctgattaccacctcgacaatgccatcaaaactggtcttttcgatcatgtaaacgttcagttctacaataaccctccatgccaatactcacctggcaatactcaattgctttttaattcatgggatgattggacttcaaatgttcttcccaataactctgttttctttggactaccagcatctcccgacgctgctccaagtggtggttatataccaccacaggtgctcatttctgaggtgcttccctatgtaaagcaagcttccaactatggaggagttatgctgtgggacaggtaccatgatgttttaaattatcacagcgatcagataaaggattatgttccaaaatatgcaatgcggtttgtgaccgcagtttccgacgctatttatgagagtgtctctgcagctacgcaccgcatcttacagaagaaaccatattagaaatatggggagccgtacgtgcaaactatttatcagctatctatgcatgtgtccgtctctgtaacgtttgtatggaaaattggaaataagtaacaacttgttattagttgttacctttgtggcatctactccagctttgatttcctagctagttgttatgtaatgtaaccaatataatcgaagcatgttgagaataaaatactccctactc

SEQ ID NO: 8114 - DNA, 1263 bp, Glycine max
  Clone ID: 700734791_FLI
gttcatataccttgtgtttgtatagcatatattcctagttgatattatctatagatggagccaattgaacaaggaagccaacctgaaaaggaaaaatggaagggcaaggccacaacagaagtaaaaggagccaaagcagaacaagtttggcctcttttggaggatttctttggccttgacaagtggttccccaccctctctacatgcattccagttgaaggtatctctggccaacctgggtgtgttcgcttctgcgctggtttcaagacccctgtggatgatggcaaacaaactgtgaattggactaagcagaaactgctatccattgacccaactcaacgggtttttagctattcgatcgtggatgggaatgtaggatttcactcctacgtttcaactttgaaggtgctgccaatggctgaggggtgtgagattgagtggctatatgaagttgaacctgttgaagggtggaaactggagcatcttgattccttcatagacacgggcttgcaggtcatggctcagaggatgcaagcagctttgaagacaatggaggaagcagtattcatggcttaaaagtaaggacaaaacttatatactgttgctttggtgttgtttgtattgttgcaggatgatcacattctttaacacacccttctttaacatattttaaaaattataaaaatagaagagacggtcattaaatgaattgtgaaattcaacaaattttataattttctataaatttcagtcaataataagatatatgttaaaagagggtgttaaagaatttattaaccttcatcttattctttaattatagttgaagttttattttgataatccatgtaatctctgttgcaaacctttattacaccgattatcaaaatgaaattttaattttgattggagaagaagacaaccaacccttacaaaagtatatctaagttttgtcctgaagcaattaaaggagtgttagtgcaataaattctaataataagaaataacctaaaataattatatttttaataaattttaattattaataaagaatgtgtgaaaaaatatgttagtaatatttgtcaagggattatcatttaccaatatatggcaatggagccttttcagtttatcaagtacttttattgctgagaaaaaaaagtactttaattgatgtgtttgcgatttcagtgtatcattagtatgtacttactagtagaaaaactgaagatatgctgttgcattgtgttgtagcaattaaat

SEQ ID NO: 8115 - DNA, 1795 bp, Glycine max
  Clone ID: 700734795_FLI
cttaattattaacacttccttagttcaatatggggaagcccttcactctctctctttcttccctttgcttgctactcttgtcgagtgcatgctttgctattagctccagcaagctcaacgagtgccaactcaacaacctcaacgcgttggaacccgaccaccgcgttgagtccgaaggtggtttgattcaaacatggaactctcaacaccctgagctgaaatgcgccggtgtcactgtttccaaactcaccctcaaccgcaatggcctccacttgccatcttactcaccttatccccggatgatcatcatcgcccaagggaaaggagcacttggagttgcaattccaggatgtcctgagacgtttgaggagccacaagaacaatcaaacagaagaggctcaaggtcgcagaagcagcagctacaggacagtcaccagaagattcgtcacttcaatgaaggagacgtactcgtgattcctcctggtgttccttactggacctataacactggcgatgaaccagttgttgccatcagtcttcttgacacctctaacttcaataaccagcttgatcaaacccctagggtattttaccttgctgggaacccagatatagagtacccagagaccatgcaacaacaacaacagcagaaaagtcatggtggacgcaagcaggggcaacaccagcaggaggaagaggaagaaggtggcagcgtgctcagtggcttcagcaaacacttcttggcacaatccttcaacaccaacgaggacatagctgagaaacttcagtctccagacgacgaaaggaagcagatcgtgacagtggaaggaggtctcagcgttatcagccccaagtggcaagaacaacaagatgaagatgaagatgaagacgaagatgatgaagatgaacaaattccctctcaccctcctcgccgaccaagccatggaaagcgtgaacaagacgaggacgaggacgaagatgaagataaacctcgtcctagtcgaccaagccaaggaaagcgtgaacaagaccaggaccaggacgaggacgaagatgaagatgaagatcaacctcgcaagagccgcgaatggagatcgaaaaagacacaacccagaagacctagacaagaagaaccacgtgaaagaggatgcgagacaagaaacggggttgaggaaaatatctgcaccttgaagcttcacgagaacattgctcgcccttcacgcgctgacttctacaaccctaaagctggtcgcattagtaccctcaacagcctcaccctcccagccctccgccaattccaactcagtgcccaatatgttgtcctctacaagaatggaatttactctccacattggaatctgaatgcaaacagtgtgatctatgtgactcgaggacaaggaaaggttagagttgtgaactgccaagggaatgcagtgttcgacggtgagcttaggaggggacaattgctggtggtaccacagaacttcgtggtggcggagcaagccggagaacaaggattcgaatacatagtattcaagacacaccacaacgcagtcactagctacttgaaggatgtgtttagggcaattccctcagaggttcttgcccattcttacaaccttcgacagagtcaagtgtctgagcttaagtatgaaggaaattggggtcctttggtcaaccctgagtctcaacaaggctcaccccgtgttaaagtcgcataaatgacaagcatgatggtgtgaggatgaggccatcttatgaaataataacaaataaataaattttgtatgataat

SEQ ID NO: 8116 - DNA, 1155 bp, Glycine max
  Clone ID: 700734812_FLI
gcggaagattgcgcgggaagtggagttcaacagcaaggttgaaaagaagagaagaggcttgattccccttagggatatgaatttggatgactacaaggcttataaggaagccaaattggcgcagatgaagcttctcgattactcttctagttttccggtggacgaaaatgtccctgaacctcaattgaatcgcggagaaaagtttgaggctgaagctgaattggatggtggtgaacgtgttgcgcctaagaaccctaggtgggctgtttatgggaggggtttggaggatgtcactgagtttttcaatagtgacaactatgaccctactgctaaaacccctggaggtcgccggaagttgtttaataaggaggagaaggttttgttgaataagaggataccagacttggcagctgctacttcagataaatggcttcccctgcacactctcgctgcttgtggagaatttcaccttttagattctctgttgaagcataatgttgatatcaatgctgtggataaggatggtttgactgcccttcacagagcaacaattggaaaaaagcaggccataatcaattatctcctgagaaactcagctaatccctttgtacaggataatgagggagccacattgatgcactatgctgtactaacagcttctacccagacaattaaaatactcttattgtataatgtggatataaatctccaggacaattatggctggacaccattacatcttgctgttcaagctcagaggacagatttagtgaggcttttgctaatcaaaggtgctgataagacattaaaaaatgaggatggtttaactcctcttgacctttgcctttacaatggtcaaagtgccagaacatatgagctaatcaagttgtttaagcagcctcaaagacgtcttagtcatgtatcagtatgacagacggggctaagaaacaatacgacttctgaaagatttggaccaacaaatgaagattaaccgttgccaaattttgcatgacaattagcatcccttggtcacatggaaattttgggacaactacggtattgtactatattaaaattaaaatgtatattttaaatgtgataggaaggaaaataggaatattttcatgaaaagaaagaaaaatggtctgccatttt

SEQ ID NO: 8117 - DNA, 1107 bp, Glycine max
  Clone ID: 700734851_FLI
ctggcgatgccctaagagtccctgcaggaaccacatactatgtggttaaccctgacaacgacgagaatctcagaatgataacactcgccatacccgttaacaaacccggtagatttgagagtttcttcctatctagcactcaagctcaacagtcctacttgcaagggttcagcaagaatattctagaggcctcatacgacaccaaattcgaggagataaacaaggttctgtttggtagagaggaggggcagcaacaaggggaggagaggctgcaagagagtgtgattgtggaaatctcaaagaaacaaattcgggaactgagcaaacatgccaaatctagttcaaggaaaaccatttcttctgaagataaacctttcaacttgagaagccgcgaccccatctattccaacaagcttggcaagttgtttgagattaccccagagaaaaaccctcagcttcgggacttggatgtcttcctcagtgttgtggatatgaacgagggagctctttttctgccacacttcaattcaaaggccatagtggtactagtgattaatgaaggagaagcaaacattgaacttgttggcattaaagaacaacaacagaggcagcaacaggaagagcaacctttggaagtgcggaaatatagagctgaattgtctgaacaagatatatttgtaatcccagcaggttatccagttgtggtcaacgctacctcagatctgaatttctttgcttttggtatcaatgccgagaacaaccagaggaacttccttgcaggttcgaaagacaatgtgataagccagatacctagtcaagtgcaggagcttgcgttccctgggtctgcaaaagatattgagaacctaataaagagccaaagtgagtcctactttgtggatgctcagcctcagcagaaagaggaggggaacaagggaagaaagggtcctttgtcttcaattttgagggctttttactgaataagtatgtagtactaaaatgtatgctgtaatagctcatagtgagcgaggaaagtatcgggctatttaactatgacttgagctccatctatgaataaataaatcagcatatgatgcttttgttttgtgt

SEQ ID NO: 8118 - DNA, 550 bp, Glycine max
  Clone ID: 700734944_FLI
gctttttaattcatgggatgattggacttcaaatgttcttcccaataactctgttttctttggactaccagcatctcccgacgctgctccaagtggtggttatataccaccacaggtgctcatttctgaggtgcttccctatgtaaagcaagcttccaactatggaggagttatgctgtgggacaggtaccatgatgttttaaattatcacagcgatcagataaaggattatgttccaaaatatgcaatgcggtttgtgaccgcagtttccgacgctatttatgagagtgtctctgcagctacgcaccgcatcttacagaagaaaccatattagaaatatggggagccgtacgtgcaaactatttatcagctatctatgcatgtgtccgtctctgtaacgtttgtatggaaaattggaaataagtaacaacttgttattagttgttacctttgtggcatctactccagctttgatttcctagctagttgttatgtaatgtaaccaatataatcgaagcatgttgagaataaaatactccctactcattcc

SEQ ID NO: 8119 - DNA, 1739 bp, Glycine max
  Clone ID: 700734987_FLI
aatatggggaagcccttcttcactctctctctttcttccctttgcttgctactcttgtcgagtgcatgccttgctattacctccagcaagttcaacgagtgccaactcaacaacctcaacgcgttggaacccgaccaccgcgttgagtccgaaggtggtcttattgaaacatggaactctcaacaccctgagctgcaatgcgccggtgtcactgtttccaaacgcaccctcaaccgcaacggcctccacttgccatcttactcaccttatccccaaatgatcattgtcgttcaagggaagggagcaattggatttgcatttccgggatgtcctgagacgtttgagaagccacaacagcaatcaagcagaagaggctcaaggtcgcagcagcaactacaagacagtcaccagaagattcgtcacttcaatgaaggagacgtactagtgattcctcctggtgttccttactggacctataacactggcgatgaaccagttgttgccatcagtcttcttgacacctccaacttcaacaatcagcttgatcaaaaccccagagtattttaccttgctgggaacccagatatagagcacccagagaccatgcaacaacagcagcagcagaagagtcatggtggacgcaagcaggggcaacaccagcagcaggaggaagaaggtggcagtgtgctcagtggcttcagcaaacatttcttagcacaatccttcaacaccaacgaggacacagctgagaaacttcggtctccagatgacgaaaggaagcagatcgtgacagtggagggaggcctcagcgttatcagccccaagtggcaagaacaagaagacgaagacgaagatgaagacgaagaatatgaacaaactccctcttatcctccacgacgaccaagccatggaaagcatgaagatgacgaggacgaggacgaagaagaagatcaacctcgtcctgatcaccctccacagcgaccaagcaggcccgaacaacaagaaccacgtggaagaggatgtcagactagaaatggggttgaggaaaatatttgcaccatgaagcttcacgagaacattgctcgcccttcacgtgctgacttctacaacccaaaagctggtcgcattagcaccctcaacagtctcaccctcccagccctccgccaattcggactcagtgcccaatatgttgtcctctacaggaatggaatttactctccacattggaacttgaacgcgaacagtgtgatctatgtgactcgagggaaaggaagagttagagtggtgaactgccaagggaatgcagtgttcgacggtgagctaaggaggggacaattgctagtggtgccgcagaactttgtggtggctgagcaagggggagaacaaggattggaatacgtagtgttcaagacacaccacaacgccgtgagcagctacattaaggatgtgtttagggcaatcccttcggaggttctttccaattcttacaaccttggccagagtcaagtgcgtcagctcaagtatcaaggaaactccggccctttggtcaacccataaataacaacaagcatatatgaaggtgtggtgaggccatcttatatgaaataatatcaaaatatattttgtgtaataataaaactatggcctatgtatttaccaccctccgacccagcctatgttaatatctgagtggcgttgtacctttgaatcgccttaataaaatgtcagtcttcaagttt

SEQ ID NO: 8120 - DNA, 281 bp, Glycine max
  Clone ID: 700735007_FLI
gtcgaccaaaaaaggttggacgtggggctgcaggtcagaggcctgcaatgccaatgaagggaaagaaaagagttaggacaaagtgatagtgctttagccaataggtttctttgtacaaagtcttttccttttggttataagaatatttttttgtttgctttaatgaagcacctagtctcatgcaacaaccaaaaggatctttgataagctgcagagggaaactaacaacaatatatggaatagttctgaactgtagtaactaacatggagaaattccaatg

SEQ ID NO: 8121 - DNA, 764 bp, Glycine max
  Clone ID: 700735202_FLI
gccaagttattgctcagtactaccaactaattcgactgggttatgagggatataaaatggtgatggaaaactgcaatgacaacatggcagtgcttaaggaaggactggagaaaacaggaaggtttgagattatatccaaagacattggtgttccattggtggccttcacattgaaggaccacacccacttcaatgaattccaaatctctgacatgctgaggcgctatggttggatagtgccagcatacacaatgcccccagatgcacaacatgtgacagtgcttcgtgttgtgattagggaggatttttctcgcaccctcgcggagcgtctagtgattgatgtcaccaaagttgtgcacgagctggatctccttcctgctagggtgatcagcaccaacaccataatggttacaggagaagcaggtgaagaaaatgacgaaaaagtgctgtttgccaagaagagtgaaatagaaacacaaagggaaatcactaaagcttggaagaagtttgtgatggacaggaagaagatgaatggtgtttgttagaaccttgtttttggatcattttttgagctacttatgcagaccagagaccagagcaattactattattattttaatataatatcgtgtggagagtaattcccttccccaataacatagcgtactttagatatgctgaaattgcaatgttgttagttgtatggaatcgtgttggactgaaagttacttcatttctcaacgcaaccagcataaatttcctct

SEQ ID NO: 8122 - DNA, 1116 bp, Glycine max
  Clone ID: 700735371_FLI
cagtgtggtactggtgtggtggtattgtgtggtcatggttgaaggtgaagtttagggttttgcaatgaagatgatgaccacacaagtaccaccacacagtgtccaagtccacacaacaacacaccgctacgaagctggcgtcgtcccccccggagcccgtttcgaaccgccgcgttatgaagccggcgtcaaagcgccctccatttaccattccgagagaggtccaacgacttcccaggtcctcgccgtcctcgccggcctcccggtcggtggcatcctgctcctcctggcgggattgaccctggcaggaaccctcaccggactggcagttgccacgccgctcttcgtcctcttcagcccggtgctggttccagccacggtcgccatcggcctggccgtggccgggttcctgacgtcgggggccttcgggctcacggcgctgtcttccttctcctggatcctgaactacatccgggagacccagccagcctcggagaacctcgccgccgccgcgaagcatcacctcgccgaggcggcggagtacgtggggcagaagacgaaggaagtggggcagaagaccaaggaggttgggcaggatattcagagcaaggcacaggatacaagggaggcagctgcaagggatgcaagggaggcagctgcaagggatgcaagggaagctgctgcaagggatgcaaaggtggaggcaagggatgtaaagagaacaacagtgacagcaacaaccgcaaccgcatgatgagtaattctgatattagagggagcattaatgtgttgttgtgatgtggtttatatggggaaattaaataaatgatgtatgtacctcttgcctatgtaggtttgtgtgttttgttttgttgtctagctttggttattaagtagtagggacgttcgttcgtgtctcaaaaaaaggggtactaccactctgtagtgtatatggatgctggaaatcaatgtgttttgtatttgttcacttccattgttgaattcaatgtcaaatgtgttttgcgttggttatgtgtaaaattactatctttctcgtccgatgatcaaagttttaagcaacaaaaccaagggtgaaatttaaactgtgctttgttg

SEQ ID NO: 8123 - DNA, 1690 bp, Glycine max; identical to SEQ ID NO: 8081
  Clone ID: 700735374_FLI

SEQ ID NO: 8124 - DNA, 1113 bp, Glycine max
  Clone ID: 700735386_FLI
agacggtaacggaaccgttaagaccatcgccgaggccattaagaaggtgccggaatatagttcacgccgcattattatctacgtcagggcaggaaggtatgaagaagagaatttaaagttggggaggaagaaaacaaatgtgatgttcataggggacgggaagggcaaaaccgtcatcacgggcggaagaaattattaccagaatctgaccacatttcacaccgcgtccttcgctgctagtggttctggtttcatcgcaaaagacatgactttcgagaactacgccgggccggggaggcaccaggcggtggccctccgcgtcggagcagaccacgcggtggtgtaccgctgcaacatcatcggataccaggacacaatgtatgttcactcgaaccgtcaattttaccgagaatgcgacatttacggaaccgtggacttcatattcggcaacgccgcggtggtgttccaaaactgcaccctctgggcccgaaagcccatggcccaacagaagaacaccatcacggcccaaaaccgaaaggacccgaatcagaacacgggcatttcgatccacaattgtaggatcatggccacgccggatcttgaagcatccaagggtagctaccccacttatctgggccgtccctggaaactttacgctagaactgtttacatgctatcttacataggggatcacgtgcatccacgtgggtggctcgagtggaacacttcctcctttgctttagacacgtgttattatggtgaatacatgaattatgggccgggttcaggtctgggccaacgggttaattgggccgggtatcgggttatcaattcgacggtggaagcttctagatttacggtgggccaattcatatcgggctcgtcatggttgccctctactggagtggcattcattgctggcttatcaacctgagttattccaatgtctctgtagacacttttcaaaatcttccttcatagtttaaaccaaatcaatttgccaaatgtactaaactacaatatagttttttttttaacccaatgatgatggtgataataaggaatgtatgtaaacaatgttcagtgtcatatatagttctttatttttggctt

SEQ ID NO: 8125 - DNA, 1049 bp, Glycine max
  Clone ID: 700735465_FLI
gtttggtatagatatgagggtcaattcgttgaggatcctaataacgagggtttgacaatcgatttcgatcgagatataagccaaacgataaatgaggaagaggaagaggacgtcccatcaccagagttggagaggttggtcgctcaggaagaacgtgaaatgaagcctcaccaagaagaaaccgaattggtaaacttgcggaccacggaggaaaagaaagaagtaaaggtaggaaccggtatgaccgtgtctatccgccaaggcttgataacccttcttgaagagtatcaagatgtctttgcgtggtcgtatcaagacatgcctggtttggattccgacattgtgcagcataagttgcctttgaatcctgggtcttccccggttaagcaaaagttacgaagaatgaaacccgagatgtctttaaaaattaaagaagaagtaaggaagcagtttgatgcaggattcctagctgtggcgcggtacccggaatgggtggccaatattgtcccagtcccgaaaaaggacggcaaagttcgaatgtgtgtagactaccgggacttgaaccgagccagtcctaaagacaattttcccctgccacacattgatatattggtagataatacagccaaattcgcccttttctcatttatggatggtttctcggggtataattagataaagatggcacccgaagatgtagagaagaccactttcgtcaccctatgggggacattctgctataaagtgatggccttcaggctgaaaaatgctggggctacctatcaacgtgccatggtggcgttgttccatgataggatgcataaggaaatagaggtctacgtagatgacatgattgccaagtctcggactgaggccgaacaccttgtcaatctgcgtaagctttttggaaggttgcggaaataccaattaaaactgaacccaaccaaatgcacctttggggtgaagtcggggaagctgctaggatttatcgtaagtcagaaagggatagagatagatcctgagaaagtaaaggccatccttgaaatgcc

SEQ ID NO: 8126 - DNA, 1139 bp, Glycine max
  Clone ID: 700735472_FLI
cttgagattttcaagaataacttgaactatatcagggacatgaatgcaaacagaaaatcaccccattctcatcgtttaggattgaacaagtttgctgacatcactcctcaagagttcagcaaaaagtacttgcaagctcccaaggatgtgtcgcagcaaatcaaaatggccaacaagaaaatgaagaaggaacaatattcttgtgaccatccacctgcatcatgggattggaggaaaaaaggtgtcatcacccaagtaaagtaccaagggggctgtggaagcggttgggcgttttctgccacgggagccatagaagcagcacatgcaatagcaacaggagaccttgttagcctttctgaacaagaactcgtagactgtgtggaagaaagcgaaggttgttacaatggatggcactatcaatcgttcgaatgggttttagaacatggtgggattgccactgatgatgattatccttacagagctaaagagggtagatgcaaagccaataagatacaagacaaggttacaattgacggatatgaaactctaataatgtcagatgagagtacagaatcagagacagagcaagcgttcttaagcgccatccttgagcaaccaattagtgtctccattgatgcaaaagattttcatttatacaccgggggaatttatgatggagaaaactgtacaagtccgtatgggattaatcactttgttttacttgtgggttatggttcagcggatggtgtagattactggatagcgaaaaattcatggggagaagattggggagaagatggttacatttggatccaaagaaacacgggtaatttattaggagtgtgtgggatgaattatttcgcttcatacccaaccaaagaggaatcagaaacactggtgtctgctcgcgttaaaggtcatcgaagagttgatcactctcctctttgagccgtaaaggttcaatacaacgagtgcttgttttcttagggacaagcattggacttatgtatgattctgtgtaaccatgagtcttccacgttgtactaatgtgaagggcaaaaataaaacacagaacaagttcgtttttctcaaataatgtgaaggtagaaaatggaaccatgcctcctctcttgcatgtg

SEQ ID NO: 8127 - DNA, 610 bp, Glycine max
  Clone ID: 700735473_FLI
ggaatttccatcagtaagaaattgttggatcaaacatctgatgacttccacaaggtgttgcacactgctattcgctgcatcaatgaccataagaagtactatgagaaggttttgcgcaatgcagtcaagaagtttggaactgacgaggatggactaagccgtgtgattgttacaagggctgagaaggatctgaaggacatcaaagagctctactacaagagaaacagtgttcaccttgaggatgaagtgtccaaggaaacttctggggactacaagaagttcctcctcactctcttggggaaataagactaagttaagaacttgctctaagggcatcttagtaatgggtttttgttaattatgtcattggtttctggtttgtgcgatttcattatgttagttttccagtaagagtttgttatatctggttaagtttttgagacaacaagaactcgtgtcttgtttgagggcatgcgtgccatttcttagggttgtgttggtacttggcatgctcttattagaggacctctatgctgcgtgtttcctttggattatgctattacctcacctggtttgcttttaatgaaaggttgataacaaatttatatgt

SEQ ID NO: 8128 - DNA, 690 bp, Glycine max
  Clone ID: 700735514_FLI
cttactacttaatttccacttctaattaacaaagttaagcaagcattgacttggtacctataagtagtaatggctgtggctttgacgattgtgttgagcttgctctcggttctctcttctgcatcttgtgcacgaatggtgggggggaagacggaggtccccgacgtgagaacaaacagggaagtgcaagagcttggaaggttcgcggtggaggagtacaaccgcggtttgaaacagtggaagaacaatgggagtgaacagttgaacttttcggaggtggtggaggcgcagcaacaagtggtgtcaggaatgaagtactacttgaagatctcagctactcataaaggggttcacaaaatgttcacctctgttgtggtggtcaagccatggcttcattccaagcaactccttcattttgcgcctgcagcaccatccagtaaagatttttgagatgcatgcatgctagctatttggagctaattaattatataataattaataaccatggcggtatttgtaattgcaagtgagctttttgattttcttctactaaagttttcctctactttttgtaatgggtatatctgtgggcagaacaacaaaaatcaactacgagttgaaatcttacttaccagccatatgtaccaaagaaagtgaataataactatatatatgctatagttttgttct

SEQ ID NO: 8129 - DNA, 1541 bp, Glycine max
  Clone ID: 700735533_FLI
ggaacatgaagaaggggtggtggttagggagagaaaagcaacttccttttcaaccaaatagtgccaacccactctttaactatttcccttttcaaccattgcttagatgctctctaagccttcatctgctatgcccacttttccttcttccatggtgagaagtgggttgtgcgtgtggccaaatgtgagacaactttgctttagaaaaggcattctatatgggtttatgcgattgttttctactccgttgaaaacgctgcgtggagctagccgctcgctgagagtggctcaattttgcagtgttgccaatatgtcttcctcattgcagattgaattggtaccttgcctgaaggacaattatgcatatctgttacatgatgtagatacgggtacagttggtgttgttgatccttctgaagctgtgcctgtcatagatgccttgagtaggaaaaatcgaaatttgacatacatactcaacactcaccatcatcatgatcacacgggtggaaatgtagaattgaaagcaagatacggggcaaaggtgattggttcaggaactgacaagaaaaggattcctggcattgatatccacttgaacgatggtgataagtggatgtttgctggccatgaggtgcgtgtaatggacactcctggtcacacccaaggccatataagcttctattttcctggatctggggcaatttttactggagacactttgttcagcttatcatgtggcaagctctttgaaggaaccccacagcagatgctatcttctcttaaaaagatcatgtctttgccagataatacaaatatatactgtggacacgagtatacattgaataatacaaagtttgcattgtctatcgaacctgaaaacgaggaacttcaatcctatgctgcccaagtagcttaccttcgaagtaaaggcctgcccacgattcccaccacactgaagatggaaaaggcttgtaatccattccttcgtacatccagtgctgcaatccggcaatcactaaacattgcagccacagcaaatgatgcagaagcccttggtggcatccggcaagcaaaggataatttttagatttttgacttacaatattttgaacgtttgaagaaacttgttctatgtagggtaggatataaatccatccgtggaataatatatgcttgatgctatgttctcgatgtatatgatttcagaaattttggttctatttggaagtgtgtgtacttggtgcctaagaaagttgtggtgcgatttagaggggtacaatgcacacatgacactcactcagtgttctgttcagttgaggatgtgtggcgggaagaagggtagctagaagtttaaagtaaactccttgtccttggccaatggccacccaccccacttccctcagaagaacaagaaccttgtaaatgtatgggtctgtactctggacttagagcgcgtatatttggcttcttcaggatctatctgcaagtctcaacatacaaataaaataaatcaattagtaatataaattatactattttat

SEQ ID NO: 8130 - DNA, 961 bp, Glycine max
  Clone ID: 700735604_FLI
ctccaatcccatgatgcaggaaaaaaggtgtcatcacccaagtaaagtaccaagggggctgtggatggtcacaagaatattgttccttcttcatgggattggaggaaaaaaggtgtcatcacccaagtaaagtaccaagggggctgtggaagcggttgggcgttttctgccacgggagccatagaagcagcacatgcaatagcaacaggagaccttgttagcctttctgaacaagaactcgtagactgtgtggaagaaagcgaaggttgttacaatggatggcactatcaatcgttcgaatgggttttagaacatggtgggattgccactgatgatgattatccttacagagctaaagagggtagatgcaaagccaataagatacaagacaaggttacaattgacggatatgaaactctaataatgtcagatgagagtacagaatcagagacagagcaagcgttcttaagcgccatccttgagcaaccaattagtgtctccattgatgcaaaagattttcatttatacaccgggggaatttatgatggagaaaactgtacaagtccgtatgggattaatcactttgttttacttgtgggttatggttcagcggatggtgtagattactggatagcgaaaaattcatggggagaagattggggagaagatggttacatttggatccaaagaaacacgggtaatttattaggagtgtgtgggatgaattatttcgcttcatacccaaccaaagaggaatcagaaacactggtgtctgctcgcgttaaaggtcatcgaagagttgatcactctcctctttgagccgtaaaggttcaatacaacgagtgcttgttttcttagggacaagcattgtacttatgtatgattctgtgtaaccatgagtcttccacgttgtactaatgtgaagggcaaaaataaaacacagaacaagttcgtttttctc

SEQ ID NO: 8131 - DNA, 614 bp, Glycine max
  Clone ID: 700735616_FLI
gaacgagggagctctttttctgccacacttcaattcaaaggccatagtggtactagtgattaatgaaggagaagcaaacattgaacttgttggcattaaagaacaacaacagaggcagcaacaggaagagcaacctttggaagtgcggaaatatagagctgaattgtctgaacaagatatatttgtaatcccagcaggttatccagttgtggtcaacgctacctcagatctgaatttctttgcttttggtatcaatgccgagaacaaccagaggaacttccttgcaggttcgaaagacaatgtgataagccagatacctagtcaagtgcaggagcttgcgttccctgggtctgcaaaagatattgagaacctaataaagagccaaagtgagtcctactttgtggatgctcagcctcagcagaaagaggaggggaacaagggaagaaagggtcctttgtcttcaattttgagggctttttactgaataagtatgtagtactaaaatgtatgctgtaatagctcatagtgagcgaggaaagtatcgggctatttaactatgacttgagctccatctatgaataaataaatcagcatatgatgcttttgttttgtgt

SEQ ID NO: 8132 - DNA, 1430 bp, Glycine max
  Clone ID: 700735790_FLI
ctttcagctatgaacgctctagcagccaccaaccgtaacttccgacgtgcagctcacattctcggtttggacactaagcttgagaatagccttctcattcccttcagggaaatcaaagttgaatgcacgatcccaaaagatgacggaacactagtatcatatgtaggattcagaattcaacatgacaatgctcgtggaccgatgaaaggagggattcgttatcacccggaggttgaccctgatgaagtgaatgctctagctcagctaatgacatggaagacagccgtagcagacattccttatggaggagcaaagggtggaattggctgcaacccgagggacctcagcgtcagcgagttagaacgtctaactcgcgttttcacccaaaagattcatgatctcattggtattcagagagatgttcctgcccctgacatgggaactaattcacagacaatggcttggattcttgatgagtattctaagtttcatggacattcaccagcagttgtgactgggaaacctatagatcttggaggttcattgggaagagaggctgccacaggattgggagtgatttttgcaacagaggctttatttgctgaatacgggaaatcaatttctgatatgacatttgtaatccagggatttggaaacgtgggcacttgggctgctaagtcaatttatgagagagggggtaaggtgatagctgtgagtgacatcagtggtgctattagaaacccaaatggaatcgatatacctgctctgctgaaacacaaggaaggcaatggaaatttgaaggaattctcaggagcagatatcatggatcctgatgaattgcttgttcatgaatgtgatgttctcatcccttgtgccttgggaggagttctcaacaaggaaaatgctgctgatgtgaaagcgaaatttataatagaagctgcaaatcatccaactgaccctgatgctgatgagatattgtctaagaaaggagtcatcatattacccgacatatatgctaatgccggtggagtgactgtgagctactttgagtgggttcagaatattcagggatttatgtgggatgaagagaaagtgaaccgtgagctgaaaaagtatatgactaaagccttccgcaacataaaggcaatgtgtcaaattcataactgtgacttgcgaatgggagccttcagtctcggagtgaaccgtgttgctcgagctacacttctcaggggttgggaagcttaatagaacacatgcatcaccgcttgctaaacaagttttctagcttagtattatgttgttgccctttctccagtatgctcctttttttccgtttgttatttgatcggtttagtttaatttagtttagtaattgagtatcattgttgcctaagaaccacatgtgaagttacaggtggatgtgtttcttt

SEQ ID NO: 8133 - DNA, 1730 bp, Glycine max
  Clone ID: 700735794_FLI
tctctccattggtccttaaacactcatcagtcatcaccatggccaagctagttttttccctttgttttctgcttttcagtggctgctgcttcgctttcagttccagagagcagcctcagcaaaacgagtgccagatccaaaaactcaatgccctcaaaccggataaccgtatagagtcagaaggagggctcattgagacatggaaccctaacaacaagccattccagtgtgccggtgttgccctctctcgctgcaccctcaaccgcaacgcccttcgtagaccttcctacaccaacggtccccaggaaatctacatccaacaaggtaagggtatttttggcatgatatacccgggttgtcctagcacatttgaagagcctcaacaacctcaacaaagaggacaaagcagcagaccacaagaccgtcaccagaagatctataacttcagagagggtgatttgatcgcagtgcctactggtgttgcatggtggatgtacaacaatgaagacactcctgttgttgccgtttctattattgacaccaacagcttggagaaccagctcgaccagatgcctaggagattctatcttgctgggaaccaagagcaagagtttctaaaatatcagcaagagcaaggaggtcatcaaagccagaaaggaaagcatcagcaagaagaagaaaacgaaggaggcagcatattgagtggcttcaccctggaattcttggaacatgcattcagcgtggacaagcagatagcgaaaaacctacaaggagagaacgaaggggaagacaagggagccattgtgacagtgaaaggaggtctgagcgtgataaaaccacccacggacgagcagcaacaaagaccccaggaagaggaagaagaagaagaggatgagaagccacagtgcaagggtaaagacaaacactgccaacgcccccgaggaagccaaagcaaaagcagaagaaatggcattgacgagaccatatgcaccatgagacttcgccacaacattggccagacttcatcacctgacatctacaaccctcaagccggtagcgtcacaaccgccaccagccttgacttcccagccctctcgtggctcagactcagtgctgagtttggatctctccgcaagaatgcaatgttcgtgccacactacaacctgaacgcgaacagcataatatacgcattgaatggacgggcattgatacaagtggtgaattgcaacggtgagagagtgtttgatggagagctgcaagagggacgggtgctgatcgtgccacaaaactttgtggtggctgcaagatcacagagtgacaacttcgagtatgtgtcattcaagaccaatgatacacccatgatcggcactcttgcaggggcaaactcattgttgaacgcattaccagaggaagtgattcagcacactttcaacctaaaaagccagcaggccaggcagataaagaacaacaaccctttcaagttcctggttccacctcaggagtctcagaagagagctgtggcttagagccctttttgtatgtgctaccccacttttgtctttttggcaatagtgctagcaaccaataaataataataataataatgaataagaaaacaaaggctttagcttgccttttgttcactgtaaaataataatgtaagtactctctataatgagtcacgaaacttttgcgggaataaaaggagaaattccaatgagttttctgtc

SEQ ID NO: 8134 - DNA, 1909 bp, Glycine max
  Clone ID: 700735848_FLI
cttaattattaacacttccttagttcaatatggggaagcccttcactctctctctttcttccctttgcttgctactcttgtcgagtgcatgctttgctattagctccagcaagctcaacgagtgccaactcaacaacctcaacgcgttggaacccgaccaccgcgttgagtccgaaggtggtttgattcaaacatggaactctcaacaccctgagctgaaatgcgccggtgtcactgtttccaaactcaccctcaaccgcaatggcctccacttgccatcttactcaccttatccccggatgatcatcatcgcccaagggaaaggagcacttggagttgcaattccaggatgtcctgagacgtttgaggagccacaagaacaatcaaacagaagaggctcaaggtcgcagaagcagcagctacaggacagtcaccagaagattcgtcacttcaatgaaggagacgtactcgtgattcctcctggtgttccttactggacctataacactggcgatgaaccagttgttgccatcagtcttcttgacacctctaacttcaataaccagcttgatcaaacccctagggtattttaccttgctgggaacccagatatagagtacccagagaccatgcaacaacaacaacagcagaaaagtcatggtggacgcaagcaggggcaacaccagcaggaggaagaggaagaaggtggcagcgtgctcagtggcttcagcaaacacttcttggcacaatccttcaacaccaacgaggacatagctgagaaacttcagtctccagacgacgaaaggaagcagatcgtgacagtggaaggaggtctcagcgttatcagccccaagtggcaagaacaacaagatgaagatgaagatgaagacgaagatgatgaagatgaacaaattccctctcaccctcctcgccgaccaagccatggaaagcgtgaacaagacgaggacgaggacgaagatgaagataaacctcgtcctagtcgaccaagccaaggaaagcgtgaacaagaccaggaccaggacgaggacgaagatgaagatgaagatcaacctcgcaagagccgcgaatggagatcgaaaaagacacaacccagaagacctagacaagaagaaccacgtgaaagaggatgcgagacaagaaacggggttgaggaaaatatctgcaccttgaagcttcacgagaacattgctcgcccttcacgcgctgacttctacaaccctaaagctggtcgcattagtaccctcaacagcctcaccctcccagccctccgccaattccaactcagtgcccaatatgttgtcctctacaagaatggaatttactctccacattggaatctgaatgcaaacagtgtgatctatgtgactcgaggacaaggaaaggttagagttgtgaactgccaagggaatgcagtgttcgacggtgagcttaggaggggacaattgctggtggtaccacagaacttcgtggtggcggagcaagccggagaacaaggattcgaatacatagtattcaagacacaccacaacgcagtcactagctacttgaaggatgtgtttagggcaattccctcagaggttcttgcccattcttacaaccttcgacagagtcaagtgtctgagcttaagtatgaaggaaattggggtcctttggtcaaccctgagtctcaacaaggctcaccccgtgttaaagtcgcataaatgacaagcatgatggtgtgaggatgaggccatcttatgaaataataacaaataaataaattttgtatgataataaaaagtatggcccatgtaccatcccagcgagcctatgtttatatctgagtggcgttgtacctttgaatcgccttaataaaatgtcagtcttcaagttttgtctttaaaaaaac

SEQ ID NO: 8135 - DNA, 813 bp, Glycine max
  Clone ID: 700735863_FLI
ttgaaatggaagaggagcctgtttatgtcaatgcgaagcagtatcatggtattttgaggcgaagacagtcacgtgctaaggctgagattgaaaagaaagtaatcaaaaacaggaagccatacctccacgaatcccgtcaccttcatgcaatgagaagggcaagaggcaacggtggtcgctttctcaacacaaagaagcttgaaaataacaattctaattccacttcagacaaaggcaacaatactcgtgcaaacccctcaacaaactcgcctaacactcaacttttgttcaccaacaatttgaatctaggctcatcaaatgtttcacaagccacagttcagcacatgcacacagagcagagtttcactataggttaccataatggaaatggtcttacagcactataccgttcacaagcaaatgggaaaaaggagggaaactgctttggtaaagagagggaccctaatggggctttcaaataacacttccctcagccatacagcaacagttaggtgaagatgaagggctttatctcatccaacttgtgatgctgtatagaaggcaattcattcttggcttagttaagtggtgagaccagtgacatggtgtacactatggccttgtttggtctctcccttgcttttgtttctctctacaagtccatatgtaaaatggataacagaaagaaaaagaaaaatcactttggtttgagaactttttaaagtttatattaactgtgttaaggttcataaaactgtagactgatttgtgtgacatgctccacagaaccttaaattttcctctattttgtcc

SEQ ID NO: 8136 - DNA, 2066 bp, Glycine max
  Clone ID: 700735901_FLI
aaacacagtgttgattcccaaatccccattagttttcaaaataaagactttgcgtggcacccacaagaaggccacacagtcaccaccaccaccacccatttctcccggtgcgcgactcactttatttttattcatccttccttcctaacagatccgatccccgatggcggcggcgtcgcggcggctccgggacctgcagtcctcggcggggaacaagatctgcgtggactgctcccagaagaaccctcagtgggcctccgtctcctacggcgtcttcatgtgccttgagtgctccggcaagcaccgcggcctcggcgtccacatctccttcgtccgatccgtcaccatggactcctggtcagacatccagatcaagaaaatggaagccggcggcaacgacaaactcaacgccttcctcgcccagtactccatccccaaagaaactgacatcgtcacgaaatataacaccaacgccgcttctgtgtaccgcaaccggatccaggccatcgctgagggacgtccctggcgcgatccgccggtggtgaaggaaaacctctccgccggaaaggggaaaccgccgctgacacaaacgcggaggaacaacgattctggatgggatgattggggtaacgaggggagtcctcggagcaagagcatgtcgaccggggattttaggactctgaatggagccggcggagcgccggcgaggtccaggtccacggaggatatctacacgcggtcgcagctggaggcgtcagccgcgaacaaggagggattcttcgcgcggaaaatggcggagaacgagtcgcggccggaggggctgccgccctcgcagggagggaagtatgtagggtttggatccagcccgacgccgccgccacagcggcggaatgatgcccaaaacgattacttctctgtcgtttcgcaggggattgggaagttgtcttttgttgctgcctctgcggctaatgttgttcaggttggcacgaaggagttcacttccaaggtcaaggaaggtggttacgatcataaggtgaatgaaactgtcaatgttgtcactcagaagacatcagagattggacagaggacttggggcataatgaaaggagtcatggctatggcttcccagaagattgaggagtacactaaggatgatccaaactggaagaatgataactggcaacgaaatgagaatgatacaaatggttattatcaggattttaatcgagagaaaaaaggatggaattcttctactggaagagaacaatcttcatcaggggaatataaaactgaaagctctagctcttgggatgattgggaccacaaagatagcaggaaggaagaaccagctaaaggatcaactcattcatcaggtgggcagtttagtacctacaactcaagctcttgggatgattgggaacacaaagattctaggaaggaagaacctgctaaaggatcagctccccataataatgatgattgggctggctgggataatgccaaagatgatggattcgataatatttatgaaggtgctaataagaaaggtgttggtcataaggggaaatctgatggcacttggacagaggaaggctttctctaagatttcaaggtcataatttgaaacaaattattacttgttatacttcttggaccccaggggtgattggacttcattaccagtttcgtgatttgttcctcaagtgacaaaaaaatactgtagtttacgcactgatggcatgcaggccaagcaggggcgccaccaaccaaacatgatactcgattttcagctataacttttaatcccattgttcctttttaaacccagacccattcttctcctttccatcgtttcttcaatattcccttctcttttgtaatttttgggaatgttcgttggagagatagtatccaaaaatgggctaatctcccaaatatcaattcttaagagcattattgcctgcgtagtgcgatgaaacattaatggcagggaaatttcagaaatgtagcctcttaatttgactgcttataattttatgagtgcccttccctcgcctgtttctcat

SEQ ID NO: 8137 - DNA, 1356 bp, Glycine max
  Clone ID: 700735922_FLI
tcaaaattccataaaatggagcctcgcaaagcttcaccattatcgtgggtcttgatcttcttccttaccatttccttgtggggagttaaggtatcaagtgaagagcaccaccaccatggcaaatctaaagagggacctgtggtggaaagggatcaaaggaggacattacttgtcactgaatttggagagatcactgccattgacatcaaggaaggacaaaaggaactaccctaccatcttcagttcatcacattggagccaaactcgctatttctccctgtgcttctccaagcagacatggtcttttatgttcatacagggagtggaaagctgacttgggcaaatgatgatggtactagtacgattcgtttacgcgaaggagatgtctgcagtctcaatgaaggatctgttttctatatacagagcaacttagaggctgagagaaggaaacttaggatttatgcaatgtttaccaacacagacgacaatacttacgatccatcaatcggtgcttactcaaggatcaatgaactggtcaaaggctttgataagaaaatcatgcaagcagctttgaaggtgccggaagatttgatcgaagcaatcattaacaagacggagactccagctatagtgcatgcggttccagagaagcgaaatattgtccaggagctggaggcttcgtttcttaaaaactttttaggcgttgggtccaactccaagaaactcgaaacatacaacatctttgagcatgaccctgacttcaaaaatcccattggttggagcacagcagtgaccaaaaagcaactaaagtcattgaagcggaccaacattggatttctgatggtgaatttgaacatgggatcaatattggggcctcattggaatgcaaaggcaacagagttgacagtgggagtggatggggaaggcatggtccgagtagtatgtggaagcggcaatgaaaatgagacagaatgccaaaacatgaggtttaaggttaaggaaggtgatgcttttctggtgcctaggtttcatccaatggctcagatgtcattcaacaatggaccatttgtttttctcggcttcagcacttcagcaaagaaaaaccaccctcagtttttggcgggaaagggatcagtgcttcatattctagacaaaaagatactggccaggtctttgggtgtgagtaacagaaccattgatgagcttctgcgttctcccgaggactccatcattttcagatgcagttcctgcgcagaggaagaggagaagataatgaaggaggaggaggaggaagaggagagcaagaaagaagaagaagagaggaagaaaaaagaagaggaggaggaggaagaggag

SEQ ID NO: 8138 - DNA, 1443 bp, Glycine max
  Clone ID: 700735923_FLI
tgcagaccgagctagctagctagcaagcaagcacagagatggaggcaaagcgaggccatgccctcatgtgcttggcacgtgtttcactcttcctctgcgctctaaccctatccgctgctcacggaagcaccacggttcaagacatcgcgagaaagttgaaactcggggacaacgagcttctgcgcacggagaagaagttcaaggttttcatggagaattacgggaggagctactccacagaggaggagtatttgcgccgtttggggattttcgcccagaacatggtcagagcggcggagcatcaggcgctggaccccaccgccgtccacggcgtcacgcagttctccgatctcaccgaggacgagtttgagaagctctacactggcgtcaatggcggcttcccgtcatcgaataatgccgccggcggtattgcgccgccgttggaggtggacgggctgccggagaattttgattggagagagaaaggagctgtcaccgaagttaagttacagggtagatgtggatcatgctgggctttcagcaccacaggatctatagaaggagccaattttcttgccaccggaaagctcgtcagtcttagtgaacaacagctccttgactgtgacaacaagtgtgacataacagaaaagacttcatgtgacaatgggtgtaatggaggtcttatgacaaatgcctacaattatttgctcgagtctggtgggttggaggaggagtcttcatatccctacactggggagagaggtgaatgcaagtttgatccagagaaaatagcagttaagatcacaaatttcaccaatatccctgctgatgagaaccaaattgccgcatatttagtaaaaaatggtccacttgctatgggcgtgaatgcaattttcatgcaaacatacattggtggtgtctcatgccctctcatatgtagcaagaaaaggctgaaccatggtgtgttacttgtgggatatggtgcaaaaggcttctcaattcttaggcttggcaacaaaccatactggatcatcaagaattcgtggggggagaaatggggagaagatggctattacaagctctgcagagggcatggcatgtgtggaataaacactatggtttctgctgcaatggtgcctcaaccacaaacaacacctacaaagaattatgcttcttattagctatgcacttaaggaaatctaaataaatatttttcattctaggtgatgtatcatgtatgtaccaaaatattttggtacgtaagtcttttaaaaagtttgcatctcctctttggttttccttagttctgaaagttatctcctaagaagacaatcatatgtactgtacgtagtgtgaagatatagtattgtatgctgcagaatatgattgtctaataaggtggactagctgtaataaaagatatttccaggttgaaaacagagc

SEQ ID NO: 8139 - DNA, 738 bp, Glycine max
  Clone ID: 700735975_FLI
attcatttggaatcatattgttgagattgttgactgggagaccagcattgggaataacaaaggaagtgaaatatgcattagacactggaaagttgaaatccctattggatcctttggctggagactggccatttgtgcaggctgaacagttggctcgcttggctttgaggtgttgtgatatgaatagaaagagccgaccggatctttattcagatgtctggaggatacttgatgcaatgagggtttcttctggaggtgcaaactcctttggattaagttctgaagggcttttacaacctccttcatattttatttgtccaatcttccaggaagttatgagagatccacatgtagctgcagatggttttacatatgaagctgaggctatacgaggatggcttgatggtggtcatgacaattcaccaatgactaacagtaagcttgcacatcacaatcttgttcccaaccgcgctcttcgctctgcaatccaggactggcttcaaaaccactgatcaagctcattatttttctctgcccattttgattgaactgtatatctgctgtttataccatgtctaggaaagaaagttgtcatttcattgtcaccttgtatcagttttgtttcttgtggttcttcattcacattttatacctatcctcttgtatagattagataaccacgggtttatcttacaatagttgtaaagtacatatatattatagcatgtatgtcagaac

SEQ ID NO: 8140 - DNA, 1309 bp, Glycine max
  Clone ID: 700736030_FLI
ggcaaaaggtgtgtggagtgctggtgcatgcgagcttatatggtgccaccacggcctatgtcattacatctgccaccagcatcagagcaatactgaaatcaaattgttatcacaaggaagggcatcaggctccttgtaaatatggggatgcagtatatatgatgctgtttggactagttcagatcataatgtcattcataccagatctccacaacatggcatgggtttcaattgttgcggccataatgtcctttacatactcatctattggacttggacttggcatcacaacagtaatagaaaatggaagaattatgggtagtttaacaggagtaccggcttcaaatattgctgacaagttatggttagtcttccaaggaattggtgatattgcctttgcctatccatacacagtcatcctccttgagatacaggacactctagagtctcctccaccagaaaacaagaccatgaaaaaggcctccatgattgctatcctcattacaacattcttctacctctgctgtggatgctttggatatgcggcttttggaaatcaaacaccaggaaacctcttgacagggtttggattttacgagccttactggctcattgactttgccaatgcttgcattgttcttcacttggtaggaggatatcagatttacagtcagccgatatatggtgctgttgacagatggtgttcaaaaagataccccaacagtggatttgtgaataatttctaccaattgaaactgcctcggttgccagcttttcagctaaacatgttcaggatatgttttagaacagcttatgtggtttccacgactggacttgcgatcctatttccttacttcaatcaagttataggagtgttaggagccttaggcttttggccattggctatatatttcccggtagagatgtactttgtgcagaggaaagttgaagcttggtctagaaaatggattgtcctcaggaccttcagctttatttgctttctggtgtcattactgggtctcattggatcacttgaaggaatcataagcgagaaactaagctaatgaagggtgcttcatttgtttgagtttaatgtcttgttgctcatatcttccatgtaattcagtttcatgctaattctattactattgagagttaataaaggggataccaattatgtggggatgtgtcaaaatgaaggtggtgttgagcatggtatagttctgtttggtgaagaactccctttaaaggtgtaatgctacataaacaactctctatgcacataaacttgtattgatactggattatt

SEQ ID NO: 8141 - DNA, 589 bp, Glycine max
  Clone ID: 700736060_FLI
gctcctcacgctcacactcactcatttgcaaagaaagagagagaaatggcactgagggcagccgtgctccgccacgttcgtgtgccactccaagccgctccaaaactgcagccatggcgtgccatgtcatcacacggcgacgatcatctctccaaagaggaggtcgtcgaaagagtcctcgccgtcgtcaaagatttccccaaagtcgatccttccagggtgagtccagatgtacatttccagaaggatttgggtttggatagcttggacaatgtggaaattgtaatggcactagaagaggagttcaagctagagatcccagacaaggaagctgataaaattgactcttgtcatcttgctattgagtacatttctaaccatcccatggctggttaactaatgtgtcctttttcctatttggcttcatgttgaacttaaacacagtgcaaccttgaaccttccccttactttcactggatgtttctggaatctggtgttgttggtatgttttcctttttccatttaaattggagtaaaggggctggttgtttagaataatgtgaattgttcagagaagagtttgtcaatg

SEQ ID NO: 8142 - DNA, 286 bp, Glycine max
  Clone ID: 700736123_FLI
ctagttctagcaaagcgtgcgtcatatatggaatttaatgatgttttgagatccacaagaacgcagttagagcgtgagcttggtcttgaagacatcttcagcgtgaaagatttacctgcttacaacatgttgagatgattgacaattgcctttcagttcaacatttctcttccttttttttttgtttcttttggcggagaatgttacatgaaatgtatctaaagcatttgtcattttatctctatatagaaacgtgaaaatcaaatatcagatcaatctttctgct

SEQ ID NO: 8143 - DNA, 1079 bp, Glycine max
  Clone ID: 700736209_FLI
gaaccacatactatgtggtcaaccctgacaacaacgaaaatctcagattaataacactcgccatacccgttaacaagcctggtagatttgagagtttcttcctatctagcactgaagctcaacaatcctacttgcaaggattcagcaggaacattttagaggcctcctacgataccaaattcgaggagataaacaaggttctgtttagtagagaggaagggcagcagcaaggggagcagaggctgcaagagagcgtgattgtggaaatctcgaaggaacagattcgggcactgagcaaacgtgccaaatctagttcaaggaaaaccatttcttctgaagataaaccttttaacttgagaagccgcgaccccatctactccaacaagcttggcaagttctttgagatcaccccagagaaaaacccccagcttcgggacttggatatcttcctcagtattgtggatatgaacgagggagctcttcttctaccacacttcaattcaaaggcgatagtgatactggtaattaatgaaggagatgcaaacattgaacttgttggcctaaaagaacaacaacaggagcagcaacaggaagagcaacctttggaagtgcggaaatatagagccgaattgtctgaacaagatatatttgtaatcccagcaggttatccagttgtggtcaacgctacctcaaatctgaatttctttgctattggtattaatgccgagaacaaccagaggaacttcctcgcaggttcgcaagacaatgtgataagccagatacctagtcaagtgcaggagcttgcattccctgggtctgcacaagctgttgagaagctattaaagaaccaaagagaatcctactttgtggatgctcagcctaagaagaaagaggaggggaataagggaagaaagggtcctttgtcttcaattttgagggctttttactgaataagtatgtactaaaatgtatgctgtaatagctcatagtgagcgaggaaagtatcgggctatgtaactatgactagagcttcaactatgaataaataaatcgacagcatatgatgcttttgttttgtg

SEQ ID NO: 8144 - DNA, 2158 bp, Glycine max
  Clone ID: 700736227_FLI
attcggctagaggtagatatccaacaaggaaagataagtatctaacctacgagggtagggatgagtgctagaccctccaagaattgggagagcactcatccctacactcgtaggggaagaactggtcgatatccaacaaggaaagatcagaattctgagaagccaggcgaagtttatgttccaagagatgaaaattttggtcacttgaagtcctcggattttcttgcatatggaataaaatctttatctcaatatgtcttaccggcgttcgaatctgttttcgatttgaacttcacgccaaatgagtttgatagcttccaagatgtgcgtgacctccacgaaggtggaattaagcttcctacagaagtaattagcacaattatgcccttaccggtggtcaaagaactctttcgtacagatggtgaacaagtcctcaagtttccaccacctcatgtcattcaagtgagtaagtctgcatggatgaccgatgaagaatttgcaagagagatggttgcgggtgtaaatccatgcgtaattcgtggtcttcaagagtttcctccaaaaagcaatctggatcctacaatctatggtgagcaaaccagtaagataacagcagatgcccttgatctagatggatacacagtggacgaggcactagcaagtcggaggttatttatgttagattaccatgatgtattcatgccatatataaggcggataaatcagacatatgccaaggcttatgcgacaaggactatcctttttctgagagaaaatggaaccttaaagccagtggccatcgaattaagtttgccacatcctgctggggacctgtcaggtgctgtcagtcaagtcatcttacctgcaaaagaaggtgttgaaagtacaatttggctactggccaaagcttatgtggtcgtaaatgactcttgctatcatcaactcatgagccattggttaaatactcatgcggtgattgagccattcatcatagcaacaaaccgacaccttagtgctcttcacccaatttataagcttctaactcctcactaccgtgacaccatgaacatcaacgcacttgctaggcaatctctcattaatgctgatggcataatagagaaatcttttttgccctcaaagcattccgttgagatgtcttcagcggtttataagaattgggttttcactgatcaagcactacctgcagatcttatcaagagaggagtggcaattaaggatccatctgccccacatggacttcgacttctgatagaggactacccttatgctgttgatgggctagagatatgggctgcaattaagacatgggtccaagaatatgtgtccttgtactatgcaagagatgatgatgtcaaacctgattctgaactccaacagtggtggaaagaagctgtagagaaaggtcatggtgatctgaaagacaagccatggtggcctaagttgcaaacaattgaagagcttgttgaaatttgcaccattatcatatggactgcttcagccctccatgcagccgttaactttggtcaatatccatatggaggtttcattctgaatcgcccaacttcttctagaaggttgcttcctgagaaaggcaccccagaatatgaagaaatggtgaaaagtcatcaaaaggcttatttgagaactattacatcaaagtttcaaactctagttgacctttcagtgatagagatcttgtcaaggcatgcttctgatgaggtctaccttggccaaagggacaacccacattggacctctgactcaaaagcattacaagcctttcaaaaatttggaaacaagctcaaagaaattgaggaaaaacttgcaaggaagaacaatgatcaaagtctctccaatcgacttgggccggttcaactgccatacactttgctccatcctaacagtgaggaagggttgacttgcagggggattcctaatagcatctctatctaagggagcatgtggtctactttaattacagtactgtacctaccttccaataaaaaagatgcaaggctagagatccaataaatcttgcatcctatctaatgtttcaattatcttgtgttttaatgctgtaatggagcctacaatttgcaaattaattaagagcaccgagcactattagtttgcgttt

SEQ ID NO: 8145 - DNA, 618 bp, Glycine max
  Clone ID: 700736278_FLI
cgcaaacaaagaagttgcaggatatactccctagcattatccaccaattaggaccagataacttggaaaacctgaagaagcagggatggcattcacccctattctcttcagagcaccctgaagagaataggggtgaatgccatccctgctattgaagaggtcaatatctttaaggatgacgtagttatccagtttctaaatcccaaagttcaagcatccattgctgctaatacttgggttgtcagtggttcaccgcaaacaaagaagttgcaggatatactccctagcattatccaccaattaggaccagataacttggaaaacctgaagaagctagccgagcaattccagaagcaggctcctgaaggggccgctggttcaaccacagctcaagaggagaatgatgacgacgtcccagagcttgttccaggccaggattttgagacagctgctgaggagaccaaggctgcttcttagattgtgccatcgctaaatatctcctgtgttttaattttttcttcttcttgattttccattttaagtatttcaggtgtttggttctcctgtcatatactttaaacagttcaaatactctattaaatctgctttccttcatct

SEQ ID NO: 8146 - DNA, 1901 bp, Glycine max
  Clone ID: 700736290_FLI
cttaattattaacacttccttagttcaatatggggaagcccttcactctctctctttcttccctttgcttgctactcttgtcgagtgcatgctttgctattagctccagcaagctcaacgagtgccaactcaacaacctcaacgcgttggaacccgaccaccgcgttgagtccgaaggtggtttgattcaaacatggaactctcaacaccctgagctgaaatacgccggtgtcactgtttccaaactcaccctcaaccgcaatggcctccacttgccatcttactcaccttatccccggatgatcatcatcgcccaagggaaaggagcacttggagttgcaattccaggatgtcctgagacgtttgaggagccacaagaacaatcaaacagaagaggctcaaggtcgcagaagcagcagctacaggacagtcaccagaagattcgtcacttcaatgaaggagacgtactcgtgattcctcctggtgttccttactggacctataacactggcgatgaaccagttgttgccatcagtcttcttgacacctctaacttcaataaccagcttgatcaaacccctagggtattttaccttgctgggaacccagatatagagtacccagagaccatgcaacaacaacaacagcagaaaagtcatggtggacgcaagcaggggcaacaccagcaggaggaagaggaagaaggtggcagcgtgctcagtggcttcagcaaacacttcttggcacaatccttcaacaccaacgaggacatagctgagaaacttcagtctccagacgacgaaaggaagcagatcgtgacagtggaaggaggtctcagcgttatcagccccaagtggcaagaacaacaagatgaagatgaagatgaagacgaagatgatgaagatgaacaaattccctctcaccctcctcgccgaccaagccatggaaagcgtgaacaagacgaggacgaggacgaagatgaagataaacctcgtcctagtcgaccaagccaaggaaagcgtgaacaagaccaggaccaggacgaggacgaagatgaagatgaagatcaacctcgcaagagccgcgaatggagatcgaaaaagacacaacccagaagacctagacaagaagaaccacgtgaaagaggatgcgagacaagaaacggggttgaggaaaatatctgcaccttgaagcttcacgagaacattgctcgcccttcacgcgctgacttctacaaccctaaagctggtcgcattagtaccctcaacagcctcaccctcccagccctccgccaattccaactcagtgcccaatatgttgtcctctacaagaatggaatttactctccacattggaatctgaatgcaaacagtgtgatctatgtgactcgaggacaaggaaaggttagagttgtgaactgccaagggaatgcagtgttcgacggtgagcttaggaggggacaattgctggtggtaccacagaacttcgtggtggcggagcaagccggagaacaaggattcgaatacatagtattcaagacacaccacaacgcagtcactagctacttgaaggatgtgtttagggcaattccctcagaggttcttgcccattcttacaaccttcgacagagtcaagtgtctgagcttaagtatgaaggaaattggggtcctttggtcaaccctgagtctcaacaaggctcaccccgtgttaaagtcgcataaatgacaagcatgatggtgtgaggatgaggccatcttatgaaataataacaaataaataaattttgtatgataataaaaagtatggcccatgtaccatcccagcgagcctatgtttatatctgagtggcgttgtacctttcaatcgccttaataaaatgtcagtcttcacgttttgtcttt

SEQ ID NO: 8147 - DNA, 1484 bp, Glycine max
  Clone ID: 700736402_FLI
gtttggctctacaagtctttccttttctatttaattcctaaaatcccattcttcttcgctcattcctctgcactgccatcatccccaacttcctcacaaggttacaaggactaaagagttgtgccaccatgtcggacgatgaaagggaggagaaagagttggatctctcttctgccgaagttgtcaccaaatacaaaaccgctgctgagatcgttaacaaggccttgaagctagttatttcagaatgtaaaccaaaggcgaagattgtggatatttgtgagaaaggggattcatacattagagagcaaactggaaatgtgtacaagaatgtgaagaggaagattgagagaggtgttgctttcccaacatgtttatcaatcaacaacgttgtctgccatttctctccactagccagtgatgaggccgtgttggaagaaggtgatatattgaaaattgatatggcatgccatatagatgggttcattgctgtggtagctcacacccatgttcttcaggaaggtcctgttactggaagggcagctgatgtcattgctgctgctaatactgctgctgaggtggccttgaggcttgtcaggccgggaaagaagaacaaggatgtaagtgatgcaattcaaaaggttgctgctgcctatgactgtaaaattgttgagggtgttcttagccaccaaatgaagcagtttgttattgatgggaataaagttgtgcttagtttgtctaatccagacacaagggttgacgaagcagagtttgaggagaacgaagtttatgcaattgatatagtaacaagcactggggatggcaagcctaagctgttggatgagaagcagacaactatttataagagggctgttgacaagagttatcacttgaagatgaaagcgtctaggttcattttcagtgaaataagccaaaaatttccaatcatgccattctctgctagggctttggaagagaaaagagctcgacttggtttggtggaatgcgtcaaccatgagctcttgcagccatatcctgttttgcatgaaaagcctggtgattttgttgcacatatcaaattcacagtcttgttgatgccaaatggatcggatcgaatcacaactcatccactccaagaattgcagcccacaaaaacaatagatgatcctgatattaaggcctggctagccttgggcacaaagacaaagaagaaaggtggtggaaagaagaaaaaaggtaagaaaggggagaaggcagatgagtcagctgaagctgagcctatggactcaacaaacgaggccactcctcaagagtgacttaactctcctcccctctcctctcccccaaacaatgaaagaagttttttcatttcattttcgataccccttttcaattttggtacactgttcaccaaattgtattttgcttggatatcaattttagtatagtgttccgacattgattctaatagcaattttcatatgctc

SEQ ID NO: 8148 - DNA, 1689 bp, Glycine max
  Clone ID: 700736421_FLI
attgtctttgaacactcatcaccatggccaagcttgttctttccctttgtttccttcttttcagtggctgcttcgctctgagagagcaggcacagcaaaatgagtgccagatccaaaagctgaatgccctcaaaccggataaccgtatagagtcggaaggtgggttcattgagacctggaaccctaacaacaagccattccagtgtgccggtgttgccctctctcgctgcacccttaaccgcaatgcccttcgtagaccttcctacaccaacggtccccaggaaatctacatacaacaaggtaatggtatttttggcatgatattcccgggttgtcctagcacttatcaagagccgcaagaatctcagcaacgaggacgaagccagaggccccaagaccgtcaccaaaaggtacatcgcttcagagagggtgatttgatcgcagtgcctactggtgttgcatggtggatgtacaacaatgaagacactcctgttgttgccgtttctattattgacaccaacagcttggagaaccagctcgaccagatgcctaggagattctatcttgctgggaaccaagagcaagagtttctaaaatatcagcagcagcagcaaggaggttcccaaagccagaaaggaaagcaacaagaagaagaaaacgaaggaagcaacatattgagtggcttcgcccctgaattcttgaaagaagcgttcggcgtgaacatgcagatagtgagaaacctacaaggtgagaacgaagaggaggatagtggagccattgtgacagtgaaaggaggtctaagagtcacagctccagccatgaggaagccacagcaagaagaagatgatgatgatgaggaagagcagccacagtgcgtggagacagacaaaggttgccaacgccaaagcaaaaggagcagaaatggcattgatgagaccatttgcacaatgagacttcgccaaaacattggtcagaattcatcacctgacatctacaaccctcaagctggtagcatcacaaccgccaccagccttgacttcccagccctctggcttctcaaactcagtgcccagtatggatcactccgcaagaatgctatgttcgtgccacactacaccctgaacgcgaacagcataatatacgcattgaatgggcgggcattggtacaagtggtgaattgcaatggtgagagagtgtttgatggagagctgcaagagggaggggtgctgatcgttccacaaaactttgcggtggctgcaaaatcccagagcgataactttgagtatgtgtcattcaagaccaatgatagaccctcgatcggaaaccttgcaggggcaaactcattgttgaacgcattgccagaggaagtgattcagcacacttttaacctaaagagccagcaggccaggcaggtgaagaacaacaaccctttcagcttcctggttccacctcaggagtctcagaggagagctgtggttagagagccctttttgcatgtgctaccacacttttgtccttttgggctctagctagtgctggtagcagtaaataagaatgaataaaagaaacaaaggcttagatgccctttgttaagtgtagaataacgggtatagtaactatgtacccttgtgtaatgagtcactcaagtacctatgcgggaaaagcataaataaaagaagaaattccaat

SEQ ID NO: 8149 - DNA, 1707 bp, Glycine max
  Clone ID: 700736453_FLI
ctccattgtctttgaacactcatcaccatggccaagcttgttctttccctttgtttccttcttttcagtggctgcttcgctctgagagagcaggcacagcaaaatgagtgccagatccaaaagctgaatgccctcaaaccggataaccgtatagagtcggaaggtgggttcattgagacctggaaccctaacaacaagccattccagtgtgccggtgttgccctctctccctgcacccttaaccgcaatgcccttcgtagaccttcctacaccaacggtccccaggaaatctacatacaacaaggtaatggtatttttggcatgatattcccgggttgtcctagcacttatcaagagccgcaagaatctcagcaacgaggacgaagccagaggccccaagaccgtcaccaaaaggtacatcgcttcagagagggtgatttaatcgcagtgcctactggtgttgcatggtggatgtacaacaatgaagacactcctgttgttgccgtttctattattgacaccaacagcttggagaaccagctcgaccagatgcctaggagattctatcttgctgggaaccaagagcaagagtttctaaaatatcagcagcagcagcaaggaggttcccaaagccagaaaggaaagcaacaagaagaagaaaacgaaggaagcaacatattgagtggcttcgcccctgaattcttgaaagaagcgttcggcgtgaacatgcagatagtgagaaacctacaaggtgagaacgaagaggaggatagtggagccattgtgacagtgaaaggaggtctaagagtcacagctccagccatgaggaagccacagcaagaagaagatgatgatgatgaggaagagcagccacagtgcgtggagacagacaaaggttgccaacgccaaagcaaaaggagcagaaatggcattgatgagaccatttgcacaatgagacttcgccaaaacattggtcagaattcatcacctgacatctacaaccctcaagctggtagcatcacaaccgccaccagccttgacttcccagccctctggcttctcaaactcagtgcccagtatggatcactccgcaagaatgctatgttcgtgccacactacaccctgaacgcgaacagcataatatacgcattgaatgggcgggcattggtacaagtggtgaattgcaatggtgagagagtgtttgatggagagctgcaagagggaggggtgctgatcgttccacaaaactttgcggtggctgcaaaatcccagagcgataactttgagtatgtgtcattcaagaccaatgatagaccctcgatcggaaaccttgcaggggcaaactcattgttgaacgcattgccagaggaagtgattcagcacacttttaacctaaagagccagcaggccaggcaggtgaagaacaacaaccctttcagcttcctggttccacctcaggagtctcagaggagagctgtggcttagagagccctttttgcatgtgctaccacacttttgtccttttgggctctagctagtgctggtagcagtaaataagaatgaataaaagaaacaaaggcttagatgccctttgttaagtgtagaataacgggtatagtaactatgtacccttgtgtaatgagtcactcaagtacctatgcgggaaaagcataaataaaagaagaaattccaataaattttctgtcc

SEQ ID NO: 8150 - DNA, 1438 bp, Glycine max; identical to SEQ ID NO: 8079
  Clone ID: 700736460_FLI

SEQ ID NO: 8151 - DNA, 1273 bp, Glycine max
  Clone ID: 700736472_FLI
cagtttctgagtttcttctattttctgttcccaatttgtttcggatctctgttcacgaaccctaaatctgacgttaattcaccatgatctgaacacaacgtggttcccatctgatccactgcatcgtctttctcaattgtcgaaagatgagtacaagtggttaatgagattgaggaacttgcgttgtttgagcgaaacaaagcagagatgtacctgaaggagccgctatggagtgaaacagggaaaggcgatggaagtgcaaaaacagaggattatggtgcagtgagtgaggtcgtgaagtcactgcagcaacagagagtgtatagagaagtcactctcgcgctcagaacgggactcagagacgcgcgtgcagagttctcgtttctccgtgtccgtgctctccgttccattctcaagttcctgcgttccgttgcggagtctgattcaaccattgacctctttaaccaaatccaatccattccccaactccaagtggttccggttctgtttcagcactcgctcaaagagagtggggatgaatacagcgagaatagggtaggagatttgagtcatatattgggggttgaaccgatgaagttgacgagtccatccaccgatgctgaagttgcgcttgcccttagagtcttggaagggtgttgtttgcttcaccctcatagtacggctctcgcccatcaacacaacgctattcaggttttaatgaatatattatccactcgtggagtgcttgagcaaggtgcatgcttagatgctctaatctcattgatggtggattcatcattcaatcaaatggatttcgagaaatgtagtggtattatggaagttgctgaccttctaagagaccaacaactggatgaagatctcaggttaaaatgtggagagtttttgctgctgctcattggacatgtcaatggaagagatacgcctcctttagctactatacacgaagatacaaggcgccttcttggggagaaatcagcctccttgatatgggcagccagtcgtcagttcgattcaacactagatactgagcagaggctaacagatcttcagatccaggctcgcagggtccttgaatcattggacttgtactgaattttatggttcgtttggaaggaaaaaaatagagaggaaaaaaagcatggatcacgttgtctgatgtgtttcttttatttgatttgatagaaaaactgaaagaaatactaaaggaatagttgacttcatgagacaaaaattttaatttttctttctttct

SEQ ID NO: 8152 - DNA, 1734 bp, Glycine max
  Clone ID: 700736495_FLI
ggggaagcccttcttcactctctctctttcttccctttgcttgctactcttgtcgagtgcatgctttgctattacctccagcaagttcaacgagtgccaactcaacaacctcaacgcgttggaacccgaccaccgcgttgagtccgaaggtggtcttattgaaacatggaactctcaacaccctgagctgcaatgcgccggtgtcactgtttccaaacgcaccctcaaccgcaacggcctccacttgccatcttactcaccttatccccaaatgatcattgtcgttcaagggaagggagcaattggatttgcatttccgggatgtcctgagacgtttgagaagccacaacagcaatcaagcagaagaggctcaaggtcgcagcagcaactacaagacagtcaccagaagattcgtcacttcaatgaaggagacgtactagtgattcctcctggtgttccttactggacctataacactggcgatgaaccagttgttgccatcagtcttcttgacacctccaacttcaacaatcagcttgatcaaaaccccagagtattttaccttgctgggaacccagatatagagcacccagagaccatgcaacaacagcagcagcagaagagtcatggtggacgcaagcaggggcaacaccagcagcaggaggaagaaggtggcagtgtgctcagtggcttcagcaaacatttcttagcacaatccttcaacaccaacgaggacacagctgagaaacttcggtctccagatgacgaaaggaagcagatcgtgacagtggagggaggcctcagcgttatcagccccaagtggcaagaacaagaagacgaagacgaagatgaagacgaagaatatgaacaaactccctcttatcctccacgacgaccaagccatggaaagcatgaagatgacgaggacgaggacgaagaagaagatcaacctcgtcctgatcaccctccacagcgaccaagcaggcccgaacaacaagaaccacgtggaagaggatgtcagactagaaatggggttgaggaaaatatttgcaccatgaagcttcacgagaacattgctcgcccttcacgtgctgacttctacaacccaaaagctggtcgcattagcaccctcaacagtctcaccctcccagccctccgccaattcggactcagtgcccaatatgttgtcctctacaggaatggaatttactctccacattggaacttgaacgcgaacagtgtgatctatgtgactcgagggaaaggaagagttagagtggtgaactgccaagggaatgcagtgttcgacggtgagctaaggaggggacaattgctagtggtgccgcagaactttgtggtggctgagcaagggggagaacaaggattggaatacgtagtgttcaagacacaccacaacgccgtgagcagctacattaaggatgtgtttagggcaatcccttcggaggttctttccaattcttacaaccttggccagagtcaagtgcgtcagctcaagtatcaaggaaactccggccctttggtcaacccataaataacaacaagcatatatgaaggtgtggtgaggccatcttatatgaaataatatcaaaatatattttgtgtaataataaaactatggcctatgtatttaccaccctccgacccagcctatgttaatatctgagtggcgttgtacctttgaatcgccttaataaaatgtcagtcttcaagttt

SEQ ID NO: 8153 - DNA, 1759 bp, Glycine max
  Clone ID: 700736503_FLI
ctttccttagttcaatatggggaagcccttcttcactctctctctttcttccctttgcttgctactcttgtcgagtgcatgctttgctattacctccagcaagttcaacgagtgccaactcaacaacctcaacgcgttggaacccgaccaccgcgttgagtccgaaggtggtcttattgaaacatggaactctcaacaccctgagctgcaatgcgccggtgtcactgtttccaaacgcaccctcaaccgcaacggcctccacttgccatcttactcaccttatccccaaatgatcattgtcgttcaagggaagggagcaattggatttgcatttccgggatgtcctgagacgtttgagaagccacaacagcaatcaagcagaagaggctcaaggtcgcagcagcaactacaagacagtcaccagaagattcgtcacttcaatgaaggagacgtactagtgattcctcctggtgttccttactggacctataacactggcgatgaaccagttgttgccatcagtcttcttgacacctccaacttcaacaatcagcttgatcaaaaccccagagtattttaccttgctgggaacccagatatagagcacccagagaccatgcaacaacagcagcagcagaagagtcatggtggacgcaagcaggggcaacaccagcagcaggaggaagaaggtggcagtgtgctcagtggcttcagcaaacatttcttagcacaatccttcaacaccaacgaggacacagctgagaaacttcggtctccagatgacgaaaggaagcagatcgtgacagtggagggaggcctcagcgttatcagccccaagtggcaagaacaagaagacgaagacgaagatgaagacgaagaatatgaacaaactccctcttatcctccacgacgaccaagccatggaaagcatgaagatgacgaggacgaggacgaagaagaagatcaacctcgtcctgatcaccctccacagcgaccaagcaggcccgaacaacaagaaccacgtggaagaggatgtcagactagaaatggggttgaggaaaatatttgcaccatgaagcttcacgagaacattgctcgcccttcacgtgctgacttctacaacccaaaagctggtcgcattagcaccctcaacagtctcaccctcccagccctccgccaattcggactcagtgcccaatatgttgtcctctacaggaatggaatttactctccacattggaacttgaacgcgaacagtgtgatctatgtgactcgagggaaaggaagagttagagtggtgaactgccaagggaatgcagtgttcgacggtgagctaaggaggggacaattgctagtggtgccgcagaactttgtggtggctgagcaagggggagaacaaggattggaatacgtagtgttcaagacacaccacaacgccgtgagcagctacattaaggatgtgtttagggcaatcccttcggaggttctttccaattcttacaaccttggccagagtcaagtgcgtcagctcaagtatcaaggaaactccggccctttggtcaacccataaataacaacaagcatatatgaaggtgtggtgaggccatcttatatgaaataatatcaaaatatattttgtgtaataataaaactatggcctatgtatttaccaccctccgacccagcctatgttaatatctgagtggcgttgtacctttgaatcgccttaataaaatgtcagtcttcaagttttgtcttt

SEQ ID NO: 8154 - DNA, 342 bp, Glycine max
  Clone ID: 700736570_FLI
gcaaacattgaacttgttggcctaaaagaacaacaacaggagcagcaacaggaagagcaacctttggaagtgcggaaatatagagccgaattgtctgaacaagatatatttgtaatcccagcaggttatccagttgtggtcaacgctacctcaaatctgaatttctttgctattggtattaatgccgagaacaaccagaggaacttcctcgcaggttcgcaagacaatgtgataagccagatacctagtcaagtgcaggagcttgcattccctgggtctgcacaagctgttgagaagctattaaagaaccaaagagaatcctactttgtggatgctcagcct

SEQ ID NO: 8155 - DNA, 2121 bp, Glycine max
  Clone ID: 700736576_FLI
ttctgaaatcttagtttctgcccgaaactgaaactgaatcgaaattcaatacaatgagttcctcaactacagtgaggaagttgcaggtggtgtccctgttcctgcggacatagacattgcaaactccgttgaacccgttcatatctcccagattgccaaagacctcaaccttagtcccaatcactatgacctttacggtaaatacaaggctaaggttttgttgtcggttcttgatgagcttcaaggatcagaagatgggtattatgttgtggtcggaggcattactccgactcctctcggggaaggcaaatctactactacagtggggctctgtcaagctttaggtgcttttcttgataaaaaggtagtcacctgccttcgtcaaccatcgcaaggacctacttttggaattaaaggaggtgcagctggtggtggctatagccaagttattcccatggatgaattcaatcttcatctaacaggagatattcatgcaataactgcagcaaacaatcttctagctgctgcaattgatacccgaattttccatgagtcaacacagtcagataaggctctttttaaccggttgtgccctccaaataaagaagggaaaaggagctttagtgatgtcatgttcaggcgtcttacgaagcttggcatttcaaagaccaatccagatgatcttacaccagaagaagtaaataaatttgctaggcttgatattgacccaaattctatcacatggaggagagtaatggacatcaatgatcgattcttgagaaaaattgctattggccagggacctgacgagaaaggaatggtgagagaaacaggctttgatatttcagttgctagtgagattatggctgttttggcactgacaacatccttagctgatatgcgagagaggcttgggaaaatggttattgggaatagcaagagtggtgaccctgtaactgctgatgatctaggtgttggaggtgctttaacagttttaatgaaggatgccattcaccctacccttatgcagactctggaaggaactcctgttcttgttcatgcaggtccatttgcaaatattgctcatgggaattcttctattgtggctgataagattgcactaaagttagttggaccaggtggatttgtagttactgaagctggttttggtgctgatattggagctgaaaagtttatgaacattaagtgtcgttatagtggtttgacacctcaatgtgcgattattgtggcaactatcagagcactaaaaatgcatggtggagggcctgcagttgttgctggaagacctcttgaccatgcatatttgactgaaaatgttgccctggttgaggctggttgtgtgaacatggcacgacatatatcaaatacaaaatcttatggtgtaaatgttgtagttgccatcaacaagttttcaactgacactgaagccgagctaaatgcagttcgaagtgctgcattagctgctggagcttatgatgctgtaatttgtacccatcatgcgaatggtggcaaaggagccgttgacctgggcattgcagttcaaaaagcctgcgagaatgtgacacagccattgaagttcctgtatcttgttgacctgagtataaaagagaaaatagaggcaatagcaaagtcatatggagccagtggtgttgagtactcagaacaggctgagaagcagattgagatgtatagcaagcaaggattttcaggtcttccaatatgcatggctaagactcagtattctttctcagacaatgctgcagcaaagggagctccaagtgggtttgtcttacccataagggatgtaagagctagtataggcgctggatttatttatcctttagttggaacaatgagtacgatgccagggcttcctacaaggccatgcttctatgacattgatctggatacaacaactggaaaagtcattggtctctcttaaatcaaagtgacttgttctatcacctttcaaaagctttatggatgtcatttacatatctccctttgcgatgttcatgaacctcacagtaacattcctccttgtttgtttgcgtgcttggtgatctgtatgaatgaaataaatacgtgatttaaggagac

SEQ ID NO: 8156 - DNA, 1735 bp, Glycine max
  Clone ID: 700736615_FLI
ttctatttctcactctctgaactctgaacaccgaaaatccgccatggattttcgcatctatggcgtcacgatccttctcttcctcttcccaaccctcacattctcaatctcacagggtcagataaactcaaactcaatccttgtcgctctgttggactcccattacaccgaactcgctgagcttgtggaaaaagccatgcttttgcagactctggagaacactgtcatgaacaacagcaacaacatcacaatcttcgctcccagaaacgaagccctcgaacgcgatctcgaccccgatttcaagcgtttcctcctcgaaccccgcaatctccattccctccaaaccctcctgttgtcccacatcgtccccaaaagaatcaccaaacccgaattcaaaaccgggtcgacccgacacagaactttagcgtctcaccaccacctcactctccaagccctgaatttgactcactggaatgttgagtcttcccgggttattaacccgaattcggtaacccgacccgacggagtgatccacggcatcgacactctcctcatccctcgctcagtccaagacgaattcaaccgtcgccggaatctgatctccatcgccgcggtaaaacccgaaccatccccggaggtcgacccgcgaacccaccggttaaagaaaccggcgccggcagcgccggcgggggccccgccggcgctcccgatctacgacgcgatggcgccggggccatcgcttgcaccggcgccagcgccgggtccgggtgggtcccacaagcacttcaatggggaaaagcaagtaaaagatttcatcgagacgttactccactacggcggctacaacgagatggcggatattctggtaaacctaacgtccctggcgacggagatgggaaggttggtttcggagggttacgttttgacggtgttagctcctaacgacgaggccatggcgaagttagcgacggagcaattaagtgaaccgggttcgcccgaacagattatgtactatcacttgatacccgagtatcagaccgaggagagcatgtacaatgccgttagaaggttcgggaaggtccgttacgacacgttacggttgccgcacaaggtcacggcgcaggaggctgacggctccgttaagttcggccacggggacacgtctgcttacttgttcgaccccgatatttacacggatggacggatctccgttcagggaattgacggcgttctgtttccgcctcaggaggaagaagccgccgggcccgttacccgagcccagcccgctaaggtcgtcgtcaagcaaagaagaggaaaattgttggaaacagcatgttggatgcttggaagctttggacagaactctagattcatctcttgtcaatgaagagctcttatctggatgctagcaagactagttaagaacgaaaaccctgcacaggaaattccaaagatgtaaaaagtcaacggaatatgaaggccaggttacttgaaatgggttaatagcagcagctgctatggatttggttttcccacgtttttgtgatggtctttttttctttctccttctcgatttttcttcttgtggatttgggtcttggacttgagaacaaaagtttctcaagtctagtgaaaacaatatatagtgcaatttagattcagttaggaggttgtgttggtgggatgagaaggttttatgtaataagatggcagtgaaatctgtgcccgattcagt

SEQ ID NO: 8157 - DNA, 1385 bp, Glycine max
  Clone ID: 700736874_FLI
atcataaaattcttccaccaagttatgggtttccttgtgttgcttcttttctccctcttaggtctctcttctagttccagcatatcaactcatcgttccatattggaccttgacctaaccaagtttaccacacagaaacaggtgtcttcactgttccaactatggaagagtgagcatggacgtgtctaccataaccacgaagaagaggcaaagagacttgagattttcaagaataacttgaactatatcagggacatgaatgcaaacagaaaatcaccccattctcatcgtttaggattgaacaagtttgctgacatcactcctcaagagttcagcaaaaagtacttgcaagctcccaaggatgtgtcgcagcaaatcaaaatggccaacaagaaaatgaagaaggaacaatattcttgtgaccatccacctgcatcatgggattggaggaaaaaaggtgtcatcacccaagtaaagtaccaagggggctgtggaagcggttgggcgttttctgccacgggagccatagaagcagcacatgcaatagcaacaggagaccttgttagcctttctgaacaagaactcgtagactgtgtggaagaaagcgaaggttgttacaatggatggcactatcaatcgttcgaatgggttttagaacatggtgggattgccactgatgatgattatccttacagagctaaagagggtagatgcaaagccaataagatacaagacaaggttacaattgacggatatgaaactctaataatgtcagatgagagtacagaatcagagacagagcaagcgttcttaagcgccatccttgagcaaccaattagtgtctccattgatgcaaaagattttcatttatacaccgggggaatttatgatggagaaaactgtacaagtccgtatgggattaatcactttgttttacttgtgggttatggttcagcggatggtgtagattactggatagcgaaaaattcatggggagaagattggggagaagatggttacatttggatccaaagaaacacgggtaatttattaggagtgtgtgggatgaattatttcgcttcatacccaaccaaagaggaatcagaaacactggtgtctgctcgcgttaaaggtcatcgaagagttgatcactctcctctttgagccgtaaaggttcaatacaacgagtgcttgttttcttagggacaagcattgtacttatgtatgattctgtgtaaccatgagtcttccacgttgtactaatgtgaagggcaaaaataaaacacagaacaagttcgtttttctcaaataatgtgaaggtagaaaatggaaccatgcctcctctcttgcatgtgatttaaaatattagcagatggttttttctt

SEQ ID NO: 8158 - DNA, 1662 bp, Glycine max
  Clone ID: 700736883_FLI
aagctcaagaaggcgacactcgaaagcgcggcgaggcggctagggggaggaaaagaagccatgaagcagttgctgaagctgattcttgagtgggttcaaaccagccatcttcagaataagcgccgaaaggagaataatggtagtagtattagcagtgtacttcaggcacagtttcaggatcctagtggccagaacaacaaccagaatacacaaagtggttcatttgcacctgaatcaaacacttgtttcaacaaccaaacaccatggttgagttctcaaacttttgcaacagatcaggctcctctcatggtgcctccacagcaatttccacaacccatggttgggtatgtgggtgacccttacactagtggtgctgcttcaaataacatatcagccactcataaccataacaacagcaacccttatcaacctggtgcagaacaataccacatgttggagtcagcacattcatggccacattctctgttcaatgttgcttctaactatagtcagtcttttggggacaataatggtcttaacccacatgggggtttcggtggtggaggctatggcaataaccagtacccttatcagttttttcatggccctggtgataggttgatgaggttggggccctccgcgacgaaggaagcgaggaagaagagaatggcaaggcaaagaaggtttctgtctcatcacaggcatcatagtggtaatcaccagaatcaagggtctgaccctcatgcaagaatggggggtgataattgcaacactgctttggctgcacctcatcacgcaaatccttcagccaattggatgtactggcaggctatgattggcggcgcggcaggtcctttggctccggtgattccggccgagccgccggtggtacaaccggtcgtggaccggtcggccatgcagacacagaattgtcatcagaatcgagttgcatcagataggagacagggttggaagcctgagaagaacttgaggttccttctgcagaaggtgttgaaacaaagcgatgttggaagtttggggagaatagttttgccaaaaaaagaggcagaaacccatttgccagagctggaggcaagagatggaatttccataacaatggaagacattggaacttcacgtgtttggaacatgcgctatagatactggccgaacaacaaaagcagaatgtatttgctcgagaacactggtgactttgtgagagccaatggactccaagagggagatttcatagtgatatactcagatgtgaagtgtggcaaatatatgataagaggagtgaaagtgaggcaacaaggtgtgaaaccagagaccaagaaagcaggaaaatcgcagaaaaaccagcatgggacagggactaatgcatcaagtacagctggtactgctgctaataatggcacgtcatcgtcaccgaaaaccaaatctgaaaaaagtagtaaattaatataatatatagtatatgtatgtacaatatatattatggcatatataataaaataagagactctcaagtctgaacacggtgctcacatataatgttgtgaagtttgagcatgccctgcaatggaggctgtcaaggatttgtataacagtattttgggtaatatttcttttagtagtttattttgcgattgatattatgtg

SEQ ID NO: 8159 - DNA, 1820 bp, Glycine max
  Clone ID: 700736931_FLI
aaacagcggcggtggctgtggctatagtgtgcatttctgcctttagcatcactgtggtggctgaagatccatacaggttcttcaactggaatgttacatacggagacatttatccacttggtgttcgccaacagggaatacttatcaacggtcaattcccaggtccagacattcattctgttaccaacgacaacctcatcatcaatgtcttcaacagcttggaccagccatttctcctctcctggaacggggtacagcagagaaggaactcattcgaagatggggtattaggaacaacatgccccatcccaccaggagggaacttcacatacattcttcaagtgaaggatcaaattggaagcttctactacttcccatctcttgcatttcacaaagctgctggtggttttggaggcattaggattttgagcagacctagaattccagtccctttcgatgatcctgccggtgattacactgtcctcattggagattggtacaagctcaaccacacggatttgatgtctctgcttgatagcggtaggaagctgcctttccccaatggaatcctaatcaatggtcgtggttctaatggtgcatatttcaatgtggaacaaggaaagacctacaggcttaggatatcaaatgtggggttggaaaattcccttaactttcgcatacaaaaccacaaattgaaactggtggaagttgaaggaacacacacccttcaaactacgtactcatcccttgatgtccacgtgggccaatcttactctgttctggtaaccgcggatcaacctgctcaggactactacattgtggtctccactcgatttacctccacagttctcacctccactggagttcttcgctatagcaactctgcaggcccagtttcaggcccaccccctggtggacccaccatccaaattgattggtctttgaatcaggcccgctccatcaggaccaacctgacagcaagtgggcctaggcccaacccgcaaggctcctaccattacggtctcataaacacaaccaggaccatcatactgtcgagttcacctggtatagtgaatggcaaacaaagatacgcaatcaatagtgtgtcttacgttgctccagacactcctcttaagctcgccgactactttaaaatccctggcgttttccgtgtcggaagcttttccgacaggcccactggcggtggcatataccttgacacatctgtgctgcaaactgactacagaacatttgtggagtttgtcttccaaaacgacgaagacatcattcagagctatcatctcgatggctactctttcttcgtggttggtatggatggaggacagtggacacctgctagcaggaacacgtacaatcttcgagacgcagtttcgcggtgcactactcaggtatatcccaagtcatggactgctatatatattgcgcttgacaacgtgggaatgtggaacttgaggtctgaattttgggcacggcagtaccttggccaacagttttacatgcgcgtttatacaacatcgacatcaatccgagatgaatatcctgttccaaagaatgcactactttgtggtagggcaagtgggagacacactcgacccctttgagctagctagcaagaaccttgttgagtatgaaaattaaagcagttaacttatctgcttctgattttgaatttatttcttttctgtttcagtaattatgctatgctccgatggacatgtgtgatttaaactacaaatgaccccagctcgaggtcacattcttttccagaaaaaaagaagaaagaaatttactattattac

SEQ ID NO: 8160 - DNA, 1193 bp, Glycine max
  Clone ID: 700736974_FLI
gtcagccctaaagaggaattacgaggttagcgaggagattggtcgcggtcgtttcggcaccatcttccgctgcttccacccactctccaaccaaccctacgcctgcaaactcatcgacaaatccctcctccttgactccaccgaccgccactgcctccagaacgaacccaaattcatgtccctcctctctcctcaccccaacatcctccaaatcttccatgtcttcgaggacgaccactatctctccatcgtaatggacctctgccagccccacacgcttttcgaccgcatgctccatgctcccttctcggagtcccaggccgcctccctcatcaagaaccttctcgaagccgtcgcccactgccaccgcctcggcgtcgcccaccgcgacattaagcccgacaatattctcttcgattcggcggacaatcttaagctcgccgacttcggttcggcggagtggttcggcgacgggaggagcatgagcggcgtggtggggacgccgtactacgtggcgccggaggttctgttggggagggagtacgatgagaaggttgatgtgtggagctgtggggtgattttgtatataatgttggcggggattccccctttttacggagactctgctgctgagatctttgaggctgtggttagggctaacctcaggttcccttctagaatcttccggactgtgtcccccgccgccaaggatctcttgagaaaaatgatctctagggactcttctagaaggttctccgcagaacaagccttgagacacccttggatcttgagtgcgggtgacacggctgaactgacttgagaatgtagctacatgctgtagtagtagtgtagctaattttgcccctttgtcttttctctctactagcttaataaggtctactcgtggtggcagaggaaggaacgcttctgtaaattttcatggtgcaagtagttttttttctttctaggaatcttatatctgagactctgggtatgagtcgagagaatcttgttttccactctcggtgattctctcttttgtagtagaaagtgagaaagtgggtgatctcccagactccctccccctagtacaaaggaggagtttgattctactatccttgtagtttttgtatatgtaaatcataataaacaatcattttgaatgaatgtaaatggtgtttaatcttctgatt

SEQ ID NO: 8161 - DNA, 929 bp, Glycine max
  Clone ID: 700736976_FLI
caataataataactccattttccctctgtcttccccccctcctctacacaaaaatatattattagcatggagaaggtgaattttgtgaagaatggagagcttagattgcctccggggttccgtttccacccgactgatgaggagctggttctgcaatacttgaagcgcaaggtcttctcctgccctttgccagcctctatcattcctgagcttcatgtttgcaagtgatttggagcaagagagatacttctttagcaccaaagtggccaaatatcccaacggaaatcgctccaacagagccacaaattcgggttattggaaggcaactggcttggacaaacaaattgttacttcaaaaggcaacaaccaagttgtcggaatgaagaagacacttgttttctacagaggcaagcctcctaatggatccagaactgattggatcatgcacgagtatcgcctcatccttaacgcctctcagtctcagagccatgttgttcccatggaaaattgggttctgtgtcgcatatttttgaagaggagaattggtgctaaaaatggggaggagagcaactctaaggtggttttctatgacttcctagcgcagaacaagaccgattcctcctcatcggtcgccagtggaattacacatgaatcagatgaacatgaagagagcagtagctccaacaccttcccttatactattagaagaaaaccttaacaaccttccttaaaaatttaagttcattatctagttgttgtttttaattgtctttccctttccctgtaattatcatcaatcacttgttgaaaggaagcatcctcttcccaaatgagaccggcattaagggtagtctggagagtatggtactaatactagtagtagtgtgtaatacacttctcatttcccttcaatttaaccccttttttct

SEQ ID NO: 8162 - DNA, 977 bp, Glycine max
  Clone ID: 700736992_FLI
gaaaaaaaaaaccctagccaacacaaccatcatggccacctctgctattcagcaatcagcattcactggtcaaactgctctgaagcagctcaatgagttcgtccgcaagaccggtggcgccggcaaaggtcgcactaacatgcgccgcaccgtcaagagtgctcctcagagcatttggtatggccctgaccgtcccaagtacttgggtccattctcggagcagattccatcatacctgaccggagaattccctggtgactacggatgggacactgctggattatcagctgacccggaaaccttcgccaggaaccgggagctggaggtgattcacagcagatgggcaatgcttggtgcccttggctgcaccttcccagagatccttgagaagaatggtgtcaaattcggcgaggccgtgtggttcaaggccggtgcacagatcttctcagagggaggccttgactacttgggcaacccaaacctgatccatgctcagagcatccttgctatctgggctgttcaggttgtgctcatggggtttgttgaaggttacagagttggtggaggaccacttggtgaaggacttgacccaatctaccctggtggtgcttttgaccctcttggtctggctgatgaccctgatgcattcgctgagttgaaggtcaaggaactcaagaacggtcgcttggctatgttctccatgtttggtttctttgttcaggctattgtcactggcaagggccctattcagaacctttacgaccacgttgctgatcctgttgccaacaatgcttgggcttatgccactaactttgtccctggacaatgaggatgcctacatgcaatgcaatcttctgctcccttttgcagttcccttgtgtttaactccattttcactaatgtaactacacctgtgtagcagaaaaatctgtatgagaaccattatatttttatatattagaaatttgggtccccag

SEQ ID NO: 8163 - DNA, 1678 bp, Glycine max
  Clone ID: 700737005_FLI
cactcatcaccatggccaagcttgttctttccctttgtttccttcttttcagtggctgcttcgctctgagagagcaggcacagcaaaatgagtgccagatccaaaagctgaatgccctcaaaccggataaccgtatagagtcggaaggtgggttcattgagacctggaaccctaacaacaagccattccagtgtgccggtgttgccctctctcgctgcacccttaaccgcaatgcccttcgtagaccttcctacaccaacggtccccaggaaatctacatacaacaaggtaatggtatttttggcatgatattcccgggttgtcctagcacttatcaagagccgcaagaatctcagcaacgaggacgaagccagaggccccaagaccgtcaccaaaaggtacatcgcttcagagagggtgatttgatcgcagtgcctactggtgttgcatggtggatgtacaacaatgaagacactcctgttgttgccgtttctattattgacaccaacagcttggagaaccagctcgaccagatgcctaggagattctatcttgctgggaaccaagagcaagagtttctaaaatatcagcagcagcagcaaggaggttcccaaagccagaaaggaaagcaacaagaagaagaaaacgaaggaagcaacatattgagtggcttcgcccctgaattcttgaaagaagcgttcggcgtgaacatgcagatagtgagaaacctacaaggtgagaacgaagaggaggatagtggagccattgtgacagtgaaaggaggtctaagagtcacagctccagccatgaggaagccacagcaagaagaagatgatgatgatgaggaagagcagccacagtgcgtggagacagacaaaggttgccaacgccaaagcaaaaggagcagaaatggcattgatgagaccatttgcacaatgagacttcgccaaaacattggtcagaattcatcacctgacatctacaaccctcaagctggtagcatcacaaccgccaccagccttgacttcccagccctctggcttctcaaactcagtgcccagtatggatcactccgcaagaatgctatgttcgtgccacactacaccctgaacgcgaacagcataatatacgcattgaatgggcgggcattggtacaagtggtgaattgcaatggtgagagagtgtttgatggagagctgcaagagggaggggtgctgatcgttccacaaaactttgcggtggctgcaaaatcccagagcgataactttgagtatgtgtcattcaagaccaatgatagaccctcgatcggaaaccttgcaggggcaaactcattgttgaacgcattgccagaggaagtgattcagcacacttttaacctaaagagccagcaggccaggcaggtgaagaacaacaaccctttcagcttcctggttccacctcaggagtctcagaggagagctgtggcttagagagccctttttgcatgtgctaccacacttttgtccttttgggctctagctagtgctggtagcagtaaataagaatgaataaaagaaacaaaggcttagatgccctttgttaagtgtagaataacgggtatagtaactatgtacccttgtgtaatgagtcactcaagtacctatgcgggaaaagcataaataaaagaagaaattccaat

SEQ ID NO: 8164 - DNA, 1729 bp, Glycine max
  Clone ID: 700737038_FLI
ctctccattggtccttaaacactcatcagtcatcaccatggccaagctagttttttccctttgttttctgcttttcagtggctgctgcttcgctttcagttccagagagcagcctcagcaaaacgagtgccagatccaaaaactcaatgccctcaaaccggataaccgtatagagtcagaaggagggctcattgagacatggaaccctaacaacaagccattccagtgtgccggtgttgccctctctcgctgcaccctcaaccgcaacgcccttcgtagaccttcctacaccaacggtccccaggaaatctacatccaacaaggtaagggtatttttggcatgatatacccgggttgtcctagcacatttgaagagcctcaacaacctcaacaaagaggacaaagcagcagaccacaagaccgtcaccagaagatctataacttcagagagggtgatttgatcgcagtgcctactggtgttgcatggtggatgtacaacaatgaagacactcctgttgttgccgtttctattattgacaccaacagcttggagaaccagctcgaccagatgcctaggagattctatcttgctgggaaccaagagcaagagtttctaaaatatcagcaagagcaaggaggtcatcaaagccagaaaggaaagcatcagcaagaagaagaaaacgaaggaggcagcatattgagtggcttcaccctggaattcttggaacatgcattcagcgtggacaagcagatagcgaaaaacctacaaggagagaacgaaggggaagacaagggagccattgtgacagtgaaaggaggtctgagcgtgataaaaccacccacggacgagcagcaacaaagaccccaggaagaggaagaagaagaagaggatgagaagccacagtgcaagggtaaagacaaacactgccaacgcccccgaggaagccaaagcaaaagcagaagaaatggcattgacgagaccatatgcaccatgagacttcgccacaacattggccagacttcatcacctgacatctacaaccctcaagccggtagcgtcacaaccgccaccagccttgacttcccagccctctcgtggctcagactcagtgctgagtttggatctctccgcaagaatgcaatgttcgtgccacactacaacctgaacgcgaacagcataatatacgcattgaatggacgggcattgatacaagtggtgaattgcaacggtgagagagtgtttgatggagagctgcaagagggacgggtgctgatcgtgccacaaaactttgtggtggctgcaagatcacagagtgacaacttcgagtatgtgtcattcaagaccaatgatacacccatgatcggcactcttgcaggggcaaactcattgttgaacgcattaccagaggaagtgattcagcacactttcaacctaaaaagccagcaggccaggcagataaagaacaacaaccctttcaagttcctggttccacctcaggagtctcagaagagagctgtggcttagagccctttttgtatgtgctaccccacttttgtctttttggcaatagtgctagcaaccaataaataataataataataatgaataagaaaacaaaggctttagcttgccttttgttcactgtaaaataataatgtaagtactctctataatgagtcacgaaacttttgcgggaataaaaggagaaattccaatgagttttctgtc

SEQ ID NO: 8165 - DNA, 470 bp, Glycine max
  Clone ID: 700737102_FLI
ctcgagaacactggtgagcttctttgctttgaatttggctccacacaatagttaatgacctttcgtttttccaccactttcattttcaaggaacatggtttttcatacacacatccatatttccttgtgcaggtgactttgtgagagccaatggactccaagagggagatttcatagtgatatactcagatgtgaagtgtggcaaatatgtaagaccctttcttattttccatttttcattttcttaacatgttttgaggtataataattttttacgatacttatataatgtttttttttttatcttctgttttaatacaaatttttgcatcggcattcttgattcctatggtaattttcttatgacctgatcataaggaagtggttcgagtccggtgaacaataaatacaaaattttgtaagaaaaaacaagtatcatgaatacaattttcataaatacaaatttttgt

SEQ ID NO: 8166 - DNA, 1275 bp, Glycine max
  Clone ID: 700737107_FLI
ctacgaaaatggttgatttacattggaaatcaaagatgcctagttccaaaacaccaaaactctctctctccgacaacaagtccttaccctctttgcaactacccttccgcaccacagatatctctcccgccgctccttccgtttgcgccgcttacgactactatctccgtcttcctcaactcagaaagctttggaactccactgattttcctaattggaacaacgaaccgattctaaaaccaattttgcaagctctcgaaatcacgttccgctttctttccattgttctctccgatcccagaccttactccaaccacagagaatggactcgccggatagagtctctcatcatgcatcaaattgaaatcattgccatactttgtgaagaagaggaacaaaattccgacacacgtggcactgcaccaaccgctgatctcagcagcagcaatagcagcgtgagcagaagctacagcgaggcgagcctgcttcctcggcttgccacgtggtacaaatccagggacgtggcgcagaggatccttctctccgtggaatgccaaatgaggaggtgctcctacacgcttggtttgggcgagccgaacctagcggggaagccgagcctgctctacgacctcgtgtgcaagccgaatgagatccacgcgctgaagacgacgccgtacgacgagcgcgtggagaaccacgagaaccacgcggtgcacgccacgcaccagatcgcggagtcgtggattcacgcgtcgcggaaggttctggagagaatcgcggacgcggtgctctccagaaccttcctgaaagcagcagaggactgctacgccgtggagaggatctggaagcttctcgcggaggtggaggacctccacctgatgatggatccggacgatttcttgaggctaaagaatcaactctcggtgaaatcctcgagcggcgaaacggcatcgttctgcttcagatcgaatgagttagtggaactgacgaagatgtgcagagatctgaggcacaaggtgccggagatattggaggtggaggtggatccgaagggaggaccgaggattcaagaggcggcgatgaagctctacgtttcgaagagcgagttcgagaaggttcacttgttgcaggcgatgcaggcgattgaggcggcgatgaagagattcttctacgcgtataagcaggtgttggcggtggtgatgggaagttcagaggctaacggtaaccgagttgggttgagttgcgactcggctgactcgttgactcagattttcc

SEQ ID NO: 8167 - DNA, 2135 bp, Glycine max
  Clone ID: 700737174_FLI
atcttattttcctttttcttaatttattcttcgtcaggatttctctgttatctctcagttctccaactcccaaattcttcccagtttgcttcaattgtttgttctagggttagggttttcgatccatttccccctcaaatttcaattattaacaagtgcagagcctgattttcctcccgtcgtgctttgaggaggccatgggaggtgacgccactgccgccgctgagagtgcgaccgcggagtcgaacgccgcaaatggagtcaacatcaacattcgctgctccaatggttccaagttttccgttcagattggccttgattccaccatcagatccttcaaggacgcggttgcacgcaactgtgacatatccgcggatcaacagcgcctgatttacaagggccggattctcaaggatgatcaaaccctccaaagctatggtttggaggctgatcacactgttcatttggttcgtggttttgctccatctaacactactggtggaactaatagtgttggtggcggcaataccacaactgctaacacgagaggggctggtgctaatgagggtgggggtttaggagggccaggatttggagcttcactgtttcctggacttggtggtaacaatgggatggggggcggtggtctcaatggtctatttggagcaggctttccggatcttgaacaaatgcagcaaccatttttgtcaaatcccaatttaatgagagatataatgaacacacctgctatgcagaatttaataaataatcctgacatagtgcggaatcttataatgaataacccgcagatgcaagaactaatggataggaaccccgagctggcacacatacttaatgatcccagcactcttcgtcagacacttgaagctacaaggaaccctgagatcatgcgcgaaatgatgaggaatacagatagagcaatgagcaacattgaatcttctcctgaaggattcaacatgctgaggcgcatgtatgaaaatgttcaagaaccgtttttaaatgccactacaatggctggtaacactggaaatgatgctgcagcagtcaggaaccaatccacaaatccctcaactactaattctgaagctacttcccctgtacccaatacgaacccacttcctaatccttggtcctctactggaactggaggaggccagaataacaccagaaggtcaactactactggtggggaagctcgacagtcaacacccactggtctaggagggcttggactgccagatcttgaaggcatgttgggtgggactgggatgccagatgctgctatgttgacccagttaatgcaaaacccagccatttcacaaatgatgcaaagtatcctttccaatccacagactatgaatcagattcttggggtcaataacgagcagcgtggcatgcctgatttgaattctctaagggaggtgatgcaaaacccagagtttctacgcctgttttcctcacccgagacactgcagcaactcttgtcttttcagcaagctcttctgtctcagcttggtcagcaacaatcaacacaggaaccaggtcaaacaggtggaggcactggaccgatgaacaacttggggctggagatgttatcaagcatgtttggtggactcggagctggtagcctggctgttcctaacagatcaaatgagccgccggagcaattgtatgccacccaactttctcagcttcaggagatggggttctttgacacgcaagagaacataagggctcttattgctacatcagggaatgttcatgcagcagttgagcggcttttggggaactccggacagtagcaggtggtaagaagggacacaagactagcaattaaatcccaaacactagaatctggtgtgagatatttgtccatttagctttgattttcatcatggaattatgttcaaacaaatctattgatttttttttcatttacatgatatccagagtttagtattatatccaatactcagatgtccaatgattaattataccttcagctacaagaaagtacaaagccttttgtaccatatatatgtaattctaacttgcctgtttgcaaggattgggttcacagatacattcaaagaaggggtttatattggaacatg

SEQ ID NO: 8168 - DNA, 873 bp, Glycine max
  Clone ID: 700737217_FLI
gcccgtttcgaaccgccgcgttatgaagccggcgtcaaagcgccctccatttaccattccgagagaggtccaacgacttcccaggtcctcgccgtcctcgccggcctcccggtcggtggcatcctgctcctcctggcgggattgaccctggcaggaaccctcaccggactggcagttgccacgccgctcttcgtcctcttcagcccggtgctggttccagccacggtcgccatcggcctggccgtggccgggttcctgacgtcgggggccttcgggctcacggcgctgtcttccttctcctggatcctgaactacatccgggagacccagccagcctcggagaacctcgccgccgccgcgaagcatcacctcgccgaggcggcggagtacgtggggcagaagacgaaggaagtggggcagaagaccaaggaggttgggcaggatattcagagcaaggcacaggatacaagggaggcagctgcaagggatgcaagggaggcagctgcaagggatgcaagggaagctgctgcaagggatgcaaaggtggaggcaagggatgtaaagagaacaacagtgacagcaacaaccgcaaccgcatgatgagtaattctgatattagagggagcattaatgtgttgttgtgatgtggtttatatggggaaattaaataaatgatgtatgtacctcttgcctatgtaggtttgtgtgttttgttttgttgtctagctttggttattaagtagtagggacgttcgttcgtgtctcaaaaaaaggggtactaccactctgtagtgtatatggatgctggaaatcaatgtgttttgtatttgttcacttccattgttgaattcaatgtcaaatgtgttttgcgtt

SEQ ID NO: 8169 - DNA, 1948 bp, Glycine max
  Clone ID: 700737222_FLI
caacttcccttcacccaaccaccttccatctccaaacaaacatgggtcggaaacacgacgccgttttggccagcgaacctgtcgccgaagaagccccctgcagccctgagctcgattccgagaagaagaagaagaagaaaaagaagaacaaaaacaaagacaagcaccaaaccgaaagcagccccaaacgaaagctcgacgaacacgacccccaaaacggcaccgaatcgaagaagaaaaagaagaagcaccacgagtccaaggggaacgccgaggaaaccaacggcgatagcaacaacaacaacggcgatggtgctaatcgcgaggaaacggcgacggatgggtctgttgtggtcaccggtaacaatgcgggagaggcgaaatacgccgcggtgaagagcttcgcggattcggggctgccggagaacgtgctggagtgctgcaagggtttcgagaagccttctccgattcagtcccgggcgtggcctttcttattggacggtcgtgatttgattggaattgctgccactggctcagggaagacgttggcgttcggcataccggcggttatgcatgttttggggaagcggaaggggaaaagttccaagggacgaaaccctctcggcctcgtgctctcacccactagagagctagctcaacagatatcagatgtcatgtgtgatgctggtaggtcttgtggtgtgcaatcaatctgtttgtatggtggaacctccaaagggccacaaatctcctcactaaaatctggcattgacattgtcattggaacccctggtcgtatccaggatctgattgaaatgggtatctgttgcctaaaagaagtatcttttgtggtacttgatgaagctgatcggatgcttgacatgggttttgaacaaatagttcgctctatactgggtcaaacgtgttctgatcgtcaaatggttatgttcagtgctacatggcctttgccagttcattacttggcacaggagtttatggatcctaatcctgtaaaagttgttgtaggctcagaagacttagctgccaatcatgatgtcatgcagatagttgaggtcttggatgaccgttctcgtgataagcgcctagttgctttactggaaaagtaccacaaatctcagaggaatcgagtattggtttttgttttgtacaaattggaagccaaacgagttgaaaatatgcttcaagaagggggttggaaggttgtatcaatacacggggacaaagcccaacatgatcgcacaaaggcactctcattgttcaagaatgcaagctgtcctttgatgattgctactgatgtggccgcacgaggattggatattccagatgttgaagtagtgataaactatagttttcctctgactacagaagattatgttcatagaattgggcgaactggacgagctggtaaaaaaggtgttgcccatacattctttatgcagcagaataagggacttgctggggagctggtgaatgttttaagagaagcagggcaaattgtaccggatgccctcctgaaatttggcacacatgtaaagaaaaaggagtccaaactttatggggcacacttcaaggaaattcctgttgatgctccaaagtctcaaaagaaaacatttgacgactctgatgaagactaagtgctggctacttgtgtttatttttggctgaagaaatatatgaattcggtcatttcttactctttttggccgagttatttattactttaagaggtaataaaaaaggttagttataaatagattagtgagtcttttcatgttgtagcatgcacccatctgtgctttcttttgtttttgtcttcactttgagatgataattttgtattcacacatatttttagctgtctagaattgtcttataagttacaatttccagggtttgacattttagatttttaattgattaattaatt

SEQ ID NO: 8170 - DNA, 905 bp, Glycine max
  Clone ID: 700737254_FLI
ccctatctctctctgtctctatatctgtatttctgaattttgggaatagaaaaaccctaagcaaagcaaagcggtaaggatggggaacacggagaagctgatgaaccagatcatggaattgaaattcacttcgaaatcgctgcagcgtcaatcgcgtaagtgcgagaaggaggagaaatcggagaagctgaaggtgaagaaggcgatcgagaaaggcaacatggacggcgctcgaatctacgcggagaacgcgatccgtaagcgcacggagcagatgaactacctccgcctggcctcgcgcctcgacgccgtggtcgcccgcctcgacacgcaggcgaagatgacgacgatcagcaagtcgatgggcaacatcgtgaaatcgctggagtcatcgctggccacggggaacctccagaagatgtcggagaccatggactcgttcgagaagcagttcgtgaacatggaggtccaggccgagttcatggagagcgccatggccggatccacctccctctccactcccgaaggagaggtcaacagcctcatgcagcaggttgccgacgactacggcctcgaggtctccgtcggcctcccgcagcccgccgctcacgccgtccctgccaaggaggccgacaaggtcgacgaggacgacttgtctcgccgcctggccgaactcaaggctagaggttaattactctgtaataatactatcatcgtttctcgattctcattgctgatgcagtggaatattatatactatatgtttgtgtatatttaaccgagttcggttggcacttgttatgtggactccccctttgaggggttttatggccttcgcttcgtgttagtgtcatcgtgtgaatgcttattactacattaatagaatgcttatatttgtctttttc

SEQ ID NO: 8171 - DNA, 1680 bp, Glycine max
  Clone ID: 700737284_FLI
cctgatgataaggtcactcccatggagtctccatctttgctgcagacaggtttgtctggtgctcccatggatgttagcagaaagccctctctttgtattgcagtcataggggccactggcgagctggcaaagaggaagattttccctgctttatttgccctctactacagtggcttccttcccgagaatgtaggcatttttggttattcaaggaaggatataactgatgaagacctgcaatctattatagcttcaacgttaacatgccgagttgatcatcaagaaaactgtgacgacaaattaaatgctttccttagtagaacatattacattaatggaggctatgacaataaatatgggatgtccatgctgaatgctcgaatggagcaaattgagggaggatccaaaaccaacaggatattctacctttctgtgccacaagaagcacttttggatgttgcgtcatgtcttgcaagcagtgctcagacccagaagggatggaatcgcataatatttgagaagccatttggctttgatgcactttcttcccataggctgacacaatatcttctttcaaactttcaggaaaagcaaatatatagaattgatcatctactaggaaggaatctcattgaaaatcttacagttttaaggttttcaaatctagtttttgagccactttggagtcgtacttatatagataatgtacaggtcattttatcagaggacttggctgtgcatcctggaagatatttcagtggctatggaattatccgtgatattgtacacagtcatgtgctccaaacaattgcattgcttgccatggaaccaccaataagccttgatggagaagatattcgaaatgaaaagcttaaggttttgaggtcaattcgcaaattggagccaaaggatgtcattctcggccaatataaaacaagtggtggagccaaagttgatgcgtgcctaaatggtctgacacctacttattttgctgctgcactatacattgacaatgcacgatgggatggcgtgccatttctgattaaaacaggcttggggctcatcaaacaccaaatggagatacggattcaatttcgcaatgtaccggggaatgtgtaccacgagtgcatcgggcataatatggaccgcgctgtaaatgagctcattcttcgcgatgttcctgatgaagctattttagtgagagtcaacaataaggttccaggactaggcctacaactggactcttcagaattaaatttgctttacaaggacaagtacaacatggaggtgccggattcatacgagcatcttcttctcgatgtcattgatggggacagccatttgtttatgagaagtgatgagttggcagcagcgtggaatattctgactccaattctgaatgagatagacaaagacaatatgtcagtggagctttatgagatggggggtcgcggtcctgttggggcatactacctctgggcgaaacatggtgtccgatgggtggaggattagaacttccatccttgtatgtctttcttctatatcacgttacttctgtgtttatactgtgttacctaccccccttaaggactacctaggctctgtgttaagtattctgcaataaacttcaactgctgattagcctcgtttttgtcttgttgacaattgcatatattcttg

SEQ ID NO: 8172 - DNA, 671 bp, Glycine max
  Clone ID: 700737288_FLI
caaatcgtgagaggcttttgatctatgtctctgatgttgctttgttttctgtgacttacttgctctaccgtgttgcaactatgaaagggttggtttggctgctatgtgtttatggggtgccattgctcattgtgaacggttttcttgtgaccatcacatatctgcagcacacacactatgccttgcctcactatgattcatcagaatgggattggctgaggggtgctttggcaactatggacagagattatgggattctgaacaaggtgtttcaccacataactgatactcatgtggctcaccatcttttctctacaatgccacattaccatgcaacggaggcaaccaatgcaatgaagccaatattgggtgagtactaccgatttgatgacacaccattttacaaggcactgtggagagaagcaagagagtgcctctatgtggagccagatgaaggaacatccgagaagggcgtgtattggtacaggaacaagtattgatgaaccaagcaatgggccatagtgggagttatggaagttttgtcacttatcacttaattagtagaatgttataaataagtggatttgccgcgtaatgacttgtgtgtattgtgaaacagcttgtagcgatccatggctataatgtaaaaatatgtggaaagtgttctgctt

SEQ ID NO: 8173 - DNA, 793 bp, Glycine max
  Clone ID: 700737306_FLI
aacattggaaggcatcgatttcgacattgaacttggttccaacctctattggggcgaccttgccaaggaactagatgctctcaggcaccaaaacgaccactacttctacttgtccgcagccccacaatgttttatgcctgattaccacctcgacaatgccatcaaaactggtcttttcgatcatgtaaacgttcagttctacaataaccctccatgccaatactcacctggcaatactcaattgctttttaattcatgggatgattggacttcaaatgttcttcccaataactctgttttctttggactaccagcatctcccgacgctgctccaagtggtggttatataccaccacaggtgctcatttctgaggtgcttccctatgtaaagcaagcttccaactatggaggagttatgctgtgggacaggtaccatgatgttttaaattatcacagcgatcagataaaggattatgttccaaaatatgcaatgcggtttgtgaccgcagtttccgacgctatttatgagagtgtctctgcagctacgcaccgcatcttacagaagaaaccatattagaaatatggggagccgtacgtgcaaactatttatcagctatctatgcatgtgtccgtctctgtaacgtttgtatggaaaattggaaataagtaacaacttgttattagttgttacctttgtggcatctactccagctttgatttcctagctagttgttatgtaatgtaaccaatataatcgaagcatgttgagaataaaatactccctactcattcc

SEQ ID NO: 8174 - DNA, 1451 bp, Glycine max
  Clone ID: 700737379_FLI
caacaacaacacaaacctatgcttaaaacttaaaattatccatcttcaacttcacaatggtgcgtgtcaaagaagctctcgttgtcaccccttccgagcccacaccgaataccgttctctcactctcagctcttgactcccaactcttcttgcgcttcaccatcgagtatctttttatttacaggcccggcccgggcctggacccaacttccaccgcggctcgtttaaaagctgcattagccaaagcgcttgttccttattatccattcgccggaagggttcgctccaggcccgacggcccgggcctcgaggtcgtttgtcgggcccagggcgctgtcttcatcgaagcctcttctgaacgttacactgcccatgatttccaaaaggcccccaagacagtggcacaatggaggaaactattatctctctacgtcaccgacgttctcaaaggctctccaattcttgttattcagttgacgtggcttgccgacggcgctgcagctgtcggcgtcggtataaaccactgcatctgcgatggcatcggcagtgccgagtttctcaattatttctcggacttagcatcccataataataacgtgagtgtcgatcccaaacctaaacccgtctgggatcgacagctcatgaacccggacggcagaactcgggcgaacctggctatgcacgccgagtttgtccgggttccggatttgtgcgggttcatgaaccgtgtcacgagcgggctgagaccaacttgcattgtgttcgacgagaggcggatcaacgcgctgaagggcgcgtgcggaatgtcgtcgtacacgtcgttcgaggttctggcggcgcacgtgtggaggagttgggcgagggcgatggggtttcctaaaaaccagacgctgaagcttttgtttagcgtgaacgtgcggaagcgcgtgaagccgggactgccggaggggtattatgggaatgcgtttgtgttgggatgcgcgcagacaagcgcgtgggagttgggggagagaggggtcaggtacgggtcgggtctggtgaagcgtgcgaaggagagggtggacagcgagcacgtgcggagggtggttgagttggtctccgagtcgagggcgagtcctgactcggtgggggtgctgattctgtcgcagtggtcgaggctggggcttgagagggttgaactcgggatggggaagcctctgcatgtggggcccatatgctgtgataggtactgtttgtttcttccggtgaccggtgaacgggcgagtgtgaaggtcatggtggctgtccccaccaccgccgttgacaactttcaccgtttcctccgggaatcgaatttatgacccaaccacaccctactaggttacgtcacgttgacctctgtaattattcttcactagttcctgtgctttttgtttaacaaaaataaaataaaaaacaaacaaattattcct

SEQ ID NO: 8175 - DNA, 1020 bp, Glycine max
  Clone ID: 700737424_FLI
ctagtcgccgttgccatccaaccatcttctgtttaccgtcgtcgtcgtcccgccgttcctctgccgtcgtcgcacgaacacccagcagagagcttcgaagccacgcaggcgggaacgaccagccatcccagcgtcgtcgttgcagtcggaaggttgcaccacaccaggccgtcgcgttgtaaggttccaagctttttagacagctgacaagagacaacaagatatggcagagaagagcaaagagctgctccagtttgagcataaaggcacacccctttcttccttagaatccactcttcttgtttgtgataataaaaaagaatcagacacacaaactaggagactcccccctcatggcacaccactcactgccccacatcccccaagccaacttttagggaaggttaaagacttcctaggagtgatgtcagaagcaaataagaggcttgaacttgatgcaaaggacaatcctgagaattatgatattgaagagctaactggaaatgaatcggaagttattgaaatggatttgatgcttggtgtagctgatcttcatacaccagaggcagtggctgctgctgaatctgcaatttccacttgtcagcctgtgattccattggctgctgatggtagtgaaacagattcagaggaaagtagtactgatgatgactgtggggatgatgatattgaaagcagtgatgattatcacgacgatggaaacaacagtgaaaagccttcatctcttgttcaaaaatctatttccagtaaggataatattcaggaaaaacaaaagggaaatgttcattccaaaaaacgtccaagaatagttgagctatcttgagcataacaagattttgaggattagatctttatgctataacaatttactgagattattgcgaccagtctagttggaattttctgtatgatttatgctgcgttaaattataaccaatgtatctacgacctctatgtcaggggcagcggctggtgaagtaacaagacttgctacttggcttt

SEQ ID NO: 8176 - DNA, 789 bp, Glycine max
  Clone ID: 700737518_FLI
atacaaaaatgtctcctgtggaggtagcaaggaatgccagtgaggatgcacgtgctatatgttgtcgcgaatatggaagtgcccctgatgtgcatatttatggagatcctgattttacttttccgtatgttccagctcacttgcatcttatggtatttgagttggttaagaactcactgcgtgccgtacaagagcgttttatggattctgataaagttgcacctcccattagaataatagttgctgatggaatagaggatgttaccataaaggtctcagatgagggaggtggaattgcaagaagtgggttgcctaaaatttttacatatctatatagtactgcgagaaacccattggatgagcattcggatcttggaataggtgataatgtgacaatggctggatatggatatggtcttcctattagtcgtctatatgctcggtattttggaggtgatcttcaaataatctctatggaaggatatggcactgatgcatatctccatttgtctcgtttgggagattcacaagaacctttgccctgaaagtacttttcagtcagagttaccttaagtaactcactaacattgtgctaaggaaaacacttgttagaataaaaaagtactatttgctgtcaatttttacattctaataatttgacagatttcctgtaaatatgtggtacataagattgtgcatggtgatgccccccttctttgccttcagatccagctttgggaatttgtcctttttatcttctgaaaaaaaatgaatatgctcttttatcct

SEQ ID NO: 8177 - DNA, 357 bp, Glycine max
  Clone ID: 700737615_FLI
ccgagaacaaccagaggaacttccttgcaggttcgaaagacaatgtgataagccagatacctagtcaagtgcaggagcttgcgttccctgggtctgcaaaagatattgagaacctaataaagagccaaagtgagtcctactttgtggatgctcagcctcagcagaaagaggaggggaacaagggaagaaagggtcctttgtcttcaattttgagggctttttactgaataagtatgtagtactaaaatgtatgctgtaatagctcatagtgagcgaggaaagtatcgggctatttaactatgacttgagctccatctatgaataaataaatcagcatatgatgcttttgttttgtgt

SEQ ID NO: 8178 - DNA, 1070 bp, Glycine max
  Clone ID: 700737638_FLI
ggtctcagcgttatcagccccaagtggcaagaacaacaagatgaagatgaagatgaagacgaagatgatgaagatgaacaaattccctctcaccctcctcgccgaccaagccatggaaagcgtgaacaagacgaggacgaggacgaagatgaagataaacctcgtcctagtcgaccaagccaaggaaagcgtgaacaagaccaggaccaggacgaggacgaagatgaagatgaagatcaacctcgcaagagccgcgaatggagatcgaaaaagacacaacccagaagacctagacaagaagaaccacgtgaaagaggatgcgagacaagaaacggggttgaggaaaatatctgcaccttgaagcttcacgagaacattgctcgcccttcacgcgctgacttctacaaccctaaagctggtcgcattagtaccctcaacagcctcaccctcccagccctccgccaattccaactcagtgcccaatatgttgtcctctacaagaatggaatttactctccacattggaatctgaatgcaaacagtgtgatctatgtgactcgaggacaaggaaaggttagagttgtgaactgccaagggaatgcagtgttcgacggtgagcttaggaggggacaattgctggtggtaccacagaacttcgtggtggcggagcaagccggagaacaaggattcgaatacatagtattcaagacacaccacaacgcagtcactagctacttgaaggatgtgtttagggcaattccctcagaggttcttgcccattcttacaaccttcgacagagtcaagtgtctgagcttaagtatgaaggaaattggggtcctttggtcaaccctgagtctcaacaaggctcaccccgtgttaaagtcgcataaatgacaagcatgatggtgtgaggatgaggccatcttatgaaataataacaaataaataaattttgtatgataataaaaagtatggcccatgtaccatcccagcgagcctatgtttatatctgagtggcgttgtacctttcaatcgccttaataaaatgtcagtcttcacgttttgtctt

SEQ ID NO: 8179 - DNA, 919 bp, Glycine max
  Clone ID: 700737677_FLI
gataaacctcgtcctagtcgaccaagccaaggaaagcgtgaacaagaccaggaccaggacgaggacgaagatgaagatgaagatcaacctcgcaagagccgcgaatggagatcgaaaaagacacaacccagaagacctagacaagaagaaccacgtgaaagaggatgcgagacaagaaacggggttgaggaaaatatctgcaccttgaagcttcacgagaacattgctcgcccttcacgcgctgacttctacaaccctaaagctggtcgcattagtaccctcaacagcctcaccctcccagccctccgccaattccaactcagtgcccaatatgttgtcctctacaagaatggaatttactctccacattggaatctgaatgcaaacagtgtgatctatgtgactcgaggacaaggaaaggttagagttgtgaactgccaagggaatgcagtgttcgacggtgagcttaggaggggacaattgctggtggtaccacagaacttcgtggtggcggagcaagccggagaacaaggattcgaatacatagtattcaagacacaccacaacgcagtcactagctacttgaaggatgtgtttagggcaattccctcagaggttcttgcccattcttacaaccttcgacagagtcaagtgtctgagcttaagtatgaaggaaattggggtcctttggtcaaccctgagtctcaacaaggctcaccccgtgttaaagtcgcataaatgacaagcatgatggtgtgaggatgaggccatcttatgaaataataacaaataaataaattttgtatgataataaaaagtatggcccatgtaccatcccagcgagcctatgtttatatctgagtggcgttgtacctttcaatcgccttaataaaatgtcagtcttcacgttttgtctttt

SEQ ID NO: 8180 - DNA, 1450 bp, Glycine max
  Clone ID: 700737719_FLI
tgttactcttaacagagaacaattaaaatacctggttattgaagctttacggggcggttgccagggacatagagctgagctatttgctgcccgtgttgcaaagtgcttagctgctttggagggacgtgaaaaggtttatgtggatgacctaaaaaaagctgtagaattggtcattctaccccggtcaatcgttactgagaacccaccagatcaacaaaaccagcctcctccccctccgcctcctccacaaaatcaagaatcaggcgaagaacagaatgaagaggaagaacaagaggatgacaaggatgaagagaatgaacaacagcaagaacaattacctgaagagtttatctttgatgctgaaggtggcttggtagatgaaaaactcctcttctttgcccaacaagcacagagacgccgtgggagggctggaagggcaaaaaatgttatattttccgaggatagaggccgatacatcaagcccatgcttccaaagggccctgtaaagagattagctgtagatgcaacccttagagctgctgcaccttatcaaaaattgcgaagggcaaaagattctggaaacaatagaaaggtatttgtggagaaaacggacatgagggcaaagagaatggcacgtaaggcaggagcattggtgatatttgttgttgatgcaagtggaagcatggcattgaacaggatgcagaatgcaaaaggtgcagcacttaagcttctggctgaaagttatacaagcagggatcaggtatctataattccattccgtggagatgcagctgaagttctcctgccaccttctagatcaatttcaatggcaaggaaacgtcttgaaaggcttccatgtggtggagggtccccacttgctcatggtcttacaacggctgttagagttggactaaatgcggagaaaagtggtgacgttggacgtataatgattgttgcaatcactgatggcagagccaatatatcattgaaaaggtcaactgaccctgaagctgccgcagctactgatgccccaaaaccttcagcacaagaattgaaggatgaaattcttgaggtggccggaaagatatataaagcaggaatgtctctccttgtcatcgacactgaaaataagtttgtctcaacgggttttgccaaggagattgctagagttgcccaagggaagtattattatctgccaaatgcttcagacgctgttatctcatcggcaacaaaggaagctttatcagctttgaaaagttcatgaaaccttgtaaaagtaaatcagccaaacttgatttcttccccctttttgtcgtaaatgttaatgtaaatcattcaactatctatgatgggaagaacgcatattgtaatagccaagagcaattttgaatcataccgatgctaacaaaccatagacatgataatgatcaatgttggctaattccaaaag

SEQ ID NO: 8181 - DNA, 447 bp, Glycine max
  Clone ID: 700737722_FLI
cgatcgtataagaaatatgaatcgtgactcagttaagtttagagatgaaacaagtggcgaggtggcaaaccaaaatctcacttttccagtgcttctaccaaagataccaggtcgcttttactttctatttgggaagcccataaaaacaaaaggcatggataagattctaaaagacagagaaagtgccaaccaaatgtaccttgagattaagtcagaagttgaacacaatttaaattacttgatcaagaagagggaggaggatccatacaggaacttcgtcgataggaaaatgtatcagatattttatcctcacgaaactgatccaacgccatcatttaagccctgaaaaatgtttttgatatataatactctttttatgtaatcataattattcttaaacaggtacatgtacatggccattattctaataaaatatcactttatttt

SEQ ID NO: 8182 - DNA, 1291 bp, Glycine max
  Clone ID: 700737763_FLI
caccattttcaaatcaagaaatttagctagctttctttcaactctcttgggagcttgcttagggctttaggaggcttgggtggagcaactcatcacctctttttctcctctcttcgcatagttcaacttgagaaattcggcggtgggaactgatggtggctctgagcttccagggtgggcgggcaagtcctgcccaaccccaacacccatcattgtgtagtggaagagccgctggagtcatcaggattcggtgtgggatagctgagccatctggtgaacctgctcctttaggacaaaagacgcggtaccatgacggcatttttgagaaggccttcatgactctctttgcacgtaagatggagaaattttcagatccaccagcaggaaaagctagagagaataagggttggtgggattggggttatgactatgagagtttcgtggatgtgtcaaggagggtaatgcagcgtaggtctcgtatccagcaacaacaagtggttcgagaggttctcctgtctatgcttcctccaggtgcgcctgcccagttccggaaattgtttccgccaacaaaatgggctgcagagtttaatgctgcattgacagtgcctttcttcgactggttagttgggccatctgaggttgtggaagtagagataaatggagtgaagcaaaaaagtggcgtgcatataaagaagtgcaggtacctggagaatagtggctgtgttggaatgtgtgtcaatatgtgcaagattcctacccaagattttttcactaatgaatttggacttccgttaacaatgactcctaattttgaagatatgagttgtgatatggtgtatggccaatccccacctacatttgaagaggaccctgtttcaaaacaaccttgctatgcggatatatgttctatggcaaaaccaagctctagtgtgtgtcctaaactacaggcatgagaaggcattcctttcggatttaattttccattgcagaattagtgtttagtaagcttttttttttttaaatcagcaaagataagtatatatatttaatatgtggtgggtacaaagggtatccaaatctatatacatgtctagtaagcttctaattcgacccgaggtgctcttcccgctctagcttcagaaaatttcatttttcatgtgtaataatattaataccagccttgctaggcttttacttctttcatagagtcattacattcacaaacgagagaacattgtctacaaatacttcatgtaaatttgtaattatagtgtcaaatatcggtattgcc

SEQ ID NO: 8183 - DNA, 564 bp, Glycine max
  Clone ID: 700737894_FLI
ctcgatctcgccatcgacggcgccgacgaggtcgaccccgacctcaacctcgtcaaaggccgcggcggcgccctcctccgcgagaagatggtcgaggccgcctccgacaagttcgtcgtggtcgtcgacgacaccaagctcgtggacggcctcggcggaagcgggctggccatgccggtggaggtggtccagttctgctggaagtacaatctggatcggcttcaggagcttttcaaggaagaaggtgtggaagcaaaattgagattggaggagagtgggaaaccctacgtcaccgataattccaattacatcgtggatttgtacttcaagactccaattagggatgcattggccgcaggcgctgaaatttccgctctggaaggcgtcgtcgagcatggcttgttcctcaacatggccacttctgtcatcatcgctggcaaatctggcgttgaagtcaaggccaagtgagactctgaagtaattcgtttcttcttcttcttctcattcttgtctctgtattatttttgttttcagtggaataataataattattgcgttatttgg

SEQ ID NO: 8184 - DNA, 1606 bp, Glycine max
  Clone ID: 700737936_FLI
accaaacactagctacgcttctctctctttccttcccaggcactcttcctaatcctccatggctctatgttttttttcttcttcttcttcttgaaataatagaagaaaaacattagaaatctatctggatcctgttttgcgtttcagatcacagatttgataatgcatattattaaatttaactgaacgcatcttatcacttgaatttccttcgcagagcttcctgtggctgtggaatcatcgtatcttcttacgtccgaagcaagcctttgtcttgtgtgtgttcttcccccttccgtcagacttctaggaaaatcagatgcatcgtggtaaattttcccttacacccaagaatgaagtcaaggacttgacaggttcaagtttaaccagttacaaacatagcagtcttctggaccccatagatgtttcttcatcttcagatgatgaaaatgaccttcctaatgatgatgtgtctaatcaattagtcctttatgatcctgtggcgaatggaaacaatgcaattgaacttgcacctgatcctctccagtgtgaacatccattgcttccaagaagcaaaccttcacattcagttcctagagttttgccttcagttggtgctttcactgtccaatgtgcatcctgcttcaaatggaggttgattccaacaaaggaaaaatatgaagaaatacgtgagcatatccttgaacaaccttttgtttgtcaaaaagctcgtgagtggcgacctcatgtatcttgtgatgatccagaggatatttctcaggatggcagcagggtttgggctattgataagccaaacattgcacagcctccggctggatgggagcgactgctaaggatcagagctgaaggaagctccaaatttgcagatatatactatatagcaccatcaggcaagagattgcgttcaatggtagagatccagaagttcttgatggagcatcctgagtatacaagagatggggtaactctttcacagttctcatttcaaataccaaggccattacaagaaaactatgtgaggaagcgacctgctagacttacctcttcatatgaagtcagtgagcctgttgaacatgaacaagtgagtcctctagcatgggtagatccagaagggcatggtcgcagactggggcttcctgcccccccattcatggaatcccatgatattgaccctatcagtatcagccgtccttcaaagaggcaagcaactcataaaggtgccctgtagtaaggaccctcatcaaatcctttcgtgttatgtgcattgtgcagtcagtcagttgcatcttacttacaaatagagaaatagttcgtttatcctttttaatagggcattttaggtgtaatgagcttgcggggaaaagcagtgtagagacggttcacttgtcctcatgaggagatcattatcttggtattcctaataaaaatgtattttgcatctgggagaatcttttgtacaaaaaagggtgcctgtcccaagagaaacatgttagactcaagtaatattctgatatgaaaatatggtcattcagcaagaggctaatttgatcttaactttagcttcttttgaccttttttttttcag

SEQ ID NO: 8185 - DNA, 885 bp, Glycine max
  Clone ID: 700737952_FLI
gacaatagcaacatatatagtggaagggggtacaacacgcacatatacaaccattaagagcatgtgccacactgccccacatgtattgaggactttgctttctcatttgacgcaggcaatagctgattacgttattttccaagtggagtctggggctcattgcatacaaatatttgattcatggggtggacaactaccacctgaaatgtgggaacgctggtcaaagccttatatcaaagagattgtaaatttggtcaagaaaaaatgccctggggtaccaattgttctttatataaacggaaatggtggtcttcttgagcgtatgaaagacaccggagttgatgttatagggctagactggacagtggatatggcagatggaagaagaagattgggtagtgggataggtgttcagggaaatgtggaccctgcctacttattctcccctcttgatgccctgactgaagaaattcagagggttgtgaggtgtgcgggacctagacggcatatccttaatctcggacatggtgttcttgttggcacacctgaagaagctgttgcacatttctttgaagtagctaggagcttgcagtttgacacactttttcaaaacaatactgcaaaaggccctaatcttgtaacttaagaacaaatgtcattagtgttgcttacttgcttcttgttttactttgtcttggagttagttcaagcccttctcgaaaggaagagtgtaggcttagtcctttattcttatgcttctatgaaatgatcaaaagtctgaggatgcacattgctgtaccggcttagatgaagttgtgattttacattctgctgtatttataattgattatgataaattaattggaggcttccttccattttggt

SEQ ID NO: 8186 - DNA, 475 bp, Glycine max
  Clone ID: 700738029_FLI
gagaatggcagcacttggtggcaatcgtgatgtggcaggaagccagaacagccttgagatcgatggtttagctcgctttgctgttgaagaacacaacaaaaaacagaatgcccttttggagtttgaaaaggtagtaagtgcaaaacagcaagtggtttctggtaccttgtacaccatcactttggaggcaaaagatggtgggcaaaagaaggtttatgaagccaaagtttgggagaaggcatggttgaacttcaaggaggtgcaagagttcaagcttgttggagatgcacctgcatagtctagtgcttaattaggttgcagaagagtgaagagtgagacagcctggctcgaaggggaaagcctaaggatatatcaaagcatgctatatgtataaaataaatgtagcttttctaccttcggtattgatatttgaaatcgtgatttggcatcttatatatgatctctgtgtttgtct

SEQ ID NO: 8187 - DNA, 1728 bp, Glycine max
  Clone ID: 700738093_FLI
cgagtcatgtgagaagtgagggagagatgcagtagtagtagtgggtggtaacagagaagaaaatagggggtttggtttggtgagttacccaagagaaaggatgaagagggaacgcgagcagcttggttccatcgcagggacctcaagctgcggttattcaagcggaaaatcgaatctttgggaggaagaaggaggcatggacgagcttcttgcggtggtgggttacaaggttaggtcatcggacatggcggaagtggcgcagaagcttgagcgtctcgaagaagccatgggaaatgtccaagatgacctcccggagatttcaaacgacgtcgttcattacaacccttccgacatctccaactggctcgaaaccatgctttctaattttgaccctctcccctccgaagagccggaaaaggactccgcctcgtcggactacgatcttaaggctattccggggaaagcaatttatggagctagcgacgcgctaccaaaccctaagcgcgtgaaagccgacgagtcaaggcgcgcggtggtggtcgttgactcgcaggagaacgggatccgcctcgtgcacagcctcatggcgtgcgcggaggccgtggagaacaacaacctcgccgtggcggaggcgctggtgaagcagatcggcttcctcgctgtgtcgcaggttggagctatgaggaaagtcgcaatctacttcgccgaagcgctcgcgaggcgaatctacagagtcttccctctgcaacactctctctccgattctcttcagattcacttctacgaaacctgtccatacctcaagttcgcacacttcaccgcgaaccaggttatcctcgaagcgttccaaggaaagaaccgcgttcacgtgattgatttcggtatcaaccaggggatgcagtggccggcgctgatgcaagccctagcggttcgcaccggcggtcctccggttttccgactcaccggaatcgggccgccggcggcggacaactccgaccacctccaggaggtagggtggaagctcgcgcagctggcggaggagatcaacgtgcagttcgagtaccgtggcttcgtcgcgaacagcctcgccgatctcgacgcctccatgctcgatctccgggaaggcgaagccgtcgctgtgaactctgtcttcgagtttcacaagctcctcgcccgccccggcgcggtggagaaagtactctccgtcgtacggcagattcggccggagattgtcaccgtcgtcgagcaagaagcgaaccacaacagactgagttttgtcgaccggttcacggagtcactgcactattattcaaccctattcgactcgctggagggttcgcctgtgaaccctaacgataaggccatgtcggaggtttacttagggaagcaaatctgcaacgtggtggcgtgcgagggaatggaccgcgtggaaaggcacgagacgctgaaccagtggcggaaccggttcgtttcgaccggattttcttcggttcacttgggttcgaacgcgtacaagcaggccagcatgttgctcgcgctttttgcgggtggggatgggtatagggtggaagagaacaatggttgtctcatgttgggatggcacactaggcccttgattgccacctccgcgtggcaactcgctgcaactcgctgagtcgactcgccgattcctcaaccagctttttttttttgttttaattttattataatttctattcatgcccaccg

SEQ ID NO: 8188 - DNA, 2162 bp, Glycine max
  Clone ID: 700738195_FLI
cttccatgatgctgttttcatttctttctttccttgtcatactcaaatctgaagccaacaacgaccagctacaattcgtgtaccattattgcaacaacgagtacggaaacattaccaccgaaacctactcagacaaccggaataaccttttgtccaatatgtattatgacaaagaaaatgactacggcttctacaattcctcctatggacaagaccctgacaaagtttacgccatcggtttctgcagaggcgatgcaaatctagataagtgccgtagttgcctggaaaagtccgcagtccttctcagagagcggtgtccagtacagaaagaggggatcgggtggtttgacgagtgcatgttacgctacaccaaccactcaatatttggtgtcatggtaactcaacctaacaacatcatgtgcaacacaaaaaacgccccaaaggatcctagatcggctgctggttttgatcaagtggtccacaacctgttgaacgaactgagaaacaggacgacgacagtggcagacccagaaagtgattccagtcgaagtcgcaagttcttcgctgaaggagatgctccggttcaatcaagcaatgtgaccatacatgctctgattcagtgcacacctgatatttctagtcaaaactgtactcgatgcttggagcacgctatgacgaatattttatattgtgatggaaaaaggggtggtcgatatctaggaccaagctgttctgttagatatgagatctatccctttttttgagcccatagtccaccatgcaccaccaccacaacctgccactcaggttaccacgaccactgggaaagaaaagagcaacccatcacgaactatcattgctatagttgtgccagtcgttgccgttgtcgtactcctggtggcctttacctacaattatttaggagcgagaagacgaagacaaaaaccttttcaaagtgaaggaggcgaaggtgaacttgataatgacattaaaatagacgagttgttgcaatttgactttgcaaccatcaaatttgcaactaataacttctctgatgcaaataagcttggccaaggtggatttggaattgtttataagggtacgctctctgatggacaagaaatagcaattaaaagattgtctatcaattctaaccaaggagaaacagaatttaagaatgaaattctgctaacagggaagcttcaacaccgaaacttagttagactgcttggcttttgtttttcaagaagagaaaggttattgatatatgaattcgttcccaataaaagccttgattatttcatatttgatccaaacaatcgtgtgaatttgaattgggaaagacgctataatattataaggggtattgctcgaggtcttctttaccttcatgaagattctcgattacaagttgttcatcgtgatctcaaaacaagtaacattttgttagatgaagagttgaaccctaaaatatcagattttggcatggcaagattatttgagatcaatcaaactcaagccagtacaaatacaattgtcgggacctttggatatatggctcctgagtacattaaatatggacagttttcagtcaagtcagatgtctttagttttggcgtaatgattctggaaattgtatgcggacaaagaaacagtgagattcgtggtagcgaggaaaatgcacaagatctattaagctttgcatggaaaaattggaggggagggacagtttcaaatattgtagatgacacattaaaggattattcttggaatgaaataaggagatgcattcacattggattactgtgtgtacaggaagatatagctgatagaccaactatgaataccgttttactgatgcttaacagtgactctttcccacttgctaaaccttctgaacctgcatttttaatgcgtgataagagttctttgcctacggctatgctgtctggtgggcaacattcagaggtaacaaggtcaggttattcaggaagtcaatctgctcaagaatcatcaattatggctccaatcaccgagccatatcctcgttagatatttgtcataaaatttactttttatgccaattgggcaaaaaggaaatgatcaattattgaaacttcatcctttggagttaacaacgtaaccacctacccttcctggtt

SEQ ID NO: 8189 - DNA, 697 bp, Glycine max
  Clone ID: 700738341_FLI
atgcaggacacaattgaacgctaccgcaggcataacaggagtgctcaaacagtgaacagatctgatgaacaaaatatgcagcatttgaagcaagaaacagcaaacttgatgaagaagattgagcttcttgaggcttcaaaacggttcaagatcttgcttttcaatccatcttcgcaacttgtttatattcactgttagatttatctcacaaagaataaaaataaaaaatatattctgtgtactattcatccctcaggaagctcttgggagaaggtttggggtcatgctccttagaagaactgcaacagatagaacaacaattggaaaggagtgtaagcaatgttcgtgcaagaaagaatcaagtttacaaggaacaaattgatcaactaaaagagaaggaaagagctctatatgctgaaaatgctaggctgtgtgagcagtatggtatccagccacagccagcaacaaaggatccgaaagaaattcaaccctatgcagaaagcagtccaagttcagaagtggagactgaattgttcattggactacccaggtctatctagttgaagataatttaatccttgcctagtatgaaataagaagcccaactgcaatgtataaatatcacatgtttcctaatactttgagatgaataatattatcgcttatattatataaagaactttccaattttatgatt

SEQ ID NO: 8190 - DNA, 1071 bp, Glycine max
  Clone ID: 700738353_FLI
gcttgccaatgttcgtggcacaaacattggcaagccacacatcatatccattgtctgccaagataaatcccaatgattcatctggaggattgaccacccatactatggatatgatgtgtggcttgccaatgttcgtggcacaaaatatagccgcgggcacatatcacttcatcctaatgacatggcttattgggattggtcatgggatgaattagctaggtatgatcttcctgcttttgttcagtatgtgtacaatcaaaccggccagcgaatgcactatgcaggtcattccttgggaaccttaatggttttagcggatttgtctcgagggaaactgttggacatgttgagatcagctgcattactttgcccaattgctcacttgaatcatgtcacgtcgccggtggcaagaactgctgctcaatcatttatagctgaccctctatactggttaggcctccgtgaattcattccaaacggggatgctgcaagcaaattagtgggaggcatctgccatattctaaacctgatcaactgctcaaacaacctactgacactaatcacaggtccaaactgctgcctaaattcatctgcattcaatgcctatcttgatcatggattaccgccaacagcaaccaagaacttgatccatctatgtcaaatgattagaacagcaaaaatagcaaagtatgattacggtgaccaaagacaaaatatgcaacactatggacaacgggttcctcctctttatgacatgaccaaaatttcaaatgaatttcctcttttcctcacctatggaagacaagatgcgctatccaatgtaaaggatgtgcaacttttgctcaatgaccttagagatcatgatggaaacaagttagtagtattgtttacggaagattattctcactatgattttattatgggtgtcaatgttaaccaaattatctatgatcctatgatagttttcttcgaggttaattgattttacaactattagtgattgcactttaaataatgtaaaaattttctttttcatcaagtttgttcaataaaatgttacattttcctctc

SEQ ID NO: 8191 - DNA, 676 bp, Glycine max
  Clone ID: 700738568_FLI
ataaattaaccttccagggaaactagagaaaaaatatatatttggaggaatatatgcatgagattaatcatgtctgtgcagagtgagcttcatggattagctgctttgcagtggtcgatttgtcaagactccctcagtaggtccaatgaggctcgaggtatgtatgagaagcttaaatctcatccaaatcctaaagtaagcaagaaagcaagacagttcatgtacagctttcaggctatggaaatgatgaagatgacaacaggatctcaattttatttaaagaactcagactaccagaattattttgatgcatttgttgaaaataaatctaactatcccggaggagatggcccggttcaagaaagtgcaatgaatcaggttttgccgtatattctttttcttgtttctcctatttttgtcgtactacttattgctgttcggaaaggaatataaatctctttcttttgtatacaaattccgtttgttttatttcatattgtcaaatgtcaatctctaagcaggagataattcttccagtttggactttggacaacttcattcgagtttgattacaaaaactaacctctacgattgtatgtatatatataggataggattgtaaatgtaagaattgtgcaagtactattattataaaggaaatgttctattttggtgt

SEQ ID NO: 8192 - DNA, 1574 bp, Glycine max
  Clone ID: 700738574_FLI
gggaagaccttgttagccaaggctattgctggtgaagctggtgttccatttttctctatatcaggttctgagtttgttgagatgtttgttggtgttggtgcttctcgtgttcgtgatttgttcaagaaggcgaaagagaatgccccttgcattgtctttgttgatgaaattgatgctgttggaagacaaagagggactggaattggtggagggaatgatgaaagagagcagaccctcaaccaacttttgacagaaatggatgggtttgagggtaacacaggtatcattgtcgttgcagcaactaacagggctgacattcttgactcggccttgttgagacctggccgatttgatagacaggtgacagttgatgttccagatataaggggaaggactgaaatcctaaaggttcatgctagcaacaaaaagtttgatgctgatgtttctcttgaagtgattgcaatgagaacacctggctttagtggagctgatcttgcgaatctgttgaatgaagctgctatattagctggtcgccgtggaaagacagctatttcatctaaagaaattgatgattctattgataggattgtggctggaatggaaggaacagtgatgacagatgggaagagcaaaagtttagtggcatatcatgaagttggtcatgctatttgtggaactttgactcctggtcatgatgctgtgcaaaaggtaacactagttcctcgcggtcaagctcgtggacttacatggttcattcctaacgatgacccaactctgatctccaaacaacaactctttgcaagaattgttggaggactaggtgggagggctgcagaagaaattattttcggtgagcctgaagttacaactggagcagctggtgatttgcagcaaatcaccagtttggcaaaacagatggtgaccacatttggaatgtctgatattggtccttggtcacttatggaaccatcagcacaaggtggggatgtcatcatgagaatgatggcaaggaactcaatgtcagagaggcttgcagaagacattgatgctgccatcaagaggatctcagatgaagcatatgaaattgcactggagcatataaggaacaaccgtgaggccattgacaagattgtggaagtccttctggagaaggagactctgagcggagatgaattccgtgctatattgtctgagtttgttgaaattccagctgaaaaccgtgttgctccttcaactccagtaccagccactgtttgaatagcctatatatgtaacatctttcatatgtattatcttagaatacagaatgccctctgcagcctgctccatatttgtgaatgattaaagattctaccttactttttcattttttgtagtgttgacaaatgacaacagagagtatgtataaaagagaaactgtttttagtgtaaaaatttgtagtttctttacgtctataatacagtgtaactttaataaacctttatttttaaatgtagagttgtaacgggtgagacacaatgtttagtttttttttataaatggaaatgaaaaaaaatactaacttaaatacttt

SEQ ID NO: 8193 - DNA, 639 bp, Glycine max
  Clone ID: 700738611_FLI
tcgacgtcgatttttgtcgctcgaagctctcctcctttaactacccttccaattctcttagccaaagcgtttcgtcgtcgtcgcttgatgttggagtggtgccggacgggaacacggtgtcagacatgtcgtattcttttggtcggaacagttcggattcgagtgggattgttgttgtgtcaggaaatagtgtggggcaaggtgcgacgcagttgtgtggaatggatcgggaagcgagggtactgcgatacagagagaaaaggaagaaccgaaaattcgagaagacaattcgatacgcatcgcgaaaagcatatgcggaaacccggcccaggataaaaggccgcttcgccaaacgaacagaaattgactcggatgtggagcgtctctatagccctggccctgcggtgctcatgctggacactccatacggcgtcgtaccatcgttttagttaatttcaaaatgaagaaacgatggagtgcatgaatcttagaataatgattagcgattctgtgggattgttaggggaaaaaggtgaagaatcgaatcggtacgaacgtgattcttagctggagcgcgatgggggaagattattgtgaagatttgtctcgatcgaccagaaaagcccgtttactttttat

SEQ ID NO: 8194 - DNA, 1238 bp, Glycine max
  Clone ID: 700738702_FLI
ctccacaggatgctggaactcactatgcagtcatgagctcctacgagtacctcagcactggacttcgccagtacttggacaacaaaatggatggattctacattgctccagcttttatggacaagcttgttgttcacatctccaagaacttcatgaccctgcccaacatcaaggttcctctcattcttggtatctggggaggcaagggacaaggaaaatctttccaatgtgagcttgtctttgccaagatgggaatcaaccccatcatgatgagtgctggagagttggaaagtggaaatgcaggagagccagcaaaactgatcaggcagagataccgtgaagctgcagacatgatcaagaagggaaagatgtgcgctctcttcatcaacgatcttgatgcaggagctggtcgtcttggtggaaccacacaatacactgtgaacaaccagatggtgaatgccactctcatgaacattgctgataaccccaccaatgtgcagcttccaggtatgtacaacaaggaagagaacccccgtgttcccatcattgtcaccggtaacgatttctcaacactctatgcacctctcatccgtgatgggcgtatggagaagttctactgggcaccaacaagggaagaccgcattggtgtttgcaccggaattttccgcactgatggtattcctgaacaggacattgtcaagcttgttgacaccttccctggccaatccattgatttctttggtgcactgagggccagagtatatgatgatgaagtgaggaagtggatttctggtgttggtgttgacagtgttgggaagaagcttgtgaactcaaaagatggacctccaacctttgagcagcccaagatgactctggagaagctcttgctgtatggtaacatgcttgtccaagaacaagagaatgtcaagagagtccaattggctgacaagtacttgaacgaggctgctcttggaaatgctaacgaggatgctattcagaggggaactttcttccagtcttgaattggaggcaaagcaaacttggcaagtaaatatttctgttcgtgaaggttgttgtactaatccaagtgctagaagttgtgatggaacttgcgtgtaacattcttagcattctcaatgtcttaggtgcaaagagaagatgctaagtttgagatgatcttactatatttttcatattggaccgtcttcctctataattttgagttacagtgtccactt

SEQ ID NO: 8195 - DNA, 1728 bp, Glycine max
  Clone ID: 700738818_FLI
aaatttgtttccttcacacttttcagaacacccagaagctctagcctcaccagcaccacatattgctagctagcgactccgagatgccaagcaaagaggattcacctttagtagaagcaaagcttccactattagaagctcaccctttaacagatgaaagagaacaagaccaaagtttcccacgaaggttttggcttgagtcaaagaggctttggcacatagtaggcccttcaattttcagccgtattgcatcctactccatgttagtcataacacaagcctttgcaggccaccttggtgacctcgaactcgctgccatctccattgccaataatgtcgtcgttggcttcgacttcggcctcttgttgggtatggcaagcgctttagaaacgctatgcgggcaagcttttggagcgaagaagtactacatgttaggcgtttacatgcagcgttcatggatcgttcttttcatatgttgcatctttcttttgcctttgtacttgtttgcctcgccggtgttgaagttgttggggcagccggaggagttggcggagctatccggcgcggtgtcgatctggatgataccggtgcactttgcctttgcgtttcagttccctctgcagaggttcttgcagtgccagctgaagaccgcgcccatagcgtgggtgtctctggtggcgctcgtggtgcatgtgtttgtaagttggttgttcgtgttcaagcttcagtttggtgttgttggtgctgctgctactattaacttctcttggtgggtcctcactttggggctttttggctacgttgtttggggtgggtgccctcacacttggagtggtttctctgttgaagcgttttctggtctttgggagtttctgaaactctctgctgctgctggagtcatgctatgcttggagaattggtattacaaaattctgattgtaatgaccgggaatcttgagaacgcggagatcgctgtggatgcattatccatatgtatgaccatcaatagtttggagctgatgattcctctggctttttttgctgcaacaggagtgagggttgcaaacgagctaggagctgggaacggaaaaggagccaagtttgctactatggtatctgtggtgacatcggttataataggacttttcttctggatgttgattttgatattgcacgataaattcggctacatattctctaatagcaaagctgtccttgatgaagtaaacaacctttctcttctattagccttcacaattctgctcaacagtgttcaaccagttctctcgggggtggcagtgggatcagggtggcaatcatatgttgcatacataaatttgggttgctactatattattggggtgcctcttggaattttgatgggttgggtcttcaatcaaggagttatgggaatctgggcagggatgatttttggtggcacagcaactcagacattaatattgagcctcattacaattcgatgcgactgggacaaagaggctgaaagagcaaaattgcatttaacgaagtggactgatccaaaacaagaattgaactaatcaagggatactcgctttgtaacctaaatgccaaaggaatccgcatatttgttttaggcttcggtgatattgaacgaaactaaaataattatgatatatgtcattattaatacaatgaaattgtttcatgatagtagtattagaaaagaaaattctatttaccaatttt

SEQ ID NO: 8196 - DNA, 1815 bp, Glycine max
  Clone ID: 700738841_FLI
gggcaatgctgacattatacagatttcaggacatgatgggggaacaggagcaagccctataagttccatcaagcatgcaggaggtccttgggaacttgggcttacagaatctcaccagacactcattgaaaatggacttagagaaagggttattctcagagttgatggtgggtttagaagtggagtagatgtcatgatggcagcaataatgggtgctgatgaatatgggtttggttcagtggcaatgattgctactggatgtgttatggcccgcatttgccacaccaataattgcccagttggtgttgccagtcagagggaagagttgcgtgcacgctttcctggtgttcctggggaccttgtcaactactttttgtatgtagctgaggaggtaagaggcatattggcacagctggggtatgagaagttggatgatgtgattggccggactgacttgtttcaaccacgagacatatctctagcaaaaactcagcatctagatctgaattatatcctctctaatgttgggttgcctaaatggagcagtaccgaaattaggaatcaggagcctcataccaatggtcctgttctggatgatgttttgctagcagacccagaggttgccgatgccattgaaaatgaaaaggtggttaataagaccataaaaatatacaacattgatcgtgctgtatgtggacgtatagctggtgtcattgcaaagaagtacggtgacactggttttgctggacagttgaatataacatttacaggaagtgctgggcagtcatttgcatgctttctgactcctggaatgaacattcgccttgttggagaggctaatgattatgttgggaagggcattgctggaggtgagttggttatcactccagtcgacaagaccgggtttgaacctgaggatgcagctattgtagggaacacttgcttgtatggtgcaactggtggacaggtcttcgttagagggagagctggtgaaagatttgctgtcagaaactcacttgctgaagcagtggtggaaggcgcaggagatcattgttgtgagtacatgactggtggctgtgtggttgtcttgggaaaagtgggtagaaatgtagctgctggtatgactggagggttggcttacattcttgatgaggacgatactttcatacccaaggtaaacagagaaattgtaaaaatccaacgggtgtcagcccctgttggacagatgcaactgaagagcctgattgaagctcacgttgaaaaaacctgtagtaccaaaggtgcggctattctgaaggactgggataagtatttatcactattttggcagctggttccacctagtgaagaagatacccccgaggcaaatgccaaatatgacacaactacggcagatcaggtcacttatcagtctgcttagggtaacaatctaaggttacattacattgattacgccaggctatggagccattgttgtgtccctgatttgtacaggaattggagaggctatcaattaggtggaaatgctagccaaaatatgggattaaactatcccttgaaaccatggtgctgcatgtattctcaagatcatttttgccagcagtatgaggaaccccgtatacatccatctgaagcattagcattctcttttgtatagccatgtgaaggaaaaaagctgtatataaaatgcagttgattcgaatttgattgggacttttgtggacggtcaaaataaatagttggggcttgatatgcctgggtcccctttgctctcctgaattaatgaaaaattattgttttttccttgcacgatcg

SEQ ID NO: 8197 - DNA, 170 bp, Glycine max
  Clone ID: 700738858_FLI
ctagatgtagctgatggatagtttttatgtttgacacatgtagatttcttgtctttctgtgggatttatgctgtgttggttgtctgggggaagttcattctttttccaagccttgtcctagctatggatccacatcggcataagcttcatatgaatggggttgaaaccat

SEQ ID NO: 8198 - DNA, 878 bp, Glycine max
  Clone ID: 700738944_FLI
gagttaatcaacgttaatcaacttgttctcgttaattagtactgaaaaatgacttccaagatacaaatattatcaatcctaggcatgttggccatgttctttcttatctccacggaggtgttagccactggattacatggtgttggtgttggtggtggattacctggtgttggtgttagcgctggattacctggtgttggcactggattacatggtgttggcggcgctggattatctggtgctggtggcgttggattatctgccgacgcgggattatctcgtgctggtgacgctggattatctggtgctggtggcggccgtcgtggtcgtgctggctccccttctttgtgttttttctctgtcattttctcgaacaggtgaaaggcgacgacaacgatgaccggtggccacgatcgcgtgaagggttcatggagtcctcaggaggatgcgacgttgctgaaactcgtgaacgagcacggggcacgcaactggtccgtcataagcgccggaatttccgggcgttccggcaagtcgtgccgtctgcggtggtgcaaccagctgagtccggaggtgcagcaccgtccgttcactccggcggaggacaagatgatcataaagcgcacgccattcacggaaacaaatgggccaccatctcgcgcctcctccccggccgcaccgacaacgccatcaagaaccactggaactccactctccgccgccgtcgcgcggtggagtcatcctcctcctacagtctctccgccggcgaaacgtcactcttccttgtttgacacgcttcaccctttcaagaaacagtgcatcgagaaggaaaacgaagaagagcgagtgctgagtcccgttacgacgtcgttgagtctttt

SEQ ID NO: 8199 - DNA, 1735 bp, Glycine max
  Clone ID: 700738950_FLI
tgtctctgcaattcggatgatatcaaggactaaaaaccaccaatcaaaaaccatgaatgctaagagagaaaagggagagtgctttgaaaatgggaaagtttagttcaagttacagtacttctgattttgttcactttggagttctacttccctttcttctgttatcacagttgttctttcaacttgcatggtgtggctccatagtaaagttccttcctggattagagggaccccttccttttgttcttgaaaccgggtatgtgggagtgggtgaatcagaggatgtgcaggcattctactacttcattgagtcagagaacaatccaaaggaggatcctctcatgctttggctcactggtggccctggttgctcagctttctctggccttgtcattgaaataggtccaattgcatttaaaaatgaggaatacaatgggagcctgcccaatttggtcttgaggccacactcatggacaaaggttagtagcattatatttgtagacttgcctgtttccacgggcttcacttatgccacaacagagtttgctactcaacgaagcgactggatacaagttcaccaagtccatcaatttcttaggaagtggttgattgaacatccaaattttttgtcaactgatgtttacattggtggcgattcatactctggcattactattccagcaattgttcaagaaatttctctaggaaatgaaaaagggctccaaccatggataaatctccagggatacctgctggggaatccagcaacaactcgaaggcatgaaaactatcgaatatcctttgctcatggaatgggacttatttctgatgaactatacaggtcactgcaaaaaaattgtaaaggagagtacataaatgtagacaccaaaaatgtattatgttctagaaatatcgagacattcaatgaggttacatcaggacttagtatggtcaatattttggacccgtcatgtgattggcttgatactgaaacatcttggaggagatctctacttaagaaatatccgagaaagaatttccttaatactcatctcaaattgccatccttaaactgtcggagttatgcatacttcctctgcggttattgggccaatgatgatagtgttcgcagtgcactgcatatccgtaagggaactataggaaaatggcgtcgctgtaccttcaatatacctaacaaggaggacatctcaagcagctatgagtatcatgtaaatctcagtagaaaaggctatcgttcactgatatacagcggggatcatgacatgaaaattcctttcttggaaactcaagcatggataagctctttgaactattccattgtggatgattggaggcaatggcatacagatggccaagttgcaggatacacaaggacttactccaatcgtatgacatttgccaccgtgaagggaggaggccacacagctccggagtacaagcctgaagaatgcttggccatgttcaggagatggatatctaacaaggctttgtaggaataactaataaaactcatgttctctcttggcaagaactaaacttggcatactttgcataataaagccacagggtagattattcactaataaaaaataaatttgtgtgtctttgtcaaccaaaaatacaaaactgtatgaataggatttgttccaagtagattttaaaatattcaactatgtaatgctttggtgttgggatttgcctcactgcctaaact

SEQ ID NO: 8200 - DNA, 1433 bp, Glycine max
  Clone ID: 700738987_FLI
cattaagcttcggaaaaaagttgttgttgtagtagttgtttgtggtcggtgatagttgagtttgaagtagtgcttcgcgtctacattcagttcaatggcttcttccatctgtgctctctcgccttccgtccaatcacagctcactaaaaccaccctcgttgctccaatccctctctatcaacgaagcaagtgcgaaatgagcaggaggagttttgcgtttaagggaattgtggcctctggcgtttcggtcgcggcttctactctcacagccgaagcagaaccatcttccaaaggttttgaaagattgccgtacaagccggaagggtacaattattggacatggaggggtcataaaatacattatgtagtgcaaggagaaggctctcccattgttcttattcatggttttggggcctctgcattccactggaggtacaacattccagaattggctaagaaacacaaggtatatgccttagacttgctcggttttgggtggagtgacaaagcacttatagattatgatgctatggtgtggagagatcaagttgttgactttgtgaaggaaatagtaaaagaaccaaccgttttagttggaaacagccttggaggatttactgctttggttgcagcaactgggttgcctgatcttgtcaatggtgttgctcttctaaattctgccggacaatttggcgatgggaaaagggaaagtgaaacttctgaagaaacagctctacaaaagtttctcctaaagccattgaaggaagttttccagcgtgtagttcttggatttttattctggcaggcaaagcaaccagctcgggttctgtcagtcctaaaaagtgtgtatataaattcttccaatgtggatgactatcttgtggaatctataacaaggccagctcaagatccaaatgccggagaagtctactacaggttaatgacgcgcttcatgatgaatcagagcaagtacactctagatgctgtcttaagtgaactctcatgcccgttgttgctgctttggggtgaccttgacccatgggttggtccagccaaagcgaatcgaatcaaagagttctatccaaaaactactcttgtgaacttgcaggctgggcattgtccacatgatgagacaccagagcttgtgaacaaggctttattggattggttgaccaccctcactcctgaagtgactctccaaacagtttgaacgcgtatgattttgtaaagccaattgaaaacaagttcttgattaagttttgagtttcaaatagttaatagtagttatcagtatacgttgtgtacaaagaattgggtaaaggatactcagaatagagaaaaatcacagcaagaatactttatgatcattgttctacttcttctgcacacctgtacatttttttcgacctaatgtatgcattcatttcttacat

SEQ ID NO: 8201 - DNA, 503 bp, Glycine max
  Clone ID: 700739218_FLI
gatgaagtgaggaagtggatttctggtgttggtgttgacagtgttgggaagaagcttgtgaactcaaaagatggacctccaacctttgagcagcccaagatgactctggagaagctcttgctgtatggtaacatgcttgtccaagaacaagagaatgtcaagagagtccaattggctgacaagtacttgaacgaggctgctcttggaaatgctaacgaggatgctattcagaggggaactttcttccagtcttgaattggaggcaaagcaaacttggcaagtaaatatttctgttcgtgaaggttgttgtactaatccaagtgctagaagttgtgatggaacttgcgtgtaacattcttagcattctcaatgtcttaggtgcaaagagaagatgctaagtttgagatgatcttactatatttttcatattggaccgtcttcctctataattttgagttacagtgtccacttaaattgaatttggtgccttttccttttgtcct

SEQ ID NO: 8202 - DNA, 1423 bp, Glycine max
  Clone ID: 700739290_FLI
ggaaattaagcaaaaccgcgtaggtgctcaaatcatagtctcagcatataaagtaatatcttaacctatctgcttaattgtttgattgtgatggcggatgaagggggaattgagaagcggcgctacgatgtttttctgtgttttagaggggaagacacgcgctacaccttcacaggtaatctctatgctgctttgcggcaggcgagattgaggaccttcttcgatgatgggttcaagagtggcgaccaaatctttgacgttgttcttcaagcaattcaggaatcaaggatttcaatcgttgttctctccgaaaacttcgcttcttcctcgtggtgccttgaagaacttgtgaagatccttgagtgcagggaaacaaagaagcaactcgttattccaatcttttaccgcatggatccctccgacgtaaggagacagactggttgttatggggagagcctggctcaacatcaatatgagttcagaagcgactccgagaaagtacgcaattggcaggaagctttgactcatgtcgccaacttgcccggatggaggttcagccggtaccaatatgaatatgaattcatcgaagacattgtgcgacaagccatcgtcgccattgtaccccgctatagcatttttctgagttttagtggaaacgatacccgctcctttacaggttttctcaacaatgcattgtgcaggagtaggtaccaaaccttcatgaatgatggggaccaaatttcacaatctactaatggagttattgaagaatcaaggctttcgatcattgtattttctgaaaactatgcacgttcctcgtcctgtcttgattttcttttgaccatccttgagtgtatgaagacgaaaaaccaactggtttgccccatcttttacaaagtgttaccgtcggatttaaggcatcaaagaaatagctatggtgaagccatgactgagcatgaaaatatgttgggtaaggactctgagatggtgaagaaatggaggtcagctttgtttgatgtcgccaacttgaaaggattttacttgaaaaccgggtacgaatatgaatttattgacaaaatcgtggaaatggccagtaaaatttaaaatggcttaaatcgatcaggtcctcgctcaagtgtcaactagaaggaaatatagactgaagtgccgtggaaggcagaactaatcaattcaacagattacaaatggttctatgagcagtcataagctcacagattgatactagtagttgtaatgtttacaatcggcactgaggaattgatttggaagtctgaattttacttcgaacattagcaatttctagaaaggtgaatatataagtcctgagggccatggccagaggcctgtcatcttgaaattgtgacacacactctcgtttaagtcatatttactttgatttccc

SEQ ID NO: 8203 - DNA, 128 bp, Glycine max
  Clone ID: 700739327_FLI
gtggtagtagtagtagtaagcatacaacacttgttgcttcatttttcttttaaacttgtactgagaaacagaaccatcaattttctctgccttctcattgtgcaataaaattcttaccttgaaatctg

SEQ ID NO: 8204 - DNA, 672 bp, Glycine max
  Clone ID: 700739380_FLI
tgggcgtatggagaagttctactgggcaccaacaagggatgaccgcattggtgtctgcactggaatttttcgcaccgattcaattcctgaacaggacgttgtcaagattgttgacaccttccctggccaatccattgatttctttggtgcactgagggccagagtatatgatgacgaagtgaggaagtggatttctggtgttggtgttgacggcattgggaagaagcttgtgaactcaaaagatggacctccaacctttgagcagcccaagatgactctggagaagctcttgacgtatggtaacatgcttgtccaagaacaagagaatgtcaagagagtccaattggctgacaagtacttgaacgaggctgcacttggaaatgctaacgaggatgctattaacaggggaactttcttccaatcttgaattggaggcaaagcaaacttggcaagtaaatatttctgttcctgaaggttgtgctgatccaagtgctagaagttgtgatgggacttgcgtgtaacattcttagaattctcaatgtcttaggtgcaaagagaagatgccaagtttgagatgattttactatatttttcatattggactgtcttcctctataattttgagttaaagtgtccacttaaattgaatttggtgccttttccttttgtcct

SEQ ID NO: 8205 - DNA, 1446 bp, Glycine max
  Clone ID: 700739416_FLI
caaaggttgctgtaggagataagattgcagtagtgctaagtgctaacacctgcagtgaacaatggcctctgcatcagcatctctgctcaagtcttcacttgttcttgacaagtctgagtgggtgaagggacaaacccttcgccaaccttctgcatcagttgtgagatgcaaccccaccaccccatcaggcctcaccatcagagctggttcctatgctgatgagctcgttaagaccgcgaaaacagtggcttcaccagggaggggtattttggccatggatgagtccaatgctacctgtgggaagcgtttggcttcaattgggctagagaacactgaagctaaccgccaggcataccgtaccctcctcgtgacagttccaggccttggtcagtacatctctggtgccattctctttgaggaaacactctaccaatccacaactgatggcaggaagattgttgacgtgctgcttgagcaaaacattgttcctggtattaaagtcgacaagggtttggtgccccttgcaggttccaacgacgagtcatggtgccaaggtttggatggtctagcctctcgctcagctgcatactacgagcaaggtgcccgtttcgccaaatggcgtactgttgtgagcatccccaacggtccctctgctctggcagttaaggaagcagcctggggtctggctcgctatgctgcaattgctcaggacaatgggttggtcccaattgtggagccagagatcttgcttgatggggagcatggtattgatagaacttttgaagtagcccaaaaggtctgggcagaggttttcttctaccttgctgagaacaatgtcctttttgagggtattctccttaagcctagcatggttacacctggagccgagtccaaggacaaggccagtcctcagacagttgctgattacaccctcaagctccttcacaggagaattccccctgctgtccctggaattatgtttttgtctggtggacagtctgaggttgaagctaccctcaatttgaatgccatgaaccaatctccaaacccgtggcacgtgtcattctcgtatgccagagccctccaaaacactgccttgaagacatggggaggccgcccagagaacgtgaaggcagcacaagatgcactcgcattccgtgccaagtccaactcactcgctcagcttgggaagtacactggtgagggtgaatccgaggaagccaagaaggagttgttcgtcaaaagctactcctactaagatgtttgcagtgaatatgatacttgttaggcagcaacaccagcagttacagtaggtgttgacggacgatgaagtggaagactaatttgtctaaaatgtaatgtttttatagtcttggagactatttttgtttatggttaaatgcacctttacagcttaataaaccttttgctatgagttgtgtactt

SEQ ID NO: 8206 - DNA, 862 bp, Glycine max
  Clone ID: 700739430_FLI
ttgcggctgagttaccaggaagaacagataacgaaataaagaaccattggcacaccacactcaagaagaggtctcaacaaaacacactcacaaaggaagaagctagagcctccaaatcaaaggataaggtacttcccaacaagggtgttactgttactcttccagctacttcttcccagatttcagataattcatcattatcgccagcttcatccaccagcagcgagttttccaacataacttcagatccttccactgctgccagcatgcaaaatttggtgtttgaagatgatgatgagttcggttttctggattcatacattgatcctatgaataatgaaagtttctggaaagagctaactctggatgacatttcctttaataatgtaccaatagtttcagaagataccaatggctgttttcaaagtacaagttctagcaatagcaacacccttgattctctgcataaatcaaccagcgaaagtattgttgcggataatgactttggcggctttttcgatgcatacgcagaagcaaccgttgacaacttttggacacaaccatatgtggctggcatgtcctcccacgttccaactgaactacttgctccctccgttgcagaatctgaatattttactccaatatatgatgatctgtggggccaaactcatttgtattattagcttatattctgatatacaaaaaatagtgcttgttcagtttgagagtaactactactattatacacagtcatgaataatgataattattgttacttattgcaggtgtgtattagtcgggttaataaacgagagtgtatatatatataaataaagtatgtatattgaagttgctttagggt

SEQ ID NO: 8207 - DNA, 1043 bp, Glycine max
  Clone ID: 700739601_FLI
gcccaataccaaaagcctacatacaaaaatttgaagcgatgaagaacgttgttatagataccgatctgcagtacatggaaatttctatttcttatggtagaaacaagtacagtgattctgtgattataacaacaaaagcaattactatgacaatggacaaaattccaaaaggctttgtaagcattgatttatcaaaaaacggatttcaaggagagattccaaatgccattggagagcttcatgccctcaaagggatgaacctttcccataacagacttattggtcctattccccaatccatgggaaatttgacaaacttagaatcattggatctctcctcaaatatgctcactggtggtatacctacagaattaaccaatttgaactttcttgaagtcctaaatctttccaataaccatcttgcgggagaaatacctggaggacaacagttcaatacttttcccaatgattcctacaagggaaactctgggttatgcggactcccactgacaatcaaatgcagcaaggaccctgaacaacattctccaccttcaactaccttgaggaaagaaggaggatttggatttggttggaaaccagtggctataggatatggatgtggaatggtctttggagtgggaatgggatgttgtgtattgttaataggaaagccccaatggcttgtgagaatggttggaggtcaactcaataaaaaggtgaaaaggaagacaaggatgagatctaatgaaaatggtagcagaatgaattagttgatatatggcatgactggagaatgtcttgttacatacctgccatctttgaaaacaaaacttaagggcaagaactttatcacactgcattgcatgggagatctggttcaaagttttgctgtaatatgaatgtgttgtacttttgcttttttgtgtgttctttttcgtttgttgtgtagaagagtgcgatgtattgagttgcagttttgatttatttaatacgtataactgtggcattaattggttgtataataatagatgttgtatattttt

SEQ ID NO: 8208 - DNA, 410 bp, Glycine max
  Clone ID: 700739616_FLI
attaaataaaatcaagaaagcatgcatatgatgaagaaggtgtgtgggtttgcaatagtggtgatggcagcactttttctggtggagatgagtcccatggcagaggctgtgacttgtagccctgtggagttgagtccctgtttgggggcaatcacgtcctcttcaccaccatcgacaacttgttgccagaaggtgagggaacaaaggccatgcctctgtggttacctcaaaaaccctagtctgaggccatatgtcaactctcctggttccagaagggttgctagctcttgtggggttcccttcccaacttgttagtcactttttacttcatatatatgtaataaactccccctactgttggctggaaattatatatatatatatatatatgttgaagaaattcactcaat

SEQ ID NO: 8209 - DNA, 1017 bp, Glycine max
  Clone ID: 700739674_FLI
aatgaacccatatggacgaactaagcttatcattgctgacagagggaactcttctgtgcatggaacccatatggacgaactaagcttatcattgaagaaatttgtcgtgatgtccaccgtgcagagccagattggaaaataatattgttaagatacttcaacccagtcggtgcacaccctagcggttgtattggggaggatccccgcggaattccaaacaatctcatgccatttgttcagcaagtagcagttggccgacggcctgcactgacagtttttggaaatgattataatacaactgatggcactggggttcgggattacattcatgttgttgatttagcagatgggcacattgctgcgttgcttaaactagatgatcctaatataggttgtgaggtttataacctgggaacaggaaagggaacatcagttttggagatggttcgagcttttgagatggcatctggaaagaaaattccacttgtgatggctggccgtagacctggtgatgctgaaattgtttatgcatcaacaaagaaagcggaaagagagcttaaatggaaggcaaaatatggcattgatgagatgtgccgcgatcaatggaattgggctagcaaaaacccttatggctatggagatcaggaggattccaccgtttaactatatatatatatagtgttctctttgggttcttttccgaactcccccacaccgtagtccgtaggtcttgtgaatttagttttctcaaaagcttttctttagtccgtaggtcaaggtgacaagtacttgtattattatgattcatagttacatggtaaataagtagtggtttactgcactgtaatttaatttaaaggttctataggttccttcttacaggttattgattattagattcgaatactctcatgttccacatgagcagcatcctgttttgtaaatctgaatcacatgtttgtttaaagtgtaactaacaggtatcctaacctcattattcagattatttcttttttg

SEQ ID NO: 8210 - DNA, 1440 bp, Glycine max
  Clone ID: 700739717_FLI
gtctttctctcctttcttctccttctcgcactgccatttgaaacccctgacccgaatcgtttcctttctcctcatcctctgcctcagtctcccaggatccaatataaatggaaatggaagcttcaaaatttatggctacaacgaactgaagcctctatcagacttagcttgcccgggttagtggaagaatttggggtgaagtaaagtgaaaaattgccttacgttagaaacgtgatcaagttccatggaagaagagcatcaatgttctggaagtggtgaagaaccacagacacaggaaccagatggagaagatcaacagctgcagcatcaatgccaagtacctcgagctgaagagaaatttgtattgcaatttatggattcgatggataactacctatccctctttgatgcagtgtcctccacacttcgacagggatggtttgacttagcaagtgctcgacattccatgggtgcttctcgcattaatagttctttattggacctgaaatttcattcagctgctacaacattgaagataaccaactatgatggtacacagccatgcttcatgttgcgtaaatgggtatcctctgaacatgaaagttctcagttagaagatgagaatgtgcagtcacaagatggtagtagtgtcaaatcttctggtatggttttcttatccctatgcataagcataatacaattttttttcattagatgttagcatactgtaatttgaactggatattagggtaaatcccaaaattaaacatgcacattagagcaaactttgatttcatttgttacttgattcttctgctatatgctttaagtagcatgtttgttgtttctcattttgttatatgtttggttgtacgaactgctgaggtgaccatggctaaaaactcatcaggacttgtagaaaatgctgaagttcaaaatgagcgatccaagtccttgtcaatttttggagttttaatttccccaaagcttcgagcctcccagctgtcatttgagaaagcactagagacactcatagaaatagccaatatgcaatcgtcattgttatattcttttcaccaacttcgaagggtggaagataccaaagaataaaaaagtaccagctctttcaggctgctggaaatccatcgcatgtggacaatctgattgcagttttgaggattcagtattcaatgattttggtgttctatttattgatgcatcagcagactgtgaacatcttcctcattacgcttatttctttttatattggttacaaatacatgaacattgattatagtaagggggaagggttttacccaacgcgtgctaacagatttgcgcatgctgaaggggcgtaacctttctctgctacatatgtggcccgaagtcaatacaaaggatttgggcttcattttggttgaatgaattaatttactgatg

SEQ ID NO: 8211 - DNA, 1216 bp, Glycine max
  Clone ID: 700739771_FLI
cttcaatcaatggcagcaacctcaacatccctcttctcctcaaatctccattctctcaactcacaacctttctcttcctcactctccttccgaaatgtccattccaccctctctttcccttcttctaaaccctcccgtggcgttgtagccatggctggctctggcaagttctttgttggtggcaattggaagtgtaatgggaccaaagactccatcagaaagcttgtctctgacttgaacagtgcaacattggagtctgatgttgatgttgttgttgcacctccctttgtgtacatcgatcaggtgaaaaactcaattacagataggattgaaatttctgcccagaattcttgggtgggaaaaggtggggctttcacgggagaaatcagtgtggagcaactaaaagaccttggctgcaagtgggttattcttggacattctgagcgaagacatgtaattggagaaaatgatgagtttatagggaagaaggctgtctatgctttgagtgagggtctaggtgtgatagcatgtattggggaactgttacaagaaagagaagctgggaaaactttcgatgtttgttttcagcaattgaaggcttttgcagatgtagtgccaagttgggataatatagttattgcatatgagcctgtatgggcaattggaactggcaaagtggccacacccgagcaagcccaggaagtccatgcagctgttcgtgactggcttaagaagaatgtctcggctgaagtttcatctaaaacgcgaattatttatggagggtctgtaaatgcgagcaacagtgctgagctcgcgaagcaagaagatattgatggatttcttgttggtggtgcttcattaaagggtcctgagtttgctaccattatcaattcagtcacatccaagaaagttgtggcttaattacttattatggttttcaagagcgcattaaaaatgtggcaataacatgggtgtattatgagttttatttgtatcccttctatggctatgatacctgcgtttagtttgctacttcgaagaaataatcgtttatttttgtcagcacccagaggcttgagagaacttttgaaaaataaacgattatttctcaaaattcaagtgtttctaaacatgtaaggtatgagaaacattctccttttctcatgagccatgttttcttcatttcttggaacaattccatatacgaaaatgtgct

SEQ ID NO: 8212 - DNA, 1427 bp, Glycine max
  Clone ID: 700739836_FLI
aacgctgttttgtagccgttgtctgccttcaaaataaacaaaactactcactccccacaaataaccttcacgccactccaatagaacacaatgagtgctgcttctttgctattctcctgctctatgcatgtgggtgtatctcatcccaaggtggctgcaaaaccctctccatgctgtttgctcaatcagccatggaatcatttaaagtcaaaaacaccatttgggcattcaggagtctttgaaaaatctaaactttcgcataaaggtgatgagattctgtggagggcgggggcccttcaagttgaaagtgcaccctccttctctatgggccaaaaatttcaccttcatgatgtgattgaggctcagcaatttgacagagagactctcaatgccatatttgaagttgcaaggagcatggagagcattgaaagcaagtcatcaaggagccaaatgctaaagggttacctcatggctactttgttttatgagccatccactagaactaggctttcatttgagtctgccatgaaaagattaggtggggatgttctcacaactgagaatgcaagggagttttcgtctgctgctaaaggagagacgcttgaagatactataagaacggttgaaggttacactgatataattgtgatgaggcactttgaaagtggtgctgccaaaagagcagcaacaactgctagcattcctgtaatcaatgcaggggatggccctggacagcatcccacccaggcactgctagatgtttataccattgaaagagagataggaaaactggacggaattagagttgggcttgtgggagaccttgctaatgggagaacagttcgctcacttgcatacttactagccaagtatcaggatgtgaaaatttattttgtctctccaaacgtggttaaaatgaaggatgacataaaagactatctgacatcaaagggagtagagtgggaagaaagtgctgatttgttggaagttgcttctaagtgcgatgtggtttatcaaactcgcattcagaaagaaagatttagagagaaaattgaactttatgaggaggcaagaggcaagtatattgtaaatcaagatgttctagatgcgatgcaaaaacatgctgtggttatgcacccacttccaagacttgacgagatcacagtggaagttgatagagatccaagagctgcttactttaggcaggcaaagaatggtctatatattaggatggctctcttaaaggtattgcttcttggttggtaaggatgcattcacttttcgaagtgaatctgatgatctaatgtcaaaaaatttcagttgttttctttgtttcctttccttgccttttagcatgtttggtatcatgttgacgtaatttcacagttagatcagagctggtaggtattgcttctgcatcttctggt

SEQ ID NO: 8213 - DNA, 1514 bp, Glycine max
  Clone ID: 700739861_FLI
cttcttactctcttacgttaattcttcgttgtctatgatggcattggatatgattgatgttgttcccaggacgaggatggaagaagaaaatatagcaatacaagaagcagcttccgctgggttaaagagcatggagcatctcattcgtctcctttctccttcttcttctcttcacaacaaccttaataatctcaatctcaaccacctcgactgctccgaaatcaccggcttcactgtctccaagttcaaacaagtcatcaaccttctcaaccgcaccggccacgcccgcttccgccgctctccaccccaagcccaagcccaagcccaaactaatcctcaaccacaacctcagatccaacaacaagggttcagtttagatttcgtgaagcccaccattctaaactcaaagcccatcaacaaagacgaaactttgactctttcaacaacctcttcttccttcatgtcctccgtcaccaacgacgccagcgtctccgacggcaagatcggacctttcctccctccctccgccgccaaaccccctctctcctccgcccaccggaaaaagtgccgcgacgccgccgcagcactctccgccaaaccctcctgccactgctccaagaaaaggaaatcacgcgtgaaacgaacgattcgggtgccggcgataagctcaaagatcgcagatatcccaccggacgagtattcgtggagaaaatacggtcaaaaaccgatcaagggctcaccttaccctcgagggtactacaagtgcagcaccgtgagagggtgtccggcgaggaagcacgtggagcgagcgcaggatgaccccaagatgctaatagtgacttacgagggtgagcaccgtcacgtgctgccgttaacttccgctgccggcgttagtttcggccattgagttaatcgacggcgtcttttggaaacttggcgggggacgttaaatgagcgtcggatcgtgaagtaacggcggatgcgaacaaggatcgattcggttcgaggacggaaaaagaaaagtggcaactaaagtcaactttcgcgttgtggaatgattttgttgacgaggacttttgtgtaaatttgaccccaagtaaagtagtgcaggtctcaaagaatgaaaattatagtgatctcatctgtttttctttatttctatttttttttaaaaagagacatttatttatttatttatttgatgttagagttgaattggttgaaggatggggctgcaataattttcttggtagaagaataaaaaaatattaatattgggagatctaagttgaaagattagattctttttgttgaaagaaaggacggtgtttgggggcaaaaagtcaaagtatgagggccccacagagaagcatgtggagttggaataataatgataactttagcattgagtaatggaaagtaggggggaagggaaggaacaggtcaatggttgttatggcgagtgggtcccactgcgtgttgttacttcaaaattcaaatatctctttctctct

SEQ ID NO: 8214 - DNA, 275 bp, Glycine max
  Clone ID: 700739977_FLI
cagggtattacaaggcaattgaagccataggtaaagcatccacattttatacttgggtgttggtgtctggggtgttctaccatctttataaccaatcatcttaccaagcactggatgagattagcccattgactttctctgtggggaacacaatgaaaagagtggtggtgattgtgtcttcagttttggtgttcaggaatccggttcggcctcttaacggccttggatccgccattgcaattcttgggactttcctgtattctcaggcaacatcc

SEQ ID NO: 8215 - DNA, 1584 bp, Glycine max
  Clone ID: 700740015_FLI
tgcccttttggagacttgcgctttttctttgttatttcttctttgttccagaatcatcatcaccaatattttccagcaacacatttaccaagctacataagtagaaacaggattttccatatttgaagtgccacggtgcttccccgagaggcttggcaacttaaagtagatcaaaagtgatgaagaagagttctggttcctcccagaaacttggttcatttctaagtccaggggcaccaaactacagtgagaaaagcattgggagccaaaaggggtggagctcagagagggtgttgttgcagccttcaagcagcaacataaggaatgctagtgtagctaacttgacaccctttaacagtggaagaacaataccttcaatgggatgatgctgagagatggatttgtagccccgtttcaggctattctaacaacaaaaccaattcctatgcacaacttcagcagcggcgaccgaaatcaaaaagtggtccaattatgcctccaggaacaggctactactccaattactcacccacaattccactgcgccaaggtttggtagtgaagaacttcatgatgggtggttctcctttttcaacgggagtgttggcaccggatgctatttctcttcaccattattattcacatgaggctgttttcggtcaccgttatgactttgacaatagtatgcaatgctctagtccattgctcaatgaaaatagtgtagccctcccatcagtgtctagtgcacccatgtggtcagaactgctatgcgacccttcttcgcctaattctcaagatgagaaacgaaaagaaactaagaatgcggacgacgtgacatctctctcaaaatgtgacaaaggcactcaaatgagccctcctgagactgagaatgatgcaccaaaatcttcacccaattcgaccatggatcaacaaaattacctttctgcaaagttagaggtcagagatgtagagatagaccgtgaggctactactgttaggtggtctaagagccatgtacccaagctgagcttgctacctggtatacactcaaggaaaagtagtagaacggaagccaaagcttcaggtttggatattgcagactcaacgttggactcttccaagattcagagggaggaagccaaaatcgttgcatgggagagtttgcagaaagcgaaggctgaagctgaaatacgaaaactagagatgaaattggaaaagaaaaaatcgtcatcaatggataagattctaaacaagctgagaagggcgcagatgaaggctgaaaagatgagaaaccaaataactgtacaagagggtcagcaggtttccaatactcgcaaagtattttcattccacaaatatgcccagatatggtctccaaggagctgcttcggcactcatgctctccatgattaattaataatttaatatttaatcccatacccacgccctgaaatcactaaggtttagtcccgaaaaatgcaggaataatcatatttcaagtcataggccatttttgtttgccttttgtacttcccaacaatgttaatagtgaattactaatacattgtcttacagccatttgat

SEQ ID NO: 8216 - DNA, 661 bp, Glycine max
  Clone ID: 700740020_FLI
ctctacctttactgctactatgttgctgggacagtaggccttatgagtgtcccagtaatggggatagcaccagaatcaaatgcttcatcagagagcatttataatgctgcattggctctaggcattgcaaatcaacttaccaacatacttagagatgttggagaagatgctagaagaggaagagtatatctcccacaagatgaattggcacaagctggcctttcagatgatgacattttccgcggaagagttacagacaaatggcggaaattcatgaagggacaaataaagagggcgaggatgttttttgatgaggcagagagaggggttgcagagctcaactcagctagcaggtggcctgtgtgggcatcattgttgttgtataggcaaatattagattccattgaagccaatgattataataacttcacaaaaagggcatatgtaggaaaagtaaagaaactcttgtcactacctactgcctatggtttttcacttctaggccctcagaagtttaccaaaatggttaggaggtaactgttatacaatgtgtgatacttttgagttacaactgtatacatctcaagttaccagcatgtgttgaagagcaacccattcatttaatgagtttgcaagcatagtaatcagttttaaaatgtgt

SEQ ID NO: 8217 - DNA, 1136 bp, Glycine max
  Clone ID: 700740124_FLI
tgagtgttgagtggacaacactgacacgcatcatctctctcacattctcaaaatgctaaccttcaatctcaatgctatctcttcttcgttctcagttgttccatttcatgccaattatccactgtctactcaaacccaattgttagttccttccaatcttagttactcctttgctacaacaggaaccagaaagttcaagtctttccagctcaaggctggattttgggaatcaattaaatctgggttgatgaagaataactccatgcaagtcattgatccaccctctgcagatgaagaagacgaagaacctctgcctcaagagtttgttcttgtggaaaagacagaacccgatggtacaattgagcaaataatattctcttcaggtggagatgttgatgtttatgatcttcaagccctctgtgacaaggtagggtggccacgtagaccattgtcaaaattagctgccgctttgaaaaatagctatatagtggcctcactgcattctataagaaagtcacctgggtcagaggggaatgaacagaagagattaattggcatggcccgtgctacgtctgaccatgccttcaatgccacaatttgggatgtcctagttgatcctggctaccagggccaaggtcttggtaaagctcttatagagaaactgattcgaactcttctgcaaagggacattggcaatataactctgtttgcagatagtcaagttgtggaattttatcgcaatttaggctttgaagctgacccagagggcataaaaggcatgttttggtacccgaatcactaattgcaaccctaccaaagcttgtttttggattatgttaacattgcaatttgcaaccatgaaatatacaacgacagaagcagtgacaaatttatctatcacttgtaatacgaaagtataaagattgtacgtcaatcctgtaattattgtgttttaggtgtttgtaagttattcacttcttaaaaaagttttgcaacttttcgaacagatgatcatgagtctttgattatgcctgcttgatatttgtctgaaatccgtcagtgactacttactgattttttaatgttttttttcagttttggatgaattgttgtactatataaattagtggttttct

SEQ ID NO: 8218 - DNA, 612 bp, Glycine max
  Clone ID: 700740361_FLI
ctttgtgaagattgccgcaccttatgcacaggaacttttagacataaggcaaaagcgaccgactgggccacaactcgtggaggagataaggaaacaagcagatgatgcaagaaccaattcaatatcgatgccttacagagttcaaagaatagaggaatttgtcaagcaacttgaggcaggagacctgaaactccgagtccgagtacttgagtctgaaagagctgctcgaaaagcaacaatattacaaatggctaccatgtattcagtattggggggaaccttgctaaaccttggtgtcactttgagtagccaaggcaatcaagcttttgcaaatggatcattcattggtgcaggcattttaggggctctatttttaaggtctatgcaacgggtgaagaaacttgacaagtttgagaacatgatataattcgttcccaccaaattcaactccttcgggcttcaagcatatgcatgatatatatatatatatatatatatatattcttgatctctttttccattcatatttttctcataagcataagatatacgagtacgagttgtacagaaacatgattggagggtaatgaagctgcaagaaactgttccttc

SEQ ID NO: 8219 - DNA, 1528 bp, Glycine max
  Clone ID: 700740544_FLI
tgaaaacaagagtgagacagagaaatccataccagtaacgaagaaagatggcgaaaatcctacacctgcaaaagctgaagttcctgacaacgagtttgagaagcgcataagaccagaggttatccctgcaaatgagataggggttacatttgcagatattggtgcgttggatgagattaaagaatcacttcaagagctggtaatgcttccccttagaaggccagacctcttcaaaggtgggcttctgaagccatgtagaggtatattgctttttgggcctcctggtactggaaaaacaatgctagcaaaggcaattgcaaatgaagctggtgcaagtttcatcaatgtctcaatgtcaaccatcacatcaaaatggtttggagaggatgaaaagaacgtccgagctctgttcacactggcagctaaggttgccccaacaattatctttgttgacgaggttgacagtatgcttggacagaggactagagtaggagagcatgaggccatgaggaagattaaaaatgaattcatgacacactgggatgggctattaactggacctaatgagcaaattttggttctcgcagcaaccaacaggccatttgaccttgatgaagctatcataagacggtttgagcgcaggatcttggttggtcttccatctgttgagaacagggaaatgatcttgaagactcttttggctaaagagaaacatgaaaacttagacttcaaagagctggcaaccatgacagaaggatatactggaagcgatcttaagaatttgtgcatcactgcggcttatcgacctgttagagaactaatacagcaggagagactgaaggacatggaaaagaagaaaagagaagcagaaggccaaagctctgaagatgcttcaaacaataaagataaggaagaacaagaaattaccctgaggcctttaaacatggaagacatgagacaggccaagagtcaggtggctgcaagttttgcgtcagaaggatccgtaatgaatgagttgaagcagtggaatgatttgtatggagaaggaggttcaaggaagaaacaacaactcacttacttcctatagattgtggaatgctacttttatttttggttttgtgaccattcatcctcaacgatacatttcaacaaaggaaggaatccttcaccagagatgttgaattgaaagcatgccgaaatgtcagagatcttatgattcccagaaaagctcgagttctggcacacacttctaatctctaaaggatgtgtagaccatcatgcactatgtttaggaaagggttctcggtttttgcttgggttgactagaaacaaatgagcacctatattaggggatttatattatgtcatgcacggttttggaagatgcaatggctttgtaggaagtaggaatattttacacccaacattttaggtatgttatattatatatgatcagaattttcagacagtagagttttgtaaattgattgtgcaactgtactgctaatacagtttggctcaattattc

SEQ ID NO: 8220 - DNA, 639 bp, Glycine max
  Clone ID: 700740644_FLI
gaaaaattttcagtgaagtatgttggagctgcagcaatgtattttgtgtctaagaaactgaagaaaaaatataacattactgatgaacgtgctgctctttatgaggcagcagaaacatgggtagatgctctggatggccgggagttccttggagggtctaagcctaacttagctgacctggctgtcttcggggttttaaagccgatccgctatttgaggtctggcaaggatatggtggagcatacacgtattggcgagtggtatgcaagaatggagagtgctgtgggagagccttccaggattaaagcctaaattgggttctttcttgtcctgacaattgacatttatttttttggcttctactattattatggtcttgcttgcctccactggtttgatggaaaacatttaggtttctcagataacatatttggctctttagaacaatactacaatgtggtattagtgttatatataggcaaagttttgctgaacaattgattctttagaaaaattattcttctattatagctgctgttattgtaaagattaaagaaatctttgagctgtatcaaagaataaggcaacgtctgccatgcctgtgatattttaacactttggttttgattaatttgatgc

SEQ ID NO: 8221 - DNA, 1609 bp, Glycine max
  Clone ID: 700740758_FLI
gaagttaaaagccttagccttccctacaactccaaacacaaagacatcatcatccatggctgcctccgtctccactgtcggagctgtcaacagagctcttttgaacctgaatggttctggagctggagcttcagctcccagttcagccttctttgggaccagcttgaagaaggttattgcctcaagggtccccaacagcaaggtttccggtggaagcttcaagattgttgctgtagaagagaagaaagagattgaagagacccagcagaccgacaaggacagatggaagggtcttgcctatgatatctcagacgaccaacaagacatcacaagaggaaagggtttggttgactcccttttccaagctccacaggatgctggaactcactatgcagtcatgagctcctacgagtacctcagcactggacttcgccagtacttggacaacaaaatggatggattctacattgctccagcttttatggacaagcttgttgttcacatctccaagaacttcatgaccctgcccaacatcaaggttcctctcattcttggtatctggggaggcaagggacaaggaaaatctttccaatgtgagcttgtctttgccaagatgggaatcaaccccatcatgatgagtgctggagagttggaaagtggaaatgcaggagagccagcaaaactgatcaggcagagataccgtgaagctgcagacatgatcaagaagggaaagatgtgcgctctcttcatcaacgatcttgatgcaggagctggtcgtcttggtggaaccacacaatacactgtgaacaaccagatggtgaatgccactctcatgaacattgctgataaccccaccaatgtgcagcttccaggtatgtacaacaaggaagagaacccccgtgttcccatcattgtcaccggtaacgatttctcaacactctatgcacctctcatccgtgatgggcgtatggagaagttctactgggcaccaacaagggaagaccgcattggtgtttgcaccggaattttccgcactgatggtattcctgaacaggacattgtcaagcttgttgacaccttccctggccaatccattgatttctttggtgcactgagggccagagtatatgatgatgaagtgaggaagtggatttctggtgttggtgttgacagtgttgggaagaagcttgtgaactcaaaagatggacctccaacctttgagcagcccaagatgactctggagaagctcttgctgtatggtaacatgcttgtccaagaacaagagaatgtcaagagagtccaattggctgacaagtacttgaacgaggctgctcttggaaatgctaacgaggatgctattcagaggggaactttcttccagtcttgaattggaggcaaagcaaacttggcaagtaaatatttctgttcgtgaaggttgttgtactaatccaagtgctagaagttgtgatggaacttgcgtgtaacattcttagcattctcaatgtcttaggtgcaaagagaagatgctaagtttgagatgatcttactatatttttcatattggaccgtcttcctctataattttgagttacagtgtccacttaaattg

SEQ ID NO: 8222 - DNA, 1381 bp, Glycine max
  Clone ID: 700740910_FLI
agaagatcgaggatgattatgtttctggggagacaatcgggcaaggcaagttcgggtctgtttggttgtgtaggtcaaaggttagtggagctgaatatgcgtgtaagaccctgaagaaaggggaggagacggttcatcgagaggttgagatcatgcaacacttatccggacattctggggttgttacactgcaagctgtttatgaggaagctgaatgctttcatcttgtgatggaactgtgctctggtggtcggctcatcgatgggatggttaaggatggtctgtattcggaacagcgggttgctaatgtactcaaggaagtgatgttggtcatcaagtattgtcatgacatgggagttgtgcacagagatatcaaacccgagaatattctcctcactgcatccggaaaaataaagcttgcagatttcggcttggccatgagagtttccgaaggtcagaacttgactggtttggcaggaagccctgcctatgttgccccagaagtattgttaggcagatactctgagaaggtggatatatggagtgctggagtgctcctgcatgctctgttggttggcagtcttccatttcaaggagattcattggaagcagtttttgaggctattaagactgtcaaattagatttccaaaatggaatgtggaaatcaatatctaaacctgcacaagaccttattgggagaatgctgacaagggatatttcagcaaggatatcagctgaagaagtacttaggcatccatggatattgttctacacggcaaatacattgaaaatgctgcccatcaaaacaaaattgaagaaccaaattggtgccacatgccaacagcttgttgctgtaagggaaccaaggttaggaggaaataggatagataattactcacttagcgagggttcgtcctctgaaagttgctattcagatgatcaggatgaatgtgtgttgattgatgtgcttgcctctgcaatttcacacgtgaggatatctgaaccaaagaggagcagggtgtgtggtcccacaggcccgatagttcaacaaggttcatctaacatgaagcctaacaacctctgtaaagcattttgacctactgacaggctgacaccacttataccactatcttgacgattcttgctgggattatagaatttactttcctcagcacattacatagtgggcaaaagtgaattttacatgctgactcctatggtaggttggcctgggtgccgcggcttcctctccaagttcctttatagtgtgacatctaattgcaatatttttttgtccctttgcttaataacctaataatgattaactgaaataattgtacagcatttgtaaatagaatggtaatgtatcattttcttgct

SEQ ID NO: 8223 - DNA, 1817 bp, Glycine max
  Clone ID: 700741010_FLI
gtggaatcagcaactatgaatatgatgcggaggttgaagagcattgcttctgggaggacttccatttcttcagatcctggaggggattctaactcaaaaagggccaagtttgaaccagaaactgaagggaaggccgatgagaaaacaaataccattgaaacaatctgcacagatcaggaacaacctatagacacatcaaaagaaacttccaatgtaggcacatccgatgtatctacagtagctagaactgagaagtcaggtttcgatgagcttcctaaagaattaaatgaaatgaaaattagagatgagaaaagcaaaaacaacaatgaaaaggatatagaagctactgtagtgagtggtaatggaacagaaacaggacaaataattacaactgccattggtggtcgagatggacaaccaaagcagacaatctcttacatggctgaacgtgtggttgggactggttcttttggtgttgtttttcaggctaagtgccttgaaactggtgaatctgttgccataaagaaggtgttgcaagacaggagatataagaatagggaactccaggttatgcgcacagttgaccatcctaatgttgtcaaactaaagcactacttcttttcaactaccgataaagatgaattgtaccttaacctggttttggagtatgtacctgaaactgtctacaaagtttcaaaacactatgttaggatgcaccaacacatgcctatcatttatgtgcaactttatacctaccagatatgtcgtgcgttaaattatttacatcaagtgattggtgtttgtcatcgtgacatcaaaccccagaacctattggtaaatccgcagacacatcagttaaagatatgtgattttgggagcgcaaaggtgttggttcctggtgaacccaacatatcgtacatttgctctcgatattatagagctccagaacttatatttggggctactgaatacacaattgctattgatatgtggtctgttggttgtgttttagctgaactactcctaggacagccattgtttcctggagagagtggggttgatcagttagttgagatcattaaggtcttgggaacacccaccagagaagaaataaggtgcatgaatccaaactacaatgaatttaagtttcctcagattaaagctcacccatggcacaaggtttttcacaagagaatgccgcctgaagccgtggatcttgtgtcaaggctgctgcaatattcaccaaatctacgttgcaccgctttggctgcatgtgcgcatcccttcttcaatgatctgcgggacccaaatgcatgcttgcctaatgggcgacctctacctcctttgttcaacttcacatctcaagaactggctaatgcacctgaagagttgcgccaacgcctcattcctgagcatgcaaggagttgaatcaatttgaaagttgaaacatctctagggcattgtaaatgggttttgaatgaatagacaccctctccggcatcgccacccgcatgtccaggtctgttcttcagcctcttctgcacaagtcacagctgtgactatacaaagtgagaaacaccttataaagttctatcaaagaacttaaaaagacctgcaggtgactcaaatggataaagtggtactacctggtgatagggttgcaagccttttttaagtagtttataaacttggtgcctcagttgtgaacgatattctaacgatcgtgtaagcatgttttcatatagatcaagttcgtttattaattattactttattccttgaaatggactaagtggaatcctcaattgaataggctt

SEQ ID NO: 8224 - DNA, 724 bp, Glycine max
  Clone ID: 700741020_FLI
aagtagttgagaactaagaagaaggaaatggcttcctcaatgatctcctccccagctgttaccaccgtcaaccgtgccggtgccggcatggttgctccattcaccggcctcaaatccatggctggcttccccacgaggaagaccaacaatgacattacctccattgctagcaacggtggaagagtacaatgcatgcaggtgtggccaccaattggcaagaagaagttcgagactctttcctacttgccagacctcgatgatgcccaattggcaaaggaagtcgaataccttctaaggaaaggatggattccttgcttggaattcgagttggagcacggtttcgtgtaccgtgagcacaacaggtcacctggatactatgatggacgctactggaccatgtggaagctgcctatgtttggctgcactgatgcttctcaggtgttgaaggagcttcaagaggctaagactgcataccccaatggcttcatccgtatcattggatttgacaacgttcgccaagtgcagtgcatcagcttcatcgcctacaagcccccaggcttctaagtcattgaaaaatttgcaaagcatctgtagccaccccactttgtttgttgtacttaaactacattcccatttgtttttgctttatgagatttcatcatcctgtatttttggtttctgttttcggacttcaatggaaattaatggatgagaactaatgaat

SEQ ID NO: 8225 - DNA, 2670 bp, Glycine max
  Clone ID: 700741027_FLI
atgactagattaagttagtagtttgtccattattgatccaacacatgcctctcttttccaacaatttcaacaagatcttttggccttccaatatccatttgtccattattgaatacataagatgtgacaatgacatggcttgctcctttctcaatgtaactcaaacaattttcagaatttagtccccctccgacttgcagaccacctaaatattaccagtcctccacattaaattgagcggaggaaaaatctaaaagttttaaagatatcgggtgagtttggtactttggttaagcttttttcttttaaaaaaaaagcacttattttataataaaaaaagcgcttattataaaattttagatgtttgtataaacttattttaaagagcagaagctgaaaataagctggtggggaagcaattttgcaaaaacacggaagacactcctatggaagatgtatgacacaaataccccggtttttaacgcactcttccaaccttcatttagtggtttccatcttctcccatcgagagacctagcacctggtgtcgctccgcaacagtcgcctggttacctccgctatagtctccctcccaattcatgcgagttcatattaatttagaacgaaatccctaatttggtttgtacatgtttgttgcttgggttaatttagaatgaaatccctaattttgtttgtgattgttgtttgaaaattgggggttcttgatctagattatgttatatagggaacaagtgagaattttctgctgcagtgttgtgtatgtagtgtgtggtttcaattgttggctggtgggggtaatttgcacaccaaatccttcatggatgtggttcaaggcaaaggcttttcttcatctttttatgattgtccgaatatccagctttagtatttcaaaattttgatccattcttaagctggtctttggagatttgattttttgatgattctgggagttgggatgattgaaggcaaatcacaatttattgttgagtggggcgagcaacactaatattttgttttattttcttttgttgcatcaatgttatcaaatattttatttggggtttgaacctttgaggttagctacttaattttctggtttgctgcatctatgttatcaaatattttatcgacgtttcattaagggatatgcttcgattgcggctcctttaaccaagctattggcgaaggaccaattccagtggacctctacagctcaacaggcgtttgatgctcttaagcacaccctgtgtagtgccccggtactagggttgccggatttttctcaacccttcgttgctgagactgacgcttctggggttggaatgcgggcagtgccctcgcaatgctcttcagtaaggcgttttcccccaaactgctccgatcttccacatatgtgagagaacttgccgcaatcaccgccggcgtcaagaaatggcgtcaatatctgttaggacattcctttgtcatcttaacagatcatcgaagccttaaagagttaatgtcccaagccatccagacgccggagcagcaaatatacttagctcgtctcctcaggtttgattattcaatccaatatcgggcgggaaagtcaaatgcgacggctgatgctctttccaggatacctgaaaattgctctggtcaattattggcgttgatcatgcctcatttggtgtttatggaggatttgaaggctgagcttcattgccaccctgcttatcttgaactccgatagagtatccttgacaatcccgctgctcaccctcagtatagcaccattgtggacttcatttcgcagaaacaccgaatttggttgcctaagggattcagcttcatccctctgctacttgaggaatttcattccacacctactggtgggcatatgggcattactaagactttggcgagggtaactcagaattttatgtggcaaggtatcaaggatgatgtgcgtagtttcatcctttattgcctgcactgtcagcagaccaaatacaatcaccgcaaaagccccgatctactgtgcccattaccagttctggcacgaccgtgggaagacctgtcattaaacttcattggtggcttgccatcctttcgtgggttctctattattctggttgtagtggatcgtttctcgaagggagtccacttgggaatgctccactcaaaccatacggcttccacagtggctcatctctttttggatattgttgttaaaatccatggcatgcctcacagcttagtcttcgatcgggatcctttgttcctaagcaaattctggcaggagcttttcaaacttttcggcaccaagcttcgaatgagctcagcttatcatccgcaatcggatggtcaaacagaggtcttgaatagggtcaatgaacagtatctgcgatccttcgttcatcaacgaccctcttcgtggggcaaattcctcctttgggctgaatggtcatacaattcctccattcacactactacggagatggcgccgtatgaagttacttttgggaaaccgcctccgcccattcctcattatcttttcggcacttcaaatattgacgccgttgatgatttttttacaagttgtgaagcagtctttgcattagcccggaagaagctccttaaggcccaacagactatgaaacactttgc

SEQ ID NO: 8226 - DNA, 990 bp, Glycine max
  Clone ID: 700741081_FLI
tgcacacacattcagtcataacgtaaaatatgaaattagacactatcttcgcctttatcgtagtttatattctgctggtaacctcatcagagttccctagtgttgctgcagatgatgttagcagcatcatcagtgcttcccaatttgagcaattgctgaaacacagaaacgatcaaatttgtgaggggaagaacggattctacagctacaatgcttttgtcactgctgccagaacctttgatgggtttggcactacgggtgatgttaacactcgtaagagggaggttgcagctttcctagcccaaacctctcacgagaccacaggaggaggaggatggcctaatgccccagatgggccatatgcttggggttattgctttgtcacagaaagagataaatccaataattattgtgaaattagcaaggcaccatgtgcctcaggcaaatcatactatggtcgaggaccccttcagctgacacacaactacaactatgatctagctggaaaagccatacattcagacttgataaacaatccagacttggtagcccaagacccagtggtatcattccagacagctatatggttttggatgacatcacaagccaataagccctcatgccacgacgtgatcaccaataggtggaccccatcttctgtcgacatggcagctaatagagccccaggttatggtgtgatcaccaacatcatcaacggtaggattgaatgtgggaatggtccttctccagcctcaaatgacaggatcgggttttataaaaagtattgtgagatttttgggctctcagatgctaccaacttggattgcagtagccaaaagtcctttgatcaagattaagttggactccttccttgcttataattgccttagttataaatcccggaataagaataagaatgttggtccttgtgttgattttaaataaatttgtctattctgtgttgaatgattaaaacatttttgttcaatc

SEQ ID NO: 8227 - DNA, 1860 bp, Glycine max
  Clone ID: 700741124_FLI
gaaacctctaatcgaaagattgaaatacttgaagctttgagtgaatcaagtacaaaggaggttgctaatgaaggcgacaatgtggagagtaaaggtgaaaaccccccaccgttggctggggccaatgtcatgaatgtcatattggttgcagcagaatgtgctcccttcgtcaaaacaggtggtcttggagatgttgctggatcattacctaaggctttggctaggcgtggacacagagttatggttgtagtacctcggtatagtcattatgctgacgcacaagatataggagtatggaaacgatacaaagtagatggtcaggacatggaagtaacatatttccactcttatattgatggtgttgacttcgtttttattgacagtccaaactttcgccatttacaggataacatatatgggggaaaccgagaggatattctaaaacgcatggtgttgttttgcaaggcagctgctgaggttccttggcatgttccttgtggtggagtttgctatggagatggaaatttggccttcatcgcaaatgattggcatactgctttgctgccagtgtatctgaaagcatattatcgtgaccatggtttaatgaagtacacaagatctgttcttgtgattcataacatagcacaccagggacggggccccattgatgatttccgctacacagatttacctgaacactacatagaccttttcaaattatatgacccggttggaggtgagcacttcaatatcttttcggctggtttaaaggcagctgaccggattgtcactgtgagtcatggatatgcatgggagattaaaacttctgaaggtggttggggtttgcatgggatcataaatgagaatgactggaaattgagaggaattgtgaatggaattgacaccaaagattggaaccccaagattgatgttcacttgaaatcagatggatacactaactacacccttgagaccctgcaaagtggcaagcgtcagtgcaaagccgccttgcaaaaggagctcggtttgcctgtccgtgaggatgttccgttacttggattcattggaaggctggatcaacagaaaggcattgatctcatagccgaagcaattccttggatagtgggccaggatgtgcagctagtcatgttgggaactggaaggccggacttagaagatatgcttaggcagtttgagtcccaacaccgtgacaaagtcagaggatgggttggcttttcggtcaagatggctcaccggataacagcaggtgcagacatattgctgatgccatcaagatttgagccatgtggattgaatcaactctatgccatgaattacggaacaattccagttgtacatgctgtcggtggattgagggatacagtgaagccttttaatccatttgaagagtcgggccttgggtggacatttgacagtgcagaaactaacaagttaataaatgcattagggaactgcttgttgaccttcaggcagtataagcagagctgggaagggctccaacggcgagggatgacgcaggatcttagttgggacaatgctgctcagcagtatgaggaggttcttgttgctgctaagtaccaatggtaaattcttggcttctactctacctaagcagactgatcaatatggagtgctctcatgctgagtgatatcaaggtctgtgcagggaaaggacttggtcaagttgttaaaaccttcatgttgcaggtcctggaggaacatttttgcccctaaactaaggattatgtaataatacacttgttatatatgtcatgtctggcacatacctatgtagctaaaacatcaatccagcaatatataaaataaggttagaaactt

SEQ ID NO: 8228 - DNA, 856 bp, Glycine max
  Clone ID: 700741226_FLI
ggcgagagagaatgacaatatctgttttcttagttccttcgacgcctcagttgtgtaactacagaatctcatggccaattcccacttacccttctctttcttcttctaagttaactgtttcactgtgctctccttcccctccaacatctgttatcgaagagggtccttctccttcaccagaattgaccagtggttgtaaggcgtgtggaagagaagaagtggagcaaggatgcaatggtgaaggaaggattcagggtgggattgctacagtaccaggctttgggtggtggcctataaaggcttacaggccatgccctgcatttgtggcatctggtggtaggtataggcgccaaggacaaagcatggacgaggttgtctccggaagtggtaaaactaaaacacccattgccactgactccaacacaagtaacaaaaaggaaagttcgaagaaatctaagaggtaaatgtttgggaggaatattacagtcatcgctctatcgaggtgacaaaagcaagagctttaaggaagaggaggggtaaagaaaatgttgatgttgtggtctgctacaaatgttacaaataatattctgtgaggattatggaaatctatgtaagtcttatacatgcattaggaaatagggtgatgccatgtaatcatgttcactggatttccttgaatctctaccgcttttttcattcatcatcagttatctatcattatagttactttaggtttttaggtttttttatcgataaatattaattcattagaatgtgaattttgtaaacaaacgagatcgaatcttgtgatcttttttttctcccttaattatttaactcatcttatatcttctat

SEQ ID NO: 8229 - DNA, 621 bp, Glycine max
  Clone ID: 700741249_FLI
gacagcttccacagtaccggaagcaaaaattctcggccagattccctaacatgttgcctgaggcattggacctgttagaaaagatgctgatctttgatccaaacaaacgcattactgttgatgaggcactatgtcacccatatctttcatcactccacaacatcaatgatgagccagtctgtcccaggccattcagttttgattttgatcagccaacgtgtgctgaagagcacgtgaaggagctcatttggaaggaatcagtgaagttcaatccagatccaccatgccagtaattctttcttatttgtataaatgtaacgagataaacctctttccccttaaatatattgcctgtgcatccgccagatgatttgctagagacaaattgaagttctcttccttgtaatcttgttctagaccaacaaggatatggaaacaaatttctcctggaaaatgggtaaacgttagaaatccagttggacaggcctttataagagtaataaaaaagctgtgttgtattgtgctcgctcaagtttgctttgggaggaatagggtgtcacagagcctctctcttatttcatgacaattatcttttaatgtcactttccagctttagtgttt

SEQ ID NO: 8230 - DNA, 1352 bp, Glycine max
  Clone ID: 700741257_FLI
gtttgtattataaagaacacagctacattggctgggtcattgttcactttgcatgcctctcaaattcatattgatttgcctactctcactgagaaagacaaggaggttataagcacctggggtgttaaaaacaaaattgattttctgtcactgtcatatactcggcacgctaaagacgttcgccaggctcgcgaatttctttccaagttaggtgatctcagccagactcaaatttttgcaaagattgaaaatgttgagggattgacccattttgatgagattcttcaagaagctgacggtattatcctttcccgtgggaatttgggtattgatcttccaccagagaaggtgtttttgtttcaaaaatctgccctttacaagtgtaacatggctgggaaacctgctgtgcttacacgtgttgtggatagcatgactgacaacttgagaccaactcgtgctgaagccacagatgttgccaatgctgttttagatggaagtgatgccatacttctgggtgctgagactttacgtgggttgtaccctattgagactatttctactgttggcagaatttgttctgaggctgagaaagttttcaatcaagacctttattttaagaggacagtcaagtatgttggagaacccatgacccacttggaatctattgcatcctctgcggtacgggctgcaattaaggtgaaagcatctattataatttgtttcacttcatcaggaagggctgcaagattgatcgcaaagtataggccaacaatgccagtactatctgttgtgatcccccgactcaagacaaatcagctaaagtggagctttagtggagcttttgaggcaagacaatcacttatcgtgagaggtctctttcctatgcttgcagatccacgacatcctgctgagtcaacaagtgcaacaaatgagtctattcttaaggttgcccttgatcatggaaaatcattgggagttattaagtcacatgaccgggtagttgtttgccagaaacttggtgatgcatctgtggttaagattattgagcttgaagattaaactattaaagagcactcaaccaactacagttttagtgttatttatttatttttacaactttggttatttttcttgaagatgcgggtcattctgccacaagtagaagttatctctacttggttttgatgaaacaaattttgatgcaaattattactggctgtcaaacataaaatcaaggcaatgtgcccttgatgccaatttttttagtttaagattcatactagaacacagttcgaaaaatgtgattattgaatcggattaccaatctaatgatgctaattgcttgttatttc

SEQ ID NO: 8231 - DNA, 1533 bp, Glycine max
  Clone ID: 700741294_FLI
tcgagaatagctgcacgcctctttcttgcttttttatgtagaagtttataaggtgaatacattttaatattttttattattttctttattttcacataaataatagcttatatatttcagggtattcttcttgatggttcacaaatagccgtaaagagattatcaaaaagttcaaagcaaggatcaaatgagttcaagaatgaagttttattaatagccaaacttcaacaccgaaatctagtgactctaattggtttttgctttcaggaagaagaaaaaatacttatttatgaatatgtgccaaacaagagccttgattactttctatttgattctcaaccgcaaaagttaagctggtctgaacgctataatattataggaggaattgctcaaggaattctttatttacatgaacattctcgactaaaagttatacatcgtgatctcaaacccagtaatgttctattagatgaatgtatgattccaaaaatttcagattttggtctcgccagaattgttgaaataaatcaagacaaaggaaatacaagtgtaattgttggaacatatggttatatgtctccagaatatgcaatgttcggacaattttctgagaagtcagatgttttcagttttggtgtcatggttttagagattataagtggaaaaaagaatttcagttcttatgaatcacaccgtattactaatggcctcttaagctatgtttggaaacaatggagtgatcacacacctttgaacacattggacccagatattactgaaaattattctgaaattgaggtcatcaagtgcattcagattggtttattatgtgttcaacaagaccctgatgctagacctacaatggtgacagttgcttcatatctgactagtcaccctattgaattgccaacaccacaagagcctgcatttttcttgcatggtagaatgcatgaaaatccagttgcgaatgaatcaagttccaatcaatcaatcaacacttctacaccattctcgaacaatcaaatgtctataagccaatttcttcctcggtaatttcttaacattcgtagggaaaaaagattctttgcatgtgtcttgactaaaggagttacagctgatgttatatccagatggatagttcagactttttaattggattaatcaggttatatggaagactgtatatctgtagcatactgtaaatgcttacctaggatgctgctttctcgaagaaacaggtgatgcatgctgaatgcattctcagtccacaatcctggatttttagttcctgcttattttggtagctaggtgctaattgcttgtttcaattttgaggacttggaagggtcatgtgtgaatgagtttgttaccaataaataataattaagggacatatcgagcatagtatactaaaaaaaaggtgtctgtttaattaaagagcctaatggaaggggttttccattttgaggccgggggctttcttgtgtctgctgctttgtttatgttctatcttatatttgtttttggtggtcc

SEQ ID NO: 8232 - DNA, 1181 bp, Glycine max
  Clone ID: 700741338_FLI
gttaataagcatatctaagtataacattctctgaatacatgcaagatagaatcctctaccatgatataaaagtatcaccaactctctcaaatactgtcaaaacaaccaccaaaatcctgaaggtgggtgtgttgcggtggagaaagagaaatgcgaatccgaaaggagaatttaacatataagagtatgaggacctaatatcaatttacaatacacttatacacatattatgttcagaattcataagtcacaaacaaaatggaggtttcatgctttcatctactgaccattccaagtaaaaacatcataaccaaagctgccactatggataatcccgctcctgataaccacgcctcagtcaaatctctcgggattttcttgttgacaaaaatcaacaaaaaccacataacaaaattatcaataaaattatgaaaaaaggaagtatgcattcacaaattactcataaaatttacatcacaaacggtaatgtccataaaaaattataatgaatgtatgcctgtcataagagcataagcacattcctaggcgtaccaaaaatataagcaactaaattttgatttcttaatatctacaaaagatgaaccacttcccaaagtgcatcctttttttaaggaacccaaagaaatcaaacatacaatagcaaagtggaatcttgaagtatcagagttctgggtataaggtttctaagcctattctatacatgccttgaaatgccatgtaagcctctcatttgtaacatataagaggcagccaaaaccatgtgggacctgcgggtgcagatgaaaatccaaaatggggcaaaaaggaaatagtctctaaatgcaccaagaacgcggagccatgcaaagttgctgtttccagccaacctctctggtcatttgaggtaaaacgctttccattctcgcaaccttacttagtgtggtgccttccttcgcatcttcaaccgtcgaattgctactcctcccaaaacaccagctctaatttctcgttcagttgggcatgtttgtgctctgagagagcgagaaattaagccaatgggtcgagggaagatcgagatcaaaagaatcaacaatgccaacagcagacaagtcatgttctcgaaggggaggaccgggttgttcaagaaggctcaggaactttccatagactccatgggagga

SEQ ID NO: 8233 - DNA, 1753 bp, Glycine max
  Clone ID: 700741346_FLI
atttcatatgtgttccaaacttcttcttggaatgtcccttcctaaataaccctcaaacaaaagccaccttaacatctcttctctgaaaattctctttagagagatagagagatagagagagagagaaagaaattaagaaaaaatggcagcctgcactgtctactcaacacaatctctgagcacaaattgctccatctcaaccccatcaaagacacagctgagtttcttccaccaaaagcaggtagttttctggaggaacagcaacaggggcaacagcagcagcagaagaagctatgtgataacatgtgcagcaggtgactcacagacagtggtgattggtcttgctgcagactcagggtgtgggaagagcaccttcatgaggaggctgacaagtgtgtttggaggagcagcagagccaccgaagggtggcaaccctgactcaaacacactcatcagtgacaccaccactgtcatatgcttggatgattaccactctttggatagaactggcagaaaggagaagggtgtcactgcccttgaccctagagccaatgattttgatctcatgtatgaacaagttaaagctcttaaggatggaattgctgttgaaaaaccaatctacaaccatgtcactggtctcctggatccccctgagctcattaaaccccccaaaatcttagtcattgaaggcttgcacccaatgtatgattctcgggtcagagatctcttggactttagcatctacctagacattagcaatgaggtcaaattcgcttggaaaattcagagagacatggcagagcgtggacacagtcttgaaagcatcaaggctagcattgaagcaaggaagcctgattttgaagcatatattgatccacaaaagcaatacgcagatgcagtgatagaagtgttgccaacccaactcattccagatgacaacgagggtaagattttgagagtgaggttgatacagaaagaaggggttaagtactttagcccagtttacttatttgatgatggctctaccatttcatggataccatgtggaaggaagcttacatgctcctaccctggcatcaaattcttctatggaccagagacttactacggaaatgaggtgtcacttgtagaaatggatggacaatttgacagactagatgaactaatatacgttgagagccacctaagcaacctctctacaaagttctatggagaggttactcaacagatgttgaagcatgctgatttccccggcagcaacaatggaacaggtctcttccaaaccatagttggtttgaagataagagatttatatgagcagctaatagccaccaaggctgagactccagtggctgcaaaagcttaggaattgaattgaacctgccataataatatatatacatatcgaccgagcgacgcagtcaaattgcattagttctcatcaaaatcatcattttctttcttctttcatgttttccacaatttcactgtgtttcatgttattttgtctattgttattaggctgttctgcatcataattaatgaaaaaaacacatatgtatgtatgtatgtacttatccgagaaaaaaaagtgaggctgagattcagttatgttgatacaagattgagacaataattggcttctctttctctagctttatccatactggcatcgcatattttcttatcaaactttttgtgtgtagtttgtaaattaatcaaagggaatgatctaatattctatttgttggtt

SEQ ID NO: 8234 - DNA, 1568 bp, Glycine max
  Clone ID: 700741350_FLI
cgttcccagctccagaaactgaatcccgagcccatcgcatggatcatggactcgcacacacccgaatccctctccaccttcttcaacctcgtcttcaccatgcgcctcttctggctctgcgcctgccacgcgccccccgaagccggctccctctacttccactacctccgtcctccgaaccttcttcatcaccgtgggcgtcgacaccgaactctgcttcatgcgcaccctcggttacatcattacaaagcttcacatgatcaaagaactcagcgttggattgggcttaaaaacgatttttccttctcccagattctcttacgccaacgagactcacggtctttggattctcaaaggttacgcgccagtcatgaccatgaaactggcgcgaagcaataacgttaaaaaaagtcaattctctggcatcgatgccaaggagtcaattctccgttactctctggcgcaccaccaactcgaggcacacgtgcagctagaatacaccgttgggtttttcgatgctttcattcaggttcgtgcacgtgtcgataacatacgcctccacgtggcgaggttgggatttacccaaaacgacgacgtggatgatttcgttgaggagaagcactttccgtcccgggttcgggtttgggtgggcccggagatcggagcgacttattgcgctgggctgagcttgggccggtcgacggagaacaaagagagcgaagtggaaactaagagggttgtggagggcaatttggagaagtcgcagggttcgaatgtgaaagcgttagccaagtcgtcgaggaggacgcggagtaggagttggagaatggatcaagacgcggaagggaacgcggcgatattcgacgtcgttttgcatgataacactacgggccaggaaatgggctcgtggaggcccataagtgaaacgggtggtgacccgggtcatgggctgagagggcgatatgcgagggcaaatagagcgtttaataaaagcgggtcggtggttattgcaggggatgaatatggagaggaagtggggtggaggctttgcaaagagatggaagggagtgtgatgaagtggagaatagggggagagttttgggttagctatttgcccaaccaagcaaagggttcttcttttgaaactaggtacatggagtggtgtgatgaagttgatttgcctcttattcatggtaaaacaacctaagcaagcatgccagtatatatatatgaaagttgaaacccttaattctctcaccaaattacccacgcgaaaaaaaggatcggaaaaggaggagaggtttcggtaaaaatgcatgtaatagaactaaacttagcgactagcatggttagtatatgcctatatgatactgctgtttaggtgctatatatatcaatatatgtggaatagccattggtgcactatctaattaagaaaatgcttcatctatagtgtctggttccatataggattccttagttaaaatgtctaaaattgagtaaagctagctataatatataactcttggttaaacttttaagggcacgtttagtttacaatattaatt

SEQ ID NO: 8235 - DNA, 1350 bp, Glycine max
  Clone ID: 700741352_FLI
ttgaagggttattcagaagaccccatttcccctgctaggctttttgaagtggttgccgatgatctgctaactctcaataaaaatcttcagtcgattgtaggagcagaaaatccagttttgatgtctgcagctgagcagatttttagtgctggtggaaagaggatgagaccagctttggtgttcttggtgtcaagggcgactgcagagttacttggcttgaaggaacttactgcaaagcatcgacgtttagcagagataattgaaatgattcatactgcaagtttgatacatgatgatgtactagatgagagtgaccttcgacgagggaagaaaactgttcatcaaatgtttggaacaagagttgcagtgctggctggagacttcatgtttgcacagtcatcatggtatctagccaaccttgaaaatattcaagtcattaaactcatcagtcaggtgataaaagattttgcaagtggggaaataaagcaggcttcaagcttgtttgattgtgatgtacaacttgacgagtatctaattaagagctattacaagacagcatccttgattgctgccagcacaaaaggagccgcgatctttagtggtgctgacagcagcgtgactgagaaaatgtacgaatatggaaggaatcttggtctatccttccaagttgtggatgacatattggatttcactcaatcagccgagcaactgggaaagcctgctggcagtgaccttgccaagggcaacctgactgcaccagtaattttcgcactggagaaagaaccgaaattgagggatatcatcgagtctgaattcagtgaggttggttcccttgaggaagccatcaatttggtcaagagttgtgggggcattgaaagagcacaagagttagcaaaagagaaagccgatcttgcaattcaaagtctccaatgcctacctcagagtgtatttcgtttagcccttgaagatatggtggcatataaccttcaacggattgcataagcttgtgcatgctgatgacacattgttaaagaaaaaacacaaaaagattcttttggtcctaatatagggatgagagagccttgaactttttgtcatttcaagaatttcaagcaaatctacacttgtgctacttttggggtacttttatagtcattgaagggcaaagcaagcgcgcattctcatcatttaatatatttgcagcttcctgcaaagtacaagaacataatatattccattattgtatcaatacaagtctgcagtatattctttccccccattcttcctttctgggatcttgaaaacagtaaaataaaaaatgataattgatgtttcttttttttttttttc

SEQ ID NO: 8236 - DNA, 1483 bp, Glycine max
  Clone ID: 700741421_FLI
gcagacttaacaacagcacaaagcgggttactgtctgttcaagctaccatctctctctctctttcttagtgcctccttgccagaagttaaaatggcccaagaaactttcctattcacatctgaatcagtgaacgaggggcaccctgacaagctctgtgaccagatctccgatgctgtgctcgatgcatgcttggagcaggaccctgacagcaaggttgcctgtgaaacctgcaccaagaccaacatggtgatggttttcggagagatcacaaccaaggccaacgtggactatgagaagattgtgcgtgacacatgcaggaacattggttttgtctctgatgatgttggtcttgatgctgacaactgcaaggtcctcgtcaacattgagcaacagagtcctgatattgctcaaggtgtgcacggccacctcacaaagaggcctgaggagattggtgctggtgaccaaggtcatatgttcggctatgccactgacgagactcccgagctcatgcccttgagccatgtccttgccacgaagctcggtgccaagctcaccgaggttcggaagaacgggacatgcccttggctgagacctgatggcaagacccaagtcactgttgagtactacaatgacaagggtgccatggttccaatccgcgtccacactgtgctcatctccacacagcatgatgagactgtcacaaatgatgagattgcagctgatcttaaagaacacgtgattaagcctgtgattcctgagaagtaccttgatgagaagaccattttccatttgaacccttctggcaggtttgtcattggagggccgcatggcgatgctggtctcaccggccgcaagatcatcatcgacacctatggaggatggggtgcacatggtggtggtgccttctctgggaaggatcctaccaaggttgataggagtggtgcctacattgtgaggcaagctgcaaagagcattgttgcaaatggacttgctaggagggcaattgtgcaagtttcctatgccattggtgtgcctgagcccttgtctgtgtttgttgacacttatggcactgggaagatccctgacaaggaaatcctcagcattgtgaaggagagttttgacttcaggcctggcatgatctccatcaaccttgatctcaagaggggtggaaatggcaggttcttgaagactgctgcatatggacactttggcagagatgaccctgacttcacatgggaagtggtgaagccactcaagggggagaaggtacctgcttaactaaaaggggttccaacactcttggcaagggacttttgcactactactggcttcttattatctgattgctaaaattttctctatgtttccttccctcttactcaattctgtttttttttttctgtatttttttatgaatttcccccttttttttgtgtacttgtatgtgttctttcagaacatatatattttatatgatgaaac

SEQ ID NO: 8237 - DNA, 612 bp, Glycine max
  Clone ID: 700741457_FLI
gaaatgccaaaaactgggatcgtcctactgctacttacgttgaaaaatgcaagtttcctgaagatggttcatcaccaaagtctctaagatatattggaagcatggtagctgatgttcatcgtacgttgctttatggaggcatctttttgtaccctgctgacaaaaaaagtccaaatggaaaacttcgtgtcctgtatgaagtcttcccaatgtcattcttgatggaacaggcaggaggacagtctttcacgggcaaggaacgggcacttgatttagttccaacgaagttgcacgagcgatctcccatattccttggtagctatgatgatgttgaggaaatcaaagctctttatgctgctgctgagggtgaacaagaatgaaattggaaaggtttcttgtatctttcgctacttacaagcgcttgttttctaattgttactagcaggtgcttataagaaaactagttatctggtcatgtatatgttaataaaattggttgatgtgcctgtcagggctatagaatttatttagataaaatacttagattaaagtatcattttgttgctgaagaagtataactgcttactttccctcaagatgcatttcaaagtt

SEQ ID NO: 8238 - DNA, 723 bp, Glycine max
  Clone ID: 700741530_FLI
gtgtcactgagaaaatgtatgaatatggaaagaatcttggtctatcctttcaagttgtggatgacatattggatttcacgcaatcagcggagcaactgggaaagcctgctggcagtgaccttgccaagggcaacctgactgcaccagtgatttttgcactggagaaagaaccaaaattgagggatatcattgagtctgaattcagtgaggttggttcgcttgacgaggccatcaatttggtcaagagttgtgggggcattgaaagagcacaagagttagcaaaagagaaagctgatcttgcaattcaaagtctccaatgcctacctcagagtgtgtttcgtttagcccttgaggatatggtggcatataaccttcaacggattgcataagcttgtgcatgccgaggacactttgttaaaaaaaaaaaacacaaaccttttttttggtcctaatatagggatgagagagccttgaactttttgtcatttcaagaatatccagcaaatctacacttgtgctacttttggggtacttatatagtcattgaagggcaaagcaagtgcgcattctcatcatttaatatatttgcagcttcctgcaaagtccaataacataatatattccattattgtatcaatacaagtctgcagtacattctttccccccattgttcctttctgggatcttgaaaacagtaagaataaaaaaagataattgatgttt

SEQ ID NO: 8239 - DNA, 722 bp, Glycine max
  Clone ID: 700741539_FLI
gattatccaattgtgtccattgaggatccatttgatcaggatgactgggagcactatgcaaaattaacagctgaagttggccagcaggtgcagattgttggtgatgatctccttgtcaccaacccaaagcgggtggagaaagcaatcaaggagaaggcttgcaatgcccttctgttgaaggtgaatcaaattggtagtgtaactgaaagtattgaagctgtgagaatgtctaaacaagctggttggggtgtcatggctagccacaggagtggtgaaactgaggataccttcattgctgacctctcagttggattagcaactggtcagatcaagactggagctccctgccgatctgaaaggcttgccaagtacaaccagctcctgaggattgaggaggaacttggttctgctgctgtgtatgctggtgccaaattcagagcccccgtggagccctactgattgtttagcccaagattactaagcatcatttaaataagattctattgatgactgcataggacatgtattttttgcgaaaaataaacttgtctactacttcagagaatataggttttccgggcgtggaattttgaagcgagaaaataaggcagtagatgtatgcctgatgcctagtttatttgaaatctagctttagggggtgtttggtgcgacaaattgttttccagaatcataatttttgggaattaaaaaattttggtcgt

SEQ ID NO: 8240 - DNA, 994 bp, Glycine max
  Clone ID: 700741750_FLI
tggataccttacgtgggaagcacgtatcaagattctccttggcacagccaaagcgctagcgtatttgcatgaagcaattgaaccaaaggtggtgcaccgtgatgtaaagtcaagcaacatattaattgatgatgatttcaatgccaaggtttctgattttggcctggccaaattattgggtgctgggaagagttatgtcacaacaagagttatgggaacttttggatatgtggctcctgaatatgcaaatactggccttctaaatgagaagagtgatgtttatagctttggtgttttgctattggaaggaattactggtagagatccagttgactatggtcgaccagcaaatgaagtgaaccttgttgattggctgaaaatgatggttggaaacaggagatcagaagaagtggtggaccccaacattgaggtgaagccatccaccagagctttaaaacgggctctcttaactgctttaagatgtgtagatccagattctgagaaaaggcccaagatgggccaagttgtacgaatgttggagtcagaggaataccctttaccaagagaggaccgaagacaccgaagaagaaatcgagagggtagtggagaaattgagtcccagaaggaatattctgacacagacaggagtgagattcaggattcaagagaagaaagaagagggtgaacaacagacatgaccccaagaattcggtgggttggtgggatttataaattggtagctttttttttcctccatagctttttagattcttggatttttgcctacctcagatgggcatggcaaaggggctggcacagctggagatatttttattttttatttttttcccatgcattggttcttggtgtccttttgtttgtatataggatagatattgtttgtgtatgaaggtggatggtatttctaagataagaacccataatattggggtgtgtacagaatttgatatcttaattccaaaatatgttccat

SEQ ID NO: 8241 - DNA, 1487 bp, Glycine max
  Clone ID: 700741828_FLI
caaaggttgctgtaggagataagattgcagtagtgctaagtgctaacacctgcagtgaacaatggcctctgcatcagcatctctgctcaagtcttcacttgttcttgacaagtctgagtgggtgaagggacaaacccttcgccaaccttctgcatcagttgtgagatgcaaccccaccaccccatcaggcctcaccatcagagctggttcctatgctgatgagctcgttaagaccgcgaaaacagtggcttcaccagggaggggtattttggccatggatgagtccaattgctacctgtgggaagcgtttggcttcaattgggctagagaacactgaagctaaccgccaggcataccgtaccctcctcgtgacagttccaggccttggtcagtacatctctggtgccattctctttgaggaaacactctaccaatccacaactgatggcaggaagattgttgacgtgctgcttgagcaaaacattgttcctggtattaaagtcgacaagggtttggtgccccttgcaggttccaacgacgagtcatggtgccaaggtttggatggtctagcctctcgctcagctgcatactacgagcaaggtgcccgtttcgccaaatggcgtactgttgtgagcatccccaacggtccctctgctctggcagttaaggaagcagcctggggtctggctcgctatgctgcaattgctcaggacaatgggttggtcccaattgtggagccagagatcttgcttgatggggagcatggtattgatagaacttttgaagtagcccaaaaggtctgggcagaggttttcttctaccttgctgagaacaatgtcctttttgagggtattctccttaagcctagcatggttacacctggagccgagtccaaggacaaggccagtcctcagacagttgctgattacaccctcaagctccttcacaggagaattccccctgctgtccctggaattatgtttttgtctggtggacagtctgaggttgaagctaccctcaatttgaatgccatgaaccaatctccaaacccgtggcacgtgtcattctcgtatgccagagccctccaaaacactgccttgaagacatggggaggccgcccagagaacgtgaaggcagcacaagatgcactcgcattccgtgccaagtccaactcactcgctcagcttgggaagtacactggtgagggtgaatccgaggaagccaagaaggagttgttcgtcaaaagctactcctactaagatgtttgcagtgaatatgatacttgttaggcagcaacaccagcagttacagtaggtgttgacggacgatgaagtggaagactaatttgtctaaaatgtaatgtttttatagtcttggagactatttttgtttatggttaaatgcacctttacagcttaataaaccttttgctatgagttgtgtacttgattatgtctcaatatataacaaaatggtttaagctcggc

SEQ ID NO: 8242 - DNA, 851 bp, Glycine max
  Clone ID: 700741958_FLI
ttgcatacgagatccaaatcctgtagtattttttgaaccgaagtggctttatcgtttggctgttgaagaagtaccagaggatgactacatgctgcctttatctgaggccgaggtaattcggcaaggaagtgatgtaacacttgttggatggggagctcaattagctataatggaacaagcttgtcttgatgctgaaaaagagggaatttcttgtgaattgattgatctgaagacactaattccttgggataaggaaacagtagagtcctcagttaacaagacaggaagattgcttgttagtcatgaagctcctataactggaggttttggtgctgaaatttcagcttctattgttgagcgttgcttctcaaggttagaggcccctgtagcaagaatttgtggtctggacactccttttcctttggtttttgaacctttctacatgccaaccaaaaataagatattggatgcaattaaatcaactgtgaagtactagtgagcttaatcaccattttttggtcatctataaggtcctgatgccattgagtgatgcattagtatattgcaccatggagttggaaggttatacaaaaatgaaatataaatgatcagcaaaaaaagaacaatgggcatgcacatgtaacactattaattttctcttacgaggccctgtgtactgagaaacatcaaatatttgaagggagtgatccccattagtaaatctcctacaataaatggacgttttccctttaaatgtgaagttgataactcaaatcagtcaaatgtctacgtcctgccaattgtagcttgcacgatatatatatatatatataaatttcataattttagat

SEQ ID NO: 8243 - DNA, 1047 bp, Glycine max
  Clone ID: 700741988_FLI
gattatctctttgacaaaagattcaacctttctcttcgcttctacaagccccaacaacaacacatagcactcagcaataagaaggtccctattgtgattttccttcacggtggaggcttttgcttcggttcgcgcacctggccccatattcacaactgttgcatgcgcctcgcgtcggggctccaagcggcggtggtttcgccggactaccgtctcgcgccggagcaccgtcttcctgctgcggtggacgacgccgtggaggcggtgaggtggctccagaggcagggcctgagcttgagggaggacgcgtggttgagtgggggcgttgactttgaccgcgtcttcgtcgtgggtgactcgtctggcgggaacattgcgcaccacctggcagttcggttggggtccggttcgagagagatggacccggttcgggtacgaggttacgtcttgtttgcgccgttttttggcggggaggttcggaccaagtccgaggaaggtccaccagagcacatgttgagccttgagttactagacagattttggaggctttcgatgcctgttggaaagagccgagaccacccattggcgaatccgttcggacctggaagcccaaatcttgaacaagagaagcttgatcctattttggtgatagtaggtggcaatgaattgctcaaggatagggcaaaaaattatgctacaaggttaaaagaattagacaaggacattaaatacgttgagtttgaggggtgcgagcatgggtttttcacgcatgattcattctcatcagaagttgcagaagaggtcatccaaatccttaaacgattcatgcttgcaaacttctagttagaaggcacgcacgcacctgaaaaaacaaattcaacagtagaaagacactcatagtgaaatgtaattaaggttaattaattagtctgtgtaattttagcccggtataagtagttcgtgggaatttataagtatatataaatgtcaatttcatggtgtgtacgtgtagcttttcattggagattgtagtcaagtatctttctt

SEQ ID NO: 8244 - DNA, 2503 bp, Glycine max
  Clone ID: 700742139_FLI
gaaataccttacaaaacaaacagtcccagaaacaatcattaaactcccaattttgtcttgttctactcatcactcattctctaacctcaatttcaaataaaagtttcattcttttcactgctccaatctcccctctttgatctcactccaaccacgagatgctcaaaacttctgcttttcaagtttgccactttcgttctaattctcgagaaagcaaagtattttaaatttgttgagagggttgtgatgctgaatgttgtttccaaccagtggagtaaggatgaattctgcaatggatgatatgaatttgattcagcaaacccagagacatcacttggttgtgagggagattggcgaggagattgatttagaaataggagctggggaggatgacccgtcatttggtagcactactctgattggtgcaccgatgcgggaatcttctgtagaagaacatggtgagagcaagcagatggggatgatttctcagcttcctaatgatgctcaagatatgtccaagacccaacaagggaaaaggaagaaaaaggttgttaaaagatggagagaagaatgggcagacacctataagtgggcttatgttgatgtgaaggatggtacaccgaggattttctgctctgtctgcagggagtacggtcggaagcatagaagaaatccttatgggaatgagggcagtcgtaatatgcagatgagtgccctggaagaacacaacaacagtttgcttcacaaagaggctcttcgtcttcaaatggcctccaaagataaaattgtggtcgacaagcctgtttatgtaaaagttgccatgtcaaaaacagcaggatcaattcttgaagctacactaaaaagggatcctcatgaggttgaattcattcaggcagtccaagaagcagttcaagcccttgaaagagtcatagcaaaaaattctcgttatattaacatcatggagcgcttattggaacctgaacgaatgattgtttttcgagtttcatgggtggatgataggggtgggacatgtgtgaatcggggctttagggtacagtttaaccagtcaatgggtccatgtaggggtggtattcgttttcatccatcaatgaatttaagtgttgccaagttccttggttttgaacagactttaaagaatgccttatcaccatacaaattaggaggagcagctggtggaagtgatttcgatccaaaaggaaaaagtgataatgagattatgcgattctgccaaagtttcatgagcgaaatgtatcgctacctggggcctgacaaggaccttccgtctgaggaaatgggtgttggtactcgagaaatggggtatctttttggacagtataggcgtctagcaggtcattttcagggaagctttacagggccaaggatattttggtctggctccagtcttcgacctgaagctactggctatgggctggttttctttgcccagctcatgcttgctgacatgaataaagaacttaaaggattaagatgtgctgtgagtggttctggaaagattgcaatgcatgtcttagagaagctaattgcttatggtgctcttcccatttcagtatcagattctagaggatatttggttgatgaggatggatttgactacatgaaaatatcatttttgagagacatcaaagctcaacaaagaagtttacgagactattcaaagacctatgctcggtccaaatattatgatgaagcaaaaccatggagtgaaaggtgtgatgttgcatttgcttgtacttcacagaatgaaattgatcaatctgatgccattaatttggttaattcaggttgtcgtatactagtagaaggttcaaacatgccttgtacccctgaggcagttcagattcttaggaaagctagtgttctcattgctcctgcaatggctgccggtgctggaggggttgtggctggagaacttgaactgaatcatgaatgcagtttgatgcactggtcaccggaggactttgaatctaaattgcaggaagctatgaagcagacttatcagagggctatgaaagctgcaactgactttggttatcaaaaagaaagtcctgaggctttggtacatggagcagtcatctctgcctttctaaccattgctcaagccatgactgatcaaggctctatatagaggttcatattgcatagttttgaatgcatccaaatactgatgttaaccaattagcactgcttggaaatctgcattcagtgaatagtccaaatcattgctgatgctacagtattgccaaagcatatttccttgtaaaaatatgtaagaaaatttagactcagaaaagaaaaatatttgaaggacaaattttagtttcacaacagaataggcatctttattattaccaagaaaaaggagaaattgtccttggcttattaaaccctgtttgatgcttgttccaaacttgagaaatatttggatattgagatttgaaataaaagattagtgttcagtttg

SEQ ID NO: 8245 - DNA, 565 bp, Glycine max
  Clone ID: 700742258_FLI
gccttcaagcatgtagggatggccattggtacgatgttaagtatgtccccaatgccctcgttattcacattggcgaccaaatggagatactgagcaatggaaaatataaggcagtttttcacagaacaacagtgaacaaagatgagacaagaatgtcgtggcccgtgttcatagaacccaaaaaggaacaagaagttggtcctcacccaaagttggttaaccaagacaatccaccaaaatacaaaaccaagaaatacaaggattatgcttattgtaagctcaataagatccctcaatgaatgaagtgggcactacgagataattatagctcatggtttctctgttttgttatttaatttatggaatgaaagtgtgacttgtgggaagtagattaaataagatctgtgactaatgttggtttctctgttttgttatttaatttatggaatgaaagtgtgacttgtgggaagtagattaaataagatctgtgactaatgttggattaatcttatgcttttgaagtaaataaagatgacaagaaacagtttgtctgttctgttattat

SEQ ID NO: 8246 - DNA, 1394 bp, Glycine max
  Clone ID: 700742307_FLI
gacacaactgcgaattagttcatcctttcccaagccagccaagcgagtgaaattacttgcatagatagagcatcatggccatgatgaaacgtgctgcttcctcttcggttcgctcgctactttcctcatcctccaccttcaccagaaaccttcatgcctcaggtgaaaagaagaaaattgtgggggtgttctacaaagggaatgagtatgctaaattgaaccccaatttcgtggggtgtgttgaaggagcattgggtatacgtgagtggctggaatcacagggtcatcagtacattgtcactgatgacaaagaaggaccagattctgaacttgagaaacacattccagatgcccatgtcatcatatctactccatttcaccccgcctatgtcaccgcggaaagaataaagaaagcgcaaaaattggagctgcttttgactgctggcattggttctgatcacgttgatctcaaagctgcagctgctgctggtttaactgtggcagaggtcacgggaagcaatgtcgtgtcggttgcggaggatgaactcatgagaatcctcattctaatgaggaatttcttgcctgggtaccatcaggctgttaagggtgaatggaatgttgctggcattgcacatagagcttatgatcttgaaggcaagacagtaggaaccgttggcgcgggacgaattgggaagcttttactccagaggttgaaaccttttaactgtaatcttctgtattttgatcgacttaggatcgatcctgaattggagaaagagattggagcaaaatttgaggaggaccttgatgcaatgcttccaaagtgtgatgtaattgttatcaacacccctctcactgagcagacaaggggattgtttgacaaaaatagaattgcgaagtgcaagaaaggtgtcttgattgttaacaatgctcgaggggcaattgcggacacccaagcaattgcagatgcttgctccagtggccacgttgcaggttatagtggtgatgtttggttcccacagccagctccaaaggatcatccatggcgttacatgccaaaccatgccatgactcctcatatttctggcaccaccatagatgcacagttacgttatgctgctggggtcaaagacatgcttgataggcacttcaagggtgaagactttccagaacaaaactacattgtcaaggagggtcaacttgcaagccaataccggtgaagtagtgtgtgtcaatgtggcctttgaatcttccatttttaaggccaatcgatgagcaaataaatatctagaaggcactttaattatgtaatgtacttgctttgttgtgtctgaactcgtttaattgatctcagaaataaaattttaaggaacactctccatgttccatgtatt

SEQ ID NO: 8247 - DNA, 1248 bp, Glycine max
  Clone ID: 700742323_FLI
ggagcacagcaaggcttgtggacattcgcagtttggacgaatctatgaacaagggcattaccctgaatgggacgaggatcaccctattcattttgttgggcactcagcaggagcacaagttattcgtgtcttgcaacaaatgcttgcggataaggcattcaaggggtatgaaaacacctcagagaactgggtattaagcgtcacatccttatcgggagcatttaatgggactacaagaacctacgcagatggcatgctgccagaagatgggagaacattgaaacctatttgcctgctacagctatgccgcattggggtgataatatatgattggttcgacatttcctggctgaagaactactacaattttgggtttgatcactacaacatgtcttggagaaaaatgggcatatggggtcttgttgactgcctattggggaatgcaggtccatttgcttcaggagattggatcctccctgatctcacaattcaaggctctataagactcaactaccatatacgtacatttccaaacacatactacttcagctacgccaccaagcgcacaacaaagatcatgggtgttaaagttccttcaagcatacttggaattcacccattgcttttcattagagttttgcagatgtgccagtggcgttttcctccagatgttcctcccccttataagggatacagggatgaggactggcaagacaatgatggagcactaaatacaatatccatgactcatcctcgcctcccaattgaacaccccaactgcttggttgaaaaggaatcagactgccaaccattacaacctggcatctggtactacaaatatgtggagggtgatcacatactattcattattaatcgtgagagagcaggagtgcagtttgacgtaatctatgacagtattttccaacgctgtaggaagcacgtttttaggaagaagcttccaacaatgcctaatgaaatcaatcactagcacaccattctttactctcccatgttcaattaaaagagatgtatgaaaagaaacaggctattcatttcagttaatgccccttcaccttcttaaatgtaaatatttttcccacgttctctcatttttataccaccattttctgtattttgtaggattggagagatatcagagaccataatcaataggatgttacaatcaccataagtgtacacaattattgtctcaatattaaacatcatgaaatgaattgttgaattttg

SEQ ID NO: 8248 - DNA, 1223 bp, Glycine max
  Clone ID: 700742351_FLI
gcgacatgaatgagtacttatctctcttctctcgctagctgtttataaccaagacactaactaggtaacatagaattgagaagtaatggaaatgaagaagccgtgttgtgaagagtcagagacaattgttggatcctgggaatgttggttcgacgatgcatgcatcgttgacatggattactttgtgaagaccctttcaagcatcaaacagaaaggtgttcgtgcagacttgattggttccatcatcactcattatgcctccatatggctccctgacctctcttcctctgctgaaaatggtgtcaccactcacttccaatcccccgaaagcgtcacaaattcatggatgaagaagaggttctttgtggaaaccttggtgagtgttctgcctcctgagaaggattctgtcccatgcaacttcctccttcgccttctcagaaccgccaacatggttcgtgttgacgccacttatagaggtgagcttgagaaccggatttcgtggcagctagaccaagcttctctcaaagagctcatgataccctccttcagccacacgtgtgggacactcttggatgttgagctagtcctcaggttggttaagaggtttatgagtttggaccgtgatggtgctgctttggttaaggtggccaagttggttgattgctacctcgctgaggctgctgtggatgccaatttgaccttgtctgagttcattgcacttgctggagctcttccaagtcattcaagagccacggatgatggcttgtaccgagccattgacacgtatctaaaagcacatccagatgtgtcaaagcaagaaaggaagggcctgtgtaggctgcttgatagccggaaactcacaacggaggcctcacttcatgcagctcagaatgaacggttgcctgtgagagctgtgattcaggtgctcttctccgaacaaaccaaactcaaccgccacatagattggagtggctccttcagtagcttgaggagccccaatggaggccttgacccaccaggacgatgcctttcaaagcgtgaaacaaatgctcagcaaatggagataaggaagctgaaggaagatgtttacaggctgcaaagccagttcaatgccatgcaagggcagatggagagaatggcggcgaagaagaagggcttattcaaatggaggaagtttggaatgcctacgtttagcagaaatgtaggagaggtggagaaaattg

SEQ ID NO: 8249 - DNA, 1378 bp, Glycine max
  Clone ID: 700742482_FLI
tggaaatggcgaagaagcatggcctcaaggtgcaggctgttatgtcatttcaccaatgtggcggtaacgtcggagactcttgcactattcctttgcccaaatgggttgtggaggagattgataatgaccacgatcttgcatatactgatcaatggggaagaagaaactatgaatatatatcacttggatgtgatactttgccggtgctcaagggacgatccccagttcaatgttatgctgatttcatgcgtgctttcagagacactttcaagcacctccttggtgataccattgtggaaatccaagttgggatgggaccagcaggtgagttgcgttacccttcgtacccagagcaaaatgggacatggaaattcccaggaattggtgctttccaatgctatgacaagtatatgttgagtagcttaaaagctgctgctgaagctcacggtaagcctgaatggggaagcacaggccctactgatgctggccactataacaactggccagaagacactcaatttttccgcaaagaaggtggtggatgggatggtccatatggtgagtttttcctcacttggtactctcagatgctgttggaacatggtgacaggattctctcatcagccacgtcgatctttgacaacactggagttaagatctcagtgaaggttgccggcattcactggcactatggtacaaggtctcacgccccagaactcactgcagggtattacaacacccgattccgtgatggctacctccccattgctcaaatgctggcgcgccacggtgccatctttaacttcacctgtatcgagatgcgcgatcacgagcagccacaagaggccctttgtgcacctgagaagctggtgaagcaagtggctctggcaacgcagaaggcacaggttccacttgccggcgaaaacgcgctgccacggtacgacgagtatgcacatgagcagatcataagggcatcacaattggatgttgatggtgagtctggtgatagagagatgtgtgccttcacatacctgaggatgaatccgcatttgtttgaaccaaataactggaggaagtttgtggggtttgtgaagaagatgaaagaagggaagagtgcacacaagtgttgggaagaggtggagagggaagctgagcattttgtgcatgttacacagcctcttgtgcaagaggctgcagtgctgatgcactgagaattgttgaacatccttgtggtaatagggcttaggaataagtcacaaggaggctgtgtgaaagttttagtgaaccaacagcccaggtttgtggctttgaagatgtaaaattttgtattatattgttttgtattgtatgcacctaaaacttctatttgtgacccttt

SEQ ID NO: 8250 - DNA, 576 bp, Glycine max
  Clone ID: 700742589_FLI
attaacttaaaaataaagcaagaaaaaagagagcgctggaagatgatgatacgaaggggaagcaaatggaattgagcctctgttagtgatttccatggacgcacctcgtaaacagcaggtttcgttgagaggagcaagtgcgaaggagataacaagagacgcgcttcttcagaaggtctctcaggaaagagaacttcgcaattacgcaaaaagagctgctgctgctgcgctcttcattcaggttcttcgtctctgcttcctttccctgattttaaaaaatcaccataccagttggtgtcgtaacatgatcaattttacaaattacattacacgacaaacttataacatataaaatcaacctaccaccgaccacatggatcaagtaccaagttgctctagcgtaagtttcaagttcaggctgtgtgtatgcaactttgttaaatacttggagggcacccgtagtcaactcggctcatgttattgtataaaaaaaataatctaaaattaatatgaataaaaaccttaaatcatgttattgtactcaattttatagtggtgtgaaatacctgaagttat

SEQ ID NO: 8251 - DNA, 1142 bp, Glycine max
  Clone ID: 700742678_FLI
tctctctcgacgacgggtcactatacgtcgacgtttcgggaggggcattatgggaagatgttctcaaacgctgcgtttcggagttccgcctcgcgccgcggtcttggaccgattacctcggcctgaccgtcggcgggacgctctccaatgccggcgtcagcggccaggccttccgctacggcccgcaaaccgccaacgtaacggaattggaggtggtgagcggcaaaggcgaaaccttagtctgttccgaatcacaaaattcggaactcttcttcgccaccctgggaggattaggccagttcggcatcataactcgcgctcgagtcccggttcaacaagccccggacatggtgagatggataagggtggtgtacacagaatttggcgacttcactcgagaccagagtggctggtgactctccgagagggtgatggttttgattacgtggaaggtttcgtttttgtcaacagtgacgacccttgcaacggctggaccaccgtccccgtgggccccaaccaatacttcgacccggttcggattccttcaaccgccggcccggttctctattgcttagaacttgcccttcattatcgtaaccaagaccatccttccgcagttgatatggaggtggatagattacttggacggttaagattcgttgagggtctaaagttcagcgtggatgtgacgtacatggaattcttgctacgtgtgaagcgtgtggaggaggatgcaaaagccaatggaatctgggacgcaccccacccatggctgaatatgttcgtctccaagtccaacatcgctgaatttgatcgtgaagtgttcaagaaaatcctcaagcacggagttggtggccccattctagtgtaccctcttttgcgaagcaagtaagtacaatttttgacggtgaaatcaaataatatttctcatttctatacaattcctataaacttttaccttattgcactttagtccatctttgtctttattttgtatgtatagttttttcctctttttttcccacaaatttaaaattgaacaaatatatgttttgtgaaaagtaaaatttcaaaacatttgaaacaaacatgcatttagtttgttgttggtatcttaattgtacaactttgatttattggtt

SEQ ID NO: 8252 - DNA, 416 bp, Glycine max
  Clone ID: 700742811_FLI
caaaaagactgccgcccagatcagccttcgctggggaattcaaaggaacactgtggtcattcctaaatcgtcaaaactggagaggttgaaagagaactttcaggttttcgattttgagttgtctaaagaggacatggagctcattggaagtatagatagaaaatatcgaaccaatcaaccagctgtgttttggggcatagatttgtatgcgtgagaatgcccttcctaagtctgtatcatggctgtttgaccttgtgttaagattcagatttggtataagctgatctttcaggctccttagtagctcagtttatttgataatgtaaactttctttgttgatggttgaaaaatcatcttctcatcccatatccaatctcgtggactaaataagagagacttctgaatgttgttgctt

SEQ ID NO: 8253 - DNA, 995 bp, Glycine max
  Clone ID: 700742914_FLI
gaaaaacttagctactaaggaaggatcaaagagaatggctcaagcaatggcatcaatggctggcttgcgtggttcctctcaggctgtgttggaaggtagccttcaggtgagtggctccacacgcttgaatgtggggagtggaagcagggtggcctcagtcacacgtgcagggttcacagttagagcacaacaacaacaagtgagtggtgaggtacaaagcagccgtagggcagtgctttcacttgttgctgctggtttggccactggctcttttgttcaagctgtgcttgctgatgccaaatctatcaaagttggaccacctcccccaccttctggtggattgcctggaacgttgaactcagatgaagcaagagaccttcagctgccattgaaagataggttcttccttcaaccattgtctcctactgaggctgcacaaagggcaaaggaatcagccaaggagattgttggtgttaagaagttgattgaaaagaaggcttggccatatgttcagaatgatctgcgtctcagggctgagtatttgcgctttgatctcaacactgtcattgctggaaagcctaaggatgagaagaaatcactcaaggaactcactggcaagctcttccaggatatcagcaatctggatcatgcagcaaaaattaagagcagcccagaagcagagaagtactatgctgctactgtatcttctctgaacgatgtccttgccaaacttggttaatgtgattaatttcttgctttcttgtgtaagctttgtgcatcattttctcagacactttgttgactgatattttaagaaaatcaaatgatgagggaaaattttctataaataagatcaatatatctagacgacttctctcctgcatgtccaaaactgaaaggtaattaaggggtaatgtaattgtagaagttagaagtttaattataatttcctgagcacaaaactagaatagttataatgatactataatcttagt

SEQ ID NO: 8254 - DNA, 937 bp, Glycine max
  Clone ID: 700742922_FLI
ctgacttgaacagtgcaacattggagtctgatgttgatgttgttgttgcacctccctttgtgtacatcgatcaggtgaaaaactcaattacagataggattgaaatttctgcccagaattcttgggtgggaaaaggtggggctttcacgggagaaatcagtgtggagcaactaaaagaccttggctgcaagtgggttattcttggacattctgagcgaagacatgtaattggagaaaatgatgagtttatagggaagaaggctgtctatgctttgagtgagggtctaggtgtgatagcatgtattggggaactgttacaagaaagagaagctgggaaaactttcgatgtttgttttcagcaattgaaggcttttgcagatgtagtgccaagttgggataatatagttattgcatatgagcctgtatgggcaattggaactggcaaagtggccacacccgagcaagcccaggaagtccatgcagctgttcgtgactggcttaagaagaatgtctcggctgaagtttcatctaaaacgcgaattatttatggagggtctgtaaatgcgagcaacagtgctgagctcgcgaagcaagaagatattgatggatttcttgttggtggtgcttcattaaagggtcctgagtttgctaccattatcaattcagtcacatccaagaaagttgtggcttaattacttattatggttttcaagagcgcattaaaaatgtggcaataacatgggtgtattatgagttttatttgtatcccttctatggctatgatacctgcgtttagtttgctacttcgaagaaataatcgtttatttttgtcagcacccagaggcttgagagaacttttgaaaaataaacgattatttctcaaaattcaagtgtttctaaacatgtaaggtatgagaaacattctccttttctcaac

SEQ ID NO: 8255 - DNA, 840 bp, Glycine max
  Clone ID: 700742959_FLI
gctggattatgttcagtctgtggtgaagaaagttttgggactggttctgaccatattcgtgagaaagatggaatctgggcagttttggcctggctatctatacttgcatataaaaataaagataaacttgaagacaagcttgtcactgttgaagacatagttcgccagcattgggctacttatgggcgccattattatactcgatatgactatgaaaacgtggatgcaggtgcagcaaaggaactgatggcatatttggtcaagctgcagtcctcactttcagaagtcaatcagattgttaaggggataaggtcagatgtttcgaatgttgtccacggtgatgaatttgagtacaatgatcctgtggatggttccatctcatcacatcagggaatccgatatttgtttgaggatggatcacgattgattttccgcctatctggaactggatcagaaggtgcaacaattcgattatacattgagcaatatgagaaggatccatcaaagattgggagactttcaaacgaagcacttgctcctcttgtggaagttgcgttgaaactttcgaagatggaagaattcactggtcgatccgctccaacagtcattacatgaacacattcaagtggaaggtggttagatcctgaagcttctcccagtcatttcatttcttctttgtccagtatcttacggatagccgaacagtagatttggttgtttgcagcctttgctatgggaaattgagtggaatttgagtttctttatctaaattttgatatgctgaataatttgcaacagccgagtgctaattatatagtcttaatataatggtttctcttg

SEQ ID NO: 8256 - DNA, 659 bp, Glycine max
  Clone ID: 700742994_FLI
caaggttgccaactaccctccatgccccaacccagagctggtgaagggtcttcgtccccacactgatgccggtggaattatccttctcttccaggatgacaaggtcagtggactgcagcttctcaaagatggccagtgggttgatgtgcctcctatgcgccactccattgttgttaacattggtgatcagcttgaggttatcaccaatggtaagtacaagagtgtggagcaccgtgtgatagcacaaacagatgggaccagaatgtccattgcctcattctataaccctggcagtgatgctgtcatctaccctgctccagaattgttggagaaagaggcagaagagaaaaaccagctctacccaaaatttgtgtttgaagactacatgaagctatatgctaagttgaagttccaggccaaggagccaagatttgaagcctttaaagcatcaaattttggtccaattgcaactgtttaaatatttttactatagtctaccacatgcttgacttgggaagagtgtaacaaagtacctgatgcatgtgtttactaaaagaatatatgtatgtgtgtttttgttttcaactttggttttatgtaataaattgattttgagtttgtaattgatcattgaagtaattttatgtaatttttacttt

SEQ ID NO: 8257 - DNA, 655 bp, Glycine max
  Clone ID: 700743149_FLI
ggagcatttggttgattagggtttcttcggctgcgtgctgatgctcttgttttctcacagtcacacaacagcaatggaagcaatcacagagggagtgaacaacatcaacatctctgattcttacaagaagaatcgcattcaggtctccaacaccaaaaagcctctcttcttctacgtcaatctcgccaagaggtatatgcaacagcataatgaggttgagctctcagcactaggaatggctattgctacagtggttactgttgctgaaatcttgaaaaacaatgagcttgctattgaaaagaaaatcacgacatcaacagttgacatcaaagatgattctagaggcagacctgtccaaaaggccaagattgaaatattacttgggaagactgaaaaatttgatgagttgatggcggctgctgctgctgctgctgaagatggtgaaaatggagatgttgaagagcacactgcataagttcatcgaaggttatacctgtcttgggtgaagatatgtactctttaatgaactgcgcttgtgttgttagtatgtagcggacaaacaaagcaaagaattcgttatatagactggcctgcaatgttgaactatgcaattccttcatttcttttccctataaatagaggctttttgtgtctt

SEQ ID NO: 8258 - DNA, 1523 bp, Glycine max
  Clone ID: 700743189_FLI
gtgtcaaaacacttcaactttaggctccatctcaaaaaaatgggtggtttagctagcaatcttcctctaattgttatggtgggtctgcaaattcattatgcagcacttgctatattcacaagagccgctttgttagatggattgagtacgacggtctttgtagtgtacaggcaaggcatagccactttggctttggcgcctatgtttttctctcctaagcggagacaatcagtgaaagattctttgggattcaggagcttctttttgatgtttgtgaccgctcttgttggagtcacagcaaatcagaatgcatactttaaaggtttattttatgcatcctctactgcagctaccgctatgagtaatctgataccagcattaacgtttgtaattgcggcaattgcgggatttgagaaagttgacataagcttaagaagcacggccaagatattagggacagtttgttgcgtcgctggagccttaaccatggctttggtcaaaggacagaagctgttacacacagagttccttccttctatacatcttactggcagtgaaggtgacgattggctgctgggttgtctattgctcttagcaagcagtgttttctggtcttgttggatgatcctgcaggtaccgatcgcttcgtgctgcccagaccatttatcatcaaccttttggatgtgtctgttttcaacaatacaagctgccctatttgcccttctttcagagtcggatcttcaagcatggattctacaatcacctttacagatatcatgttctttatatgcaggaatcggaatagcggttagcttcttcattcaatcatggtgcatctcagaaagaggtcccctgtactgtgcaatgttcaaccctttggcaacagtcataactgctttgataagtgcaacattcctacaggaagaggtgtacgttggaagtttggtaggtgctgttggagttattgctggtttatatattgtgctttggggtaaagccaaagagtttgctgagattaaaccagaggcggcaccacaatcatcaaacttacaagatgatcatgatataagtagtaggatagatttggaacaaccccttctgtcagagaaattgtccgaacatgtaacagaagcagatagcaaggtgtagccatgcatgatgattgaaccaatatatatatatagaagttttggtgaagttttgatcattgcagaattgaagaaactgaaacatggaacaagttgcagcttaaacaaacttggcttagttcctttcaccaaaatttctaactatagagtgtgaaaataaattcaagctcatggcctggacttggagtaatggtaattatgtaaaagtgataatatgtcttaggagaaaaaatatatgaattaaattttgtttccttccatctcgttttcttacctagctccgttcttcctattatgctaggaaaattaggaattctgcgctgcacccgtagttttcatgtttttttttttcttcattagtaaattacttccatc

SEQ ID NO: 8259 - DNA, 357 bp, Glycine max
  Clone ID: 700743237_FLI
ggccgcacagcccgatgttgatggatttttggttggtggtgccaattctttgcagtttcctccatttacagaacctccatagataattcttacagatgcagcaactgcaaagaattggccgcacagcccgatgttgatggatttttggttggtggtgcctccctgaagccggagttcgtggacatcataaatgctgccactgtgaagaagaattgaaattcgtagttaggaactgatataatgctgcctttcaagctgcttcggaaattgctgtttttgagttttggatctgtgctttgtggccaatgttttgaactctgtttagtactgaataaacacgctttcctttgagatctc

SEQ ID NO: 8260 - DNA, 1103 bp, Glycine max
  Clone ID: 700743260_FLI
gcaagccaatcctaattcctattctcctatccttttacataactctaaagtaagaaaaaatagagcaatttcacaacacaactcttagaattgtgagttaagtatgggaaggtccccttgctgtgagaaagctcacacaaacaaaggtgcatggactaaagaagaagatgacagactcatatcttatattcgagctcacggagaaggctgctggcgttcactccccaaagccgccggccttctccggtgcggcaagagctgccgtctccggtggatcaactacctccgccccgacctcaaaagaggtaactttaccgaagaagaagatgaactcatcatcaaactccacagtctcctcggtaacaagtggtctttgatagctggaagattgccggggagaacagacaatgaaataaagaattattggaacacgcacataagaaggaagcttttgaacagaggaatcgaccctgctactcataggccactcaacgaagctgcttctgctgcaactgttacaactgccaccactaatatatcttttgggaaacaacaagaacaagagacaagttctagtaacggaagcgttgttaaaggttccatcttgtaacgctgccctgacttgaaccttgagttaaccattagtcctcctcgccaacaacaacctcagaagaatctttgttttgtttgcagtttgggtttgaacaacagcaaggattgtagctgcaacgttgccaacactgttactgttactgtcagcaacactactccttcttctgctgctgctgctgctgctgctgcttatgatttcttgggcatgaaaaccaacggtgtttgggattgcacccgcttggaaatgaaatgaaaattcaacgaaattataccaattagttagtgtttttggagagaagtcgagagaatgaaattcattaattttttaattttcccccctattttctttttcttctcttgtttgtataaataattagtcgctgatgcataatatatagtaccggtacagttgaacattttattgcccaattttcccttttgttgttactcttcactttcttttcttccggcaattgatggtagtcataaag

SEQ ID NO: 8261 - DNA, 1169 bp, Glycine max
  Clone ID: 700743339_FLI
aagccatcccatatccttttgttttgttctcttcagtctgtttgcgagtgcgagtgaaaaaaaatgggtgggggaggagctatgaggtcggcggcgaagatagccggaattggcgtgtccaaggcggcgctccggccttcggcgctccctacggagcagacggtccgcaacgcgtcgcgaccaacggcggtctccggagtgtcgtcgcagtcggcgaaatccgcggaggtggcgccgctgcacacggcagctgcctgggacgattgggacttcgccgaggatggcgaattggtcgtgccgaggatggtgttcggttctgtccccactctcgatgaagctaaggaagccaccgcagagttgaaggacgctattgatcaagtatatctttgtcctgagacttctcaatattcatctcccggtggtcaagtctctgctttgtctcccactctctatgggccagtgaacagatcttgtgtcattgatgctatttcagatcctacggccccaaagcatgccattcaggcttttcatttgcttagcactagtcgtgaggcccaggctgttgtggcttcacttgcttgtgacccaaatgtatggaatgcagtcatggaaaattctgctgtcagtagtttcttccaatcacaacagtcagtggctggttttggagcagcagaaaattctgaggaagtggataagttatcaagctgtgcttctgaaacagtcgaatcccctgagaaattggaagggtcggctgagtctcacccggggaacatgtttgacgatttcatgggtcttctgcagaatgtgaagcttacagttattgaattggtaagtaggttgtctggtttccttcagaacatattcccaacacctgatgctatgagagagaaaatgtctttcgatgctgatgggaacactaaagcaagtttcatggatagtaaaattagcatgggaggaaccttcataggtttggcagtgctggtgataatggtgatcgtgacaaagagagcttagactctaacaagcaaaactacaatttgtcgacttttctgatagttttgaaaccatgttattaaatatgaactgtttttaaattgagatgtgtcgcacttggtgatttatttccattaaaataaaatttgaaagtcgtcctggaaagttagtttttt

SEQ ID NO: 8262 - DNA, 693 bp, Glycine max
  Clone ID: 700743470_FLI
cagaggcctgttgaaggaaatgcaacaatgaaacaggatttaagaagctttaagcttatattggaatatattaaagccttgcctactgggcaagaaaccgattttgtattagtttcatgttctggactaggaattgagccttccaggcgggagcaggttcttaaagccaagagggctggtgaagattccttaagaagatctggccttggatacacaatagtccgtcctggtccattgcaggaagaacctggagggcagcgtgctctaatatttgatcaaggaaacagaatatcacagggcatcagctgtgctgatgtagctgatatatgtgtgaaggcactacatgatacaactgcaagaaacaaaagctttgatgtatgttacgagtatattgctgaggatggaagggagctttatgagctggttgcacacttgcccgacaaagcaaataactacttgacaccagcactctctgtcttagagaagaatacctgatcatcccttgttgagacaaaatacttcccagaagatttcataaatttgctacctacgttcttctacttctgcattggatcaatgcagaagtgattcatgtaactatttttcctgtatatatattcttgtgtagcacaaatctacgacttgagaaattaatttatttataaattcttcctttgaaaattggaattatac

SEQ ID NO: 8263 - DNA, 335 bp, Glycine max
  Clone ID: 700743483_FLI
gtgaacatgcacgtgatggtgggtgagatgaaggtggctgttgcggtggagcaaagggaagaagatgggttcgtgagtggggaggaagtggagaagagagtgagggaggtgatggagtcagaggagattagggagaggagtttgaagctgaaagagatggctttggctgcagttggggaatttggatcctctaaaacagcacttgcaaatttggttcaatcatggactactcatgtgtaacatttttttttatcattaaaaattgaaagaccaaaaaaacaaaacaaaaggcatgatatttacaataattcacgcatatgtcttgatattctgat

SEQ ID NO: 8264 - DNA, 1450 bp, Glycine max
  Clone ID: 700743611_FLI
cctgatcccctccttcatctactcctcttcctccaaaacgctccctctccaccacatgctcaacaccgcctccgctgccgccgccgccgctccctccccgccgccggccaatctcgacgccggatcgcgtggcctcatgattccctctcccagcgagtcacgcaagatcgagttgtactcccccgccttctacgccgcctgcaccgccggtggaatcctcagctgtggcctcactcacatgaccgtcactcctcttgacctagtcaagtgtaatatgcagattgaccctgctaagtacaagagcatctcgtctggttttggagttttgcttaaggagcagggattcaggggctttttttcgtggctgggtgcctaccttgcttggttatagtgctcagggtgcttgcaaatttggattttacgagttctttaagaagtactattctgatattgctggcccagagtatgcaagcaagtacaagaccttgatctaccttgctggttcagcatctgctgaggttattgctgatattgctctttgcccatttgaggctgtgaaggtccgtgtccaaactcagcctggttttgcaaggggtttgtctgatgggctcccaaaatttgtcagatctgaaggaaccttagggctgtacaaggggttagtgcctctctggggacgacaaattccatacacaatgatgaagtttgcttcttttgagaccattgttgagctgatctataagcatgccatcccaacaccaaagaatgagtgcaccaaaagcctgcaacttggtgtcagttttgctggtggatatgttgctggtgtactttgtgcaattgtgtctcatcctgctgataatcttgtctcttttctgaacaatgcaaaaggagcaacagttggtgatgcggtgaagaagcttggtttgtggggtctctttacgcgtggtctccccctccgaattgttatgattggaactcttactggagcccaatggggaatatatgatgcattcaaagtcttcgtcggattgccaaccactggtggtcctgctcctgcagctgctccagctcctggttctgagctagcaaaggcatagaatgtccaatgatgacaagcaacaatgttgtacgaaacttagaaagccagtgaatagggaccataaataaatagaggactgctgaatgaagttgcttgagtggaactcaagcttggttggataatattcttttaaagttcagacattgtttccatttttcttatatttaagtattttgaatttttgggaggatggttttgctctcatccttccacttgctgaaaactttgtaggtaggaatgatataattttgcatgttaggttctctacatgccaattgtcaaacgggaacacatttgttttcttgtctgtgcataagcaccgacacatatgcaatgcctagattgagatcattt

SEQ ID NO: 8265 - DNA, 657 bp, Glycine max
  Clone ID: 700743613_FLI
ctagctagggtttctgagtttatgtggttgcgcctctgcctgtaagagtgaaaaaaccttctcttttccttctctcaagtctcaagagatttcatcatggctccaaagaaggacaaggctccaccaccttcctccaagcccgccaaatctggcggtggcaagcagaagaagaagaagtggagcaagggaaagcaaaaggagaaggtgaataacatggtgctgtttgatcagggcacctatgataagctcctttctgaagctcccaaattcaagctcatcactccttccattctttctgatcgtttgaggattaatggatcacttgcaaggaaggctataagagaattgatggctaggggttcaatcaggatggtgtctgcccatgcaagccagcaaatttacaccagggcaacaaacacctaggtgtggaactgatcttagcttacggagtattggtaggaatagtaatgaagtattgttcttttgcactttgggaagcatctcatatggttctatcagttctagattgtcgctgaatccgatgctcagattgtatttttggtttccttcaatgttttatcttcttcaatattctggcagttgtcttatacttgttttgtttacttgaattgttaatgtggcagagattctttttgg

SEQ ID NO: 8266 - DNA, 468 bp, Glycine max
  Clone ID: 700743615_FLI
cgcagctattagtgatgttttatcaaaaccatggctgccactacctcttggccttaaagctccagcacttgatggtgtaatgggtgaattacaaagacaagggattcccaaaatccctccctcttgtgcttgagtgccaattctaagagagaggtgattttcctcttacgcgaggtgtgatggccataaaaccctaattcgacgacttctcatctctcttcccttgcatgttagaatattatgcgcatgcttgcttcctatttcacatctagcaaaaattaaaaggggagagaagactatatatataacttttggaactttctttgttcatgtgctatgtccagccaagtagtttagcccttttgtgaaatatatgtgagattataaaggctgtgatttttgtattagtcttagaagatcatatgagactaatatatgatgaggaatatataattgagttatgtaaaa

SEQ ID NO: 8267 - DNA, 2035 bp, Glycine max
  Clone ID: 700743672_FLI
cttgtggttggaaaggtgtatgccaagatcatggagattgagtctcgcctgcttccttgtgggctccatgtcattggtgagccaccctcagccttggaagcagttgcaacactagtgaacatagctgcacttgatcgtcccgaagatggtatttcctctctcccatcaatactagctgagactgttggaagaagcattgaggaagtttatagagggagtgacaaaggaatactaaaggatgtagagcttcttcggcagataactgaagcttcgcgtggagcaattacttcctttgtgcagaggactactaataagaagggtcaagttgttgacgtagctgataaacttacctcaatccttggatttggcataaatgaaccatgggtcgagtacttgtcaaacaccaaattttaccgagctgatagggaaaaactcagaaccttgttcgatttcttgggagaatgtttgaagttggttgtagccgataatgaattgggaagtttgaaacaagccttggagggtaagtatgtggagccaggacctggtggcgatccaattagaaatcctaaagttttaccgacagggaagaatattcacgccctggacccacaagctattcctactacagcagcaatgcaaagtgccaaaatagtggtggatagattgattgagaggcagaaagctgaaaatgggggaaagtatcctgagactgttgcacttgtattgtggggaacagataatattaagacatatggtgagtccctggctcaggtcttgtggatgattggtgtgaatccagtagctgatacctttggaagggtcaaccgggtggaacctgtaagtcttgaagagcttggaaggccaaggattgatgttgttgttaattgttcaggagtattcagggaccttttcatcaatcagatgaatcttctggatagagcagtgaagatggttgctgaattggatgaaccagcagagcaaaactttgtgaggaagcatgcactagaacaagctcaagcccttgggattgacgttagagaagcagcaacaagggtcttctccaatgcctcagggtcctactcctcaaacataaacctggcagtggagaattcttcatggaatgatgagaagcagctccaggacatgtaccttagccgaaagtctttcgcttttgactgcgatgcgcctggtgcaggcatgacagaaaaaagaaaggtctttgagatggctctgagcacagcagatgccacattccaaaaccttgattcatcagaaatctccctcactgatgtcagtcattactttgactcagatccaacaaacctggttcaaagtctaagaaaagatgggaagaagccaagtgcatacgttgctgacacaaccactgctaatgctcaggtgcgtacccttgctgagacggttcgacttgatgcaagaaccaagctattgaaccccaagtggtatgaaggcatgctgtctactggatacgagggtgttcgcgagatagagaagaggctcactaacacagttggatggagtgcaacctcaggccaagtcgacaactgggtgtatgaagaagccaacacaactttcattcaagatgaggaaatgttgaagaagctaatgaacacaaatccaaactcctttaggaagctggtgcagacattcttggaagccaatggacgcggttactgggagacttcagaagacaacattgacaagctcaggcagttgtactcagaagtggaagacaaaatagaaggcattgatcgctgaagtgataattgagatgaacagcagaaacattaactgttttttaactatgccttctttgtatctggagcttctttcccacactgaattgaaagttgttgatggtgtccttttaatgtgattttgctcctctctcctttttccctgctgtaattttaatcattttcagggatcatgttcctttgtgcagttgcaaactccaaaccaacatgtcaaatattgctctcagtttaatatatagagaatgattcccttgtatcac

SEQ ID NO: 8268 - DNA, 726 bp, Glycine max
  Clone ID: 700743681_FLI
gggatatcacatgatctgagattcctcttatcacgacttttggacacgaatcccaagacaaggataaccgtcgatgagatctataaggacacgtggttcaatgcggatggcgagtatcggttcaaccgggttttggtcaaggagagtgagtgtgaaaagcaattgggtcgaaccggattcaagtctttgaatgctttcgacttaatttctttctcgaccgggttggatatgtcgggtcttttcgaggacccgaccggatcgaattcggttgaacgggttgtttcgacagtggtgccagagaaaattatggagagagtggaggcaatgacggaggagggaagggtggtggtgagaagggagaagaatggtggtggagcaaagctagaagggcaggatggtaatttgattggtattgttgtggtttaccaattaaccgatgagctggtggtggttgaaatgaaaagaagtgaaaagggaggggggtttggggggcagttttggaaagataaactgcggccactgcttcttgaattggcaagtgaattggaagagccggtctctcggtgatttctatagaatataatttggtatctatgttttttgttttgggtaacaaccgtaaaccattgtttttatggattggtgaaggtttaggtaatgttttaaggaacttatataagtatatagtaaagaaatgaacatgtttaatactactagaatttaaag

SEQ ID NO: 8269 - DNA, 1194 bp, Glycine max
  Clone ID: 700743711_FLI
aatggctcggacgttgctgtgaaaattttgatggaacaggattttcttgctgagcgcttcaaggaattcctaagggaggttgcaataatgaaacgtttacggcatccaaacattgttttgtttatgggggcagtcactcagcctcctaacttatcaattgtcacagaatatttatcaaggttgtactcctctacatgttcctcatctttttccctcaaagagggaagtttttcaaggctatggataataggatattttgaccttgagattctaagagttcttgacctaagtgcaggggtagcttatataggctgttgcataggtctggtgccaaagaagtattggatgagcggcgtaggcttggtatggcttatgacgtggcaaaggggatgaattatcttcataaacgtaatccccccattgttcatagagatctgaaatctccaaaccttcttgttgacaagaaatatacagtgaaggtttgtgattttgggctttcacgtctgaaggccaatacatttctctcatccaaatcagctgctgggactcctgagtggatggctccagaggttcttcgtgatgagccatcgaatgagaagtctgatgtttacagctttggtgtaatcttatgggagcttgcaacattgcaacagccatggattaatttaaatccagcacaggttgtggcagctgttggctttaaggggaaaaggctagagatcccacatgatgtgaatcctcaagtagctgcactaattgatgcttgctgggcgaatgagccttggaaacgtccttcttttgccagtattatggattctttgaggccattgctcaaaccccctacacctcaacctggttgtccaagcatgccattactgacctgaatggtttgaacgccaaggttcttttcatgcacatatgacaggattttattggtctttgatgtctaacaagattacactgctttagttgtccctagagtcaattgtatatttctttaattcaggtttaagaaatactgatttccaacgcagagcatggatactccctctttattgttccaaacaaaattatttgattaggtgatcttgtaattttaccgagaaatgtttcactttttcttctttcataattttgtatgtaaaaaaacattcccattgtaattacattcagttaatgataagcagctttgcc

SEQ ID NO: 8270 - DNA, 517 bp, Glycine max
  Clone ID: 700743719_FLI
gagcaaggataatgactgatggattcaacagttgcagaaatgtggtttgtaattttactgaaggtgccatgtattcattccctcaaatacgcttgccgccaagagctttagaggctgctaaacaggctggaaaggttccagatgtttactactgcctcaagcttttggaagccactggcatatccactgttcctggttcaggatttggtcagaaagaaggggtgttccatttgaggacaactattttaccagctgaggaagacatgcctgatattatggatagtttcaaaaagttcaatgatgaattcatggagcaatacgaagacgatagaggttattcaaggttgtaagaaaatcattgtaaaagctgcattatactcttgcgcttttggaagttcttcatccatccatccctcggagagaaaaaaaacataacctccgtttctactatttgtccttcattggagattattcttaaaccttacactttcttctatatcatctctgaacttacaat

SEQ ID NO: 8271 - DNA, 768 bp, Glycine max
  Clone ID: 700743838_FLI
caggcctaaagttgagtcttggtcttctgagttttctatgattgattgggtgaagatatttggtggggtgcctgtttcagcaagcaatattttcaaattgctttcaacaaagtcacatgttctcctatatcctggtggtgcgcgtgaggctctccattataagggggaagcatacaagttgacttggcctgatcacccagaatttgtgagaatggcagcacgatttggtgccacaattgtgccatttggagctgtaggtgaagatgatttagctgaattagttcttgactacaacgacttaatgaagatccccatagtcaacgatcgtataagaaatatgaatcgtgactcagttaagtttagagatgaaacaagtggcgaggtggcaaaccaaaatctcacttttccagtgcttctaccaaagataccaggtcgcttttactttctatttgggaagcccataaaaacaaaaggcatggataagattctaaaagacagagaaagtgccaaccaaatgtaccttgagattaagtcagaagttgaacacaatttaaattacttgatcaagaagagggaggaggatccatacaggaacttcgtcgataggaaaatgtatcagatattttatcctcacgaaactgatccaacgccatcatttaagccctgaaaaatgtttttgatatataatactctttttatgtaatcataattattcttaaacaggtacatgtacatggccattattctaataaaatatcactttatttt

SEQ ID NO: 8272 - DNA, 402 bp, Glycine max
  Clone ID: 700743959_FLI
tgactgactatgagcagaaggctttggaagcacttaagcctgaactcaaggccagcatagagaaggggattgcttttgctcagaagcaaactgttgctgcttaaatttccttgtcagcaggtggtttcttgggttatggatttatttgagcataaatactacttagaggacttaggttgcagatttgttgtagcatctttactgcttccagaacttaggattcagactttctatgtatcaattctacttccagttttgttagtagaacgggaggacgcttccatttctgttctctaaaccgagcttaggttttggtcagaaatcttcaaagatgtaagcattataatgtagaattgaaaaaaaatgtaaacgttgctttttgaataatatggccattagacc

SEQ ID NO: 8273 - DNA, 825 bp, Glycine max
  Clone ID: 700744235_FLI
tctctctctacaaatccttctttctttcttctcttcgctgctcactgtagccatggctttcagagtaggaggagcgggagggggaaatgcctcttctggcatgggtgttgctgagcatagtgtaaacaccttcctggaattgcagaggaagaaagttcatcgctatgtgatttttaaaattgatgagaaaaagaaagaggttatcgttgaaaaaactggaggccctgctgagagctatgatgatttcactgcatccttgcctgaaaatgattgccgatacgctgtctttgactttgattttgtgacatctgagaactgccaaaagagcaaaattttttttattgcatggtctccttcagtggcccgcattcgcccgaagatgctatatgcaacatccaaggacaggttcagaagggagctgcagggcatccattatgagattcaggcaacagacccaacagagatggatcttgaagtcctcagagaacgtgcaaactgagcagtcacctacacaagaggcttgtgtctaggtgatgtagttagaatatctgaggcctcagggaatgatgttgactgatgataccctttagtttttctactatgatccctgtctgtttcgacctatttctcgtaaattagctgacttgtcatttatcaagtaaataacctgcacctgtgaaggctgatcaggggttcctgcctaagaaaccccactgcaggggaatttatgcttttccttattgccatgatgcttctcaggtgcagattaatacagtaatcgctattggaaattcgacttatattatatgaatttcaaatagacgc

SEQ ID NO: 8274 - DNA, 859 bp, Glycine max
  Clone ID: 700744240_FLI
ccttgccacgctccccgtcttcaccttcgacccggaaaaaaccgggccggagtgcgctgtttgcttgtcggagttcgaacccggtgaaacgggtcgggtcttgcccaaatgtaatcacagtttccacatagaatgtattgacatgtggttccattctcatgacacgtgtcctctttgtcgcgccccggttgaacgcgcgccggaaccggaagttgttgttataacagtacccgatccggtttccgaaaccggttcaggcgaaaatgagaaccgaaccggttcttcttcttcttcctcttcggttggattgagtaagcctaagccttcgttggttggtgtgacaattgaggtgcctccgagggacgagaattttcaaaacgagttgcaaccgagttgcgactcatcctcctcgtttcggtcgccgatgagtcgcatgctgtcgtttacgaggatgctcggcagggaaaagaaggggaacgtgtcgccgtcgtcgtgcggcggcggcgattgtagctccgccgcggagcgaggtgagcgagaggagactcagtgagtcggtgactcgggtgctgacgtggcacttgttggaagcggaaaaacttgggttgttggcgcgtggcggtgtgtaatagtgacgtttctggattttaatgtaggcggtgagcggcgcgtgagttaggtggcgcgagatactgacgtagaatggttttgggatgaacataaatgatgtacttattcgttgatatatatattttttctttatttgtttcttatcttcgggttccaaaaatagttaaatagaatacgaaaattgctaattgtaatgcttgcttacatagaaatgaaaccaattttaaag

SEQ ID NO: 8275 - DNA, 895 bp, Glycine max
  Clone ID: 700744417_FLI
tacctctctctgacacaagaattaagttgtgagatggagagaagtagtgaagaggagatgttaataacgaaaggtccatggacagagcaagaggattctcttctcttcaattacatcactgtccacggcgaaggtcactggaactctgtcgctcgctacacaggtctaaaacgaacgggcaaaagctgcagattaagatggttgaactacttgcgtccaaatgttcgacgtgggaacataaccctccaagaacagctcttgattcttgacctccattcccgttggggcaacaggtggtcgaaaatagctgaacatttaccgggaagaacagacaacgagataaagaattattggagaacgagagtggtaaagcaggctaagcaactaaaatgtgatgtgaacagcaagcaattcagggacacgttgcgttttgtgtggatgccacgtatgctagagcggattcgggctcaggcctcatcatcggcccaagcccaccaaagcagcttaatctccaacagtaacactcaagcacacagtggattgttgtcatcagcgcttcatgcccacgcgccttctctctctgactcgagcgcgtcgtacaatcttatgggtgctgatgctggaagttgctcatctcatagctactactcagacatagcaggcaatggttttggtggtgcggacttgtggacggatcaaaacatttgctttctgcaacaccagcttgctcatcatgacttgttctgatcatgcatacttcaacatcttgctccaaaattcactctaaactgcaacatataaagcaattgtaacactagtcgtgaaacatgcatgtttctttttatgttaatttggtgtgaaatttaataatctatacttcaattaatttcaagag

SEQ ID NO: 8276 - DNA, 177 bp, Glycine max
  Clone ID: 700744539_FLI
ttttgatgggaatagcccaccaatttggtttgctcataaatgtaacaaagataaagagtttgtatacataaattccacgacaacattgatatttcttggttaccacttctcagatgaatgaaatggagacatggttttcataatttgattaactgaattaattacaatattattaac

SEQ ID NO: 8277 - DNA, 1226 bp, Glycine max
  Clone ID: 700744905_FLI
gcaagattgttgctgttaagaagcttaaccaagatgggctccagggtcacagagagtggttggctgaaataaactatcttggccaactacagcatcctaaccttgtcaagttaataggatactgctttgaggatgaacatcggcttctggtttatgaatttatgcctaagggtagcatggaaaatcatctattcagaagaggttcttactttcagccattctcttggagtttgcgaatgaaaatagcactaggggctgcaaagggtcttgcttttcttcatagtacagaacataaagtcatataccgtgactttaaaacgtcaaatatcctactcgatacaaactataatgccaaactttctgattttgggttggccagagatggtcctactggtgataaaagccatgtctctactagggtcatgggaacccgtggatatgcggcaccagagtatttagcgacaggtcatctcactaccaagagtgatgtgtatagttttggagtagttcttctggaaatgatatcaggaagacgagctattgacaagaaccagccaactggagagcataaccttgttgaatgggccaagccttatctatctaataaacgaagagtcttccgtgtaatggatccccgtctcgaaggtcaatattcacagaatcgagctcaagcagcagctgcgcttgctatgcaatgtttttccgtagagcctaagtgcaggccgaatatggatgaggtggtaaaagcattggaggagcttcaggaatcaaagaacatgcagagaaaaggcgctgatcataaacagcatcatgtacgcaattccggccccggccgtaccaatggtggcgatggtggttcagatgcccctagaaaggcttctgcttatcctagaccttctgcttctctcctccgcggttgagagaattttgtgatgcggcaagtagtaaagcatataacaaaattcggaggtttaggtgtggctggcatgaaccatgtttatgtaagcaatgtatagtttgctttatttccatgttacattttgtgctatatataatttttttttctcgttgtggttctgattgttagacattcaagggtctaatgtgggtccttaaggtgttcattaattttgaaccctgtaaacaactgcaacactacccatgtggttgattctctacatttttatcttttgctttataatatgtaaaaaagtcttctccatgtt

SEQ ID NO: 8278 - DNA, 855 bp, Glycine max
  Clone ID: 700744975_FLI
gtttggactgagaccaagagaagagggtatagcatagtttaatcgcagccccgaggggaataaaaccgacaaatcgttgaacatcggagccagagattcagagcgggtaccaccgacgatggatactggcggaggcggagcatcacctacagccgccatgtcgcggtggaagttcgcggcgtggcggcagtaccagcacctgctggacaaatcgacgccgcacgtcggacgccggtggctggggttcgcggcggtggcgcttttgtacttgctgcgcgtgtactttgtggaaggcttctacgtcgtttcgtacggcttaggcatatacatcctcaaccttctgatagggttcctctcccctcaggtggaccccgagaccgcgattctcaacgccgacgaccctatactccccatcgccgcctccgacgagtttcgccccttcgttcgccgcctccccgagttcaagttctgcgctatgatgtaaagagagcaccaccagaaaccacaagcctttcagtttcagaggactgaaattttcagctggagcaatctgaggatttgatggaagctgaagaaagttgcttttgaggtcttgtgtggacaccaacgggatgtcttggatgtttttaggccctagtaaaagattcagtttagggagatataattggagtttctgagggttttcttttactcctttattttctatttctttctatataagtgggctaatggctctcgttcttgaattagtactagtaatcaaataacgagaattttagatagatagcttgtgtagaatgaaatctttttcatttcttgcagtgaagttatactgatctatctttttgttttgct

SEQ ID NO: 8279 - DNA, 694 bp, Glycine max
  Clone ID: 700745011_FLI
cgagttcgaaaagggttctaaggtgacacagatgccctgcaagcacgcgtatcacggcgactgcttgattccgtggcttcggctgcataattcatgccctgtgtgccgctatgaattgcccacggacgacgccgattacgagaacgaggtttcacggtggtgatgctgggtcgaggacaggtgggagcgacgctggaggtgggagtaatagaccttttcgcaggactgttaggatatatttgcgccatcctgatgctggtgactctgcgcaggacggtgctgaaagggaatggagatggagaagttgagattgaaatttatgttttgtttcatgttgaaaaactggaaactatcttgtgcagctctgagcttccgtgaatagattgtagcattgcaatgtttacagaagtccttgtgaggaatgcaagaaatgttatttcccgtggcaaggaactttgttcgatcaaaggtctttgtttgttatggtagtagatagctggaacatgggaatgcacgaaaacacaactattgagattttaggtactgtgttaatgagcgttgataagaaacttcccgttacttttgtacagatcatcttccaaacatccaatattgattatcgtccttttgtacaatatgaactagtcatggtctatattgctcctgtgtgtgtgtataaaacgttttaatttag

SEQ ID NO: 8280 - DNA, 1496 bp, Glycine max
  Clone ID: 700745012_FLI
ggaaaattgaattccacctccttcatttcttctcctcttaattaatcccttttgaaccctttatagttgccttcattaagattttgatgcattgatagcatcaaaatatggtggccacaagcacaaatgagttggaggcaggaactgtttctaggtatgacaggaaaagtgaaatcaaggtattcgatgaatcaaaaactggggtccaaggactggtagaaaatggtgtgacaaaggttccacggatgttctattgtgaacactctaatctcagtgatggattaaccacagaatcaaattcaaacttcactatcccctccatagacctcactggcatcaatgatgaccctattttgagagatgctgttgtgggaaaagttagatatgcatgtgaaaagtggggcttctttcaggttacaaaccatggaattccaactcaagttttggatgagatgatcaaaggaactggcaggtttcatgaacaagatgccaaggtgaggaaagagtactacacccgtgatatgagcaggaaagttatttatctttccaactttagtctttatcaagatccatctgctgattggagggatacacttgcatttttttgggcgcctaattcacccaatgatgaagaattgcctgcagtttgtagagatattgtgcctgagtactcaacaaaagtaatggcacttgcttctactttgtttgagttactgtcagaggctcttggccttgatcgctttcaccttaaagaaatgggttgtgatgaagggcttcttcatctgtgtcactattacccagcatgccctgagccagaattaactatgggcactagcaggcacacagacggtaacttcatgacaatacttttgcaagaccaaatgggtggccttcaaattcttcatgaaaatcaatggattgatgtgcctgcagcacatggagctcttgtagtgaacattggagatcttctgcagctagtgactaatgaaaaattcatcagtgttcaacatagagttctagcaaaccatcaaggcccaagaacatcaattgcatccttttttagaattggtgatcagtcaccagagggactctcaagagtctttggtcccatcaaggaactgttatctgaacacaatccaccagtgtacagagaaacttctttaaaagactacttggcacatcaatacgcaaagagcatcggagcttcttcactgtcattattcaagttgtgattatgataaattgcatgcaacacttgatgttttcagaacaagttgtggtttatctcattttgctaaaatttggtacatggctatgtggcttcaagaactgaaaactatggcatattgtattctttgaaaaatgtatccgtttagactagagaaaaataattatgcaccttgggttctcaaatatcaacataaaacttgagagaagctttatagcatgtatttagataatcttgaaggtatgaattaaatagaagaatttattct

SEQ ID NO: 8281 - DNA, 1353 bp, Glycine max
  Clone ID: 700745025_FLI
gcaggtgcaggcagatacatagatagatggcatattcatattctctttagactccccgctttcaaagctctgaaatttccgattcgggatggagaaatacgagctcgtgaaggatataggatctgggaatttcggtgtggccaggctcatgcgacacaaagacaccaaggagcttgttgccatgaaatacattgaacggggtcacaagattgatgagaatgttgcgagggaaatcataaaccatagaagtcttcggcaccccaatattattcggttcaaggaggtggttctgactccaacccatctgggtattgttatggagtatgcggctggtggagagctctttgagaggatttgcagtgctggaagattcagcgaagatgaggctcgatatttcttccagcagctcatctcaggagttagctactgtcattccatgcaaatctgtcatcgagacttgaagctggagaacacattattggatggcagcccagccccacggctcaaaatttgtgattttggctattctaagtcatctctgcttcattctaggcctaagtcaacggtgggaaccccggcctacattgcacctgaggttctttcacgtagagagtatgatggaaagttagcagatgtatggtcctgtggagtgactctttatgtaatgctggtgggagcatacccatttgaagaccaagaggatcccaaaaatttcaggaaaaccatcaatcgaattatggctgttcaatacaagattccagactacgttcacatatctcaagactgtagacatcttctatctcgcatttttgtggcaaatccagctaggagaatcaccattaaggaaatcaagtcccacccatggtttgtaaagaacttgcccagagaattaacagaagtagctcaagctgcctactacagaaaagaaaacccaaccttttctcttcagagtatagaggacatcatgaatattgttgaggaggccaaggctccacctccagcatccaggtcaattggaggatttggctggggaggggaggaagaagaagaggatgaaacaaaagaagcagtggctgagactgaagaagatgagtacgaaaagagagtcaaggaagcacaagcaagtggggaatttcatgtcagttaaaaagtgtttatttttagatagagagcaattgattcttggtttcctttgcacttagctaagttcaactaaggtgagtgtgttttgcttgtatgtataaaattaagttttccgcatgggacatatagtttaataaatggctgtacatttttttaaggttgtgcatggtaaggttgtgcatggttgttaattgtgatcatattataagt

SEQ ID NO: 8282 - DNA, 859 bp, Glycine max; identical to SEQ ID NO: 8274
  Clone ID: 700745326_FLI

SEQ ID NO: 8283 - DNA, 977 bp, Glycine max
  Clone ID: 700745654_FLI
gcagctgctgtgatgtcactgagctattcaactatatcctgggtggcttgtttggctagaggtcgtgttgagaatgttagctatgcatacaagaaaaccacttctactgacttaatgttcagaattttcaatgcacttggtcaaatttcatttgcatttgctggccatgcagtggcccttgaaattcaggccacaattccatcaacccctgagaagccctcaaagataccaatgtggaaaggtgctattggtgcctatgtcatcaatgctatatgctatttcccagttgcacttgtaggatattgggcctttggaagagatgttgaggataatgtgcttatggaatttgaaagacctgcatggcttattgcctcagctaacttgatggtgttcattcatgttgttggtagctaccaggtttatgctatgcctgtttttgacttgattgagagcatgatggtcaaaagatttaagttccctccaggagtagcacttagacttgttgctagatctgcttatgtagcttttacattattcgttggggtcacattccctttctttggtgatctgcttgggttctttggtggatttggttttgctcctacttcatactttcttcctagtataatgtggctgataatcaagaagccaaaaagattcagcaccaactggttcatcaattggatttcaatatacattggagtgtgcattatgttggcatctacaattggtggcttaaggaatattgccactgatgcttctacttataagttttacacctaaactattttatattattgcaaaaatatgtagcatgagcaattaatctagttaattagactggagttggtgaatgtctagttgataatgtcctttgttcctataagcaactagccttttagtcttctttctctccttttattttatcttagtgagatgttaatttattaatagaacaaatagttttaattggcttc

SEQ ID NO: 8284 - DNA, 1945 bp, Glycine max
  Clone ID: 700745763_FLI
gtggaagttaacccgtgtaattggtttggagttgagtgctccgatggaagagtagtggtcttgaatttgaaagacctttgtctcgaaggaaatctggtacctgagcttgcaaaccttgttcacataaagtccataattttgcggaacaattcttttcatggaatcatcccccaaggaattgcacacttgaatgaaatggaggttttggatttgggctacaacaactttagtggaccgctacctacagatcttgggaataatattccgctgacaatccttttgctggacaacaatgatcatctttgtggtttctctcccgaaattaatgaattgaagatggtttctgaatatcaagtagatgaaaaccaactaagtagtgcagaaaaagtgccaataagatccatcaaacgccatgctggccaaaataatggtgttcggaagctactgcaagttcgtactcgtgaaggtggaagtccttttaatcgggtttttcctgatagtcctgctccatttccttcagctccctcacctgccccagcaacgccaccagtggttcagaagccagctcccgttgaccgaaataattctgcttctccttctcccctgcctgaaccacgctctgcaccgctatctaaaagtagctcatcaaagaaccatctagttgttattttggctggagttatgggtggtgttgtatttcttctcatttcaatcattggcctatatctctgtaaaacaaacaaggtagctactgtaaaaccttgggcaacaggattaagtggacagcttcagaaggcatttgtaacaggtgtgccaaagctaaagagatcagagcttgaagcagcatgtgaagattttagtaatgtaattggcacttcatccattggtacagtttacaaagggactttatctagtggtgtcgaaattgctgtggcatctgttgcagcgacatcatccaaagattggtcaaagactctagaagcccaatttaggaacaagatagatacattatcaaaagtgaaccacaagaattttgtaaatcttcttggacattgtgaagaagatgagcctttcaccagaatggtggtttttgagtatgccccaaatggaacactctttgagcatttacacataaaagaatctgagcacttggattggggaacaagacttagagttgccatgggcatggcctactgcctacaacatatgcaccagttggagcctcctttggtccttagcaacctgaattcttcaggtgtccaactcactgatgattatgctgccaaaatctctgatttgagtttcttaaatgaaatagcttcagctgtgataaaatctcctgctagaaaaaacactgatatgacacccgcaagtaacatatacagctttggtgttatattatttgaaatggtaactggcagactcccttattcagtggacaatgatggctcacttgatgactgggcttcacactatttacaaggggatcagcccctcaaagaaatggtggatccaactctagcatccttccaagaagaacagctcgaacaagtcgatgctttgattaaatcttgtgtccatcctgatcaaaagcaaagaccaacaatgaaagaagtttgtgtgagattaagagagataacaaaaataacacctgatgcagctgttccaaagctttctccactttggtgggcagagcttgagattgcttctgtagatgcaagctgaaatcgctaattcgggttgtaagtatggagttcttaccatcctcatcctttttccatcggtgaaggcacagaaaatgtattcacctgtagattaatacatcttgtgttaattatagaagagtggcaaatcacatgtacataagggagataaaagaatgtgattttttcttttcttttcctggggtgcttcgtttggttatggtttatgaaattacactaac

SEQ ID NO: 8285 - DNA, 1052 bp, Glycine max
  Clone ID: 700745779_FLI
gaattaaagtagcaacaaatactcttccctacacttggcagaaaaaaaatggttcaacaagaaatccgaaggggtccctggacagaacaggaggactacaaattagtgtattttgttaacatgtttggagatcgtagatgggactttatagcaaaggtatcaggtttgaaggtggagggagactgtaaatagatggtcaagaattgctcgcaggctaccagggcgaactgacaatgagattaagaattattggaggactcacatgaggaaaaagaaggctcaagagaaaaagcatgcatcagcagcatcgcctgtttcttctagttgtcaatcttcactgtcctcaaacaaccatgttgtggattcacatgcttccaaagaggttggagaagagagttgttatgacacaggtggatatgatgatggcatgatgatgggtttaattggtggtgaaaaggggtactccatggatgatatatggaaagatattatgtcagaagaagagaacaacatttataataataatcttcaacctgtctatgaagggcatagtgaagagggatgcaacttctctttccaccaccaccaatgattatgccttctccaccatcatgggatcagtacaacatttcttctcaacccttatgggtgatggatgaagaagaaagtaataagatgttattccctacactaagtgaccaatattttccttactatgaacaagggaacgcatttctaactggctaatcaggagattctttttttcttttgtccttaaaaaaattatcaatattttgttcttatgtgtgtgccatctgtcacaataagaaggcttaagtgttaacctgtacagcatagtatctttgagctttcggcatggtcctccatagtgtgacacagctgtaatcgatctcaaatgtaactgtagtctatgtcaaaatgtgtttgtggttttactttaaagaaacatccaatagggaaagtggttatgttctgaattatgtaaaatatacatcaagcacttatgcaaattcaagttttaatctaatttg

SEQ ID NO: 8286 - DNA, 1515 bp, Glycine max
  Clone ID: 700745792_FLI
ggccaggcaagccccactcaaccaccacacctctcctcgttcacgctacccctttctgctcttcttctacctttcaagttttaaaagtataaagatggcagagacattcctatttacctcagagtcggtgaacgagggacaccctgacaagctctgcgaccaaatctccgatgctgtcctcgacgcttgcctcgagcaggacccagacagcaaagttgcctgcgaaacatgcaccaaaaccaacttggtcatggtcttcggagaaatcacgaccaaggccaacgttgactacgagaagatagtgcgtgacacctgcaggaacatcggcttcgtctcaaatgatgtgggactggatgccgacaactgcaaggtcctcgtcaacattgagcagcagagccctgatattgctcagggtgtacacggccaccttaccaaaaaacctgaagaaattggtgctggtgaccagggtcacatgtttggctatgccactgatgaaacccctgaattgatgccattgagccatgttcttgcaacaaaactcggtgctcgtctcaccgaggttcgcaagaacggtacctgcccttggctgaggcctgatgggaagacccaagtgaccgttgagtattacaatgacaatggtgccagggttcctattcgtgtacacaccgtgctaatctccacccaacacgacgagactgtcaccaatgacgaaattgctgctgacctcaaagagcatgtgatcaagcctgtgatcccagagaagtaccttgatgagaagaccattttccacttgaacccttcaggccgttttgtcattggtggccctcatggcgatgctggtctcaccggccgcaagatcattatcgatacttatggaggatggggtgctcatggtggtggtgctttctccgggaaggaccctaccaaggttgataggagtggtgcttacattgtgagacaggctgctaagagcattgtggcaagtggacttgccagaaggtgcattgtgcaagtgtcttatgccattggtgtgcctgagcctttgtctgtgtttgttgacacctatggcactgggaagatccatgataaggagattctcaacattgtgaaggaaaactttgatttcaggcctggtatgatctccatcaaccttgatctcaagaggggtggaaataacaggtttttgaagactgctgcctatggacactttggaagagaagaccctgacttcacatgggaagtggtcaaacccctcaagtgggagaaggcctaagtaattcattccactgctctatgctggaagttttttgagcgttgcccttataatatgtctaatatccataactttccacgtctcttactctgtgtgtttctctcctcttcctcctattttgttatttgtatgttcttttgtaattttttacgtgatcaactaaaaacatgtactctctgtttgtatgtatgccctaccaatgtgtctcttaatatcaatatcaaaaagagagtgttcaagtt

SEQ ID NO: 8287 - DNA, 2128 bp, Glycine max
  Clone ID: 700745847_FLI
atttctttctttctttctatcaaacacagtgcgtgcgtgttttctttctcctaattgtataaaatgggggacaagcaccagcagcaccaccaagacgacagcagcgatttcacctccgaggacgaaggcaccgaagattaccgccgcggcggctaccacgccgtccgaatcggcgacgccttcagcgccggtcgctacgtcgttcagagtaaactcggctggggccatttctccactgtctggctcgcttgggacaccaaacattctagatacgtggctttgaaagttcagaagagtgctcagcactacactgaggcagctatggatgagataacaattttgcagcagattgcggagggagatcctgatgataagaagtgtgtggtgaagcttttggaccatttcaagcattctggtcccaatggacagcatgtttgcatggtgtttgagtaccttggggacaatcttttgactcttattaagtactcggattatcgggggttgcctattgccatggttaaggagatttgctttcatattctggctggattggattacttgcaccagcagctttctatcatacatactgacttgaagcccgaaaacatcttgctcttgtcgacaattgatccgtctaaggatcctaggaagtctggggcgccacttattcttcctaatagtaaagataagatggcgatggagtcagcagggatgaaagatacgaaaatgttgaatggggatttggttaagaatcataagaaaaagattaagagaaaagctaagcaagcagcccatggatgtgttgagaaggaagcttctgaaggagttgagggtaatgctgaaacctctggggctgtggagtcatctcccaatgcgagttctgcgagagaacagacttctagttctgcaggaactagtcagttatcggatgctgatggaacaaagttgaaagagcagggtaacaaaagaggaagccgctctatgagacagaagctgctggcatcggttgatctcaagtgcaagttggtggactttggtaatgcctgctggacatataaacagtttacaaatgatatccagacaagacagtatcggtgcccggaggtgatccttgggtcaaaatattctacatctgcagatctttggtcctttgcttgcatttgttttgagcttgcaactggagatgtattatttgatcctcacagtggtgacaactttgatagggatgaggaccacttagcattaatgatggaacttcttggaatgatgccacgtaagatagcactaggtggccgttattcccgtgatttctttaatagatatggtgacttaaggcacattcgacggttgcgattctggcccttgaataaagtcctcttggagaagtatgacttgagtgagaaagatgcaaatgatatgacagactttttggttcctatccttgactttgttcctgagaagcggccaacagctggtcagtgccttctccatccatggatgaatgctggtcctcgccttttggagccatctgtgccttctaatcacaaccctgctgctgaaacttccgtttcggatcagaagagaaaggacaaagatgagagggaggccatggagacaggaatggggaatattgttatcaattcagattttaaaccactaatgcattctccatcaaagaaagtcttccaaggcagaagccagaagtagttcatctggcaagggctctttcccgtgcgactgtttccatgttcttagcgtgcccctgcatcatttccctcattcattgatgtccatgggaattgttttgggggcatgttcatttagccttggattgggtaggacttgtttgaagccgggtgctcgctaaatcctttcaagtcttccacattgcatcttcaaaaagaagttgggatactccgagagctctcactactaagaataccgttatgatatactctgtgccttgtttctcatgcttacgataggtcaaagatgcctttgtcaattggtaccgttgacttgtttgtgaacagtgttcattatcatgtactcttatgctgaatgatattcttgatatgaaaacattataaacatgtttcaagtcattcgatttttgttctttgggttc

SEQ ID NO: 8288 - DNA, 1106 bp, Glycine max
  Clone ID: 700745970_FLI
ctcgtcagcctgtataccacaggttttatgcacttgtgctgaccgcatgtatgctggaatactgctaaacactcgccttgcttgccctttgtcttccatactttcaagtccttttagtgaatcagcagcgcagttttgtgctgcttctgttgttattgccttggaagacttgcacaagaatggtgttctctacagaggtgtgtcacctgatgttttgatgttggaacaaactggacatatacagctggtggacttcagatttggaaaacagctttctggtgagagaacattcacaatttgtgggatggcagattcactggctccagagattgttttgggaaaaggccatggtttccctgctgactggtgggcgttgggagttttaatatattatatgttacgtggtgagatgccatttggatcatggagagaaaatgaacttgatacagttgccaaaattgcaaaaagaaagctacatcttcccgagacttttagccctgaagctgttgatctcatctccaagctacttgaagtggaagaaagcactagacttggtagccaaggtcctgattctgtcaagagtcacccatggtttaattgtattgaatgggaagggattagacaccacacctttcccgttccgcaggaaattatttctcgtataacacagtacttggaagttcattctgaggattgtagtactggttatctgggttctccattgcaggaggtaaaagaacttaatgtgcctgaatggcttgaggactggtagaagaatgacctttacattttgtcttctttttgaagtttggctttgcaccagtatttacctttgcttattcggacaaattgcaatccaagaatgcagttaaccagaaaatgcaaagagagcaatagatgctgaatattccctatagtttgaatcttttagttgcaaaatgggtagggtaggtttattatcttattcatctcctcccttttctaattttttttgggggtaattcctctcctctgtaaatattatatatgtgtaaatgattgaatttgttttcattttcaattgcaattcaagcaatttagttttgtcatggaacaatattcatatt

SEQ ID NO: 8289 - DNA, 1897 bp, Glycine max
  Clone ID: 700745995_FLI
cagcgaatcacgttttgttcgagcttcctccattctcaattttcagaatcgatttcgaagagctgcttcgtctttgctccaccaaaattcttcaccgttgtagttgtactcagccactcggagacaccgctaatcgatagtttagttggcaagtcataaattagtttcatctcttaagatttcattggaagcagtcaaaatgtcacggaagggtttgatggaacaagacctgagtaagttggatgtgacaaagttgcatccactttctccagaagtcatatctcggcaggctactattaatattggcactataggtcatgtggcacatggcaagtcgacagttgtgaaagcaatatcaggagtccagactgtgcgtttcaaaaatgagttggagcgtaacattacaatcaagcttggctatgctaatgcaaaaatatacaagtgtgaagatgaacggtgtccaaggcctatgtgctacaaggcttatggaagtggaaaggaagatagtcctatgtgtgatgtgccaggatttgaaaacagcaagatgaaattgctgagacatgtttcatttgtggattgtccgggacatgatattcttatggctacaatgcttaatggagcagcaatcatggatggagctttgctactcattgctgccaatgaaagctgcccacaaccacaaacctctgagcatttagctgctgtggaaattatgcgtctacagcacataataattcttcagaacaaggtagacttgattcaagaaaatgtggctatcaatcagcatgaggcaatttcaaagtttatacaaggaactgttgctgatggtgcaccagtagtacctatttcagcacagttgaagtataatattgatgttgtgtgtgagtatattgtgaagaagatcccaatccctgaaaggaactttgtttctcctcctaatatgatcgttattcggtcatttgatgtcaataaacctggttatgaggttgatgaaataaaaggaggtgtagctggtgggagcattttgaggggtgttttgaaggtcaatcaattcattgaagttcgtcctgggattgttgttaaagatgagagtggaaatatcagatgcacgcccatatactcaagaatagtttcattgtatgctgaacaaaatgagcttcaatttgctgttcctggaggcctaattggtgttgggacaacaatggatcccactttgacacgtgctgataggttggtaggtcaagttttgggagaggttggatcactacctgaggtttttgttgaacttgaggtaaactttttcctgcttcggcggctccttggtgtccgaacaaaagggtctgagagacagggaaaggtatccaagctggctaaaggagagatgttaatgttgaacattggatcaatgtcgacgggggctagagtagttgctgtgaagaatgacttggcgaagttgcaactcacttcccctgtgtgcactagcaagggcgagaagattgcacttagtcgtcgtgttgagaagcattggcgtcttattgggtggggacaaatccaagctggaatcactcttgatgtccctcccgccccccaactgagttgaacactgataagagacagatcacaagaaacaccagcagctataaaaacctgagacgaatttagatgtgggaagggagacaagtgttgggaaccatttttgtgaggtggagaagaaaacgttttgattgtcgtctatttttgttttcacatcgttattggtttattttccccactgtacctattattgaagctgtatcctatactctgattgagttcaggctgggagcgagaatctcagccagtacttgtttcattccatggcatctttaccgatattcaaaaattggttcgccatttg

SEQ ID NO: 8290 - DNA, 1282 bp, Glycine max
  Clone ID: 700746124_FLI
tgtttaggtactttgaccattatggtatcataagagacattatgcagaatcatttacttcaaatactagcactctttgcgatggaaacccctgttagtttggatgcagaggatattagaaatgaaaaggtctcacatgattatataccttgaactcaactgttctaaatagtcatgttttttttttttaccagaatttcaattacctgatggatgtcaggtcaaggttcttcgttcgatgagacccctacgacttgaggatgtggttataggtcagtataagagccacactagaggaggagttacatatccagcatacgttgatgataaaactgtaccaagcggcagcttaactccaacatttgctgcagctgccctcttcatagataatgcaagatgggatggggtaccttttctgatgaaggctgggaaagcattacacaacaaaagagctgagatacgggtacagttcaggcatgtgccaggtaatctgtacaatcggaatttcggtactgatcttgatcgggctacaaatgaacttgttataagagttcagcctgatgaggctatttatctgaagataaacaacaaagttccgggtctgggaatgaagttggatcgcagtaatctcaatcttcactacgctgcaagatattcaaaggagattccagatgcatatgaaaggttacttctggatgccattgaaggagaaagaagactcttcattcgtagtgatgaactggatgctgcttggtcactctttacacctgtactgaaggagcttgaagagaagaagataattccagagtactatccttatggtagtaggggtcctgttggtgctcactatcttgcagccagacacaacgtgcgatggggtgaccttgggacagacgtagaccattaaccctcgcattttgttgcacttctgatcggcctaagatgttagctattatgcatgctattttgtggtttcttcttggcatgcagtttcttttctcatcagcagcatggttacttctctggtggaagacaggtaccaggcacacacgaaaatcatacaaagcaataaaagcatcaaatttcaaagtccagtaataaagctcttagatcattgatttttttttttttagtttttgttgctatttgggacagtttggacaagagcaaatatttcatttagttgccaatcgatctagttaggtgatgtattttgattttgcattttgcattttgtgaaacacaattaaagagaaaatgaagaaagttagcaagttggtatg

SEQ ID NO: 8291 - DNA, 2112 bp, Glycine max
  Clone ID: 700746172_FLI
gtttcattttcttcttcttcaccccactgtcactgcgcaaatccagttctccccttaccctctccctcggtcctgatcttttcccgccatttcccgcgtttcttttacccagattttgaatactagccgttggatctgccatttttttcaatttttttcgaccgttgctctcgccggagtgaacgggaaatgtctgcgtccgaagcggagaagaaggtcgaggaggaagagaagaaggaagaggtcaaagggggagaactcctgttctgtggtgccacttgttgggatatcattggtcgtcgtaaaggccccgtcgacggtaacctcgtctctccctcgcgcctccgtcctctcgtcggcgtcgatattcgctacgtcgcctccggctgcgtgtcttgtcattgcgtggcgttggacgttgaagggcgttgttatacatggggacgtaatgagaaagggcaactgggtcatggagatacgattcagcgtgataggccaactgtggtgtctgaactttccaaatacaaaattgtcaaagctggatcagggaggagccatacagttgttgttacggatgatggaaattccctagcatttggatggaacaaacatggacaactaggttctggttctgtgagaaatgaaattgagtcatcacctgttcgctgtcttgtgtctgaagtaaaacatactgcttgtggtggtgacttcactgtgtggttatcttccattgaaggagcttctatacttatgggcagcttgggcatggaacagataatgagtataattccaaagacagctctgtgaggttggtttatgaaccccagccacgtcctcgagcaattgctgctcttgctggggaagcaattgtcaaagtggcatgtggaacaaatcatacaggtggttgttattccttgcttgatcttggttatataaccttatttactacttttccttaatgtttttgttttggatatttagtggcggtggataagaatggcttcgtctacacgtggggttttggtggttatggaaggctaggacatagggagcagaaggatgagtgggtcccacgacgtgttgaagtttttcaaaatagaaatgttttgccacccgatgcaatcatatcagcaggttctgtgaattcttcatgtactgcaggtggagggcagttgtatatgtggggcaaattaaagaacactggtgatgactggatgtatccaaagcctctaatggatttaagtggttggaatctactatgcatggattcaggcaatatgcaccattttgttggggctgattcctcttgcataagttggggacatgctcagaatggagagctgggatatggacctactggacagaagtcttcagctgtacccaagaaggtggatttacttgagggtatgcatgtaataagtgttgcttgtggtatgggtcattccatggttattgttgatagagcaaatgttgctgatcgacttgaccagcttgatatatatgatgggaaagctgttggtgaaggtaatgaggccgtaaacacaactccagtgcctaagcaggctgctaaaaagggtgcaaaaggagctgacaattcaaagaagaggaaacaatcaaaagattcatctgactcagatgaggatgctgaagaaagtgaggaggatagtgaggatcaaattaatggtgaggctgaggcgaaaaggccacgtggttctggtaaaggccgaggtaagacacccaaaaagtcaggtgctaagggaaaagggtcggtctctggccgtggtcggggtgggactgcagctaataaaaacagttctaaatcccctcaggtgaaatctggtaagagaggaagaccccgtaagtcataacttagatttttgtcggaaattttgttctctatacctagagaatgtagcgtgtaattcattggcaggtgattatacttagtgttttgttgttattataattcaatcccgctaactatttaattcaaagtttagaaacatgttgaatttgctaactgttttttaagacgcagtgggaagaattgcccgcttgttataattttttttttttttgtaaggggacgcttttattgcttcagtttaccat

SEQ ID NO: 8292 - DNA, 946 bp, Glycine max
  Clone ID: 700746227_FLI
cacgcgctgaagacgacgccgtacgatgagcgcgtagagaatcacgagaaccacgcgttgcacgcgacgcaccagatcgccgagtcgtggatccacgcgtcgcggaaggttctagagaggatcgcagacgcggtgctctccagaaccttcgagaaggcggctgaggactgctacgccgtggaaaggatctggaagcttctcgcggaggtggaggacctccacctgatgatggatccggacgatttcttgagactgaagaatcagctctcggtgaaatcctccggcggcgaaacggcttcgttctgcttcaggtcgaaggagttggttgaactgacgaagatgtgcagagatctgaggcacaaggtgccggagatattggaggtggaggtggatccgaagggaggaccgaggattcaagaggcggcgatgaagctctacgtttcgaagagcgcgttcgagaaggttcacttgttgcaggcgatgcaggcgattgaggcggcgatgaagagattcttctacgcgtataagcaggtgttggcggtggtgatgggaagctccgaggctaacggtaaccgagttgggttgagttgcgactcggctgactcgttgactcagattttccttgaaccgacgtattttccaagcttggatgccgccaagacttttcttggatacttgtgggataataacgataataacaaatggatatgataagggaaaaaaaaaaaacggcacaaaaacgatggccaaagtgaaattttcggtttgggcattttatggataatgttattcagtttagtttggtagtgttacacctcaataaagagggaaaaagcaaaaaacaaaagatgtaatttagaaattcttttttttctttaaggaaaagtggattaaattctgtaatggtcttgatcgttgtaaaatatttaacaaattatctttggag

SEQ ID NO: 8293 - DNA, 795 bp, Glycine max
  Clone ID: 700746240_FLI
ctccatcagcttgattgatgagccatgcaagtcagctcaccttgctgctatgagcattgccaaaaactctggttgcattctatcatatgatccaaatttgagattggctctatggccttctgcagactccgctcggaaaggcataatggatatatgggatcaagctgatgttataaagataagtgaggatgagattacatttttgactgggggtgatgatccttatgatgataatgttgttttgaagaaactttttcacccaaatctcaagcttttaattgttactgaaggttcacagggttgcagatattacacgaaggcatttaagggcagggttgcaggtgttaaagttaaacctgtagacacaactggagctggcgatgcatttgttagtgggattttatactgcatagcttctgaccaaactatttttcaggatgagaaacgtcttcgaaaggctttatattttgccaatgtatgtggtgccctcactgtaactgagagaggtgcaattcctgcactacctacaaaggaagctatcttgcaattcttactagaagcagctgtaatataaacagtattgacagatttttgttataattggttgttaagctatagcttaggtgatgctgaattctttttcctttttaattaaaaattttgtctatgaaattttcttatattaattctagttttcttttgctctcaagttttgggattgcgtaacagctgagttcacgaatttcctaggtttaatatttgtaatcaaataaaaggtattcagttttaattaag

SEQ ID NO: 8294 - DNA, 1694 bp, Glycine max
  Clone ID: 700746253_FLI
ggctgataaagacaacactcataccgttggaaagaaggatgctgctggccatgttgcttaatttagttcttgcttcctttgtcttcttgagttttatcagagacgggagtgcagggatcactagctctttcattcggtcagagtggccggcagttgacatcccccttgatcatgaagcatttgcagttccaaagggttataatgcacctcaacaagtgcacatcacgcaaggtgactatgatggaaaagcagtaatcatctcatgggtgaccacagaagagccagggcacagccatatacagtatggcacatcagagaataaatttcaaactagtgaagaaggcacagttacaaactatactttccacaaatacaagtctggctacattcatcactgtcttattgaaggccttgagtatgagactaaatactactatagaattggaagtggtgattcttctcgagaattttggttcaaaacacctcccaaagttgatccagattctccctacaaatttgggatcattggtgatttggggcaaacgtttaattctctttccacccttgagcattatatacaaagtggagcgcagactgtcttatttgttggagatctttcttatgctcataggtaccagtacaatgatgttggtttacggtgggatacatggggacgatttgttgaaaggagtacagcatatcatccatggttatggtctgctggaaatcacgaaatagactatatgccttacatgggagaagttgttcctttcaaaaactatctttaccgatatactactccctacttggcctccaatagctccagtcccctctggtatgcagttaggcgtgcgtctgctcatataattgtgctatccagctattcaccatttgtgaaatacactcctcaatacatgtggcttaaagaagagctgaagcgagttgagagggagaagactccttggctcattgtgctcatgcacgtgccgctctacaatagtaatggagctcactatatggagggtgaaagcatgcgatctgtttttgagagctggttcatcgagtacaaagttgatgtgatctttgctggccatgtccatgcttatgaaagatcatatcgatactctaatgttgactacaacataacaggcggtaacaggtatccattacctaacaaatcagcacctgtttacataacagtcggagatggtggaaatcaagaaggtcttgcttcaaggtttttggatccacagccagaatattctgcttttcgagaagcaagctacggacattccacactggagataaaaaataggacccatgctatctaccactggaatcgcaatgatgatggcaagaaagtaccgactgactcttttgtactgcataatcagtactggggacacaatcgcagaagaagaaaactgaagcattttctattgaaagttattgatgaagttgccagcatgtaatttgaagttgaagcactagcatatttggcgttttgaaaaggataaaaatgtgccccttgattaatatatgcagttcaatagtgtctgagtgagcgaaatgcaggacgttggaaatggttctatgtactatttggcttgtatgcttgtattacaacgctaataagaatattaaatgagcttgctggagaaaaataaaataagaacatattatctattgattgg

SEQ ID NO: 8295 - DNA, 1853 bp, Glycine max
  Clone ID: 700746254_FLI
gtgaaggcgccatcaagagaacatacaatggattcagaaaaaaatctactggtgttgtgcagtttgacacaacccaaaatcgctttttggctgcaggtgaagatggtcaagttaacttttgggacatggacaatattaatcttctaataagcagtgatgccgatggaggattacagagccttccacgcttgagattcaacaaggaaggtaatattcttgctgttactaccgtggacaatggtttcaagatacttgctaatgcttctggtcttagatctttaagaaccattgaaactccggcatttgaagcattgaggtcacccattgaatcaactccaattaaggtatctggctcttctactgttaatgttagtccggtcaactgtaaagtggaaagaagctcccctgtcaggccttctccaattcttaatggagttgatcccatgggccgaagtgcagagaaaccaagaactgtggaagatgtaatagatagagctaaaccatggcaactatctgaaattctggatcctgtccaatgtcggtcagttaccatgcctgagagcacagattcttccagcaaggttgtcagacttttatatacaaactctgctgttggtattttggcccttggttcaaatggtatccagaagctttggaaatgggctcgcagtgaacagaatcctactgggaaggctactgccaatgttgttccactgcattggcaacccaacaatggtcttcttatgactaatgatatctcgggcgtcaaccttgaagaagcagtaccttgcattgccctctcaaaaaatgactcatacgttatgtctgcctgtggtggaaaggtttctctatttaacatgatgacattcaaggtaatgacaacattcatgccgccgcctcctgcttctaccttcctagctttccatccccaggataacaacattattgccattgggatggaggattcaaccattcacatctataatgtcagagtcgatgaggtgaaatcaaaattgaaaggccaccagaagcgtattactggtttagctttttctaccaatcttaacatactggtctcatctggtgctgatgctcatctttgtgtgtggagtatagacacatgggagaaaagaaaatcaattccaatacagctacccgcaggaaagtcacctgttggtgatacacgagtacagttccattctgatcaacttcgcttattggtagttcatgagactcaattggcaatatatgatgcctctaagatggaacgcattcggcagtgggttccccaagatgttctgtctgcccccatatcgtatgcagcttattcctgcaacagtcagttaatatatgcgacattttgtgatgccaacattggcgtttttgatgctgatagcttgaggctcagatgtcgtattgcaccatcaatatgcttgtcaccggcagctttaagtggaagtcaaggtgtgtatcctcttgtggttgctgcccatcctctagaacctaatcagtttgctgttgggctgacggatggatctgtcaaagtgatagaaccgaacgaatcagagggtaagtggggaacctccccacctatggacaatggaatattgaatggtagggcaggatcatcatctacaacaagcaaccacactgctgatcaggctcaaagataagatcaaatgtattttactagttattttcatctgtaattgtatcagcttagatgtttagatttcgattcaccaatatgtctcatcaatatcatgtcagcttggacataaaatggtaaatgcttagacgtagaatcgtgtataccttgatttattctagttaataactcaattttattgttt

SEQ ID NO: 8296 - DNA, 1515 bp, Glycine max; identical to SEQ ID NO: 8286
  Clone ID: 700746279_FLI

SEQ ID NO: 8297 - DNA, 2802 bp, Glycine max
  Clone ID: 700746430_FLI
agtgaagcaagttgagattcctttcaagcctgctcgtgttctactgcaggattttactggagtccctgctgttgttgacctggcttgcatgcgtgatgctatgaataagcttggcagtgattctaataagattaatcctctggttcctgttgatcttgtcattgatcattcagttcaagttgatgtagcaaggtcagagaatgcagtgcaggccaatatggagcttgagttccagagaaacaaggagagatttgcttttctgaaatgggggtcaaatgctttccgtaatatgcttgttgtccctcctggttcgggtatagtacatcaggttaatcttgaatatcttggacgtgttgttttcaacactgagggcttgctctatcctgacagtgtggttggaactgattcacatacaacaatgatagatgggcttggagttgctggatggggtgttggtggtattgaagcagaggcagcaatgcttggtcagcctatgagcatggtgttacctggtgttgttgggttcaagttatctggaaaactgcgcaatggtgttacagcaactgacttggttctaactgtgacacaaatgcttaggaaacatggtgttgtagggaaatttgttgaattttatggtgatggtatgggtgagttatcattagctgacagggccactatcgccaacatgtctcctgaatatggtgcaaccatgggcttcttccctgtagaccacgttacattacaatacctcaaattaactggaagaagtgatgagactgtgacaatgatagaggcctatctcagggcaaacaaattgtttattgactataatgagcctcaaccggacagagtttattcatcctatcttgaattgaaccttgacgaagttgaaccatgcatctcaggacccaagagacctcatgatcgggtgcctttgaaagaaatgaaggctgattggcatgcttgtctagacaacaatgtgggatttaagggatttgctataccaaaagacgtacaaggcaaagttgcaaaatttgatttccatgggcagccagcagagctgaagcatggcagtgttgtgattgctgcaatcacaagttgtacaaatacatcaaacccaagtgttatgcttggggctggtcttgtagcaaagaaggcacatgatctaggtttgcaggttaagccatgggtgaaaacgagtcttgctcctggctctggagttgttacaaaatatctacttaaaagtggcctgcaaaagtatctaaatgaacagggtttcaacattgttggatttggctgtaccacatgtattggcaattcaggggaactagaccaatctgttgcttctgctatctctgaaaatgacattgtagctgctgctgtgttgtccgggaaccgtaattttgaggggcgtgtgcatcccttgacaagagctaactacctagcctcaccacctctagttgttgcttatgctcttgctgggacagttgacattgactttcaaaaggagccaataggaacagggaaggatggaaagaatgtttacttaagggatatctggccatccactcaagaaattgcagaggctgtccaatccagtgtgttgcctgacatgttccgaagtacatatgaagctattaccaaaggtaacactatgtggaaccaactacaagttcctgctgagaccctgtactcatgggaccccaagtcaacatatattcatgaacctccatacttcaagggcatgaccatggatcctcctggagctcatggtgtgaaagatgcctattgtctgctgaattttggtgacagtataacgaccgatcacatttctcctgctggtaacattaacaaggatagtcctgctgcaaaataccttctggagcgaggtgtggaacaaaaggacttcaactcttatggaagtcgtcgtggcaatgatgaagtgatggcaaggggaacttttgccaacattcgtcttgttaacaagctcttgaatggagaagttggccccaagacagttcacattccgactggggagaagctttatgtttttgatgcagcccagagatacaaggctgaagggcaggacaccattgtgctggctggagctgaatatggtagtggaagttccagagattgggctgccaagggtcccatgctattgggtgtcaaagctgtgatagctaaaagttttgagagaattcatcgtagcaatttggtaggaatgggtattgttcctctttgctttaaatctggtgaggatgctgacacattgggattgactggtcacgaacgttatactattgacctcccaagtaacatcagcgagataaggcctggccaagatgtcaccgtaacaactactaccggaaaatctttcacctgcacagttcgcttcgacaccgaggtggaacttgcttactttaaccatgggggcattcttccatatgtcatcaggaacctcattaagcagtgaagtcatggctgatgggaaatgttaaacaatgttgccactgcgtgtacacgttttgagtggtaatataatgtgagagaaatgagaataaattcaataaataggaaagatcccttcttaagaaggcaattttttgacacttccaggtaacatattaggcctgtaaacaacgagtgcattgattctagatttctcatgtctgtgttgtgtgcccattgaacaatggggggacaattgtattttttgtataagctgatgtgatccatgccgatggcagtgaatattcttttcatttaaatactccacttaattttcttaagactacagtg

SEQ ID NO: 8298 - DNA, 2261 bp, Glycine max
  Clone ID: 700746445_FLI
tttttttcccgtttctctgcgaaaaaaaaatccatagcggtttttctcactctcagcagctactttattcctcacttttttctttcattttcttatgacctcttctccttcttattataattataatataaatataaacattctttctgtttgtactttgataatgatcctgagttgaaaaagttcgtggaactttgcaccttgttaggtcatattcctttcaaaattacgcgcttcggcttgacatcgattcctttgcacttccaaaagaattggttgtgcagtccttgttttcagacaccatctttaagtttctgtcgacgtttgagttctataatggctggtgattcttctgtaatgtccaatggatacagcaagggcagtgtcaatccactaactaacctgcgaaggacttaccaagtgttagtggctgccactcaagattggggcatcggtaaggatgggaaattaccctggagattgcccactgatctcaagttttttaaggacattactgtgaaaacatccgatcctgggaagaagaatgccattgtaatgggaaggaaaacatgggagagtatccctcttgagtacaggcctctttctggtcgccttaatgttgttcttactcgctcaggcagctttgatattgcaacagcagagaatgttgttatatgtggaagcatgtcgtctgcattggaactgttagctgcttctccttactctctgtcaattgagaaagtatttgttataggaggtggtcagatatttagagaggctctcaatgcgcctggatgtgaagctatccacttaacagaaattcagtcaagtattgagtgtgacacttttatgcctccagttgatttcactatgtttcggccatggtactcatcctttcctaaagtggaaaacaacatccgctattgtttcaccacttatgtgcgtgtgcggagttctgctccagagtccccgggtcagaacattgatcaacttcttgataataattctgagtccatgaaatttgaggtcaaggaattttcttttcttcctaaaatgatttctgagagacatgaggagtatctatatcttaagctggttcaagacatcattgctgaaggtacaactaaggatgataggacagggactggtaccttgtcaaaatttggttgccagatgaggttcaatctgcacggaagctttcctcttctaacaactaagagagtattttggcgaggggttgttgaagagcttctttggtttatcagtgggtcaacgaatgccaaggtgctacaggaaaaaggcattcatatttgggatggcaatgcatccagagaataccttgatggtgttggtttgacagagagggaggagggcgacttgggacctgtttatgggtttcaatggaggcactttggtgccagatatactgacatgcatcatgactactccggtcaagggtttgatcagcttttagatgttattaacaagataaagcataatctgatgatcggcgaattattctctctgcatggaatccatctgatcttaaattaatggcacttccaccctgccacatgtttgcacagttttatgtagcacacggggagttatcatgtcaaatgtatcagcgatctgctgacatgggcctgggcgttccatttaatattgcatcttatgcccttttgacatgcatgattgctcatgtttgtgatctcattccaggtgattttatccatgttattggggatgcacatgtttactgcaatcatgtgaggcctttgcaggagcagctccataaccagccaaaaccttttccaactttggagataaatccaaaaaagaaagatatagattcttttgtggctgctgatttcaagctcataggctatgatcctcaccagaagattgatatgaagctggctgtctaaaatctggggattctcactccttcgggctgtttctgctttttgaaatgagaaccatggtgagcatggatgctgatgtgctgtgcaagatagctcataatttattatcaacaccttaggggctgtatggcaagctaaatgacaggcacaaccttaggaagattatgttaaatctgtgtacaattaaaagaacatatcgtaggacttaattcatcgcattcatactgttagtgggaattctttggctccacctgatatgcctctaaggtgatttagattgacttttgagggttctgaaactcgatgttcaagataagcggtctttttaagtgggcc

SEQ ID NO: 8299 - DNA, 1530 bp, Glycine max
  Clone ID: 700746472_FLI
tatgtctatggctgatgttggtgctggaggtgaagatgccattgttacatttgagggtattgctatccttacgccaagaggacgatacagtgttgagttacacatgtcattcttgcggcttcaaggacaggctaatgatttcaaaatccaatatagcagtgtggttcgcctatttttacttcctaagtctaatcaaccacatacctttgtcattattagtcttgatccccctattcgaaagggacaaactttgtaccctcatattgtgatgcagtttgaaactgattatgttgttgaaagtgaattggcaataaatgaagatctttataacacaaagttcaaggacaagttggagctgtcttataagggtcttattcatgaagtgttcaccacaatattacgtggtttgtctggtgccaaagtgaccaagcccggaaaatttaggagttgtcaagatggttatgcagtgaaatcatctttgaaagctgaagatggaattctgtatccccttgagaagagcttcttctttctacctaaacctcccactcttattcttcatgaagagattgactatgtggaatttgagcggcatgctgctggtggctccaatatgcattattttgaccttcttatcagactaaaatctgaacaagagcatctcttcctaatattcagagaaatgagtaccacaatttgtatgaatttatcagttcaaagggcttgaaaattatgaacttaggagatgcccaacctactgttggtataaagaaggttcttgagaatgatgatgatgatgctgttgatccacatcttgagcgcataaaaaaatgaagctggtgaagatgaaagtgatgaggaggattctgattttgttgctgacaaggatgatgaaggttctcctactgatgattctggggcagacgattctgatgccactgatagtggtgatgagaaagagaagcctgccaaaaaggaatcaaagaaggatctgccttctaaggcatctacttctaaaaagaaatcaaaagatgatgaagatggaaagaagaaaaaacagaagaagaaaaaggacccaaatgcacccaaaagggcaatgtccggtttcatgttcttttctaaattggaaagagagaatctaaagaaaactaatcctggaatttcatttacggatgtgggaagagtacttggagagaaatggaaaaagttgtctgcggaagagaaggaaccatacgaggccaaggcgcgtgaagataaaaaacgttacatggatgagattagtggctacaagaatccacaacccatgaatattgattcaggaaatgaatctgacagtgcctaaggctgtgaaaaaaaatcttgcagttttataaatacttatgcagcaagctaatgtaagccatgagccgtatatttcttactggtgatggcatctactcatatgcttcgtaaattgacacaagtttatggccaactgatgtaggatttgtaacaattttttgcttcaactgttgcacgaatatgatttaaaat

SEQ ID NO: 8300 - DNA, 1280 bp, Glycine max
  Clone ID: 700746523_FLI
cttgctgctgatgagtcaacagggacaattggcaagcgtttggccagcatcagtgtagagaacattgaatccaacaggcgagctcttagggagctgcttttcactgctcctggtgttcttcaatatctcagtggtgtcatcctctttgaggaaaccctctaccagagcacagctgcaggcaagccctttgtgaatgtcttgaaggaagctggtgtgcttcctggcatcaaggttgacaagggcacagtcgagcttgctggaactaatggagaaaccaccactcagggtctagatggccttggtcagcgttgtgccaagtactacgaagctggtgcacgttttgccaaatggcgtgcagtgctgaagattggtcccaacgagccatctgagctgtctatccatgagaacgcctatggcttggctagatacgctgtcatatgccaggagaatggcctggttcccattgttgagcctgagatccttgttgatggacctcatgacattcacaagtgtgccgccgtcaccgagcgtgtccttgcagcatgctacaaggctttgaatgatcaccatgtccttcttgagggtaccctattgaagccaaacatggtcacccctggatcccaatctgctaaggtttcccctcaggtggttgccgagcacactgtcagagcccttcagagaaccgtgcctgctgcagttcctgctgtcgttttcttgtctggtggccagagtgaggaggaggcatccgtcaacctcaacgccattaaccaggtcaatgggaagaagccatggtcactctctttctcctttggaagggcacttcaacagagcacccttaaggcatggggcggaaaagaagagaatgtgaagaaggctcaggaagcccttttggtaagagccaaggctaactcagaggcaactctgggaacctacaagggtaactcacagcttgctgatggtgcctcagagagcctccatgtttcgaactacagctactgatcaatcgaagttggtgttgtttgaagagactagtgcgagtaggaatcggtattatgggtacaacaaccgaatttcttgttgataagtattattgtggtttgactcttcccagaataatcgtttggaattttgctttttgttttcctagtgttccttttatgtcaattttagtaattcagtgtatttggtcaaacctgtgcaacagggaagggaatgtaactttgttttcttgaaagacaccaccgtgctgtgaatgaggctttgtgtttatttttgcgatt

SEQ ID NO: 8301 - DNA, 856 bp, Glycine max
  Clone ID: 700746535_FLI
ccgcaaggagttccgcactgcgctaaggcctgcggatgcgagatcacgcgagtgaggaactccttgcggacgccggggagcgccaggaggcagtggtgcaccgggagctggacctcgccgacgatgtggaggcggtggcggaggaggagatcgtagttgcggtgaattgagccgccgagggagttttcaaccggcaaaaccgcgcgatccgcgatccagagctccaccgcttgaaacgcagcctcgaactggtcgcacggaatccaggacgatccgaacaacgtgacgcggttcgtgatgctggcgcgcgaaccgatcattccgcgcacggatcggcccttcaagacgagcatcgtgtttgcgcacgataaaggaacctctgtgctcttcaaagtgctttccgcgtttgcgttcagaaacataagcttaactaagatcgagtccaggccgcaccgtagccgtcctattcgcgttgttgatgatgagagtgagggaaccgccaagcactttgagtatctcttttatattgatttcgaggcttctatggctgaggttagagcacagaacgcactcgctgaggttcaagaattcacctccttcttgcgactcttggggagttaccctatcgatatcacaccctggactccctcttctccgcgccaaaattaacatccacctccatttctttcatctcaactgtatatatatatattggagcccctcattgcacataatgtgcttctgtttatgtgtttccaactttccatgggggtgacgaatattttatgtttcaagtttttgcacgtctgaaaaaagtgtacaagaaggggaatagaatattcggcttggcattttc

SEQ ID NO: 8302 - DNA, 1587 bp, Glycine max
  Clone ID: 700746537_FLI
aaaaggggttaggaatcgagaaggagaagaagaagaaagggttggcttcggccccaaaacacacacacccactgcgagagagagagaaatgggagagggagagaacacagaaatagaaacagaaacagaatcagaagcaacatcgacatggagcctcggaaaacacactcagataatcgaactttcggagacgctgacgaacgggaacctcagcgccaagattgaggccgcgagggagataaggaagatggttcggaaatcgtcgtcgtcgtcgtcgaagacgcgcgcgaagctcgccgcagcgggtgtgattgaaccgctcgtgctgatgctctcttcttccaacgtcgacgctcgccaatcctcgctcctcgccctcctcaacctcgctgttcgcaacgaacgaaacaaggtcaaaatagtgacagatggtgccatgcctccactggtggagctcctcaagatgcaaaatagcagtatacgagaattagctacagctgcaatcttgacactctcagctgctgcatccaacaagccaattattgccgcatctggagctgcacctctccttgttcagattctcaaatctggaagtgttcaaggcaaagttgatgctgttacagccctccataatctttctactagcattgcgaattccattgaactccttgatgcaagtgctgttttccctctgctcaacctccttaaggagtgcaagaagtattccaagtttgcagaaaaagccacagcactgcttgaaatcctttccaactccgaagaaggacgaacggcaatttcaattgcagatggtggaatcttaacactagtagagacagttgaagatggatcacttgtcagcacagaacatgctgttggaaccctgctatcattatgtcgaagctgccgagataaataccgggaactgattctcaaagaaggagcaattccgggtctgttacgtctgacagtggagggcacagctgaagctcaagatagagcgcgtgtgcttctggatttgctcagagattctccccctgaaaaacgactaacctcatcagttttggagaaaattgtttatgacattgctgaacgggtagatggagcagataaagctgctgaaactgccaaacggttattgcaagatatggttcaaaggagtatggaacacagcatgaaatgcatccagcatagggctgcatcttgtactccttctattccatccacttgatgtgtacctttttttcctcatcaagcaactgcacaattgagttttaacttgtatatatgtgtttttattgtattttttttttctctggggggaaagttagtatgttaactagatcaccatgcaaagtgagtctaagctgctctacatgactagtgtaatgatttttaccagactaacttgggattgatatgttgacctcattactcaattaattacatttacacctaattacttcgacctggatggtgtctgtgctttgcacatacataaaggagtctgtacttgcatgtatttctttttcaccgagtcatgaacttgtgaaagattgctaattataagctctctagatcaatcaatgg

SEQ ID NO: 8303 - DNA, 1064 bp, Glycine max
  Clone ID: 700746570_FLI
gcaagaatggcacttcgttgcttggtgatgtccctttctgttctcttcactcttggtcttgcgagagaaagccatgccagagacgaagatttttggcatgctgtttggccaaacactcccattccaagttcattgcgagatcttctaaagcctggccctgcaagtgttgaaatcgatgatcaccctatgcaaattgaagaaacacagtacccgaaaaccttcttctataaagaagaccttcatccaggcaaaacaatgaaagtacaattcagcaagcctccctttcaacaaccatggggtgttggtacatggttaaaggaaattaaagacactactaaagaaggatatagttttgaagagctatgcatcaagaaagaagccattgagggagaagagaagttttgtgcaaaatccttgggaacagtaattggttttgccatttcaaagctgggaaagaacattcaagtactttcaagttcctttgtcaataagcaagaccaatacactgtggaaggagtgcagaatcttggagacaaagcagtgatgtgtcataggctaaatttcagaactgcagtattttactgccatgaagtccgtgaaacaacagctttcatggttccattggtggctggtgatggaaccaaaactcaggcacttgctatttgccactcaaatacttctggaatgaatcatcaaatgcttcatcaacttatgggagttgatcctggaactaaccctgtttgccatttccttggaagcaaggccattttatgggtacccaatttatctgtggacactgcctatcagaccaacattgttgcttaattagtccatgcatcttgagcaccatgagaatgagattgtgtataaaataaattatcatgtgctgtgtgttgtgcaagtactaccttctctagctagattgctagagctagaatttcaacctacctatgtgtactgataagatctgcttccctacttaaagagagcatcatcctgtgatcagtgtgcttcgtattctctctctctatatatatatggtaaaaagtggttatctcgtgcct

SEQ ID NO: 8304 - DNA, 748 bp, Glycine max
  Clone ID: 700746614_FLI
ctttaatttgctttgcttctttactcccccatttgcttccaaacaaaggaaaaatcactctcatctgagaatccaaacctcctcctaatttaagtggtgggtcagctactatggcttcgtctctgttactagcggtggtgtttgtgcttgatctggttgcttttgctctcgctgttgctgcagagcagagaaggaatactgcctcgttaaataaagacagtgcaggtagaaactactgtcaatatgactcagacattgcaaccggcctaggtgtggggtccttgtttatcctagttgccagtcaggtgatcattatggttgtaactagatgcctgtgctgtgggagagctatgagacccagtggatcaagatcatggtcaatttgcttgttcatcactagctgggtgacatttatcattgctgcttcgtgccttctagcgggttctgtgaggaacgcgtaccacaccaagtaccgtgatctcatgggagagagagcaccttcatgccagaccttgaggaagggagtgtttggagctggagctgccttcattgttctcacaggcataacctcagagctctattatgttagtttttcaaaagctaataataatggtccccctccctatgctagggacactggtgtgaggatggccaatttttagtagtagtgtggggaaattaattaattgtttgtaatgttaagttggatgtgaaagcctacttgtaaattattatgaaccttatttcc

SEQ ID NO: 8305 - DNA, 1433 bp, Glycine max
  Clone ID: 700746662_FLI
attgaatctcagaattctctaaaagagatctttttctgctctttgaagaaagaagggtctttgcttgattttggagatgtctctgctctcagatctcatcaaccttaacctctccgataccaccgagaaggtgatcgcagagtacatatggatcggtggatcaggaatggacctgaggagcaaagcaaggactctcccaggaccagttagcgacccttcagagcttcccaagtggaactatgatggttccagcacaggtcaagctcctggtgaagacagtgaagtgattttatacccacaagccattttcagggatccattcagaaggggtaacaatatcttggttatctgtgatgcctacactcctgctggagaacctattcccactaacaagaggcacgctgctgccaaggttttcagccatcctgatgttgttgctgaagtgccatggtacggtattgaacaagaatacaccttgttgcagaaagatatccaatggcctcttgggtggcctgttggtggtttccctggacctcagggtccatactactgtggtgttggcgctgacaaggcttttggccgtgacattgttgacgcacactacaaagcctgtatttatgctggcatcaacatcagtggaattaatggagaagtgatgcccggtcagtgggaattccaagttggaccttcagttggaatctcagctggtgatgagatttgggcagctcgttacatcttggagaggatcactgagattgctggtgtggtggtttcctttgaccccaagccaattaagggtgattggaatggtgctggtgctcacacaaactacagcaccaagtccatgagagaagatggtggctatgaagtgatcaaagcagcaattgacaagttggggaagaagcacaaggagcacattgctgcttatggagaaggcaacgaacgtcgtttgacaggacgccacgaaaccgctgacatcaacaccttcttatggggagttgcaaaccgtggagcttctgttagggttgggagagacacagagaaagcagggaagggatattttgaggacagaaggccagcttccaacatggacccatacgtggttacttccatgattgcagacacaaccattctgtggaagccatgagcaaaacctgcatgttttctccctttggatggaaaggaacagttatgcttttcttagtaggatttggtctctctctctttttaccttttgattggtactatggttggtgccttgttggttggtgcaactaactggcaagggttgttcattgttttcttctattcctttccctcgttttccgattgttacaatgacaataatttaatggttattatcagtcttgaacaaagaaatgctgattgtgaagtataataataatatatgaaattgtcatgttcattggagt

SEQ ID NO: 8306 - DNA, 933 bp, Glycine max
  Clone ID: 700746693_FLI
agagaataagccattcacaaggatgatggtttttgagtatgctccaaatggaaccctatttgagcatctacacattagagaagcagaacaactagactggggaatgagaatgaggatagctatgggaatagcctactgtctggagcacttgcatcagctgacaccacccattgcctacagaaacatactatcttcctctatatacctgactgaagattacgcagctaaattatcagaccttagtttctggactgatatagtctccacaaagaagggttctgaagccccacagctgttggaaactccttcagcatatataaaggccaatgtttacagctttggagtactattgttcgaattaattactggaagaattccctttgccgtggagaatggcttatttgaagattgggcggaggaatatatgaaggggcaaccattgagagacttggtggacacaagcctgaactctttgcaagcaaatgaaattgaaaaatgggaagaagtggtcaaaagctgtgtgcatccagatccagaaaaaaggccaactatgagagaggttactgctaagttgaaggaaatcaccgccatggggccggacggagcaactccgaaagcatctcctctttggtgggcagaaatagaaattatgtccagtgacttaagtttagacgttaaaccatgactccaaatgaaaaatatatcttttgggataataatctgagcagctactctgaatttggagtttgatgccatttttttaattttgttttcttagttatgttttagattcttcttgttttgaagctaactgaagtgggtggatggaagaaacagcttttgtcttagtagagcaatttaattttgtaaatagttgaggaatgaatttgtttttgtgcttttataaatgaatattactttttttgagtgtgg

SEQ ID NO: 8307 - DNA, 648 bp, Glycine max
  Clone ID: 700746753_FLI
gggatttcttagtgactcccagtcttcagtttcaccaggaaatttatcttctactgccgagttctcttggcaactcggttctgataccagtcattgcaaggttttcatggagtctgaagatgtaggacggacacttgacttgtcctgcctttcttcttatcaagagttgtacatgagactcgctaacatgtttggaatagagaggtctgatatgttgagtcatgttctctactgcgactcatccggtgctcttaagcaaattggagaggaacccttcagtgagttcatgaagacagcaaaaagattgaccattctgacggattcaaacaacaaagatagtagaagtctgttttgcagggtttggatcacaggaactcgaaatgctgaacatggattggatgctgcatcaaataagacaggtcctctcagtatatttgcttaatatggtgtggcatggcatcggagacattgtttttagatatgaaaagttgaaggacatagttattactcagttgtaagagatgctaatatgaactgaaaattccatcaatattggcgtctttgttttcgatgtccatttgtagaaaataatgatttttcctgtatgatggacaattactattctaatattaattaattaattaacct

SEQ ID NO: 8308 - DNA, 870 bp, Glycine max
  Clone ID: 700746763_FLI
gatcaaggctcctaagcaggcctctggggagcacaagaagaaaaagaagatcaaagtgactttcccatcaggtcaagagcggaatgcaccatcacaggcaattaggaaatgcttgcactgtgagataaccaagacaccacagtggagggcagggccaatggggccgaaaacactctgcaatgcttgtggcgtgcgctacaagtcaggccggcttttccccgaatatcgccctgcagcgagtccaacgttttgtgcggccatgcactccaactcccataagaaggtccttgaaatgaggaacaagacaggcaccaaatctggctttgcaactgtttctgctgcctcaccagaactcattccaaacactaacagcagccttacccttgaatatatgtgaaagggggaaaggaaggattctagttggagaattctctaattctctttcaagtcttctcttgagtcatgtcttatacaaggttttgaattgcattctacaaactgcaatgttaaaggttttagaggtgtctgcaactgcgttgtggttgcggttgtgactgcatcagccatatttgtccacaattttgatggcaaccgcaagttaaaaccttagtctttgtgttatttcttgtctgtcatttatttttctcattggatttttgtacagggctggaatggggggataggagcaaaatagaacatgatcatattgtagctatatttagaactgaagaacaagggatagagatatgcaagtcaaagagggtagagtcaccagagtgttagccattttaggtctagtaattgtagcagtactcaggaggagtctttgttacttttcttattctcatcatttttcatttttttttcttt

SEQ ID NO: 8309 - DNA, 587 bp, Glycine max
  Clone ID: 700746856_FLI
gtcaagtttgctgaactcttgaccaagattgacaggcgatctggtaaggaacttgagaaggagcccaaattcctgaagaatggtgatgctggtttggtcaagatgattcccaccaagcccatggtggttgaaaccttctccgagtatcctccacttggtcgttttgctgtgagagacatgcgtcaaactgtggctgtgggagtcatcaagagcgtcgagaagaaggaccctactggagctaaggtcaccaaggctgcacagaagaaggccaaatgaattgtgctggatggtttatcaaggaaactctattattatgactacaataaatggtttcttgttcgtagtacttcattttttcgtgtagggaacttgtttatcagattttgtgtcaggtttgctccgtcatctcgcaacttttgttcccagaactgggttcttgatcgacggtggcaaggctatttctttttcattgttatgctttgtttctattacaatgtgtctctgtaagaacaataagctgcatagtactagtcctatgctgcaggtttggcttttgaatttcaagtctatattgtgttgttataatt

SEQ ID NO: 8310 - DNA, 1691 bp, Glycine max
  Clone ID: 700746951_FLI
gggaagttcaattccgcttcaccaaaccctgaaagcccttaaaccccaacccaaatctccatcaacaacagcaagagttccatggtcgttgaatcccaacaatgaaagctctgagaaccctaagaagaaccctctattccccaacacccgcaaccgtttttcgcgccttcttctccgcacaaccacagccgcaccacgatgaccccaccgactcctccgtcttcgatagttcccactacgcccttgaggccgagcccacgctcaagcccgagccaaagcccacgtgggacgagaagtaccgggccagggcggaccgggtggtgttcggggaagagggccccaaggggaagctgcgggtgaaggaggaggaggatgagaggcggagaagggccctcgcgaaggcccttctcgaagctgcgatggacgagggcgaagacgaagaggaggaagggaaaggagcgggcttggtgaaggaggacgaccagaagtcgctgtccgtgggaatcattggcgcccccaatgctggcaagtctgcgctgactaattacatggttgggacgaaggtggcagcagtttctcggaagacgaatactacaactcatgaagttgtgggagtgttaactaaaggagacacccaaatttgtttttttgatacaccagggctcatgttgaattgcggtggatttccttatagggatgtcaaggtccgtgttgaaagtgcttggagttcagtcaatctctatgaagtgctcatagtcatttttgacgttcatagacatattaccaggcctgattcaagagtgatacaattaattaaacgaatgggagctcgatcgattccaaatcaaaggagaattttgtgcatgaacaagattgatctagtagagaaaaagaaagacttattgaaggttgccgaagaattcaaagatcttcctggatatgaaaggtatttcatgatatcaggactgaaggggtctggagtaaaagatctgactcagtacttgatggagcaggcagttcaacgaccctgggaagaagatccatttaccatgagtgaggaagttatgaagatgatagcattagaagttgtgcgtgaaaggttattggaccatgtacatcaggaaattccgtatgatgttgaacatcgattgattgactggaaagagttacgagatggttctcttagaattgagcaacacttcatcactaacaaattaagccaatgcaagattcttgtggggaagaatggctcaaaaattgggagaataggaattgaagccaatgaagagctaaggtccattttcaaaaagcaagtgcatctaattctccgagttaggcataaaaagtgaaccaggcaaaaatagatttgatgttgaagtataccttctttgccactccatgttatgctatattgaaatgccaaagctgtggcgtgtcttacacttacacatgaagtctgcaaaagtgacaagtaacaaaatggtgatcgtggggaaaatcatgggtatagtgaacacaggttgagttcattggtgatcacacaagcaaacttttgtgccatttaccattcggttgcccttgtttaaggagttggactctttaagtttattttgtgcatgaatttctgaaggaaattttcatattttgtttttgtttactcaaatataatttgatttatacatgtttttatc

SEQ ID NO: 8311 - DNA, 1174 bp, Glycine max
  Clone ID: 700746976_FLI
atttcactccccaaactccagagtcccaccgataattctctttcccatactctctctgtgttcttctgttctctctgtttcttcagattttctccctcctcagcgcctgtgaagtttgattgcttcattctttgaagtgaatttgacaattaagtaaattggttgagaagggttcattcctcttcattggaagaataaaacaaatattgcaggtggattttttctgatggcaactaatgaaaatcttccaccaaatgtaataaagcaactagccaaggaattaaaaaatattgatgaatcacctcctgaggggattaaagttgtggtaaatgatgatgatttttcaataatatatgctgacattgaaggcccagctggaactccttatgataatggagttttccgcatgaagttgttattgtctcgtgatttccctcactctcctcctaaagggtttttccttacaaagattttccatccaaatattgcaaccaatggagagatttgtgtcaacacacttaaaaaggattggaaccctaaccttgggttgcgtcatgttctcattgttgttaggtgtctactaattgagccatttccagaatcagctctaaatgaacaggctgggaaactgctgcttgaaaattatgaggagtatgccagacatgccagactttacacaggaatccatgcaaaaccaaagtccaaattcaaaactggagctatatctgaatctacaactgctctgaatgttgatcagagtaacacctcagttcttaatgctgaagtcaaaactgcaccatcgggtgcgacattgccattgcaatcaccattggccccctcaactaacaacacaacaagaggaaacaagcaggaacaggctgtggttggagctgagccagctgttaacagttcttgtgccacatccatggttcatgctgctgcaccaatgaaggcaggtggagtagcaaaagctcaggctgacaagaagaagattgatgcccggaaaagaagtttgaaaagattgtaatgaagttgttcaataattgaacttatatcatttgtggggtaattttgtttattgaaataatagagaaaggggaaatgtggttggggtgtatgggaagatcaaagatgggttcaaatgaataatacttttgttgggactaaatgaatg

SEQ ID NO: 8312 - DNA, 1168 bp, Glycine max
  Clone ID: 700747038_FLI
catacataaatacacatgtttgcttattttaaaaaataataataatttagtccaaccctgtataagagatagctcaaatgattgggtatgtcttcaatacgaaagctccaatggcttcttactacttcctcttgcttgttctcgtcggtgcaactacagcttctggggctgaactatgtgcagacttttactcatgcacctgcccaaacttgttgcctatagtgaagaaaggagtggccaaagccattcagaaagaaccacgcatgggcgcttccttactccgattgcatttccatgactgctttgtaaacggttgtgatgcatctatactgttggatgatacaagcaacttcattggggagcaaacagcagcagctaacaaccaatcagctagagggttcaacgtgattaatgatattaaggccagtgtggagaaagaatgccccagagtagtgtcatgtgctgatattcttgctttgtcagctagagattctgtagtttatttaggaggaccttcttgggaagtggggttggggagaagagattctactacagcaagcagaagtgatgctaataatagcattcctgggcctttcctcagtctaactgctctgataaacaattttgctaatcaaggcctctcagttacagatttggtggctctttcaggggcacatacaattggcctggctgaatgcaaaaatttccgagcacacatctacaatgattccaacgttgatccctcttaccgaaagttcctgcagagcaagtgccccagaagtggaaatgataaaacactcgaaccccttgaccaccaaactccaatccattttgataatctatactttcagaatttggtgagtaagaaggcccttctccattccgatcaggagctgttcaatggcagttctactgacaatctggtaagaaaatatgctaccaatgctgctgcattctttgaagactttgccaagggcatgctcaaaatgagcaacatcaagcctcttacaggaagccagggccagatcagaatcaattgtgggaaagtcaattaaacgttagcaagtgatgatgtataatatgtttttaatataaattttatttccctcctccaaagttatgtcgaataatttgatcctcgaaccgtcaagcaacctggtttatcatc

SEQ ID NO: 8313 - DNA, 3816 bp, Glycine max
  Clone ID: 700747049_FLI
gcgttgtccgtttttttcttcttctctccaaaccagagagcgaccgccggcgagcctcacctcgccggaaattcgctcttcttcgccggaacctccatttttcccgatttcagcttccaattgcgcttgctttttttctttccaccgtctccttcaagaggagcctttccgcgcaataatttttttccttttttcctttttctgagcgcctgagattgcaatgcagagggaaggaggtttctgttgctgcaagaagcgagggatctcttgtttctgaaattcctatgctgtggagcgtttgagagattcgttttttttttgtctctttctctttgttctggatgaggagcgtgctgaattttgtggaggagaagtttttgtgctagcgagggtgtgttgaaattcagaagcagttgtttatggtgtgaattgccatgttcattgtaatcagtcctttctcttgtcgagcgaatgaccttgaatttcccgcatatgtcacgggatagagcctgacgaaaactagcaaggagggaggttttcagtattttctggacaagctgcaggatgccttctgaaatcatggagaagaggggtgcttctgcctcatctcgctttttggatgacatttcctatgtttctgagaagaatactggattacgaaagccaaaatctatccatgaccattttctacaagggaagagtgaaatggcggcatcacctggcatcatttttaatacttcgtcaccccttgaaacaaattcaaaaacaggcttgtcaatttctcagactactctatctcgggaaattacagaagacctacattttggcagagaaacaggcaatacagatatgctgaaggattccaccacagaatcattgaattatcacaagagatcatggtctaatgtgtataggcagtcagcatctggctcatatggtctaattgggagcaagattgtcaccaatgctgcctcacgtgaaagcagtctgttttcaagctcgctgtctgacatgtttagccaaaagttgaggttattggggaatggagtgctgtctggtcaacccattacagttggttcctttcctgaggaagaaccgtacaaatctcttgaagaaattgaggctgaaactattggaaatctccttcctgatgaagatgacctgttttctggagtcactgatgagttaggattcagtactggcactagaatgaatgatgattttgaagattttgatttgttcagcagcagtggaggcatggaattggaaggagatgaacatctaatttccggaaaaagaaccagttgcggggatgaagatcctaattactttggagtttctaaaggaaaaattccttttggtgaaaaatcttctagaacactttttgttagaaacatcaatagcaatgtagaagattccgagctaaaggctctctttgagcaatatggagatatccgaaccatatatactgcctgcaagtatcgtggatttgttatgatttcttattatgatctaagggcagcacaaaatgcaatgaaagcacttcaaaataggtcattgagatctaggaaacttgatatacattattcaattccaaagggcaatgctccagagaaggatattggtcatggtacactgatgatatctgatcttgattcatctgttctgaatgatgaactaaaacagatttttgggttttatggagaaattagagaaatctatgaatatccacaactgaatcatgtcaaatttattgaattttatgatgtccgggctgcagaagcttctcttcgtgcattgaatgggatctgctttgctgggaagcacattaagcttgaacctggtcttcccaagattgcaacatgtatgatgcagcaatcacagaagggaaaagatgaacctgattttggtcatagtttgagtgacaacatatccttaaggcataataaaggagtgtcatctggatttattgcatctggtgtcagcttggaaaatggatataatcagggatttcgttctgaaacacagctacctgcttttatggataactcactgtttcatgtgaattctagcattcacaagaccacaagaggggcatctgctggaaaagtatctggtgtttttgaggcctgtaatgctattgatgcgatgaaatttgcatccatttcgaggttccatcctcattctttacctgaatatcgcgaaagtttagctaatggcagtccttacaacttttcaagtaccattaacatggctgccaatattggaactggatcgacggaatcatctgacagcaggcacattcagggaatgagctcaactgggaacctagcagagtttaatgcagcaggaaatggaaaccgcccccatcatggactttatcatatgtggaatgggtccaacttgcatcagcaacctccttcaaattccatgctttggcagaaaataccatcctttgttaatggtgcttgttctccaggtcttccacagatacccagcttttctagaacaccgcctcatgtgcttagagcatctcatatagaccatcaagtgggatctgcgccggttgttgcagcctcaccctgggatagacaacattctttcttgggagagtctcctgatgcatctggttttagattgggttctgttggaagtccaggctttcatggtagctggcagttgcatcctcctgcttctcacaatatattttctcatgttggtgggaatggtacagaattgacatcaaatggtgggcagggctctcctaagcagttgtcacatgttttacctgggagacttcccatgactttggtttctaaaaacctctattctcgtagaagtgaaccaaacactaacaacaatgctgataaaaaacaatatgtacttgacctaggccgcattttgcgtggggatgacaaccggacaacgctcatgataaaaaatattcccaataagtatacttcaaagatgcttcttgttgccatagatgagcaatgtcgaggaacttatgattttctgtatttgccaattgatttcaagaacaaatgtaatgttggctatgcattcatcaatatgattgatcctggacaaattattccattccaccaggcttttcatgggaaaaaatgggagaaattcaacagtgaaaaggtagcggtactcgcctatgcccgaattcaaggaaaatctgctcttattgctcattttcagaattcaagcctaatgaatgaagataaacgttgccgccccattctcttccatacagatggcccaaatgctggtgatccggagcctttccccttgggtaacaatattagagtgaggcctggaaaaattcgcatgaatggtaatgaggagaatggcagccaagggaatccttcatctttggcaagtggagaagagtctgggaatggaacagaatctacatcgagctcttcaaaaagttctgactgatttagcatcatgatctaacagttcaatgtgcatgtgatgtcatctccaagactgtatatttacattttctttttgttcgatcgagcgagagaggagttggagccggtaggaaagggggctcacaatttttttcctatagaggagccttgcaagagtttttggaagttgaagtacataaccaagaatgaagtaactgattctattgttttccgttattttcctaaaattttgcatggagtactgctaccatcttaccactttagagaatagcttaactgaagcttaaaattttggctagctgtgaacggggacaatgtgacactttgcagtttccttgagataatgtgcatcattgcggttttc

SEQ ID NO: 8314 - DNA, 1473 bp, Glycine max
  Clone ID: 700747183_FLI
gtgaatcccataatcatgaagaaaggaaacttgggacttggtctcaaactctcagttcctgtgtctgatcaatctaattttgccaggttcctgactgaaagtgggacttttaaggatggggatctgcttgtcaacagggatggagttcgaattgtctctcagaatgatgtcgaagctccacctccaatcaagcctacagacaaccagttaactttggcagacatagatgtaatcaaagttgttggaaagggaaatggaggggtagttcaattggtgcaacacaaatggactagtcagttttttgcgttgaaggtaattcagatgaatattgaggagtctatgcgcaagcagattgcacaagagctgaaaattaatcaacaagcacaatgtccttatgttgttgtctgctaccaatcattctatgaaaacggtgtcatatcaatcatcttagagtacatggatggaggttccttagctgatctgctgaagaaagttaaaacaattccagaggattatcttgctgccatctgtaagcaggtgctgaagggtttagtttatctccaccacgaaaagcatattatccacagagacttaaaaccttctaatttgttaataaatcatattggtgaagtaaagattactgactttggtgtgagtgcaattatggaaagtacatctggtcaagcaaatactttcattggaacctacaactatatgtctccagagagaatcaatggaagccagcgaggctacaactacaaaagtgatatatggagtttgggactaatattacttgagtgtgctttgggtcggtttccatatgcaccgcctgatcaaagtgaaacatgggaaagcatttttgagcttattgaaaccattgtcgataaacctcctcctatccctccttctgaacaattttctacagaattttgctcatttatctcagcatgtctacagaaagacccaaaggatcgactgtcagctcaggaattaatggcacatccttttgtcaacatgtatgatgacttggaggtggatctttcagcttacttctcaaatgcaggatctcctcttgcaaccttataaaagtttccctgcttgcaaatgaggagcgtttgcagatgagttgaagaaccagctcctagagtcacttcaaggattctgtatttagttgttgagtgattgagttcaatttgttgagaaactcagatgcaagggtcaagaaattgcaataattgacatttgaagaactttaatgctgaagttaagtatcaggggctacttgcaacaaaatgtttgaaatttatgattgcaacaaaacgtatcactaggatttgcctgagttgctgataatatgatctgatgtacaaattttcatgagatgaaagttttgtcaagctgtcccaaatgaacgttttgagtcacactaggtgaacagttcctcaagttatatttgagactttttatttggtt

SEQ ID NO: 8315 - DNA, 1136 bp, Glycine max
  Clone ID: 700747208_FLI
ccaaaagatgcatcaagcatgaatctagtatgtgggaagaatgtgctgattgacatgagcatacatacagcatatgtaaaggccattcgtgctgcacaacattacatttatatagagaatcaatatttcattgggtcttcatataattggagtcaacataaagaccttggtgctaataatttaattcctatggaaattgcgctgaagattgctgcaaagataagggcaaatgagagatttgcagtgtacattgttattccaatgtggccagagggtgttccaactggtgctgccacccaaagaattctattttggcagcataaaacaatgcaaacgatgtatgagacaatttacaaggctttggttgaagttgggcttgaaacagcattctctccacaagactatttgaactttttttgtcttggcaatagggaggccatagatatgtacgagaatatcactgtgtctggaactcctccgccagcaaatagtccacaagcatttagtagaaacaatcgccgtttcatgatttatgttcattcaaaaggcatgatagttgatgatgaatatgtcatattggggtctgcaaacatcaaccagcgctctatggaaggaacaagggacaccgagattgcaatgggtgcgtaccaacctcatcatacctgggcaagaagccagtatcatcctcgtgggcaaatccatggatataggatgtcactttgggctgaacatacgggtacgattgaagactgcttcttacaaccagagagccttgaatgtgttagtaggattagaacaatgggtgagctgaactggaagcaatttgcatcaaatgatgtaacagaaatgacagggcatctgctcaagtacccggtagaagtcgatcgaaagggtaaggtaagatccctcccgggccacgaagagtttccggatgtgggaggaaagattgtaggatcattcattgccattcaggagaatctaaccatttgattacttttttacattcactttgctggccattaggataggaataggatgaatgtaaatcactggtgtgcatgtaacttaattaaatgataacttttttttgggccaatcatcattcatataaataatcacacacgttaacatttaac

SEQ ID NO: 8316 - DNA, 2402 bp, Glycine max
  Clone ID: 700747276_FLI
cttggttttcttcgccttgctttgttttttctgtccatttggctctcctctttctttcctttgttttttgggggttgaaaagctcaagttttgaggattgaaggagtgttcagctactgggtttgtgttcatttcattgaggtgttcttggcccttcccggatccagcttcatctggttattgttggtataattcttagtttttagtctaaggaagatgtctgagagagaagggtccaacaattaatcccgaatagtagaggtagaagatggaaaatacatgcctatggattcagaaagagggtcgcagaagaaaagattcattgcatggcttattgaatgatagggaaatatcagaggaagaatcttcaaaatcacagttaaagaagttgattaaaagatcaaactctcatcgggcaatagttgtaaatgctatccaatcacaaatcagcaaagttttcttcaaggatttgttctttcgacgtgtccatggactagacaatcggattccaaaacatgtggtgagtgtggatgagaaatacatccgccgctgcctggaattcatacataacactgcattaaaagcagctcaattcaacatacctgagagcttaagagccacaaacatggagactttatcagaaagcttgaatacagtgaaattttttggtggaaatgcatgtggtttgggacattttgtctttgaatgtcctgtggccactgagaatgggagagtagttataagtgctaatgctggggaccagtggaccttaggttcaataatggggagcaagagcatgataaatatattgaatagtactcttcttcagcagtttggtgcttcacatagaactgacaatttgaacaggatgaacttttctgatcctgaaggattggtatgctatgattttatggactctcctagtgatttatgtatctcttcgtcgcataaacttggaaaggaaaaacagttagtgcgaagtcataagtatggctccatttctgttcataaaaggcttgtttccacttctagcaccacctctacttcttctgattggttgtcttcaacatcttccactctatctcagggaatgatccagtgttcttggaagcaagggattcctcattttgttttttctgcagatgatcagaaggaggtctatgtagcaaaattgaagaaggtagactcaacagataataaggctttggactatgtgtatgagtttcacttgaacaagggtggccaaaagggtcgcgagattcctgatggtgattttccatttgttgggaagatgcatgtatcaacgagtttcaccctttgcccgaacaattgtagaataagggagacggagtttacactattccataacatggaaatttctgacaaagaaatgtccacatcagagcattctcacaggaagagcaaggggctgtcgaaggtgtcgaaagtttttaaaactagcccatcatcaaaacgcagaacactctcaaggtttggtggatcaagtgccataaaggagagttgtccgtgggagccatatgctcttggcgggaccaatttattagatactgatgttcctccaaattttgaaatggctaccattgttgtgaaaaaccatcttccttgtaaaaaaccagagaaagtaggagggtggggtttaaaatttcttaacaaatctggtgaaaatcaaatcacgttgccatctgaaagtagtaatcaaaataatggcgactgctcaagtagcacgagcattctaattccggcaggctttcatggtgggccaagaaccagaaatggtgggccatccagtctgatagatagatggaaatctggtggccactgtgactgtggtggttgggatgaggggtgccctctgactgtactagagagaagatctaacaaagctgaggttatgtctaaaatagatacaggagacgggtgcaagtcagttgatttggttattcagggttcaagtgattacggccccaccttgaggatggtaaatgttcacgatggtttatattatattcatttccatccacctctatctgcactacagtctttctccattgctgtggcaataattcatgcacaaagtcctacacttcagcccaatggtgcaaagaagctgtcataactatagttgaatctgaggttatttagccgtcataattctcttactgtattataaaaagtgaagagaatctaggattttatacgtgaattgggttttcattctatgcttagggttgtaattgtaatacagtcagaaatagttttgtttgtcctttctaacaattcatagtttgtagccatctttttctttttcttcattcttttttgttgaagaggatacattgtaaaagggtttgtggaagaaaatttggtaaattgtagcattg

SEQ ID NO: 8317 - DNA, 1098 bp, Glycine max
  Clone ID: 700747284_FLI
attccacaaaaagatgcctccagaagcaattgatcttgcatcccggcttttgcaatactccccaagtctccgatgcactgcgcttgaagcatgtgcacatcctttctttgatgaacttcgagaacccaatgctcgcctgccaaatggtcgtccatttcctcctttatttaacttcaagcaggaagtaagtccttaaattatctttcttcatcaaatttgtgctttggcagtaaactatttgtacagaatttcaaaattaggaataaaattgatactgtttttaaaaaaggtttaaataagtctagaggcctgagaaaggtccccagatccattttcttagctttatatctgtctggttgattttaagtgtctgtctttgtgtgtttgtctatttgagtacacaaagcaatgcattgaaaaataatatacatgcactgtgttcctttttatgatccttataaacatcctagctaaaaatcataaatgatggactactatattgtaattctctctgtttccagttatccgaagcttctccagagcttgtgaacaaagtgatacctgaccacatgaagcggcaaatagggctgcaatttgttcgtccggcaggatcatgatgataagcttagagggggcatagtgtatactagttgataagttaaacaaaagtggcgccattatttttgtctaatttagcatgttctgtggcctgaccagtgtagtttcaagctgaacctggactgagacttggggtgctggatggctgcagttgatccatcaaaatatgtataccttttgattctctgttgctactgatggatcttatttcctcaggcaaaatagcctttgtttattgtaaacgtctacatgtcatatagtagttaagtatacttggcctgaaatggtcagaacttagattgcttctgtaaggggaaaaccaaagccttagctggaaggaggggagggtccacacagagttttgatgcggggttgttgggttcggtttcctcttattaatgtaatgtgcctgatttgtaatgttgttgaccagttcctttccttgtgaaatgtaattgtgctatcttatctgttttcttt

SEQ ID NO: 8318 - DNA, 453 bp, Glycine max
  Clone ID: 700747359_FLI
ggtgtatagacaatgtcgtgttgctgatcattccattggcccattggaaattcgtgttgtgaggaatgggacctttgaggagcttatggattatgcaatctcaagaggtgcgtccataaatcaatataaggtgccaagatgtgtgaatttcacacccataatggagttattggactctagggttgtgtctgtgcattttagccaggaattaccacattggacccctgaaaggaggaggtgaggttcttcgtatgtggcttattgggcttgagtcaaacatgtagatgtagattttatttgttgttttttttgctaaggttttgtattttttgggtagtgtgtaggactcatggtgagtctacatggagatgttgaattaggatgtctcttggttggattaattatgtatttcggttcgattaacttgtgtaaaagatgtgacttttttttttt

SEQ ID NO: 8319 - DNA, 1670 bp, Glycine max
  Clone ID: 700747413_FLI
caggatggtcaagtcatgttgcgttatgtgcttgtgtttgatcttacttcacattttcctgcgctttgtgccaatacagtcagcacctgaaagtgccattgtgacacagattcctggcttcagtggcactctaccttccaagcactatgctgggtatgtgacggtggataagagtcatgggaggaacttgtactactattttgttgaatcagagggtaaaccttccgaggaccctgtggttctgtggcttaatgggggacctggctgctctagcttcgatggattcatatatgagcatggtccttttaattttgaggcagcaaagacaagggggggtcttcccacactgcacctcaatccatacagctggtcaaaggtttccagtgttatatatttggattctcctgctggtgtggggttttcatactcagagaataaaactgattacataactggagacataaagactgccactgattctcatgcctttctccttaagtggtttgaactataccccgagttcctttccaacccgttcttcattgctggagagtcatatgcaggagtttatgtgcctactctcgcttctgaagtagtgaaaggaattgatgccggggtggagcccaaactgaatttcaagggttacatggttggaaatggtgtcacagatgaacaaattgatggcaatgctcttgttccatttgtacatgggatgggacttatcccagatgaactgtttgaggaggttaaccgtgagtgcaatgggaatttttatgatccaacaagtgctaattgttctagcaagctttcaaaagttgatgagttggttgatgagataaacatatataacattctagaaccatgctatcacggcacagaagcagagaagattacagaatcctatattaggatgccatctaccttccggaagttgggtgagaccgaaagaccttttcctgtgaggaaaagaatgttcggtcgtgcttggcccctaagagctcctgtgagagatggaattgtaccaacttggccacaactgatgaatagtaaatctgctccaccatgcacggacgatgaggttgcaaattcatggttaaacaatgaagcagtcaggacagcaattcatactgcacagaaaagtgtggtcagtagttgggatttatgcactgacagaatttacttcgatcatgatgctgggagcatgatcaagtaccacaagaacttaacttccaaaggttatcgtgcacttatattcagcggcgatcatgacatgtgtgttccatacacggggagtcaagtgtggacgagatcagttggatacaagattgttgatgaatggaggccttggtcatccaatggtcaagttgctgggtatacacaaggatacgacaaaaatcttacttttctgaccgtaaagggatctgggcatactgttccggaatataaaccacgagaggcattggacttttacaaacgctttctcgctggattgccaatatgatatagaggaaaagagaagatggagtaacgctgcttcttattttgtttgtactttgttaataataatgatttaaggatgtatgaagacacattttatatttgtgttctatgtttaccttattaatttattaccatattaatattaaactagatgtcaacctagtttgcac

SEQ ID NO: 8320 - DNA, 1708 bp, Glycine max
  Clone ID: 700747437_FLI
atttcccatataagactcataaccgttcgttcgttcgttcgttccccacttgcttttcattttttttctcccttttcgctaacctcaaagagagttcagtatttatacaaataaaagttttttctttttttatttctggttttcgttttggaatggctgggatttgctgtggagttgttggagaagccgccgagacttcttctcccatcgaacccacctcacgcccttccgcacgccggagtttggaccttttgcccttgaaatacatagctgctgacgtgtcagtcccgccgctggagaacagccggaagcgccagaggctggataggcgcgcttctccggcaagggagtgcgataacgcggttcatagttccaaatcgaaggtagttgaggttgttccgaattattcttcgaagagtccaacgttggactccacaagtccaacagttgtcgaggagtatccgaggtatggggtaacgtccgtttgtggaaggaggagggacatggaagacgccgtttcggtccatccatcgttttgccaagaaactttatctcatgataaaaaattagggtttcatttcttcgctgttttcgacggccacggttgctcacatgttgcgacgatgtgcaaggagaggttacacgagatagtgaaggaagaggttcaccaagcgaaggagaatttggaatgggaatcaacgatgaaaaagtgtttcgcgcgcatggacgaagaggttttaaggtggagtcagaacaacgagactccaagttgcaggtgcgagcttcagaccccgcactgcgacgctgtgggctccaccgcagttgtggccgtcgtcacgccggagaaaatcatcgtggcaaactgcggagactcacgcgccgtgctttgccgcaacaacgtagccgtcccactctccgacgatcacaagccggaccgacccgacgagttgcttcggatccaagtagcgggagggcgcgtgatatattgggacggacctagagtgcttggggtgttggctatgtccagagccataggggacaattatctgaagccgtatgtaatttcggaaccggaggtaacggtaactgagcgtagtgaggaggatgagtgtttgatattagggagtgatgggctatgggacacagtgcaaaacgacatcgcatgcaaagtggtgcggatgtgtctgaacgcgcagaagccgccatcgccgccctcgtctccgaggagggagatggcggtggactgctccgacaaggcttgctccaacgcctccattctgctgaccaaattggcgttggttaggcagagttccgacaatgtgagcgtggtggtggttgatttgaggagaacctaaaatgggaactgtgcgtggacacccgatgttgtggaattttgtttttgacaaaagaaaggggaagaaaatgcagggtgttgcgtggtgctttactgatttcttgtgattgtaattaaaatagtacttgtagataggtattttaatcaacaggggtgtgtgaaatttgtaattgtcagaaaaattatcaacaaattatgggaaattttaagagtagtgaaaacaattagtgtgtcaaccaagaggtaaatcagcctcctgaaacaccgttgtttttgttgtaattagatatataattgtaattgaaacccagcttggatctataaacgcgccaattttgttgtttggtttgcatt

SEQ ID NO: 8321 - DNA, 1532 bp, Glycine max
  Clone ID: 700747455_FLI
atcttatcctatccccacaattaacgatcgcttctgatggctctgttctgtattcatgagatgtgacgtgtatccgacacgacatggtgaactcccttttttttctcctctgactccgaaacatttccgggtagatcgggtatcatggggcaggacacaaagaactacaacaacatcgcatcatctcctctgttggaacctctgccttcgtcgaattcgaaacgagcttcgaagcttcaaacgttgggaaacatcatcgtcaccgtggtcggaactggggttctgggattgcccttcgcttttcggatcgctggatgggtcgctggatcgctcggggttgccatcgtcggcatatccacctactattgcatgctactgcttgttatgtgcagagaaaaattggcatcagaagaaccattaggggaatcaaacacatatggagacttgggttataggtccttcggaacccctggtcggtatttgacagaagttataattgtggtagcacaatgtgcagggtctgttgcttattttgtttttattggacaaaacctttattctgtattccaaggccagggactatcaatggcctcctacatatttatgttggtacctgttgagattggattgtcttggatagggagcttatctgctttggctcctttcagcatttttgctgatgtgtgcaatgttgtagccatgggaattgtggtgaaggaagatatacaacgggccttcgggaagggattttcatttgggcaaaggacaatgatcacatccaacatcggggggttgccgtttgcagcaggcatggctgttttttgttttgaggggtttggaatgacactggccttagagaattctatgcaggatagacgaaagttcccaatattgctggctcagacttttggtgggataacacttgtgtacattctttttgggttttgtggctacatggcttttggtgaagaaactagagacattgtgaccctcaatctccctaggaattggtcatctcttgcagtacaggtaggattatgtgtggggcttgcattcacactcccaatcatgttacacccaattaatgagattttcgaagggaaactcaaaatcatcctcagaaacaataatgattcaacaggactagaaaatatttgcatgtacatcagccgagcgattgtggtggttggactggcagtcttagcttcatttgtgccagaatttggtgtatatgcctcatttgtggggagtaccttatgtgcaatgctctcatttgttatgccagccacatttcacctaaagttatttggctcttccctacccatctggcaaaaagccttggattctattgtattattgtctggattatttttcgcattttatggcacttacaacacaatagttggagtttgatgcatctagcatgtattttacttagttgaaggcttgaagcttttatacaactcaatttgatatttctacataagtggttacagcaaaatgctaatgaaagcctgctcaattgtttgatt

SEQ ID NO: 8322 - DNA, 917 bp, Glycine max
  Clone ID: 700747479_FLI
gcaaatacgcatataaccacccgtgtcatgggaacttttgggtatatggcccctgaatatgcgtcaagtggcaaattgactgagaagtccgatgtatattcttttggagttgtgcttttggaactaattactggacggaagccagtagatgcatctcaacctttgggagatgagagcttagttgaatgggctcgacctttactgagtcatgcactcgacactgaggaattcgatagtttggcagatccaaggctagaaaagaattatgttgagagtgaattgtattgcatgattgaagttgctgctgcttgtgtgcggcattcagctgcaaagagacctcgcatgggacaggttgttagagctttcgatagcttaggaggttctgatctaactaatggaatgagacttggggaaagccaggtgtttgactctgcacagcaatctgaagaaataagattatttcggaggatggcatttggtagtcaaaattatagcacagatttctttagccgtgctagtttgaatccatgaaaggccactgtacatattggaagagcttgttttggaccaaagaacttgtgaagctaagccaaggagaggccctggttgagttttgttggttgcagatatggctaaggtgcactgttggttttgattttggaatttgactgcatcaggttcagatcctcattcttgtgccggaatttcattattcttttcattagctggttttttggcagcaattttgcttttgtaattagaatttgtaaagttaatttttacactcacgatgacaaagattaacatattagttgatttgttatgtaatgatagaataggatgtgtgactccttttttcatgtcttccacattttcttatgaatttctaatgagagagcgagagcaagcaagaagct

SEQ ID NO: 8323 - DNA, 1514 bp, Glycine max
  Clone ID: 700747484_FLI
gccaggcaagccccactcaaccaccacacctctcctcgttcacgctacccctttctgctcttcttctacctttcaagttttaaaagtataaagatggcagagacattcctatttacctcagagtcggtgaacgagggacaccctgacaagctctgcgaccaaatctccgatgctgtcctcgacgcttgcctcgagcaggacccagacagcaaagttgcctgcgaaacatgcaccaaaaccaacttggtcatggtcttcggagaaatcacgaccaaggccaacgttgactacgagaagatagtgcgtgacacctgcaggaacatcggcttcgtctcaaatgatgtgggactggatgccgacaactgcaaggtcctcgtcaacattgagcagcagagccctgatattgctcagggtgtacacggccaccttaccaaaaaacctgaagaaattggtgctggtgaccagggtcacatgtttggctatgccactgatgaaacccctgaattgatgccattgagccatgttcttgcaacaaaactcggtgctcgtctcaccgaggttcgcaagaacggtacctgcccttggctgaggcctgatgggaagacccaagtgaccgttgagtattacaatgacaatggtgccagggttcctattcgtgtacacaccgtgctaatctccacccaacacgacgagactgtcaccaatgacgaaattgctgctgacctcaaagagcatgtgatcaagcctgtgatcccagagaagtaccttgatgagaagaccattttccacttgaacccttcaggccgttttgtcattggtggccctcatggcgatgctggtctcaccggccgcaagatcattatcgatacttatggaggatggggtgctcatggtggtggtgctttctccgggaaggaccctaccaaggttgataggagtggtgcttacattgtgagacaggctgctaagagcattgtggcaagtggacttgccagaaggtgcattgtgcaagtgtcttatgccattggtgtgcctgagcctttgtctgtgtttgttgacacctatggcactgggaagatccatgataaggagattctcaacattgtgaaggaaaactttgatttcaggcctggtatgatctccatcaaccttgatctcaagaggggtggaaataacaggtttttgaagactgctgcctatggacactttggaagagaagaccctgacttcacatgggaagtggtcaaacccctcaagtgggagaaggcctaagtaattcattccactgctctatgctggaagttttttgagcgttgcccttataatatgtctaatatccataactttccacgtctcttactctgtgtgtttctctcctcttcctcctattttgttatttgtatgttcttttgtaattttttacgtgatcaactaaaaacatgtactctctgtttgtatgtatgccctaccaatgtgtctcttaatatcaatatcaaaaagagagtgttcaagtt

SEQ ID NO: 8324 - DNA, 1411 bp, Glycine max
  Clone ID: 700747514_FLI
ggccaaacagagcaaaaacccaacacaccacactcttgcaatcaatcaatggcggaaccttcctcctcgaagcccgccgtccctctcctgaaggacgagctggacatcgtgatcccgacgatccgcaacctcgacttcctcgagatgtggcggcccttcttcgagccctatcacctcatcatcgtgcaggacggagaccccaacaggaccatcaaagttcccgatgggttcgattacgaactctacaaccgcaacgacatcaacaggatcttgggtcccaaggcctcctgcatctcgtttaaggattctgcttgtcgctgctttgggtacatggtgtctaagaagaagtacatctacaccatcgacgacgactgcttcgttgctaaagatccttctggaaaggacatcaatgcacttgagcagcacattaagaatctcctatgtccatccacaccatttttcttcaacaccctttatgatccttacagagctggtgctgattttgtccgtggatacccttttagtcttcgtgaaggtgccccaactgctgtttctcatggcctgtggcttaacatacctgattatgatgctccaacacagcttgtcaaacccctcgagaggaacaccaggtatgttgatgctgttcttaccattcccaaaggaacattgttccccatgtgtggtatgaatctggcattcgatcgtcagctgattggacctgcaatgtattttggactcatgggtgatggtcaacctataggacgatacgatgatatgtgggctggatggtgtgttaaggttatctgtgaccatttgggcttgggagtgaagactggccttccatacatctggcacagcaaagcaagcaatccttttgtgaatctcaaaaaggagtacaagggcattttctggcaagaagagatcattccattcttccaaagtgccaccattccaaaagaatgcacttctgtccaaaaatgctacattgaactctccaagcaagtcaaagagaagcttggggctgttgatccctacttcaccaagcttgcagatgccatggtgacttggattgaagcttgggatgagcttaacagcaccacatccgaagaagcttcttccaagtcagccaatggtgctgctgctgctaccaagtgaaccttttatggttgcggactttagttttcaaatcagagtaattttgttatcatattttttttataatgcaagattatagaccaatttattgattttgatatcatcattattactatttatattataaatatcattaatgtatttcaggataatttttttcgatattgtgaatttgtgattggaaccttagaaatttaattctgcttagtggatgagttttcctgtttatactaataatttatttttctattttagt

SEQ ID NO: 8325 - DNA, 1461 bp, Glycine max
  Clone ID: 700747550_FLI
ggccaggcaagccccactcaaccaccacacctctcctcgttcacgctacccctttctgctcttcttctacctttcaagttttaaaagtataaagatggcagagacattcctatttacctcagagtcggtgaacgagggacaccctgacaagctctgcgaccaaatctccgatgctgtcctcgacgcttgcctcgagcaggacccagacagcaaagttgcctgcgaaacatgcaccaaaaccaacttggtcatggtcttcggagaaatcacgaccaaggccaacgttgactacgagaagatagtgcgtgacacctgcaggaacatcggcttcgtctcaaatgatgtgggactggatgccgacaactgcaaggtcctcgtcaacattgagcagcagagccctgatattgctcagggtgtacacggccaccttaccaaaaaacctgaagaaattggtgctggtgaccagggtcacatgtttggctatgccactgatgaaacccctgaattgatgccattgagccatgttcttgcaacaaaactcggtgctcgtctcaccgaggttcgcaagaacggtacctgcccttggctgaggcctgatgggaagacccaagtgaccgttgagtattacaatgacaatggtgccagggttcctattcgtgtacacaccgtgctaatctccacccaacacgacgagactgtcaccaatgacgaaattgctgctgacctcaaagagcatgtgatcaagcctgtgatcccagagaagtaccttgatgagaagaccattttccacttgaacccttcaggccgttttgtcattggtggccctcatggcgatgctggtctcaccggccgcaagatcattatcgatacttatggaggatggggtgctcatggtggtggtgctttctccgggaaggaccctaccaaggttgataggagtggtgcttacattgtgagacaggctgctaagagcattgtggcaagtggacttgccagaaggtgcattgtgcaagtgtcttatgccattggtgtgcctgagcctttgtctgtgtttgttgacacctatggcactgggaagatccatgataaggagattctcaacattgtgaaggaaaactttgatttcaggcctggtatgatctccatcaaccttgatctcaagaggggtggaaataacaggtttttgaagactgctgcctatggacactttggaagagaagaccctgacttcacatgggaagtggtcaaacccctcaagtgggagaaggcctaagtaattcattccactgctctatgctggaagttttttgagcgttgcccttataatatgtctaatatccataactttccacgtctcttactctgtgtgtttctctcctcttcctcctattttgttatttgtatgttcttttgtaattttttacgtgatcaactaaaaacatgtactctctgtttgtatgt

SEQ ID NO: 8326 - DNA, 2162 bp, Glycine max
  Clone ID: 700747557_FLI
caagcatggatagctcgtgttcgtgagatggatgtttttcaatcaacaacaaatcaaacattacaagctgaattgagagagcgcacagagcaatataatcagctctggatgggttttcagagacagtttgcagaaatggaaagagttcatttgcatgctattcagcaactacagcttgaactggctgatgcaagagagcggagtggaactttcaatgatgattcaagaatgtcccaaattaattcaaaaaataatgtaactcagtttggacaggaaaatggaagccaatttgacttgaatggaagcaatgcttcgggtggaaataatggtctccttccaagtgaaagcactgctaatgatggaccatttgtatctacaggcaatgcatcaatccagactgaacatgttgctggtgttcctattgctccatcatctctaattgtcccaccttcatacctcccacacagccaagtaactgcattgcatccatttgttatgcatcaacaaggagttcccaattcagttgcatcacatgttcctcaatcacatgttgggcattttcacccagtgccgtcaatgtcacctgtgcagcagtggcaaaatcatcagtctgtgtcagagggttcacaggtacctgtacaggaacattcttcaccatctcaaactgatcaacatttgatgagatcagatgctaagtttagctatgaaatgtctgttaatgggaaaactcttcatagagactatctggatgctcacatccagcaaggtgaggaggcacaaaccatgattttttcagctaccagtgaaacacaggtttctcagtcagtggataagggtcaacttgttgcttcccatcaagatcaaagcatgcaacaaatttcttcacagttctctgatgctttacaattgaactcttttgaaccaaatggtgaaatcaaggagcagaattctgtgacattatctaataatggacctgacgaccaagttttattggctgagcaagcgagttctgctgcaattgcatcatctgtcacaagccattcagttaatcataatgaaatgattcagaacaattctactgattctgttttgtctgaagtgttcacctcttctgcgttgacagcttcaacaattgcaaagacatcagagattactctcctcgatggaaaatcattattagcttgtattgttcgcactattccagctggtggccgaattcgaattagttcaacgctccctaataggctgggcaagatgcttgcacctctacattggcacgattacaaaaggaagtatgggaagctggatgattttgtggctagccatcctgaattattcttgattgagggtgactatattcagctccgtgaaggtgcacagaaaatggttgctgcaactgcagcagttgccaaagttgctgctgctgctgctgctgcatcaactccttattcttcatacatgtccactgtggctgttacaccaatggctcaatctcatcgcatgaaaaaggctccttcaaatctgggggatgatcctttaaaaatgtcagttatgcagcgtcagcaaactaatggtgcactcagtgttgctggtggtctttcaaatgtcaaaattttgagtaaatctaaggtttctcgggaaatggacggccctgaaagtagggttgtgcagtcttctgtacaattacctgttggcaatggtggaagcattgacaaatcaagtatgagcagtgcccaaatctcaggctcagcaaatggaaggctagtctcaagctttgcttctaaacagcagaccagggcaactggtgctgtgtacccttctcaaagataggaagatggaagggcgtgttagattatcctgtctcaccaggatgcggatgaaaacatacaagattatttatcgggtttgtgggagaatgttttttgaagcattgacggagtaatcttgtgccctgggcaaaatgtgattttaagttgccggtgctatctccatctccagtttctgtagtagtttatttctcccagctgttacaattcagtgtgctttcattaatgtgggcctcttgctgtggtattcttgctgcatacattgcatctgataaactgcgatttttttatgaatgcttgaaagattaatcagcatggttaaccttttcagtttgc

SEQ ID NO: 8327 - DNA, 2155 bp, Glycine max
  Clone ID: 700747567_FLI
atctccataagcattcattttcatcaactgctaagctaactgaactctctctcgttgttcccttggcctctcgctctataaatacacatcgcatcattctctcacttgcacattgaaatctgaaccttccggatttcgttttgctttgttcaggtagccagccagtcatggtgctcttcaatgtttcacgcgtagagaccactcccttcgatggccagaagcctggaacctctggtctccgcaagaaggtgaaagtgttcgtgcaacctcattacctccataactttgttcagtcaacattcaatgcattaactgtggaaaaagttagaggtgcaacgctagttgtatctggtgatggtcgttatttttcaaaggaagctattcagattataactaaaatgtcagcagcaaatggagtaagacgtgtttggattggtcaaaatggattgctttcaactcctgcagtatctgctgttatacgtgaaagagttggagctgatggatccagggcaacaggtgcatttatactgacagcaagtcacaatcctggtggccctcatgaggattttggaattaaatataatatggaaaacggtggacctgcaccagagggaattactgacaagatatatgaaaacacaacaacaattaatgagtacttgattgcatcagatctgccagatgtggatatcaccacaacaggtgttacaagctttacaggccctgaaggaccatttgatgttgaggtttttgattcagcaagtgattatataaaattgatgaagtcaatttttgattttgaatctatcaggaaactgctgtcatctcctaaattcacattctgttatgatgcactacatggggttggtggagcatatgcaaagagtatatttgtggatgagcttggggcacaagaaagctctttactgaactgtacaccaaaggaagactttggaggaggacacccagaccccaatttgacatatgcaaaagagttggttgctcgtatgggattgggcaaatccgaaccacaagatgatcccccagagtttggtgctgcttctgatggtgatgcagatcgcaacatgatacttggtaaaaggttttttgtcactccttcagattccgtggccattatcgctgcaaatgccgttgaagctataccatacttttctgctggtttaaagggtgttgccaggagcatgccaacctctgctgccctggatgttgtagccaaacatctgaatttgaaattttttgaggtccccacgggttggaagttctttggtaatttaatggatgctggattatgttcagtctgtggtgaagaaagttttgggactggttctgaccatattcgtgagaaagatggaatctgggcagttttggcctggctatctatacttgcatataaaaataaagataaacttgaagacaagcttgtcactgttgaagacatagttcgccagcattgggctacttatgggcgccattattatactcgatatgactatgaaaatgtggatgcaggtgcagcaaaggaactgatggcatatttggtcaagctgcagtcctcactttcagaagtcaatcagattattaaggggataaggtcagatgtttcgaatgttgttcacggtgatgaatttgagtacaatgatcctgtggatggttccatctcatcacatcagggaatccgatatttgtttgaggatggatcacgattgattttccgcctatctggaactggatcagaaggtgcaacaattcgactatacattgagcaatatgagaaggatccatcaaagattgggagactttcaaatgaagcccttgctcctcttgtggaagttgcattgaaactttcgaagatggaagaattcactggtcgatccgctccaacagtcattacatgaacacatacaggtggaaggtggttagatcctgaagtttctcccagtcatttcttctttgttcagtttcttacggatggccgaacactagtgttggttgtttgcagcctttgctatgggcacttgagtggaatttgatcagttactttatcaaaattttgatgtgctgaataagttgcaactgccgagtgctaattctattatatagtcttaatatgatggctcctcttgtattggcgttt

SEQ ID NO: 8328 - DNA, 1274 bp, Glycine max
  Clone ID: 700747614_FLI
ctccgtctctgcaattacgatggcgcccagggacaagactagtgccgttaagcctagcggtaacgccggggtgaaggacctgcattttcgtggagtcaggaagagaccgtgggggaggttcgccgccgagatcagagatcccgccaagaagacccgcgtctggctcggaaccttcgacaccgcggaggaggcggcccgtgcctacgacgccgccgcgcgggagtttcgcggccctaaggcgaagacaaacttccctctcccttcggaaaattttaagaacgcgagccctagccaaagcagcacggtggagtcctccagccgcgaccgcgacgtcgccgccgattcctctccgctcgacctcaacctcgcccccgtcgccgtctcctccgctcgattccccttccggaaccagttcccggttttccccggcgcggtgccggcggcgaaccaggttatgtacttcgacgccgtcctacgcgccggcatggccggtccacgtggcttcgcgtttggctacaatcctcatcccgtcgcggcgagtgagtaccacgcgacgacgagcgactcggactcgtcctccgttatcgatctgaatcataacgaaggcgttgttaaggggaacggttctagaatgttcgatctcgaccttaaccatcctcctccacatgagatcgcttgatccagaatctgactcatgccttgagtttttctttttctaattttgttttttaaagtagagaaagtagcagcgttcgataaggaaggaagggaagggaaggtaaagaaatactatgtgaatacgtagtcggtatgattgtctctatttttttgcgacagaggaaccaccagtttcatgctgttttttcttaaatcacgaagcgctcatccggtttttctttcgttttgattgatattttactacggtgtaatgttttttggttgcagccataatttggttcaatgaaattaacacggaaagtttgaattattttgattgtgatatacattttcaattaaatacgaatggggaaggaaagaaaagctgtgggtgaagcgtacttggtagtaatggtcgttgttgttggcgttgatttgattgacaggtggctcttgttacctctcccttcaaggtgactccaacgtccaatggtgcgtgggctatgtaactacacgactggtggcacagtgccacattctcaattcgctcccatcttcatgatgaaaatgaatttcatggtaaaaaattaactaaagtatgcaaaagtcatttaatt

SEQ ID NO: 8329 - DNA, 1867 bp, Glycine max
  Clone ID: 700747645_FLI
ctgggtcacgaggttatcattggatgtgggattctcgcctttttaactacggaagctgggaagttctaaggtatctactctcgaattcaagatggtggctggatgaatacaagtttgatggatttcgatttgatggtgttacatcaatgatgtacactcatcatggattggaggtagcatttactggaaattacaatgagtattttggttttgcaactgatgttgatgctgtgatttacctgatgctgactaatgatgtcattcatgggctgttccctgaggctgttacaattggtgaagatgtgagtggaatgccaacattctgccttcctacgcaagatggtggggttggctttgattatcgcctgcacatggccattgcagacaagtggattgagattctcaagaagaatgatgaagactggaaaatgggtgatattgtccacacattaacaaacagaaggtggctggaaaaatgtgtagcttatgctgaaagtcatgaccaggccttggttggtgacaagacaattgcattttggttgatggacaaggatatgtatgacttcatggctttagacagaccatccacacctattatagatcgtggtatagcgttgcacaaaatgattaggcttattaccatgggtcttggtggtgaagggtatttaaattttatggggaatgaatttggccatcctgagtggattgattttccaaggggtgatcaacatcttcctactggcgtaatagttccagggaataacaacagttttgataaatgcaggcgtagatttgacttgggtgatgcggactatctaagatatcgagggatgcaagaatttgatcaggccatgcagcatctagaagaaaagtttggtttcatgactgctgagcaccaatatatttcacggaaaaatgaaggtgacaaaattatagtcttcgaaaggggcaacctcatctttgtcttcaattttcattggaacaacagctattcagattacagagttggctgttcaacccctgggaaatataagattgtcttggattcagatgatgccttgttcggtggcttcagtcggctcaatcacactgctgagtacttcacctcagaaggatggtatgatgaccgacctcgatcctttcttatctatgcaccttctagaacagcagtggtttatgcccttgcagatgatgttgaacctaccctagcagatgaagctgaacctgccctagcagatgaagctgaaccagagccagttgatccttgatgacaattttctgggatgctgaaatgttacaagtgcacaacggcatggatgcagtaaatccctaatcaaactagccaaccaacgtctggtggattaaccgacactgaaacaacaaagaagctgaattgaagtggaataaataaagcgctagttcatctttagttgagagcaggagactagcctcgaaatcttgtacatgtgccttgctaggtaataagttgtgatatcacacccatcttcctgtttttactttttaggatttaacgtcttgacatgtataagttgcgtcacgattgacaaatgtgaatcaacaaagctatggtccgcgaacctgagactcaatgtacctatgcacgtatcaatcttcataaagtgcttactctgtttaagagttggaaggattttaccgtgggaaattttgcaggaggcttttatagatgtttcctttagattatttttatttattggttaactgtttcctttatatttaaaagttgagttgtagcaattcaaagtattctatgcagtgtaataaagacaatgtacacggtcataaaaaaaattaaataattgcctactgtatctattttcttttaaat

SEQ ID NO: 8330 - DNA, 2227 bp, Glycine max
  Clone ID: 700747701_FLI
ggctgcagaggatttgatttatcagcttcgtcaagaggaagatggaagaaaacaaaataagaaaggaacaactaagaagactataacaaaaagggctttgaaagcatctggtcagtcagatctttctggaaatgcctcaaaagaccttctcctaatgcacaaacttggtgaaaccatttgcccaatgaaggaagattttatcatggttcatttgcagcatgcatgcactcattgctgtattctaatggtgtctggcaaccgttgggtttgcaggcaatgcaagaattttcagatctgtgacaagtgttatgaagcagaactaaagcgcgaagagagagaacagcatcctattaaccagagggaaaaacacaccctttatcctgtagaaattactgatgtacctgccgatacgaaggacaaagacgagattcttgagagtgaattctttgacactaggcaggcatttctgagtctctgccagggaaatcattatcagtatgatactctaaggcgggccaagcattcctctatgatgattttgtatcatcttcataatccaactgcccctgcatttgttacaacatgtaatatttgtcgtcttgacatagaaacaggccaaggttggcgttgtgaagtttgccctgaatatgatgtgtgcaatgcttgttatcaaaaggaccgtggcgctgatcatcctcataaattgacaaatcacccatcaatggcagatcgtgatgctcagaacaaggaagcaaggcaacttcgagtattacagttacgaaaaatgcttgatcttcttgtgcatgcatctcaatgtcgttctgcccactgccaatatccaaattgtcgcaaggtgaaggggcttttccgtcatgggatgcattgcaaaatccgtgcctctggaggttgtgttctatgcaagaaaatgtggtatttgcttcaactccatgctcgtgcttgcaaggaatctgaatgccatgtaccacgttgcagagatttaaaagaacacttaaggaggttgcagcaacagtctgattcaagacgaagagctgctgtaatggagatgatgaggcagagagctgcagaagttgccaacagttctggatgagcattttgatgtttggatatgtacatatgggatgttttggaagaatgctcctgacaaatatagacattagctttgcccgttctccagttagacactgctggaaactagggcttgacatggatccggatcaatccggtgaatctgaatcaattcaaactcaaaattccagattggatcggattgaaaaattgcaattctgatttgtttggattgcatcacggatttcactttgaaaatcctatctaatcctatccatcaaattgcttagtatttttttaaatatttgtttaatctttagagtttgggttttttagcccagcccaatttaattgtattttttttcacttggattgcaaacttaaactaggaaaaaatccattggatccaaatatgttaaaattgattggatcggattaaaaaatgccacagaccaacctaccaggttagttgctcggatgactaactcatacccgcgttacctaaacgtcagtagcatgttggcgtggagctggcgatccacggcaaaaaggcttgggggctctatgaatttcatttcccggcccgggaaattatcagtctgggctaatcgctaagagctcatcccgagagaactcgggacgggataactcgaagtacggcatgaagtaagaagttagccaagttctgtgatcctcgagaatgaactatcagacctaaagcctagactagaaggaaagaactgatctggtcctaacagacccgtgtccacccctgctggaaaccgtattttgaccagctgtgcgtggatggtttctatatgcatgacctgattgttaccatgaggatcatagagttcaaccaactagtgatgcctcaactaactaatcaggtccaactgggtataacggcggtggtgtcttcgtatgctagtcgatttgatgattctttgatatagtcagcttctcgtgttatctctaatggtcattgtgtggcaatttactatagttctaatttgtcaaaagtatattactttctttttttcgcgggggcactgctaagtcgcattttgtcctcgtcttctttaatgttgacactttctgtagtacctttttatttaaagattaagtaattagtagtttc

SEQ ID NO: 8331 - DNA, 842 bp, Glycine max
  Clone ID: 700747715_FLI
gttgttacgaggactcaaatatgtacactcagcaaatgttctgcaccgtgatctaaagcctagcaacttgctactgaatgccaactgtgatcttaagattgcagactttggtctcgctagaactacatctgagactgatttcatgactgagtatgtggttactcggtggtaccgagctccagagttacttcttaattgctcagaatatactgccgccattgatatttggtctgttggttgcatccttggtgaaatcataacaagacaacccctatttctggggaaagattatgttcatcagctcaggctgattacggagctcataggctcacctgatgacactagccttggatttctacgaagtgataatgctcgtagatatgtgagacagcttccacaatatccaaggcaacaatttgctgctagatttccaagtatgtctcctggtgctgttgatttgttagagaagatgcttgtctttgatccaaataggcgcatcacagttgaagaagctctgtgtcacccatacttggctcctcttcatgatattaatgaggaacctgcttgcgttagacctttcagttttgattttgagcaaccatctttcactgaagaagatatcaaggaactcatctggagagaatctgtgttattcaatcctgatccacctatttattgagatttggaatttactatcatatgtgcatagtgaaatactttttgactggattacaacactaccgaggagttgttagctctctacagaagtatttaacatattggatatactgagattcttttggtaaaaattatttgaaatttaatgaggttgtcttccattt

SEQ ID NO: 8332 - DNA, 1338 bp, Glycine max
  Clone ID: 700747718_FLI
cttcaagggcaagtaccatgatgagcttatcgccaatgctgcgtacattggcactcctggaaagggtattcttgctgctgatgagtcaacagggacaattggcaagcgtttggccagcatcagtgtagagaacattgaatccaacaggcgagctcttagggagctgcttttcactgctcctggtgttcttcaatatctcagtggtgtcatcctctttgaggaaaccctctaccagagcacagctgcaggcaagccctttgtgaatgtcttgaaggaagctggtgtgcttcctggcatcaaggttgacaagggcacagtcgagcttgctggaactaatggagaaaccaccactcagggtctagatggccttggtcagcgttgtgccaagtactacgaagctggtgcacgttttgccaaatggcgtgcagtgctgaagattggtcccaacgagccatctgagctgtctatccatgagaacgcctatggcttggctagatacgctgtcatatgccaggagaatggcctggttcccattgttgagcctgagatccttgttgatggacctcatgacattcacaagtgtgccgccgtcaccgagcgtgtccttgcagcatgctacaaggctttgaatgatcaccatgtccttcttgagggtaccctattgaagccaaacatggtcacccctggatcccaatctgctaaggtttcccctcaggtggttgccgagcacactgtcagagcccttcagagaaccgtgcctgctgcagttcctgctgtcgttttcttgtctggtggccagagtgaggaggaggcatccgtcaacctcaacgccattaaccaggtcaatgggaagaagccatggtcactctctttctcctttggaagggcacttcaacagagcacccttaaggcatggggcggaaaagaagagaatgtgaagaaggctcaggaagcccttttggtaagagccaaggctaactcagaggcaactctgggaacctacaagggtaactcacagcttgctgatggtgcctcagagagcctccatgtttcgaactacagctactgatcaatcgaagttggtgttgtttgaagagactagtgcgagtaggaatcggtattatgggtacaacaaccgaatttcttgttgataagtattattgtggtttgactcttcccagaataatcgtttggaattttgctttttgttttcctagtgttccttttatgtcaattttagtaattcagtgtatttggtcaaacctgtgcaacagggaagggaatgtaactttgttttcttgaaagacaccaccgtgctgtgaatgaggctttgtgttt

SEQ ID NO: 8333 - DNA, 580 bp, Glycine max
  Clone ID: 700747805_FLI
tgcatgtatctatgaatgatggaaccaccacaaacgaggttgatgatcaacgttttcatagtgagtttcttagcactacttgtgaacttggtggtgggagtgctcggcgctgataactatagcagagatgattttcctcttgactttgttttcggttcaggaacctctgcttatcaggtggaaggagctgctaacaaagatggaagaactcctagcatctgggacacctttgcctacgctggatatgcccatggagaaaatggagatgtagcctgtgatgggtaccacaagtacaaggtgaatacgctgcacctcatttgtggaaaataaaaaagattgaggcataagctggacaaagaaaacaagcttagtcattattttgttctacttataatgccctttaagacttgaaaagatattaattgttttcacgaaaatatataatacaggaagatgtgcagctaatgctggaaacagggcttgatgcctatagattttcgatttcatggtcaagattgttaccaagtactgtaatattgaacgcaaactcttggaattttatgtatctatatttcttttt

SEQ ID NO: 8334 - DNA, 1079 bp, Glycine max
  Clone ID: 700747814_FLI
gagataaaactcggagagaaagggtactagtacgtacctgcaggctgcagcaacctcgaagctagttcaaactagtgggaggttgtgtgcatagaagcacaaacaaattacagaaaaagtcatcatcatactcagaattaatacaaattaagcattgatcttgaattaatggctcgcggaaaggttcagctgaagcgaattgagaaccctgtgcacaggcaagttaccttctgcaagcgccgagctgggcttcttaagaaggctaaggagctctctgtgctgtgcgatgctgaaattggccttttcattttctccgcccatggaaagctctatgaactagccaccaaaggaaccatgcaagggctcattgagaggtacatgaagttcacacgaggggctcagcctgaagcagcagcacctgaagcacatcctcttctggttgctaaagaggaaactaacgcgctaaaacaagaaatccaaacattgcaaaagggtatcagttatttgtttgaaggaggaaataagactatggcaattgatgaattacaactgctagagaagaatctcgaaacttggatataccatattcgttcaatgaagatgaacattatgttacaagaaattcaagctttgaaagataaggagggaacacttaaagcggcaaataaatatctccatgacaagattgtggagaatactgcgatttctaactttgctgaatttgctactgatacttcttacccactaattgtacaagatgggggttttcaactctattaaatgggttgtttctacaatgttttgtttacatgctttaataaaggaaataatggcgactgggctgtgtttcataacattaaatagtgaagtatgaagcatgaacgttgcacaagcctaatttgcaataatttgtaacattaatattgtgttattctaatatttttatagataagtttgtaatgtaaaagtcagaaaagtgtgatttctgaccattaaattttcttttgtcattaaccaataatgtaaaatattgtgtgagtaacaatgactcaatgatgaggatattatgtattgtattt

SEQ ID NO: 8335 - DNA, 1361 bp, Glycine max
  Clone ID: 700747979_FLI
gtggtgttactaatgtgtcaagtattgaggagctttgctttataaaagatctgcatctaaggactgtggatcagcttggtgtggacggatctgttattgcaaagcatctagaagaattggagcaacttctgaaggggatagctatgatgaaagaattgactaaaaggactcaggactatttagtctcctttggagaatgcatgtcgactaggatctttgctgcatatcttaacaaaataggtgtcaaggcacgccaatacgatgcatttgagattggttttataacaactgatgacttcacaaatgcggacattttggaagcaacttatccggcagtcgccaagagattacatggtgattggctctctgatcctgcaattgcaattgttacaggcttccttggaaaggcccagaaatcatgtgcagtgacaacactgggtagagggggcagtgatttgacagctacagcaattgggaaagcactagggttacctgagatccaggtatggaaggatgttgatggtgtcctaacctgtgatccaaatatatacccaaaagcggaacctgttccttatttgacatttgacgaggctgctgaactagcgtactttggtgctcaggttctgcatccacagtctatgagacctgcaagagaaagtgatattcctgttagggttaaaaattcttacaatcctaaagctccaggtactctcatcaccaaggcaagagatatgagcaaggcagtgttaacaagcattgttttgaaacgtaatgtgaccatgttggatatagtgagtactcgcatgcttggtcagtatggtttccttgctaaggtgttttcaatctttgaagagttaggcatatcagttgatgttgtagctacaagtgaagtcagtgtttccttgacattggatccatcaaagctatggagcagagagctaattcagcaggaacttgaccatgttgtagaagaactcgagaaaatcgctgtggtgaatctcctgcagaatagatccatcatctctctcattggaaatgttcagagatcatcactaatattggagaaggctttccgtgttcttcgaacccttggcatcacggtgcaaatgatctctcagggtgcatctaaggtgaacatctcattggttgtaaatgacagtgaagcggagcagtgtgtgagggctctccacttagccttctttgagagtgagctctcagagttagagatggattacaaaaatggtaatggctctgttcatgaattatctttaggggacacttgagtgtttcaattcttttcattaagatatgtatcccaattttatatgctaatgtcaagcaagcatttttgagttcctcct

SEQ ID NO: 8336 - DNA, 1458 bp, Glycine max
  Clone ID: 700748001_FLI
caggcaagccccactcaaccaccacacctctcctcgttcacgctacccctttctgctcttcttctacctttcaagttttaaaagtataaagatggcagagacattcctatttacctcagagtcggtgaacgagggacaccctgacaagctctgcgaccaaatctccgatgctgtcctcgacgcttgcctcgagcaggacccagacagcaaagttgcctgcgaaacatgcaccaaaaccaacttggtcatggtcttcggagaaatcacgaccaaggccaacgttgactacgagaagatagtgcgtgacacctgcaggaacatcggcttcgtctcaaatgatgtgggactggatgccgacaactgcaaggtcctcgtcaacattgagcagcagagccctgatattgctcagggtgtacacggccaccttaccaaaaaacctgaagaaattggtgctggtgaccagggtcacatgtttggctatgccactgatgaaacccctgaattgatgccattgagccatgttcttgcaacaaaactcggtgctcgtctcaccgaggttcgcaagaacggtacctgcccttggctgaggcctgatgggaagacccaagtgaccgttgagtattacaatgacaatggtgccagggttcctattcgtgtacacaccgtgctaatctccacccaacacgacgagactgtcaccaatgacgaaattgctgctgacctcaaagagcatgtgatcaagcctgtgatcccagagaagtaccttgatgagaagaccattttccacttgaacccttcaggccgttttgtcattggtggccctcatggcgatgctggtctcaccggccgcaagatcattatcgatacttatggaggatggggtgctcatggtggtggtgctttctccgggaaggaccctaccaaggttgataggagtggtgcttacattgtgagacaggctgctaagagcattgtggcaagtggacttgccagaaggtgcattgtgcaagtgtcttatgccattggtgtgcctgagcctttgtctgtgtttgttgacacctatggcactgggaagatccatgataaggagattctcaacattgtgaaggaaaactttgatttcaggcctggtatgatctccatcaaccttgatctcaagaggggtggaaataacaggtttttgaagactgctgcctatggacactttggaagagaagaccctgacttcacatgggaagtggtcaaacccctcaagtgggagaaggcctaagtaattcattccactgctctatgctggaagttttttgagcgttgcccttataatatgtctaatatccataactttccacgtctcttactctgtgtgtttctctcctcttcctcctattttgttatttgtatgttcttttgtaattttttacgtgatcaactaaaaacatgtactctctgtttgtatgt

SEQ ID NO: 8337 - DNA, 825 bp, Glycine max
  Clone ID: 700748151_FLI
ggctcaacttttctagtaagagaggttatttagtggtgtctgttctattacaaatagttggtggtactgggcatcttaatgctactgatcttgatggagtattttaatgttgtgtttctacacctggattaccctcttctcttttctgggtgcagatttcgagttcctgtagatcagagaagggctgctaatggaggctttgctgctaagcaaccacttccttcccctcagaagcagcaggagaatgtggatatagtgccaaagcaaaagcctcagacgctggattccctgtttgcaaacatgaaggagcaaagaatgagatttttgtcaatgcagaataatgctgtgcaacgcaatggaggtggaaataagaggctcccatggagaagaggccgatttggcaactaagttgttcacacaatggggaatttcatgatatcaccttttgaacctatgtcctggcctgctgcgtcctgactcctcctgggttgatgcaagtgaaaaatttctcgagtgcagaagaaaactctagattccccaccccctagttggatggattatctttccccctttcattcgaatggacttcttcatttgctcgtccgttgtatattagtgtcttccgtggcttaatgtttgttctggtctggtctgtggtccatatgtggacacaattcctagcagttacaatataatgtcatttgagaggcctttgggcccgtagcaggtttatctgtactggtatgtttttctttttttgatatttagttatgggacagtatttctttgctaatgttcaactacaatgatgggcttttgcgtttc

SEQ ID NO: 8338 - DNA, 1153 bp, Glycine max
  Clone ID: 700748208_FLI
cttaaaatctccgatttcggtctctctgcgctgccggaacagcttcgttacgatgggctcctccacacacagtgcggcacccctgcctacgtggcacccgaagtgttaagaaaaaaaggctacgatggttccaaagctgatatctggtcatgcggcgtcgttttgtatgttcttctcgctggctttcttcctttccaacacgagaatctcatgacgatgtataacaaagttctcagagccgagtttgagtttccaccgtggttttcgcctgattcgaagaggctaatctccaagattctagtggcggatccctcgaagaggaccgcgatttccgccatagctcgcgtgtcgtggttccggaagggcttttcttcgctttccgcgccggacttgtgtcagttggagaaacaagaagatgccgttacggttacggttacggaggaagagaataattccaaggtccccaagttcttcaacgcgttcgagtttatttcttcgatgtcttccgggtttgatctctcggggctgtttgagagtaagcggaagacagcgacggtgttcacgtcgaagtgttcggcggcggcgattgtggcgaagattgcggcggcggcgcgggggctgagtttccgcgtggcggaggttaaggacttcaagatccggctgcagggcgcggcggaggggaggaaagggaggctggcggtcacggctgaggtgttcgaggtggcgccggaggtcgccgttgttgagttttcgaagtccgccggcgacacgttggaatacgcgaagttctgtgaggaggacgtgaggcccgcgctgaaggacattgtttggacgtggcaaggggatgccacgtgtgctgctaacgttcccgcctgtcacggtgaggagtgtcataagcaggttgttgttgttagtactatataaattaattaattataattagcgtgacagtccacggagagggttctagaaacggtaatgttctaacgacttttctttcttttgctttgggtttgtcgctttcgtctttattccctgcctgattttttggaaagatagggttttgcaccttttgaaggtgaggctgtacataaactgcaattaaatatattgtgctgctgctacattcggaatggaacttatttctgtgtcc

SEQ ID NO: 8339 - DNA, 626 bp, Glycine max
  Clone ID: 700748236_FLI
atactttcatatattgagcacggaaagagagaaggagccacccttttgacaggaggtaatacagtgggcaacaaaggttactacatagaacctacaattttctccaatgtaaaggaggacatgctaatagcacgggatgaaatatttggccctgtactagcgctgatgaagtttaagaccatggaggaagcaattaaaagtgctaacaataccaagtatggcctagcagcaggaattgtaaccaagaatttggatactgcaaacactatgtcaaggtccattcgtgcaggcattgtttggatcaactgctattttaccgtagggagtgatgttccttttggagggtataagatgagcggatttggaagagatttgggattacaggcccttcacaagtacttacaagttaaatctgttgtaacacctattcataattctccttggctttgaatagttgaatgtctcctacgtgagcacaaatgtgagtcttttcatttggaataaattacactttaattccttataatgtgtgaattgtctcttgtattattatgattactttgttttattaccacgttgttaacttaaatataatttttagagtgaaacaacaaattatagctatt

SEQ ID NO: 8340 - DNA, 752 bp, Glycine max
  Clone ID: 700748296_FLI
cctccgtcgcacccattcactccacaacaagctcgtcccgaaacgacgtcggagaatatcgaagcattgcttgatgctgcaagatacgatgacatggatgatgttaagagcttagaagccagtggtgttcctcttgattccaaggatgaacaagggaggacagctcttcatatggctgcagctaatggacatattgatattgtggagtatttaatcagtagaggggtggatcttaattcaccaaatgaggaaaagaatacacctcttcattgggcatgtctcaatgggcatgtggaggctgtgaagaaattaatcatggctggagctaatgttagtgtcttaaacagtcacgagaggactccaatggatgaagcagtgagtgggggaaagccagaagtgatggatgcgattaatgaagcagtggcactagttgaacttcgtggtgctatggtttttgcacaggaaacttgaagtttatgctacactaactagcttgtaatatgagaaatctgtgatggttatacatgttttcctataatgggtattttgttagttcgaacaagatcatgagtgttttggtatcctcctccctcccaagtttccattatggaattcctcttcggaaaatggaattgaaggagttggaatgaagtggatagttttacttttgaagttaattagttattttttttcctggaaaatcaatgaaatgccatacactcgaatatgagaaattaacattttatttatcc

SEQ ID NO: 8341 - DNA, 330 bp, Glycine max
  Clone ID: 700748435_FLI
ttgaatcgtacagtgtaacctaagtgccatttggaatgaattttgtagattacaaaaatggcttggaaagatacccaaaactttcagcattatggttcaaggattttctcaaaattgaaatcaaacttcatgaagattccatgcaataatactagttactatttgagattccttaaattgtaaatatatatatatatatatatatatatatatatatatatatagttgctaggtttatttaattcttaggctattccttatgaatttgtagttcttaaaaatattcttgtgaatttatagttcttggaatttaaaatatatacataacac

SEQ ID NO: 8342 - DNA, 1735 bp, Glycine max
  Clone ID: 700748475_FLI
aatttttattttttaacagctctgtactgaagaaaacggcgattgagagggagagtttgagaatggtgaagaaggaggagttcttgagagaaaacggcgacaacgaaaaccgttccgtctcgcggagtgacttccctcccaacttcatcttcggagttgccacttctgcatatcagatagaaggtgcttgtaaggagggtggtagaggtcctagcatatgggatgcctttacacacacggaaggaaaaattcttgacaaaagcaatggtgatgttgcagttaatcattatcatcggtacatggaagatattgatcttatagccaagttgggatttgatgcttatagattttcaatttcttggtctcggattttccccgatggcttaggaacgaaaatcaatgacgaagggataactttttataacaacattattaatggtcttcttgaaagaggtatacaaccttatgtaactttgtaccattgggatcttccgctgcatcttcacgagtcgatgggaggatggttaaataaacaaatcatagagtactttgctgtttatgcagatacttgctttgcaagttttggggatagagtgaagaactggattactattaatgagccccttcaaactgcagtcaatgggtatgatgttgcaatttttgctccaggaagacgagaaaattctcttatagagccatatttggcagcacatcatcagattttggcccatgcagcagctgtttccatataccggagcaaatacaaggataagcaagggggacaagtgggctttgtggtagattgtgaatgggcagaggctaattccgataagattgaagataaatctgctgctgcaagacgcctggattttcagcttggctggttcttgcatccactatattatggagactatcctgaagttatgcgtgaaagacttggagatcagcttcccaagttttcagaggaggataagaaaattcttttgaatgctttggactttattggtctaaatcactatacgtcaaggtttatttctcatgtgacagaatgcgccgaagaaaaccattactacaaggtgcaagagatggagagaattgtggaatgggaaggtggccaggccataggtgagaaggcagcatcagagtggctctatgttgttccctggggtctacggaagattctcaattatgtatcacaaaaatatgctactccgatatttgtcacagagaatggtatggatgatgaagataatgataacttgccgttacatgagatgctagatgacaaactgagagttcgctatttcaaaggatatcttgcgtcagttgctcaggctataaaggatggagcagatgtaaggggatactttgcgtggtcattactagacaactttgaatgggctcaaggttatacaaaacgctttggattggtctatgtagattataaaaatgggctcagcaggcaccccaagtcttctgcatattggttttcacggtttctgaaagctggtgaaaacaagaagggtaaagaagagtagcttactttcttcattatgtgtctttccataccagatacaaggaataaaataaagtaagcacagaattccacctttatcagtacttggaagctttgtatgggctataatgccatttctctacatttttctcactatcgaatttcattcccaaattgtgtgaaaactctgttccatcatatttatttgttttgcctgtt

SEQ ID NO: 8343 - DNA, 1308 bp, Glycine max
  Clone ID: 700748540_FLI
tccaaactcagaccatgaatgttgggagagaccagaggacatggatacagccaggactacgtatgctgttgatgcaccaaacgcggcttccgatgtcgccggtgaaacagccgccgctctagccgccgcatccatggcattccggtcatcggacccgggttactcggagacattgcgtcgtaatgctattacagccttccaatttgcagataactacaggggtgcttacagtgacaatgataatgttaagtataatgcctgcccatattactgcgattttgatggctatcaggatgagttgttatggggagccgcatggctaaggagggcgacgcaggacgataatttcctcaactacattcaaaccaatggcaaaactcttggtgccgacgacaacatcaatgagtttggttgggacaacaaacatgctggcctcaacgtacttgtctctaaggaagtcatagaaggaaacatgtactctcttgagtcctacaagtcctcagcagagagcttcatttgcaccctcatacccgaatcaccaagctcacacatagagtacacgccaggtggacttgtgtacagacccggaggcagcaacttgcaacatgcaacttcaattgctttccttgaattggtctatgccaattacctaacacacgcttcacaagccatcaattgtggcaatgtctatgttagtgcacaaacacttcgccaacatgctaagaggcaagttgattacattttgggtgataacccaatgggattatcctacatggttggctatagcaactactatccacaacgtattcatcaccgtggatcttccttaccctccatcaaggatcatcctcagttcattgcatgcaaagaaggttcaatttattacaattccaccaatcccaatcctaatgttcttgttggtgccattgttggaggacctgacgaaaatgatgattatgtggatgatcgagttgattttaggaaatccgagccaaccacatacattaacgcaccatttgttggggttttagcatattttgctgctaatcccaactttagttaatataataaaaacaattaccataaggtataggttcatctttttgtaaatgaaaagatatacgccgaagatgtttctcatcttgagaaaatcaagagggtagaggcttgattgggtttaggagcattactagaaaggatgacgggtttttaattacttctaaatgttttattctcgatgtttggatgtacgggtttgttaactatcttaaagttatatcagtgaatataaagtgttcattttgtttt

SEQ ID NO: 8344 - DNA, 1095 bp, Glycine max
  Clone ID: 700748571_FLI
ggggtatgaagtttacattttagaagctacatacaaggatccggtgggttgtgctgctaggaatgtccatggatttacacaggaagacatagaaaagatgtctaagcaatgggaagaagctccatccttgtatctgcagcttgatgtgaagtcattatttcatggagatgatctaaaggaaagcagaatacaggaggttgacatggatatggaagatgatctgggtgatgcattacttccagttcaaggaaaagaagctgataaagttgttgaccctccatttggagaagatgcaagtttcctaaaggctgggaagaattgggatgctgaagaggaacatccaacagaagtcagggagttgggtaaaagcaaatggtcagaagattatggtgaagatgacattgatcaaactgaaggtatgaagggcaatataaatgctctgtctgggttaattcatcattatggcaaggaacgaaaatctgtacattggggtgatcagggtggcaagacagggttttcaataggggctgcaaagaaggtaaatgctttgtctttagtgatcggacctggtgctggatataacctgaaatctaatccattacctgaagaggatagtccaacccgtaatagtgtggattcaaagaagcatagcatatttcaagaacaaatccgggctgaacgagaatctttcaaagctatttttgataggagacggcacaggattggtggacttgatgtggaagaggactaaaagagagccacccaatgcagaaatgctttcacaaaacagagtatggggagggtagatatatcatgtattcagctttatccctccctgcgttggagaagttgttaccaggatttgaatcctccacaagacggatgtggagactgattccgaattttggttttaatgtcatcaaaacagacggattacttgaaagtcatacttccatgtattagaggagtttaggtgaaagaatagagttgagttgtttggttggctgggaaaagaacatgatgttcccaatgagtttttgtggaatgatgtaaaattttattcaaggattaatatgaaatatctgtgataaggtc

SEQ ID NO: 8345 - DNA, 1580 bp, Glycine max
  Clone ID: 700748595_FLI
gtaataataggtgaggaagggtttgtggggggtggggttggagcatccatttgtggatgtgaaggaataggaggttgttttggggtgaaatgagggatgctatcaaggttgatggactttctgactgcctgctggcggcgaagatccttctccgacggcaagggtggttccgaggttacggggcggaaggaagggctgctgtggtacaaggatgcggggcagcacttgtttggtgaatactcaatggctgttgtccaggccaacaacctgctcgaggaccagagccagattgagtctggtcctctcagcctgcttgacactggcccttatgggacctttgttggtgtatatgatggacacggtggacccgagacgtcgcgctacgtctgtgatcatctcttccaacatctaaaacgatttgcatctgagcagaagtccatgtctgaggaggttattcggaaggcataccaagccacagaagaaggttttttgtcagtggttaccaaacagtggcccatgaatccccaaattgctgctgtgggatcttgttgtttggttggtgtgatttgtggtggtatcctctacattgctaaccttggcgattcccgtgctgtgcttggccgggttgtcagagcaaccggggaggttttggcgatccagctttcgtcagagcataatgtggccagagaatctgtgagacaagagatgcattctttgcatccggatgactcaaaaattgtggttctaaagcacaatgtatggcgggtgaagggtctgatacagatttctagatccattggcgatgtttacctaaaaaaggctgaattcaacaaggaaccattgtatgctaagttccgtgtgcgggaaggttttaagaggcccattttgagctctgacccatcaatttccgttcatgaaattcaacagcatgatcaatttctcatatttgcttctgatggtctttgggaacaccttagcaatcaggatgctgttgatatagttcaaaacaacccacacaatggaattgctcggaggctcatcaaagctgctttgcaagaagcagcaaaaaagagagagatgaggtactctgatttgaagaaaattgaccgtggtgtccgccggcatttccacgatgacatcacagttgtagttgtatttcttgactccaatcttgtcagcagagccagctcggtaagaggtcctcctttatcggtgagaggaggtggtattcccctaccttctagaactttggctccctgtgctgcacctatggaaacttagttcaggttgatgaagctggctgtataatctgttatgcttgtatttagtgttgtacacttagcagacattgagctctggtgatccaccagattgtatatccaatttaacagattgaaaaaatgtccggtccattagtacaatgtaacaagagacttggggtatgtagcttgcgtgagtataaagcatcatggaagtagagtaccaaagccaaaggtgacctttaatatttgatcattaagaggcaatcatgtttgcattgcatctcatatttttctcatccaatggggagtgatttctgt

SEQ ID NO: 8346 - DNA, 1634 bp, Glycine max
  Clone ID: 700748737_FLI
gaaccaacccaggttcgatgtctccatggtccataggctgatcacattcaccgccgaaaactacacaaccccgaaagctaaataaaaataaaatcaccttcgaataggaaaagcaaatctcaaattggtagcgcaagcttgtcacttgaggtttgcttcgattcttcgatctcagattaaagtgtacgaaagaagaggcttttctaaacaaaagaggaagcgtgcaatggtgggatgaagaagagaggaacatggcgagaggcaagtgggtttgttcctacaagaaaaccactcttttagtttgcttcttcaacattgctgttgctctctacgttcttcgctctctctatgcttctctttacatctactccggaaacgtttcccgcaacgctgcgttgtatagcccagatcagattcggaaaatggaggaatcaatccaaatccgctgggaatttaaacctgtggagttaattaagtgggtgaaggctttagaagcggagttttcgagtgaaactgaggcagttaagttgccctggcatttgaaacagaacataattgatgagatcttgcagagactaaggagcttgaattccagtagaacagatattgctatggaacgagaagtagttgagagttggcgcaaagaaaaactggaagaggtcaagtcagctcttgtgaaggggacttccaattcaaccatcccccatgaagaagctggtatgctagtaagagctttggagtctgattgggctgtgctctgtgaagagattggcctctggatacctgctcaagtttctaataaagaacatgacgacaaacctgagggtgcagaggagtttgaggaggaggtccttcctggcagacccgtttcacccgagtgccatgctgaactgcacacagattatgatggcgccgcagtaagatggggtcttaccttccacaaagatagtgcagctgattgctgtcaggcttgcttggaccatgcgaaacatgccaaagaaggggaaaagaaatgcaatatatgggtttattgcccatctgagtttgggtgtcattctccagatatctaccagcacaaacatcaggaatgttggctgaaatatgctgagaaacctcgactaaattttaaggataagtatcctgaatcatatcgaaattcacatccttctgcaccagtgatcgttccatgggtctctggagttatcagttcatgagtcaaataaccaaataccaaatgtgacgagatcaaccagagctaccttgtagactacacaagagtgcaaagctagcttagcaaagcctttgcatgctcgtggattatataccattgttcttcaacatgttttttgtgtaaaagaaatgaactggggagcaaagaattttccctatgttcatttatgacttgttttggtcaaaatgcggtttttgacagactcacctcagtgccaaggattttccaccaaggtcgggtctaacactgaggaaaggtgacttttaactgatgagcatgttgttttgttgtaagctatctgataacataattcattgtatctgtgggacttagaatcctactcatagtatcattcttgttcgtgatgttgatgatcatcaattcatcatcaatcttctctgtc

SEQ ID NO: 8347 - DNA, 1593 bp, Glycine max
  Clone ID: 700748756_FLI
cttggtttcggtttcaggtagactggactcctgagctacataaaaaatttgtgaaggctgtcgaacaactaggtatcgatcaagccattccttctagaatattggagataatgaaagtggaaggcttgacaaggcacaatgtggcaagccatcttcagaaatatagaatacacaagagacaaagtgcacccagggaagaagatcggaaatggcataatcaaagggatgcaatgcaaaggaactattatatgcaaagaccaatcatggcataccctccatatcattcaaatcacaccctttctccagctcctatatatcctatgtggggacaacctggtagtcaaacagctggtgtacagatttggggccatcctggttatcacatatggcatcctacagaaagttgtcactggaagccttatcagggggtgcatgtggatgcttggggatgcccattgttgccagcccctcaagctccttgttttccttacaatcaaaatatacctggattgcacaatcctaaagcagtggactatagattcggcatgccacaaagttcctttgagcatcatccggcagaggaggtggtagacaaggttgtgaaggaagcaataagcaagccatggctaccattgcccttaggactcaaacctccttccatggatagtgtgttggctgagctctccaaacaaggcatttccggcatccctcttggcaacaagcgttcttctactcctaaactccgctgacatgtatgaccgaccccaccactgggtcccacagagtagtggttttgatgatggggccagccagttacatatcaacgccctgttgactcttgtaattattttgtttctcaaatttccctcccaggttgcaactagtggtagatttggctggaagttgggaccatttactttgccttgccatccccgcctccacaccaaccactcaagatgtctctccttaagctgctgagcaatgatggttgatatgatattatatgatatcaggtcaggtcatacaccaccatgatgcatcacaaatgggcaatacattgatcctattccatggccacttgccaaaacaaaacgctaaaaataacattaaaaaaaaaggttaagctatgcagcagcattcagcagtttcaatgcagtgcatggcatcatttgttgaaactaaggactggccacgcatttgttgaagctttatacaaaatattgtggctgaaagaaagataacaatgtggactttttgatggttgtggtggtgaggggtttttggttgtaagtgaccagcttcggggtccatgtaaaaatagcatgacagggactggaggtgtcttggttctgttggtgttgttggggagggggtctagttgaggtctaataatggaaaaaaaggatagttaggatagtgttgtgaataaaaaatgagtccaggctttggtttatgctaacttgttcttttcccaattcaatttgttcactcagctattttagcttaagttcagcattgagaacaacactttgtgcatgttcagttgtttttgctcactttatctttttaacgttttgaaaataattctaagct

SEQ ID NO: 8348 - DNA, 556 bp, Glycine max
  Clone ID: 700748825_FLI
gctttgagtgcattggaaatgtctctgtgatgagagctgctttggagtgctgccacaagggctggggaacatcagttattgtgggtgttgcagcatcagggcaggaaatatctacccgtcccttccagttggtgagtggacgtgtctggaaaggaacagcttttggtggcttcaagagcaggtcacaggtgccttggcttgtagacaagtacttgaagaaggaaatcaaggttgatgagtatattacccatactttgaccctttcggagatcaacaaggcttttgatcttttgcatgaagggggatgtcttcgttgtgtgctttcaacacaagaatgaggttatctatgctagcctggctactttcgtgaggaatggatgtgttgggttgcttttcccctcttttagtggttgtagtttgaacttgaaataaatctcgagtggttatagtttgtaagtaagatcattttggtctataatatggatgttatctttcgaatcttttggcaaacttgtgatcagaaagaatgaatacttaaaagcatcccttttgagtt

SEQ ID NO: 8349 - DNA, 779 bp, Glycine max
  Clone ID: 700748836_FLI
gccacaccagcatccatcaccaatgtcactgtggagttccttcaattccccgcggtggtgacacctcctgcctctaccaaatcctatttccttggtggcgcaggggtgagagggttgaatattgaagaagaatttgtaaagttcacgggaataggtgtttatttggaagacaaggccgtgtcatcactcggtgccaaatggaagggcaaaagtgcagctgaattgctggactcacttgacttctacagagatatcatcaaaggtccgtttgagaagttaattcgagggtcaaagttaagaacattggatggtcgtgaatacgtaaggaaggtgtcagagaactgtgtggcccatatggaatccgttgggacttacagtgaagcagaagaaaaagctattgaggaatttagaaatgctttcaaggatcaaaatttcccaccaggctccactgttttctacaaacaatcacccactggaacattggggcttagtttctcgaaagatgagacaataccagaacatgagcatgcagtgatagacaacaaaccactctcggaggccgttctggagactatgatcggagagattcctgtttcccctgctttaaaagagagtttggctacaaggtttcaccagtttttcaaagagttagaggccaatcccaacaatgaaaactgagaacaatctttaggggacattggaaacaggaacaacaaaaaaatccccactttgtttgaatttgtaccccatttaataaatgagcaaaccagttagataat

SEQ ID NO: 8350 - DNA, 713 bp, Glycine max
  Clone ID: 700748929_FLI
gtggtcatacggcatcgttttgtacgagatgttgtacggaacaactccgtttaagggcgccaataggaaggaaacgttttaccgcatcttaacgaaggagccagagctaacaggggagaagacggcgttacgggatttgattgggaaactgctggagaaagatcctgaccgtcggatcagggttgatgagatcaagggccatgatttcttcaagggggttaagtgggacatggtgttgcgcattgtgaggccaccttatattcccgaaaatgaggtcaagaacaaagtggggttcggcaaaagcgacgtggaagtgttcgtggacaaggtgttttttccaacaggtgatgatggaggaagagagaaaacaaaaatggtgttggaaaagaaggatagtaataataatggtgagaatattaacaatatggtgaaagttgatgaattgagtcatgttcccaccgagaagattgacgattttttgattttttgagttgacatattcttttaatattagcctaaatgtggatccttatctcaccttaaaaaaaaaaaactaattgtagatcgtgcatatcttttgaaatttaattaatatataattaatttcgaccattgttgagatacacgagctagttaattttgtttgttgttaattatactattttttctgtaaattatggttcaatttaatgccattaattgactaatgtttt

SEQ ID NO: 8351 - DNA, 1357 bp, Glycine max
  Clone ID: 700749025_FLI
gtgatccgatccagaggttaggtgcctacatgttggagggtctaagagcaaggttggagtcctcagggagcataatctacaaggccttgaaatgtgaacaaccaacaagcaatgatctcatgacttacatgcacatcctgtaccagatttgcccatattggaagtttgcttacacatctgcaaatgctgtcattggagaagcaatgctgaatgaatcaagaattcacataattgacttccaagttgcacagggcactcagtggctgttgcttattcaggctcttgcatctcgtccaggtggagcacctttcattcgtgtaaccggagttgatgattcacaatcatttcatgcaaggggtggaggacttcacattgtaggaaaacgcctctcagattatgccaaatcttgtggagttccatttgagttccacagtgctgctatgtgtggaagtgagcttgaactagaaaaccttgtaattcaacccggggaagctctagttgtgaacttcccttttgttttgcaccacatgccagatgagagtgtgagcacagagaaccatagggacaggctattgagactggtcaaaagcttgtcacccaaggttgtgacccttgttgagcaagaatccaacaccaacacttctccctttttccaaaggtttgttgagaccttgagttactacactgctatgtttgagtccatagatgtggccctccccagagatgataagcaaaggatcaatgcagaacaacactgcgtggctcgcgacatcgtcaacatggtagcttgtgagggggatgagaggctggaaaggcatgaactcttagggaagtggaggtcaagattttcaatggctggttttgcaccatgccctttgagttcctcagtcacagctgcagttaggaatatgttgaatgaattcaatgaaaattataggcttcaacatagagatggcgctctttatctaggatggaagagtagagctatgtgtacctcttctgcttggagatgttactgactcattgtcattgtcattggtatatgtatttttttttatccacaaatattatttgttagtaatatattagcttttattagcggggaatttgaacccatcacctctccccattcccatcattggtatatgcatattttcctccttgttaatttctttcctttttatgacattaagtcattatttagtggtatccgctgtttctcaataggattaattagagacttagctttcttccaacgtgtatcctttaccttttgtgggttcagcttagtctttaaactttcttgtacatgtcaatactagaaagaacgaaagagaaacctagctcatatttattg

SEQ ID NO: 8352 - DNA, 796 bp, Glycine max
  Clone ID: 700749034_FLI
tatacttcacagtctttatgataactgcatgaaataccatattggggtgcttgttgacaagtctctcatacagattagtgacgatagagttacattgcatgacttgattgagaacatgggtaaagaaattgacagacagaaatcacctaaagagacagggaagcggaggagattatggttactaaaagatataattcaagtcttaaaagacaactcggggaccagtgaagttaaaatcatttgtcttgatttccccatatctgacaaacaagaaacaatagaatggaatggaaatgccttcaaggagatgaaaaaccttaaagcacttattatcagaaacggtattttatcccaaggtcccaattatctaccagaaagtttgagaatattggaatggcacagacatccttcccattgtttaccgtctgattttgatacaacgaatcttgccatacgcgacttggaatagttccatcccgtcattggggtgtggtggcatatccaagaagttgatgtatctaactatctaagggttttggatagctgatgcatctggtctctcaaatttgaaggaattttcatttgaatattgtgagaatttaattatagttcagagtcaattggttttctgaataaactttaaatattgagtgctggttgtttccgcaaacttaggagttttctacccatcaagggatggattgaatgaatgaaacaactgtgactcaactcaacatctttttatacaaatacaatgctgcatgcaaatgaaattttgggaagaatttgtactggg

SEQ ID NO: 8353 - DNA, 1471 bp, Glycine max
  Clone ID: 700749069_FLI
cttagaaaaatctatgtttcttttgttttgaattcaatactcagtgctttgattgtgcattttgcatcagaagcaggcactgctgagtcacagtatggaggccaaaagctcaaaccagataaaagaggaaagcaatgattccaattatgataggaaagctgaaataaaagcatttgatgattcaaaaactggtgttaaaggtcttgtagattctggtgtgaaaaagatcccacgcatgttcctttccggcatcgacataactgaaaacgtagccagtgactcgaacttgagtattcctgtcatagacctacaagacatacataacaatcctgcactgcataatgaagttgtcaccaaaattcgaagtgcatgccaggagtggggatttttccaagtgatcaatcatggaattccaattagtgttatggatcaaatgattgatggaatccgaaggtttcatgaacaagatactgatgtcaggaaacagttttactctagagatttgaagaagacaattctatacaattccaatactagcctgtacctagacaagtttgctaactggagagactcacttggatgttctatggctcctaatccacccaaaccagagaatttacctacagtatttagagacataattattgaatactccaaggaaattatggcactgggttgtacaatttttgagttattgtcagaggctcttggccttaatccatcttatctaaaagaaatgaattgtgctgaaggacttttcattcagggtcattactatccaccttgccctgaacctgaattaactttgggcacgtccaagcacactgatagttccttcatgacaatagttctacaaggccaactgggtggtcttcaagttcttcatgaaaaactatggtttaatgttccacctgtgcatggagctcttgttgtaaacgtaggagatattctacaacttataacgaatgacaattttgtcagcgtttatcatcgggttttatcgaatcatggagggccaagagtttcagtagcaagcttcttttcgaattcgcatgatccagcaaaaggtgcatcaatggtttatagtccaattaaggagttattatcagaagaaaacccagcaatctatagggacactaccataggagagatcatggcacaccattttgctaaggggcttgatgggaactctgccttgcagcctttcaggttgtgaaatgaacagattaagacctagaaaataacgatgctctcctgattctcatggaggtgcttgtaatgtgttatttctgatgccttttattttcttaattttcttcttcacacaacaagcttcaaattaagaaaccttctgggcagacatatgctcatctgtctcatcctaggcttcttagcttgtgttgtaacgaataatttcgtgccattcaagaaaaatatgtaagagattccattagaatggatatgacttaac

SEQ ID NO: 8354 - DNA, 945 bp, Glycine max
  Clone ID: 700749102_FLI
caaatctgatcaaaaggctacagaaagagcaattgacttcatgtatggatggtttatggatccattaacatctggagactatcccaacagcatgcgatcacttgtgaggacaagattaccaaagtttactgcagagcaatccaaactacttattggttcatttgattttattggcctaaactattactctacaacatatgcctctgacgcacctgatctaagcgaagcccgtcctagctacttaacagattctcttgtcactcctgcatatgaacgtgatgggaaacctattggaataaagattgcttctgattggttatatgtttatccaagaggaattcgtgaccttttattatataccaaagaaaagtacaataatcctttgatttacatcactgaaaatggtataaatgagtataatgaaccaacattatcacttgaggaatctcttatagatacctttagaattgattatcattaccgtcatctcttttatcttcaatccgcaattaggaatggcgcaaatgtgaagggatattatgtatggtctttgttcgacaattttgaatggtcttcaggttatacatcacgttttgggatgatcttcgtggattacaaaaatggtttgaagagataccaaaagctttcagcgcaatggttcaagaattttctcaagaaagaaagaagactttatagctctagtaaataatatgaaattcgtttattcattggttatatttgtaaataattatttggtttttctttgatattcttttattctaaagaggtcctaatttgacttagagggtattgattattcttttattctaaagaggtcccattggactgagaggtgaaacaaagatgtgtatcagttgattatagctgctatatattgttattgttattgttataataagaatgaaaaaaacttttggttacgat

SEQ ID NO: 8355 - DNA, 1380 bp, Glycine max
  Clone ID: 700749140_FLI
attcgatagggaagttgtccagcttggtgactcttgatttgtctgagaatcggattatggccctacctgctacgattggtgggctttcgtcgttgaccagattggacttgcattccaatagaatcacggagcttcctgattctgttgggaatcttcttagtctgctttatcttgatctgaggggaaatcagttaacactattgcctgcttcttttagcaggttggtgcgtctagaggagctcgatttgagttcaaatcagctttcagcgcttcctgactctatagggtcgcttgttagactaaaaatattgaatgtggaaacaaatgatatagaggaacttccacattctgttggtagttgttcttcccttagggagcttcgcgttgactataaccggcttaaggccctgcctgaagccgttggaaagattcagagcctggagattttgtctgtgcggtacaataacatcaaacaactacctacaacaatgtcatctctaacaaacctcaaggaacttaatgtgagtttcaatgagctcgagtcggtgccagagagcttgtgttttgccacctctcttgtcaagatgaacataggaaacaattttgctgacatgagatccttaccgagatccattgggaaccttgaattgcttgaggaattggatatcagcaataatcagatacgtgtgcttcctgaatcgtttaggatgctcactcgactacgtgtcctgcgagcagaagagaatcctcttgaagttccaccaagagaaatagctgagaagggagcacaggctgttgtccagtacatggatgagcttgttgagaagagggaaaagaaagatgttaaagcacagccactaaagcagaaaaagagttgggctcagatctgcttcttttcaaagtctaacaaaagaaagcgtgacggggttgattatgtgaaaacctgatttcattcaatgacaccattgttggcaagcaacagattctatgtggatatgcatttaaaaatagagacaaatatatctcttagtgtgcggtcaataatatgcagagatatggatcgtgcaagaatgaattgacagcctctgtaggctgttataatttgctttgacttggcggcacaaattgtagatttcttgttcagtattttctgatttttttccctgtataatttgaattttcgatttatttcatttgtatttctattgctgctttgaaagtagaaagaagtgtacacaacccaacaggcaaacagagacgacggatagtgggggagaaagagaaaccgaagatgattatgtactatggttattatatatgtacaattgtaacttcactctattgttaaacgaattacagtttaccctttgtaccacttcc

SEQ ID NO: 8356 - DNA, 1080 bp, Glycine max
  Clone ID: 700749247_FLI
tggagaagtgacagaggtgggaagcaaagtagacaagttcaaggttggagacaaagtagctgcgggatgcttggttgggtcctgccactcatgccaaaactgtgtcaacaatcttgagaattattgccaacaagtgattcccacatatggtgcaaagtatgtggatggcaccatcacatatgggggattctcagacttcatggtagcagatgagcactttgttgtcaacattccaagtgccctacctcttgatgctgcagctcctctcctttgtgcagggatcacagtgtatggtcctttgagatattttgggcttgacaaacctggcatgcatctgggtgtggttggtcttggtggactaggccatctggctgtcaaatttgcaaaagcccttggcttgaaggtcactgtcatcagtacctctcctaaaaagaaaaatgaagccatacaacatcttggagctgatttttttgtggtcagtagagaccaagatcaaatgcaggctgcaatgtgcaccttggatggtataattgatactgtttctgcagtccaccctctcatgcccttgattgatctattgaagtctcatgggaaactagtagctgttggggcaccggagaaacctctggaattgcttctcccacctttaattggggagaaaaagtatagcgggtagttacattggaggaatcaaggagacacaagaaatgattaatttcgctgctgaacacaatgttagaccggaaattgaagtaattcctatggattatgtgaacacagcaatggagcgtctccagaaagccgacgttaaatatcgatttgtgattgacattggaaacacattgaagccacactattagttttgggccgagtcaaaaaacagagaatgaccattgaccaagggaagggaacactacaataatacaaagcactcttaaggatgtttaatattccttgtgttattctcctagatcttttgtatccatttttattttgaataaagggaacagaataattgcattcactaattttggtgtgccatatccatgttatatatattatgggaaacatgcatttgag

SEQ ID NO: 8357 - DNA, 1205 bp, Glycine max
  Clone ID: 700749265_FLI
catgaacatcaatggactcgcaagacaatcactcatcaatgcaggtggcattattgagcaatcatttctgcctgggccatttgctgtggagatgtcttcggcagtttacaaggggtgggttttcactgatcaagcccttcctgcggatcttatcaagagaggaatggcagtggaggatccatcctctccctatggccttcgccttgtgatagatgactacccttatgctgttgatggactagagatatggagtgctatccagacatgggttaaggactacgtctccttgtactatgccacggatgatgcagttaagaaagactcagaactccaagcttggtggaaggaagctgttgagaagggtcacggtgacttgaaagacaagccatggtggcctaagttgaacactcttcaagatctgattcacatttgctgcattattatatggactgcttcagcactccatgcagctgtgaatttcggacaatacccttatggcggtttcatcctaaatcgtccaactctaaccagaagattgctcccagagccaggaaccaaagaatatggtgaacttaccagtaatcatcaaaaggcttatttgagaacaattacaggaaagactgaggcccttgtggacctaacagtgatagagatattgtcaaggcatgcttctgatgaggtctaccttggacagagggacaatccaaattggactgatgacacaaaggcaattcaagcctttaagaagtttggaaacaagctgaaggaaattgaggacaaaatctcagggaggaacaagaattcaagccttaggaaccgtaatggaccggcgcagatgccctacactgtgcttcttcctaccagtggggaaggccttactttcagaggaattcccaacagcatctctatctaatgagagtgtgtggtgtgtggtgtgtggttttctttccttccaacgtacctctcattgacaaataaacgtgcaaacttatgtgtgcataattttcttatgtatgcttaagttttgtaattggatgctatctagtttttcatatctaatagggtgttgtgtcagtttttatgtatagtattgtgctcctatcatgttcacccgtatcatgttcacccgtatgtaagtctgatattctgatctatgaatgtcaaatcaaatttctctatgtcaccaacttggatttgatacccgt

SEQ ID NO: 8358 - DNA, 797 bp, Glycine max
  Clone ID: 700749283_FLI
ctctcactcacaaacacacactgaactaaaaaacatcaaaagagacatggctgagcaaaccttcatcatgatcaagcctgatggcgtccaaagaggccttattggcgagatcattagcagatttgagaagaaaggtttctacttgaaaggtttgaaacttgttactgtggaccgtccttttgctgagaagcactatgctgatttgtctgccaagcctttctttagtggtttggtggattacattatctctggccctgttgttgccatgatctgggagggcaagaatgttgttacaactggccgaaagattatcggagccacaaacccagctcaatctgagcctggaactatccgtggtgactttgccattgacattggaaggaatgttatccatggaagtgatgcagttgaaagtgctaacaaggaaattgcattgtggttccctgagggccctgctaactggcaaagctcccaacactcttggatctatgagtaaatcatatgcctcaagttgatcttgaaattgccttaggttgatccagattatctacatgttttctgtttctgtccgttgttggacttttttgtttaagagtttggtaccttggcttgcatttcaggctctatttatgtcacagtttgataaattaaatcccagaccagttttgcttttaccttgttgattgttaatgttttttcctatgagccatttttgaggatgcagatgcaattacattataatattccatcctcatctctatagataaattgtcaattattgatacatatttgcttct

SEQ ID NO: 8359 - DNA, 1132 bp, Glycine max
  Clone ID: 700749341_FLI
gttgaagcaattcctctggatgatgccactcaaccctcttgtttctttcagcttttcggtgctctgaaagagctcaagagaccgatgtggatgctgatgctggtcacagctgtgaactgggtggggtggtttccttacttccttttcgacactgactggatgggtcgtgaggtctacggtggaactgctggggaggacgcgtacgcgaagggagtgcgcgtgggatcgttagggctgatggtaaacgccgtcgtgttgggcttcatgtcgttggcggtggagccgttggggaagatggttgggggagtgaagaggctttgggcgattgtgaactttattctcgcgattgggttcggaatgacggtggtgatcaccaaggtggcggagcaccagcgccggatgaaccccgccgccgtgggccacccctccgagggggtggtggttgggtccatggttttctttggggttcttggagttccccttgcgattactttcagtgtcccttttgctctagcatcaatatactgcagcgcttcaggagcaggacaaggtttatctttgggagttctcaatcttgcaattgtggtaccacagatggtggtgtctgcattaagtggtccttgggattccttgtttggtggtggcaacttgccggctttcatggtgggtgctgcggcagccgcgttgagcgccataatggcgattgtcttgctgccaactccaaagccagctgatgaggccaaggcttcaagcatgatggcagggggctttcactagttaatggagttttgcatgtttcagttttgtcccctgctttaatagaaagaaaaaaaaaaacagtaataaaagaggaaaaattggatagtctcttttgatttgaagctggtgtgtaattatgtaatagacccaccaagtgctacatttgtaaccttttgtagcacccactgaacatagtaattgcagagtttggtgtgattgtacataattgcagtggttggaacttcttggaagacccttcctcttatataattttagtctgtttcagtgttcagaggaatgtggtgattaaggatgagtcttagtttaagactttacatcaattaatgataataagggaaatgctactttttac

SEQ ID NO: 8360 - DNA, 1650 bp, Glycine max
  Clone ID: 700749355_FLI
aacctcttcttcttactctcttacgttaattcttcgttgtctatgatggcattggatatgattgatgttgttcccaggacgaggatggaagaagaaaatatagcaatacaagaagcagcttccgctgggttaaagagcatggagcatctcattcgtctcctttctccttcttcttctcttcacaacaaccttaataatctcaatctcaaccacctcgactgctccgaaatcaccggcttcactgtctccaagttcaaacaagtcatcaaccttctcaaccgcaccggccacgcccgcttccgccgctctccaccccaagcccaagcccaagcccaaactaatcctcaaccacaacctcagatccaacaacaagggttcagtttagatttcgtgaagcccaccattctaaactcaaagcccatcaacaaagacgaaactttgactctttcaacaacctcttcttccttcatgtcctccgtcaccaacgacgccagcgtctccgacggcaagatcggacctttcctccctccctccgccgccaaaccccctctctcctccgcccaccggaaaaagtgccgcgacgccgccgcagcactctccgccaaaccctcctgccactgctccaagaaaaggaaatcacgcgtgaaacgaacgattcgggtgccggcgataagctcaaagatcgcagatatcccaccggacgagtattcgtggagaaaatacggtcaaaaaccgatcaagggctcaccttaccctcgagggtactacaagtgcagcaccgtgagagggtgtccggcgaggaagcacgtggagcgagcgcaggatgaccccaagatgctaatagtgacttacgagggtgagcaccgtcacgtgctgccgttaacttccgctgccggcgttagtttcggccattgagttaatcgacggcgtcttttggaaacttggcgggggacgttaaatgagcgtcggatcgtgaagtaacggcggatgcgaacaaggatcgattcggttcgaggacggaaaaagaaaagtggcaactaaagtcaactttcgcgttgtggaatgattttgttgacgaggacttttgtgtaaatttgaccccaagtaaagtagtgcaggtctcaaagaatgaaaattatagtgatctcatctgtttttctttatttctatttttttttaaaaagagacatttatttatttatttatttgatgttagagttgaattggttgaaggatggggctgcaataattttcttggtagaagaataaaaaaatattaatattgggagatctaagttgaaagattagattctttttgttgaaagaaaggacggtgtttgggggcaaaaagtcaaagtatgagggccccacagagaagcatgtggagttggaataataatgataactttagcattgagtaatggaaagtaggggggaagggaaggaacaggtcaatggttgttatggcgagtgggtcccactgcgtgttgttacttcaaaattcaaatatctctttctctctggtctctaatctctaatctctttgactggggtgcgtgtctccaattaagttacgtaacctaacctaactaacattgatgccaaggttgacgggttgaggccatataatagtagaattaaaattttatg

SEQ ID NO: 8361 - DNA, 439 bp, Glycine max
  Clone ID: 700749381_FLI
tgctcttactggaaacaccaaaaaggtaacaaaagagaactgtatgagggttggtatggatggccttatattgaaacctgtttctgttgacaaaatgaggggtgttttatcagaactattggagcgccgagttctgttcgaaagtgtttaacctgttagattgttgtacatagctatatcaaatttggagaagagcacaaacttatgaagcaatgaggcaattgacattagttgtcatcctttttgctgttttgagatcccggcaaaaggaacaacgattgagtctgcgttgttaaataattttttgtgaacacaagttcgtatatgttgtgtattctgcattttatagcagactttcgatgttttgcaatggcggtaaaattgcatttatactgtcctagactgttttgattaattgatttaagtttaattacttgtt

SEQ ID NO: 8362 - DNA, 503 bp, Glycine max
  Clone ID: 700749436_FLI
ggacctagtcctaaagggttgctccgccgatcccattcaagaggttaccggcaccaagtcttgctccgaccaacacgccgatctcgaggctcaagactatgccggcgtgacccccatgcgccgcctcaccatgcggcggttccgtcagcgttacatgtactattcatattgctatgatactttaaggtaccctgtgccacaacccgagtgtgtcattgtaccctccgagaaacaaaggtttaaggagaccggaaggttgaaatttggcggcagtcaccaccggcaatctcgacggaggggccgtacaacaactccggtggatcataccgatcagggtgatatgtgatgattgatattgagatgtatataatagtgtcaattttttagatctttatttgtggttttttttttttacattatatatttatttgccgacaggcataaataaaccaatcgatttatatatggtctttatttttgtttaataaatgtgttttggtgtt

SEQ ID NO: 8363 - DNA, 1792 bp, Glycine max
  Clone ID: 700749466_FLI
gcctaattcgctctcttctaccacaaaccactcaatcctaagaaatccatttgaaatttcaagtctcgttctggctaagtccatgttcattgtttactatacctcaccactccaaggttctcgtaattttcttcagcagaaaacgaaactattgcttccagagaagagcatcatctacgaccattttggcaatattataaaacaagacaaaaatggagagtgacttgagctgggagcggaacacactcatcaatgagctaattcaggggatggaggtagcaaggaagttgaaggctgacttgaagttgccgtattcagttgacacaagagatctgcttctgcagaggatattatcttcttacgaaaaggctctactgattctaagatgcagcaatgcatcaacttccgagttgcagggcatgaatcaagcaacaccaactttgctacccgagtccccattatctgtccatggaagtcctctgcgcgaggacgttcatggggccatcaaggatcaccataattcaaagaaaagaaagataacgcccaaatggatggatcgtgtaagagtgagctgtgagagtggtcttgaaggaccacatgaagatggttacaactggagaaaatatggtcagaaagacatccttggagccaaatatcccagaagttactataggtgcaccttccgcagcactcagggctgttgggcaacaaagcaagtgcagagatcagatgaagatcccacaatgtttgacataacttacagaggaaatcatacctgttctcagggaaacaatgccgttctgccacccaagtcaccagaaaaacatgagaaaccagcacacagtcataacattgacattcaccatgcacaggcatcacaagaaagccttgcaaagttcagaagtatcttgtctgtcaacacagataatctggacaatggagatatggcatatgctttcactttcccttccacttcatttggatgcatgaaacaagacaaccacagcttgattcctttggccctggagaatgactccttcttaagcgacctataccaaacacacctgttatccccaacaacaccagaatcaaattatttcccatctccaactttccagatgaatgagtttgatgggatctacaacaggtcacattcgaaatccgatatcaatgagatcatttccaccaacacatcagcaaccaattctccaattcctgatttcaatttctcacttgatccggtggaaattgatccaaatttccctttcaataccccaggatttttgtgctgattgcactataaatggaatactataagaatgtagtcttcataaaacgggacaatttcagacagcagtagaattgtagaataaagaatgagcaactgcagcacttatgaacgtccttgtagtcaatatcagaattgcaattttggctccgtgttagcaattagcagtatgcactttcaaataaaatagtttctgcaaatttgcattggtacaacctacaagacacgtctttagtagaagggcattaaagggagcagataaaaaattacacatcaaaaattggatacgctggccaaaactctgtaatttcattccaattgatgacttagttacacaaatatccatatttatttacagcagccccagagcctgaaatgatacaaatatataatgatagtgacaaagtgacaatagaatggcttgtaacatgaaatctgcatcctaggattcttgttgttgttgttctactcgtccaagactgagttaggagtggaagcattttg

SEQ ID NO: 8364 - DNA, 1662 bp, Glycine max
  Clone ID: 700749504_FLI
gaacgccattgatgccaaaccgaagcttcgagacttacatcttcgcgctcttcaatgagaaccaaaagcccggcccaatagccgaacgcaactggggcctcttccaacctgatttcactcccgtctacgactccggaatcctccgcaacggacaggtttaatcttttttttttaacttttcaccttaacactaataatgataagtgcaggtaccacacccctattaaaaagagagtcattaaatattagtaagacctaaagaaatatgatttttgtgaaattagtgttttatttattagttttttacgtataaaataatggaaaaaaagagataattatgatctctttgtccttttactttttgctttttcagtttttctctccaagatggagtacaatacacaattcgagatgcaccggcctgtaaagccgtcgattattgtgaaccttttgtggttgataatttaaatagcacccccctcatctaacggttgagatagagaggtgccccttgttgctttttagaaggagaatttggtctagttcgtcacatggcctgtttactatctaacaattatcaaattctaacaaacggtcatatgggcacacttttcttagcttttagaaaatcttgattaattcataaaagaatttgattatagtaataagatattgtattttttttaattagaaatttttgagtaactttctcttgagtgattggaactttttctttttaccaatgaatgattggaacttggtagttagtagtgctaaattgggttaatggattacaaaatgtgtcttgttgtaaaggagaaatccatagtaatttggagcaatcagatcagaaattatgcttggtatcacttttaaggtattagttattataaacaccaccaacaaagggctacataattatcatccacgacaatttttaattggttgcacatgtgaaaatccttgagactgtttgtacgtatgtagtatttgcttaataatattacatttctactcagataaatttcttaccatcatgtaatgttgttgttgagacatttttgaatgaataaatgcaggcagttacacctgcaagacctacacctacaagacctgcagctcctacaaaacctgcacctgcagtaggaggtcaaaaatggtgtgtgccaaaggcagatgctagcaaccaagctttgcaagcaaacataaactatgtgtgcagccaaggagttgattgtaggccaattcaaccaggaggagattgctttgcagccaacaacgttaaggctcttgccacttatgccatgaatgcctactaccaggccaatgggcgccatgatttcaactgtgacttctctcaaactggtgttattactactactaatccaagccatgataaatgcaaaatctgagcatgtttatttaaaggttataatcagaggcaagaaaggaagatagagaaaagcccattgtcatggtgtcaatgtggcttagtggtatctgtgactctgagattatgcattcatgtactcaaaattatttagtttgtatattgttctggaagaagaatgttggcatggtatttcgtgccttgactagatatgatggtccatcgactactaaataggaactttgcattaatattaacatcattcgtagctg

SEQ ID NO: 8365 - DNA, 632 bp, Glycine max
  Clone ID: 700749617_FLI
taaatgcaccgttctctatcctgcttctgcaaaggctagcaatgagattgaggaaggactttcaaaccgtggatttgaggttactaggatgaatacatatacaacggtgccagttcaacatgttgaccatacggttctaaagatagcacttgctgcccctgttgttacagtagcttcaccatcttctattcgtgcctggaagaatcttctttcagattctgagtggaacaattctgttgcatgcattggtgagacaactgctacaatggcaagaagtttaggtttcacaaatgtgtactatccagcacaaccaggcatcgaaggctgggtagaaagcattcttgaagcattaggttcctatgatgaattattgaggtaggtctcagctctttgtagcaacctggagatgttttcaactgtttctctcatgctgcaagattaatataatgatttggcatcgtggatggatatactctctgttcagtagtagtatttttaaagatacatttagcttcaataaagtaaggagagtgtagtgtatattaggaaataaagtgcacttatcgtcattgattaaaatataaatatttttgtaattaatttcaaagtttgttatacatgcacttgttttt

SEQ ID NO: 8366 - DNA, 892 bp, Glycine max
  Clone ID: 700749669_FLI
gcattttatggtgtagttcaggatggaccaggagcaacactagcgactgttgccgagtacatggtggatggttctcttaggaatgttttgcttcgtaaggataggtatcttgatcgccgcaagagactgataattgccatggatgctgcttttggaatggaatatttacactcgaaaaatattgtgcattttgacttgaaatgtgacaatttgctcgtgaacttgaaggatcctatgcggccaatatgcaaggttggtgattttggcctatcaaagattaagcgaaataccttggtgtctggtggtgttcgtggaactctaccttggatggcaccagagctactaaatggtagtagcaataaggtctcagaaaaggttgatgtgttctcttttggcattgtcttatgggagattcttactggtgatgagccatatgctaatatgcactatggtgcaatcataggaggcattgtgaataacacattaagaccaacaatccccagttattgtgatcttgactggaaaacactaatggagcagtgttgggcacccaatccagcagtcaggccatccttcaccgaaattgctcgccgcttgcgtgtgatgtctgcagccgctagtcagatcaaaggacagggccacaaggcatctaaatgaaaatcaacagatttgatctgattgccacacacggttcattcaattatgctccaaaaagatatatattattgttatacaagggccaacaataattgtttgtattgtagttttctggtccctgctctttttgtatttgattgtgaatatgtatgtgtgcatgtgaaaaaccacatatatagactgtgcaaattaacatttgacttaatgctatttccacagtgaattttggactgcc

SEQ ID NO: 8367 - DNA, 1629 bp, Glycine max
  Clone ID: 700749863_FLI
cacgcactcctcctcctcctaggtggaattggaattggggatctactagatgggcctaatcagaagcatgagatcgcggtcacagcgtgtggtgcaggagcaagaagctgctgagtgtgtcggtgtcgtcgtcggcgacagcatgcgacagagttgttgggccaacatgccccaagagcttctccgagaggtcctcctccgaatcgaggcctccgaggacacgtggccgccgcggaagagcgtcgtctcctgcgccggcgtctgccgcagctggagacatatcaccaaagacattgtcaaaacgcccgaactctcctccaagatcaccttccccatttctgttaaacagcctggcccaagggagaatctcctacggtgctttataaagcgcaaccggtccacccaaacatactatttgtttctcagtttaaccagtacgctagctgaagatgggaagttccttcttgctgcacgcaaatgcagacgtccaacctgcacagattatatcatctctcttgacgcagatgatatgtcaaagggaagcaactcctatgttgggaaactaagatcaaactttcttggaacaaagttcacaatctatgatagccagctgcctcatacaggagcaaagattatgaaaagtcgctccacaaggctggtgaatctaaagcaagtttcacccaaggttcctacaggcaactatccagtggcccatatttcatatgaattgaatgtgctaggctcaaggggtcctaggagaatgcattgtgtcatggattccattcctgccactgcaattgaacctggaggtgtagcacctacacagactgagttttctcttaacaacatagacatgtttccttcattcccctttttttcgatcaaaatcaaatcgtgcggaaaattccatgtctggaccattggttgatcaaaaggatgggatgctagtgttgaaaaacaaggcccctaggtggcatgagcagctgcaatgttggtgcctgaactttcatggacgggtgacaattgcctcagttaaaaactttcagctggtggcttctgcagaaaacggacctgctggaccagaacacgataagatcatcctccaatttggaaaagttgggaaggatttgtttacaatggattaccggtaccctatctcggcatttcaggcatttgcaatctgcctcagcagttttgataccaagattgcttgtgaatgacatgtttaaacagtttcaatccagattatatagctatatctcttgctgcttggagaagtatggcttgaatgtcacttgttgggaagcagaaagatgaaaaatgtttgtcaaggtaaagattggttggatgagcattgaactgaattcgaaaaaaccattcagtttctgggatcacaatttaccagctcttgggaagataacataaaattggaatgttacttgaaactcctccaccatatcccacaaaacaaaacacaaaaacgggaaaaatacatttattcagacccccgtgtacataaattctctatttctttcaacagtttggttgtttattgtaatgtagtagtggttgtttataacatgtccatgcaagacatgttttgttaatgtgactactagctttcaactt

SEQ ID NO: 8368 - DNA, 1648 bp, Glycine max
  Clone ID: 700750004_FLI
gttggatatgtagcagaactgcttcaccttcttctcttctctccgcctccaccaccactccctcactctccactccctcaattcacaatcctcacgttgcctcgttcacatgaaactcctctcgccctccgtgttctcgctctctctctgaatcactcatccttataataaataaataatttctcgaagaaggagaaagaggttttcattgttgtggttgttgtagaagaagaagaagctgaagaagaatggagtccacagaatcttcatacgtgtcttctcccgagggaccgaggaagcacgctgcatcgcctcctccgaaatcgccttcgctagattctgaggagaagccaacatacattaggtttctagtatcaaactctgcggctggttcagttattggaaagggcggttcaactatcactgattttcagtcacaatctggagcacgaatccagttgtcacgtaatcatgaattctttcctggaactactgataggattatcatggtatctggcgcaataaatgaaatacagagggctgtagaacttatcctttctaagttgctcagtgagcttcatagtgaggatgacaatgatgctgagccaaagacaaaagtgagactcgttgttcctaatggttcatgtggtggaataattggcaagggaggtgctaccattaggtcattcattgaagactctcaggctggcataaagatatctcctcaagataataattactatggacagaatgataggctagtgacgctgacaggatcttttgatgaacagatgcgtgcaattgaattaattgtttcaaagttatctgaagatcctcattatgcacagtccatgaattctccattttcatatcctggttatcagggtgttccatacacatatgtgcttccgtctgttgcaccaccggcatacaatgcagtgaattacagaccaaatggtgctgctggaggaaagctccagaacagcaaggaggagcggagtaactcattgaccatgggtgttgcagatgagcatataggattggttgttggtcgtggtggaaggaatattatggaaattagtcaggctagtggggcaaggataaagatatcagatagaggtgattacgtatctggaacaaccgataggaaagttaccataacaggatcccagagagcaatacgtacagctgaatctatgatattgcagaaggttgcttatgctaccgagaggggggtgatggagtagtttgctactgcacttgtctgctgttagatgcttaatgaatctgcttgctaattgcttatacatttgctgaattttgggatttgtttgcataaattatcatcacttattatacctttgaagatttttattgtagcgggagagggcaggaattttttttttcttgaattgagagcggtcttctagaatttcttctcaaaccccgtcatcagacaagttcgattggaaagtgcatttgcacatttccaaaatgtagtatttagaactaaattcttttttttgtaattcaacaggtgctaatgtcatatatgatctgtgtatcctcaatcactagcctgagataggatatgaaaattgttttgtgatagcaactgagaatcaagaattcacttgtgagttgtcag

SEQ ID NO: 8369 - DNA, 1512 bp, Glycine max
  Clone ID: 700750041_FLI
tcttgacaaaagatcaagatatacgtctaggtgactttggtcttgctaaaatgttgtcatctgatgatcttgcttcctcggttgttggcactccaagttatatgtgcccagagcttcttgctgatataccctatggctctaagtcagatatctggtctttgggatgttgtatctatgaaatggctgcttacaagccagcttttaaagcttttgacatacaatcattgcttataaaaataaacaagtgtatagtatctcccatgccaactatgtattctgctgcttttcgagggcttgtcaaaagtatgttgcggaaaaatcctgagttgaggccaactgctgcagaattacttaatcatccacatcttcagccttacattcataaaattcaactaaaattaaatagccccagaagaagtacttttccattccaatggcccgagtcaaattacgtaaggagaactcggttcgtagatccagagtctgtttacactctttctgacctagataaatgtttgtcatttagcaatgacatggccttgaatcctagtgtttctggaactgaacaagtttctcagtgttctactcaaagagcacatggattatccacttgttcaaaagagaagatctatgaactatctgtaggttgtgtccgtgaaaaatacaaaactgacaaatcaaaagccagtaagttctcaactgttgagagaacaccaagatcaagagcagttacggtttctgccactaccaaaaggcatacaatagcaacatcaaagacaacccattctggtccaaaacgtgattcacttccagcatctcatgcaccatctagaaaattttccacaccaccaagaaccagggcaagggcaacaccaaacttgtacactaatgttcttggaagtctagactctcttgatgtttccattaatgcaccgcgaattgacaagatagttgaattcccaatggctttctgcgaggatcctttttcacctatccgtggaccatcatcaacatcagcgcgctgctcttctagttcagcagggagtactgctgattgctccatcacaaaggacaagtgtacaatccaagaggacaaagttactctccccacaagtatcactgatgcttgccctgctccaaaggaaactaaatgctcttatgagcatgtcaaagattgtgtttcaagtcattcctctactgacttggatcaacgccggtttgacacatcatcgtaccagcaacgtgcggaggcattggaggggttgctggagttcagtgctaggctcctacaacaacagaggtttgatgagcttggggtgttgctaaagccattcgggcttgagaaggtttctccaagagaaacagctatttggttgaccaagagctttaaacaaactgcagtctaaggttttctttttcatgcatgcatatgattatttgctaactgatagtgtacataacgttgtacatttgacgataaaatagtgaataatgacttttattattggtgtt

SEQ ID NO: 8370 - DNA, 2065 bp, Glycine max
  Clone ID: 700750047_FLI
aaaaagtgtatgagcgttaaaactggatacttgaggcaagaaactgttccgctctcagttgaaagtcaacgaagtctcacagcacactcagatctctcttctctttcttcaattccattgttgtttggttcccttcactctcacaatgcgaatcctcgtcctgctctctctcgccacccttctcctcttctcctccttctctcccaccttctgcgaccacctcgccgacgacgaggacctcagcttcctcgacgagccctccgccgcgccggagcacgaccaccactacggcgccgatgactccaatttcggcgactttgaggacttcgaggaggacgacgcggaggcgtacaagcagcccgaggtggacgagaaggacgtcgtcgttttgaaggagaacaacttcaccgacgccgtcaagaacaaccgcttcgtcatggtcgagttctacgcgccctggtgcggccactgccaggccctcgcgccggagtacgccgccgccgcgacggaactcaagggcgaagacgtaattttggcaaaggtggatgccaccgaggagaatgaattggcgcagcagtacgatgttcagggtttccccactgtccacttcttcgttgatggcattcacaagccttataatggccaaaggaccaaagatgctatagtgacgtggattaggaagaagatcggacctggcatatacaacttgactacagtggaggaggctcaacgcattttgaccaacgaaactaaagttgttttgggcttcctcaactctttagttggtcctgagagtgaggagcttgctgctgcttcaaggcttgaggatgatgtcaatttttatcaaactgtgaatcctgatgtggcaaagcttttccatattgaccaagatgttaagcgtccagcattgatcctcattaagaaagaggaggaaaaacttaaccactttgatggaaaattcgagaagtcagcaatagcggactttgtcttctccaacaagcttcctttggtaacaatttttacaagagaaagtgccccatcagtctttgaaaatccaatcaagaaacagttgttgctgtttgcaacttcaaatgattcagagactttggtcccagcatttaaagaagcagcaaagtctttcaagggaaagttgatctttgtatatgtggaaatggataacgaagatgttggaaagcctgtttcagaatactttggtatcagtgggaatgctccaaaagtacttggatacactgggaatgatgatggaaaaaaatttgtgcttgatggagaggtgactactgacaaaattaaggcatttggggaagatttcgttgaagacaagctaaaacctttttacaagtcagatccagttcctgaaagtaatgatggtgatgtgaaaatagtagttggtaataattttgatgaaattgtcttggatgagtcaaaggatgttctcctcgagatttatgctccctggtgtggccattgccaatcactggagccaatatacaacaagcttgcaaaacatcttcgcaatattgattctcttgtaatagccaagatggatggaacaacaaatgagcatcccagggctaagcctgatggattccccactcttctcttcttcccggcaggaaacaagagttttgaccctattactgttgatacagatcgtacagtggtagccttctacaagttcctcaagaaacatgcatcaatcccattcaagctccagaaaccaacctcaacttctgaatccgattccaaggggagctctgatgccaaagagagccagagtagtgatgtgaaggacgaattatgaggagttaagtgatatatttttatttatagaaactatgattcagacagatgatgacatagtgactgaggtaaaaaataccaagttacttctcacccctggtcaataaaaaacaaacggggagtggggggagagagacaaatgcgaggcacacatgtattactattaacttcaatttgtacaacagtgggtaatttagaattttgattttgggttgagacttcaataaattcccccttaaattcc

SEQ ID NO: 8371 - DNA, 2126 bp, Glycine max
  Clone ID: 700750091_FLI
ccgtctttatgtccctttatttttttgagggttaaaaactgctgtgaaatatttttctaggattttggctaatcgtctatcagctgctcgctcaaaagagaggaagatgcggtacatttctgaattagagctcaaagtacaaacacttcagacagagacaaccacattgtctactcagtttaccaaattacaggtgtgtacggtctgagttgagccaatattcccttttcttcagtttttcaattatattttattgtgttgaataatgtttgcttctagcattcatttattcttttctttcctttcttttgttgtgcttgtctacagatggataattcagagctgaaaagtgagaataatgagtacaaattgaggattcaagccttggaacagcagtcccaactaaaagatggtatgcatatgcatttctcttctactttatctattagctcaaatctgctctagcttgttccacccagtaaagggtgaacttttccaactttatacagaaataacttatatttatcatctggttcaatgatctctgattttcatttagtaaatggattttatgtgtgataacacggttcaatattgtgttggttctcaacatgtaaatggctgatgttaattcactaaaagttgagtgattttctatccaattatgttcaaaatctctgcacaactgcgcctttgaaatctacctgtctggtctaggaatttgattcaatcttgcagaatgcaaagtacatttgcactagtagtctagtaccatgtttttctaaagttcttgttttgcatttcatggcctctttagaactgcatatgagaaaatgttagtgtaattttgccaacacagatggtgtcacttaaactctccttgatgccaaaatagaaagaaaaagagagagagaacacgatactaggaagggaattctgatagtcaaggttcaaatgttctttttattgtacatactaaaataatagaactctttatatatgatgtttcgattcttaatggaaaatagttgaaaactacactaatttcgttattaccacaaaacttctgttgtcttcatgcctaatgcctttatcagcagtgacttctttactagatgtttctttgtaatgcaattatacactgtaaacttgtatctccaagaccaaggcattggcaatatgtttttagcagcttgaacttgtaactcaatatgtatctccatttcatcagcctctcccttctaaaatgcactgtactgccttgtttttgtgctggagatgaatactttagctgtgctatccatcatttgtgtgcttgttttggcagctctgaatgagaccttggatgctgaagtgcggcgtttaagacgcacagttgcagaacttggtggagagtctcttctgctcaagtcgcatggctcaacagcttgctattagccaacaagtgttcccagttacagcaccagcagcaccctaaccagcttagacatgttcaactggacaatagccattcccaggagcagacacagactcagtcacagtgccacaatggcaaagctactgcctactgattagcactctgataccatgtatgctcaatgtttgtgatatgaatctgaataggatattgcatgaccaaacaagctcaagtaaaaaaaaaaaagactcgattctaagagaggacccgttaacaaaaagaaaagttcaaaagatacaagaggcaaaaggagtctgtgaatgcaattcctatctaataaggttgtagttcgacttgtgcaagcccaaggatatgattatatgaagactcaaaatagtgtataattgttaactttattgcctaagatttgtagttattatttgtaaatctaatgatgatttgagatagatttcattagaatttatgattgattttattaagatttgttttaattgatttttttaaaatttgtttcgtctattaaaatgaagattctatcatttgtttggatatgtttcttattattatgatttgttttctatttttcttcttctatcatttaaactcacaattgtttaaatgaattaagagctttcatctggctcatgtaatttaagttagattttgaatgaaatatcaaatatgagtt

SEQ ID NO: 8372 - DNA, 797 bp, Glycine max
  Clone ID: 700750112_FLI
gcaccccctcagacgaagaagtgattctagcgtcagcgcggccaaagaagcgagcgggaagaagagtcttcaaggagacaaggcaccccgtctaccgaggagtgcgtcgcaggaacaagaacaagtgggtctgcgagatgcgagtccccaacaacaactcacggatttggctcgggacatacccaacgcccgaaatggccgcacgtgcgcacgacgttgcggcgctcgcgctcaggggaaagtccgcgtgcctcaacttcgcggactccaggtggcggctgacggtgccggcgaccaccaacgcggaggagatacggcgagcggcgggggaggctgctgaggcatttgcagttgcagatggggacgacgttaatattgaacaacagcagagtgtgatggccacgaatgatgatgaagttcaagagcctctccagcaggaggaggttcaagacttgcatgatttgcttttgagtattgcgaatgagcctttgatgtctcctccaccctgtgcaagagatggtagggactggaatgacgtggacatatttgatgatgatgaaatctcactatggaacttctcaatttgacgcgtacgtcattaagagtatgactgtatgcatgtttgatgataagcgaaaacacctttttgtgtatgtgattttctatatttttagggacctgttgtgtgtagataaattaagtagcactcgattgattaagttgagtggagttaaacatattgtagttgtatctatgatttgtttcgtgattaaattttaatgacaagtacagttggc

SEQ ID NO: 8373 - DNA, 824 bp, Glycine max
  Clone ID: 700750122_FLI
aactggtccaacattggataatacccatgtaagtactgtggtaaagggtagttttgggtacttggatccagaatacttcaggaggcagcaactgactgacaaatctgatgtttactcgtttggtgtggttctctttgaggtattgtgcgctcgaccagcattgaaccccacccttgctaaggagcaagtgagtctggctgagtgggcagctcattgctaccagaaaggcattcttgactcaattattgatccttatctaaagggaaaaatagctccagaatgcttcaagaagttcgccgagactgcgatgaagtgcgtggctgaccagggcattgataggccatccatgggtgatgtcttgtggaaccttgaatttgctttgcagctgcaagaaagtgcagaggaaagtggcaacggttttggtgacattcactgtgaagagccactgtacacagattctaaaggaaagaaggactctgatccgggttatgatggcaacgtgaccgactccagaagcagtggcatttcaatgagcattggaggtagaagcttggctagtgaagactctgatgggctaacccctagtgctgtgttctcccagatcatgaatccaaaaggtcgttaaggttatgcagtagtaacaacactttcactacatacgcggtcaacccactcaagttctgtagtgcaatctgctttcaccaaatttgaatgttactcgttattcattttcttaatattgctattcctttgtatgttgtttctaatttattatgattatgtaagttgtaatttgtgaccatgttatataaagattgaagagc

SEQ ID NO: 8374 - DNA, 1340 bp, Glycine max
  Clone ID: 700750148_FLI
gtacactgttcctatggctaccaccgaaggttgcttggtcgctagcaccaacagaggctgcaaggcaattcacgtctccgggggagcttcctccatgctcctccgtgacgccatgaccagagcccccgtggttaggttcaactccgccaaacgtgcttctcagcttaagttctacctggaagaccctctcaatttcgattcccttgccgtcgttttcaacaagtcaagcaggtttgcgagattgcaagatattaaggcagcaatagcagggaagaatttgtacattagattcagttgcactacaggggatgccatggggatgaacatggtttccaaaggagtccaaaacgtgcttacttttctccaaagtgattttccagatatggatgttattgggatatctgggaatttctgttcggataagaaggctgcggcagtgaactggattgaggggagagggaaatcggttgtatgcgaggctgtaattaaagaggaggtggttaagaaagtgttgaagaccagcgtggaggctttggttgaacttaacatgttgaaaaatcttactgggtctgctatggctggtgctcttggtggcttcaatgctcatgctagtaacattgtttctgctgtttacttggccactggacaggaccctgctcagaatgtggagagttctcactgcataaccatgatggaagctgtgaatgatggcaaggaccttcacatctctgttactatgccttcccttgaggtgggtacagttggagggggcacacaactggcgtctcaatcagcatgccttaatttactaggagtaaagggtgcgagcaaagagtccccaggtgcaaattctaggttactagcaaccatagtagcaggttcagtccttgcaggggagctctcactcatgtctgcaattgcagcaggccaacttgttaatagccacatgaaatacaacagatctagcaaggatatcaccaaaattggatcctaattaagctagctagctagcttggacaagaacttaaaattgtatcatcaatagtaaaagcaaagaatgcaatgcaattgtataattattagcttcagaaggacaattaattcgtgttggtgggagatgacctgcaattagagtacttcattaatgtctagtcactttatacgagtgttttatctgcttctgatgtgtacagaacatgaataagactttagtttaattttgctactcttctttttttagtttttggtcttttgatgaaaaacttgttttcaccatatgtatgtgttgtgtgtcggtcccatcatcatctaaagcaaatgtatcaaggatgtggtatttt

SEQ ID NO: 8375 - DNA, 991 bp, Glycine max
  Clone ID: 700750160_FLI
cttttttcatctaataatggctgcaacaacacgttcacgtgcatccatctacgatgtgttcctcaacttcagaggggaagacacacgctatggtttcaccggcaatctctacagggctctttctgacaagggaattcgtaccttctttgacgaagagaagcttcacagcggagaggaaataacacctgcacttttgaaggcaattaaagattccagaattgccatcactgtgctctctgaagactttgcttcttcctcattttgcttagatgaacttacatccattgttcactgcgcccagtataatgggatgatgattataccagtgttttataaggtgtatccttctgatgtcagacaccagaagggtacttatggagaagcattggctaagcataagataagatttccagaaaagttccagaattgggagatggctctgcgtcaagttgctgacttgtctggctttcatttcaaatacagagatgaatatgagtacaagtttattgagagaattgttgcgtcggtctctgagaagattaatcctgctagaatacatgttgccgatctgcctgttgaacaagagtccaaagtgcaagatacccatcaagagcaagaatacagagaggctttcaaggtgtttgacaaggatcaaaatggctacatttcagcaagtgagttgaggcaagttctgatcaaactgggtcaaaacacaactgttggagaggtggaggagatgattgcaactgcagatttcgatggtgatggtcaaattagctatgatgaatttgttaagactatgaaaatttaaaccaacaaattaataagtcttccaattaatgtttgttgtattttacttttatcacatgcattgatgtgaatgatctcagccgcccatttcatttgttcaaacttcaacccgtaattattctttcagttttagtttagtattcttcatgtttcaaaattaattggagtaaatttattcaag

SEQ ID NO: 8376 - DNA, 959 bp, Glycine max
  Clone ID: 700750229_FLI
gtgataagcacgtgaagaaggacagcgctagagagaaacaaaccaaccctgaaatccaaatccgaatccaaccctctccaacgtcactctcaccctctctctgttttctgtctcttctttcttttatcacacaacaacatacacacgccctcttcttcttccttgcatggactaactcagagactaaaccataccaaaaaaaacaacatgtgttccgcagagaaggacgggatcatgctcttcggcgtgcgcctctccgtcgtggataaccaccccacctccttcagaaagagcgctagcatgaccaacctttctcagtacgagtctccaccaccgcacgatcccaacgcagggtatgcctcagacgacgtcgttcacccctcccgtcacacccgcgaacgcaagcgaggggttccgtggacggaggaagagcacaggttgttcctgctgggattacagaacatcggtaaaggagattggagagggatttctagaaacttcgtgaagactcgtacgcctacacaggttgctagtcatgctcagaagtacttcctccgccgtcacacccagaaccgccgccgccggagatctagtctctttgatatcaccaccgactcggtgatggaaccgtggccggagaaggaagaggaacaagtggtgttgccgtcagctaggtcgaaaccggttctgccggtgcctccgtcgtcgaagatggctgagttggacttgagtgggaagtcgctgtcgctgaagcttccggtatccaagccacctatttctaatgagaattttggcgggataccattatcggtgttgcttgaaggttaattaaatgcggtcttgattgaatttttgcatgtaaaattggaaatatactagtattattgaagagttggaatttagaagagggttagagaattattaattattgaaatgtatgtatatatttttctttgatg

SEQ ID NO: 8377 - DNA, 1416 bp, Glycine max
  Clone ID: 700750243_FLI
cagaattctctaaaagagatctttttctgctctttgaagaaagaagggtctttgcttgattttggagatgtctctgctctcagatctcatcaaccttaacctctccgataccaccgagaaggtgatcgcagagtacatatggatcggtggatcaggaatggacctgaggagcaaagcaaggactctcccaggaccagttagcgacccttcagagcttcccaagtggaactatgatggttccagcacaggtcaagctcctggtgaagacagtgaagtgattttatacccacaagccattttcagggatccattcagaaggggtaacaatatcttggttatctgtgatgcctacactcctgctggagaacctattcccactaacaagaggcacgctgctgccaaggttttcagccatcctgatgttgttgctgaagtgccatggtacggtattgaacaagaatacaccttgttgcagaaagatatccaatggcctcttgggtggcctgttggtggtttccctggacctcagggtccatactactgtggtgttggcgctgacaaggcttttggccgtgacattgttgacgcacactacaaagcctgtatttatgctggcatcaacatcagtggaattaatggagaagtgatgcccggtcagtgggaattccaagttggaccttcagttggaatctcagctggtgatgagatttgggcagctcgttacatcttggagaggatcactgagattgctggtgtggtggtttcctttgaccccaagccaattaagggtgattggaatggtgctggtgctcacacaaactacagcaccaagtccatgagagaagatggtggctatgaagtgatcaaagcagcaattgacaagttggggaagaagcacaaggagcacattgctgcttatggagaaggcaacgaacgtcgtttgacaggacgccacgaaaccgctgacatcaacaccttcttatggggagttgcaaaccgtggagcttctgttagggttgggagagacacagagaaagcagggaagggatattttgaggacagaaggccagcttccaacatggacccatacgtggttacttccatgattgcagacacaaccattctgtggaagccatgagcaaaacctgcatgttttctccctttggatggaaaggaacagttatgcttttcttagtaggatttggtctctctctctttttaccttttgattggtactatggttggtgccttgttggttggtgcaactaactggcaagggttgttcattgttttcttctattcctttccctcgttttccgattgttacaatgacaataatttaatggttattatcagtcttgaacaaagaaatgctgattgtgaagtataataataatatatgaaattgtcatgttc

SEQ ID NO: 8378 - DNA, 1694 bp, Glycine max
  Clone ID: 700750279_FLI
gtgaaagttggaatggcgaaaaaggcagtgttgatcggaataaactacccaggaacaaaggcggagctgagaggatgcataaacgacgtgtggagaatgcatcgctgcctgatcgagcgatacggtttctccgaagacgacatcaccgttttgatcgacacggacgagtcctacacggagcccaccgggaagaacatccggtcagcgctgaccaggctggtccgatcggcggagcccggggacgttctgtttgtgcactacagcggacacggcacgcgcctccccgcggaaaccggagaggacgatgacactggttatgatgaatgcattgttccttctgacatgaaccttatcaccgatgatgatttcagagaatttgttgatggggtccctagaggttgcaggatcacaattgtgtctgattcttgccacagtggtggcctacttgaagaagctaaggagcagataggagagagcacaaagggagaggaggaacaatctagctctggctttggattttcaagttttctacatcggactgtggaagatgccattgagtctcgcggattccatatcccttcagcgttgcgccacaacagaggcagggatgatgatggtgatgaagctcaaaatagggatattgaacttccggatgggggctatgtaaagaacaggtctttgcccctttcaaccctcattgatatactcaagcagaaaactgggaaagatgatatagatgttgggaaactgagacctacccttttcgatgtttttggggaagatgctagtcctaaagtgaaaaagttcatgaatgttatttttaacaaactccaacatggaagtgatgaaagtgggggtggaatattggggctggtgggtggtcttgcccaagagtttctcaagcaaaagcttgatgacaatgatgagggatatgcaaagcctgcactggagacaaaagtggaaagtaagcatgaggcatacgctggaccaaccaaacgcggccttccggatggtgggatattgatgagtggatgtcagactgaccaaacttctgcagatgcaagtcctgcaggcaacgctgccagtgcttatggtgcttttagcaatgcgatacaggctataattgaggagactgatggtgcaatcacaaaccaagaacttgttcaaagggcaagagagaagctgaagaactccggtttcacacaaaaacctggactctattgcagtgatcaccatgttgatgctccttttgtgtgttgatctcttctcatctgatgactgatgcagagaaagagagaataatgtgtgttgtttatagtatgcttgtgtattgctgtatatgtttggacaatcaaattgaagttagtgtgttttcatacagttttcctatgcatcactattatcaggtacggaccattccctccaacattttagcacttctaatgtctccgctgattacagcattatggtgtatttgctgctacttgaccattttgcggggagaccaaactatcagagcaagttctatgcaccaaaccacagacttcggctctgtaaatctgaataaaatggtgtatgtgaaattattataaaatatatggttaagttttgtatttcctttgcaacattcttgcaactttgtaaggattttaatttgttgaacttagttgtagtatacttataatgttatgttt

SEQ ID NO: 8379 - DNA, 821 bp, Glycine max
  Clone ID: 700750285_FLI
aagaaatctgaattgtcggtcttagttgatcgggccactggaggaggcagtatcaaagatggtcaggtggaacttatgcttcataggcgcatgctctttgatgatggcagaggagtagacgaacgtcttgatgaactagtgtgccaaaatgatagatgtcaaggactaacagtaagaggaaattattatgtgggcatccacaaacttggagctggttcacactggcgccgtacaactggtcaggaagtttattcaccactattattggcttttgcacatgaggacttaggaaactggaaggcctttcatgtgaccagaggaactgtcattgatcctaattacaacttacctcccaatgttgctctgataactcttgaggtgttggataatggaatggtgcttctccgtttggcacatctatatgaggctggtgaagatgctcagctttcaactttgaccaaagttgaattgaagaaaatgtttgccacaaaaatgataaggggattgattgaggttagtttatcagcaaatcaagagaaggaaaaaatgaagaagaaaacatggaacgttgcaggggacaagggacaagggtctaaatcagttaggggtggccctgtcagccatattaatctcgtagttgagcttggtcccatggaaatacgttctttcctgttgaaattctaaaaaatacaatagcccatttgaagatttcgtaataagaaatcaagtaatctagcatgtgtctcttttaattgcaatattccatatcttactgtagaatcatgttagacagttaattatgcaaagtgtcccttaatatc

SEQ ID NO: 8380 - DNA, 1283 bp, Glycine max
  Clone ID: 700750362_FLI
gccagaggccggctccgggaggaaaccgccagactttacttccaacaactcatctccgcggtggacttctgccacagccgcggcgtcttccaccgcgacctcaagccggagaacctcctcctcgacgacgatggcaacctcaaggtcactgacttcggcctcagcactttctccgagcatctcaggcacgacggcctgctgcacactacgtgtggcacgccggcctacgttgcgcctgaggtcatcggaaaaagaggttacgacggcgccaaggctgatatttggtcttgtggcgtaatcctctacgtacttcttgctggttttttacctttccaggatgaaaacttggtggctttgtacaagaaaatttaccgcggtgacttcaagtgtccaccgtggttttcctccgaggcacggaggctcatcaccaagctcctcgacccgaacccgaacacgcgaatcacgatttcgaaaatcatggactcgtcgtggttcaagaaacccgtgccaaagaacttggtgggaaagaaaagagaggaattgaacttggaggaaaagattaaacatcaggagcaagaagtttccactacgatgaatgcatttcacatcatttccctttcggaagggttcgatttgtcgccgttgttcgaggagaagaagagggaggagaaagagttacgtttcgccaccacgcgccccgcgagtagcgtgatttcgagattggaagatttagcgaaggcggtgaagttcgacgtgaaaaagagcgagactaaggtgaggttgcagggtcaagaaaatgggcgaaaaggtaaactcgctattgctgcggatttgtacgccgtgacgccgtcgtttttggtcgtggaggttaagaaagacaacggtgacaccttggagtataaccagttctgcagcaaggagcttcggccagcgctcaaggacatcgtgtggaggacttctcctgcagagaatcctacactcgcttgaacaacaaattcaattcaattgtcgttcctttgtagttttcttgtttcagaacagagacatattttaattatttgcttgcttctttgtttggattctaattctatgttttagcctctcgggggtgtcgtcgtctttttacccaggaaagggggaattgttgaaaaggcgaatgcagtagtagtgaaccgaaatggacatcgaggagttgttgtcgatgattcgggtacatgtgctgcctgttgtattgctcgtggctgatgttgttgctatgttggcgtgattgtgaatatgcttgc

SEQ ID NO: 8381 - DNA, 851 bp, Glycine max
  Clone ID: 700750369_FLI
ctaatttcatggttgctgatctaccttttttgtgacaggctgtttctcattgggctcagtaaatttgggaaaggagattggagaagcatttcaagaaatgttgttgtgacaagaacaccaactcaagtagctagccatgcccagaaatactttctccgccagaattcggtgaagaaagagaggaagagatcaagcattcatgacataaccactgtggacagcaactcagttcctgtgcccattgatcagaactgggttcctcctccgggtggttcagtgcagcaatcactgcaatacccatcaagcaacatgctcgatcaaatgggtacatttgggtattcaaactatggctttggcatgtaaagaatactagactagaagccgtatgttctgtatatagtgctgtagatttgattcataagttcccctatgtaaagttttatggttttgctagctgacaagggtgattaggagtattgctaattattgaattcattagtgtaggtttcgtttgaatacctttgtggatcctataaatgaaccatgaggatgaaagggtagtgaatactaatagtgaacctttaggaatgaattcaacaggtatggaaattctttgtatgtgcccaattcaattactgctttgcaattcggattataagtattgaaatgaaaccctaaaccttggccatttcttcagtgagttcagttgagtgaaagcttactgagtatgcattattgcattcaatcagcaaacaaagcctgtttcggttgctgtttcttgatggctttttatggttaaagcctgcaattttattgaagttaatgaaaagagttgcagaacttttatgtag

SEQ ID NO: 8382 - DNA, 705 bp, Glycine max
  Clone ID: 700750531_FLI
gtgatcggtacttgagaccctggattattccggtgccagagataactttcacagcaagaaccgatgaggatgagtgcttagttttggctagtgatggactctgggatgtaatgaccaatgaagaggttggagaagtagcacgccacattcttagaaggcgccgcagatcattgtcaatggaggaagcatctcctgcacaagttgttgccgacagcttgactgaaattgcattaggtagaaatagtaaagataacatttcaatcatagttgttgatctgaaatcaaagagaaaacgtcagcaaaggcctcctttaatttcctaagaaactgattctcgttaatccttttcaatcttgagaagggcaaagagacggtaatgaagctgtagagttgatctatgaagcaaacccccccctttctgatgaccccattggtacttggtatcacttcagcttgtgtttctcctaaccttctgtacagagttgtttggcaaaaagaatctgcttcatgatagggattgcatgttattaattgttatgatgaagtttagatcagtactcttttttcccccatttggtcctgattcctgaacggttatgtgtggattaaaggaagagatggggaacagaatgaagtcctatcaattattattgtttgattttttttattgaaggaaatggaataaaacatgatgaactttattcc

SEQ ID NO: 8383 - DNA, 1740 bp, Glycine max
  Clone ID: 700750549_FLI
ctgtgtttgcggctgaggattccgaacgagcgaccttcttcgtttctcgcaaagtttaagtcatcatgggtaaggaaaagactcacatcaacattgtcgtcattggacatgtcgactctgggaagtcaactaccactggtcatttgatctacaagcttggaggtattgacaagcgtgtgattgagaggttcgagaaggaggctgctgagatgaacaagaggtcattcaagtatgcctgggtgcttgacaagctcaaggctgagcgcgaaagaggaattaccattgatattgctttgtggaagtttgaaaccaccaagtactactgcacagtcatcgatgcccccggacatcgtgactttatcaagaacatgattactggtacctcccaggctgattgtgctgtccttatcattgactccaccactggtggttttgaagctggtatttctaaggatggacagactcgtgagcatgctcttcttgctttcacccttggtgtgaagcagatgatctgctgctgtaacaagatggatgccactaccccgaagtactctaaggctaggtatgatgaaattgtgaaggaagtctcttcctacttgaagaaggttggttacaacccagacaagattccatttgtgcccatctctggtttcgagggtgacaacatgattgagaggtccaccaaccttgactggtacaagggaccaactctccttgaggctcttgaccaaatcaatgagcccaagaggccctcagacaagccactcaggcttccattgcaggatgtctacaaaattggtggtattggtaccgtgccagtgggacgtgttgagactggtgtcgtgaagcccggtatggtggtgacttttggtcccactgggctgacaactgaggttaagtctgttgagatgcaccatgaggctctcacagaggctcttccaggtgacaatgttggctttaatgtgaagaatgttgcagtcaaggatctcaagcgtggttttgttgcatccaactccaaggatgaccctgccaaggaagctgccaacttcacatctcaagtcattatcatgaaccaccctggccagattggaaatggatacgcaccggtgcttgattgccacacttctcacattgctgtcaagttttctgaaatcttgaccaagattgacaggcgatctggtaaggagcttgagaaggagcccaaatttttgaagaatggtgatgcaggtatggttaagatgattccaaccaagcccatggtggttgaaactttctctgagtatcctccccttggtcgttttgctgtgagggacatgcgtcaaactgtggctgtcggagtcatcaagagtgttgagaagaaagaccccaccggagccaaggtcaccaaggccgctgccaagaagaagtgattgcatttgggcaattttgctagcacatgtgatcatcatcgtggttactcctttatagtagttttatccttgcagagtcttaggtgttttgtttaagttatatttttaagtttctgccgatttcatgtagccgtaactttcaaaactaggttcttgatcggcggtggtcaattttcattgctgtttgtttttgatgagtactgttttttgttttgatggtaagaagagtctgagatatttcgaatttcacaagcagctatagggttttagtccatttcctttgctgctgagggatgttttaagttgcatttaatttataacgaagttttat

SEQ ID NO: 8384 - DNA, 1197 bp, Glycine max; identical to SEQ ID NO: 438
  Clone ID: 700750583_FLI

SEQ ID NO: 8385 - DNA, 854 bp, Glycine max
  Clone ID: 700750617_FLI
gccgggtaagttttttcgtgagaagatgatgaaggaaggaaccgtgatgccgatgcctgacataaaagataaaatgccggaaaggtcgtttttgccccggagcattttatcgaaattaccgttttcggtttcgaagattgatgagttgaagcaagtcttcaaggcttctgataacggctccatggagaagatgatgaaggactcgttggaggagtgcgagcgtgcaccgagtagcggcgagacaaaacgctgcgttgggtcgctcgaggacatgatcgattttgcaacctctgttttgggtcgaaacgtcgccgttcggactacccagaacgtgaacgggtccaagaagagtgtggtggtggggcccgtcaggggaatcaacggtggtaaagtcacccaatcagtgtcgtgccaccagagcctgttcccttacctgctctactactgccacgcggttcctaaggttcgggtctacgaagcggatcttctcgacccgaaaacaaaagctaagattaaccgcggagttgccatctgccacttggatacatcggattggagccccacacacggagcgtttctctcgctcgggtcggtcccgggtcggatcgaggtgtgccactggatctttgagaacgacatggcgtggaccattgcggattgagaaaagagaccatcagaataaggaataagagtcacttctataggaaattaaagttaaattaaaacaaaaaaagaacttctgttctgctaagaaaatttagcagtctcgagaattatttgtttttaatttaaaaattaagtaatgtaattttattttttttggatagaaaagtttaagtcatgttttttttact

SEQ ID NO: 8386 - DNA, 1815 bp, Glycine max
  Clone ID: 700750635_FLI
gcatgctgtgtgttaggtggtgagaagaacgaaaaaaaaagaaagatcatggcgatggcaaacttggctcgacggaagggttacgccgtcgttttgtcgtcgaggtcgtcgctttgtctgacaaggtggagggggttcgcgtccggatctgacgaaaacgacgtcgtggtcatcggcggcggtcccggcggctacgtggcggccattaaagcggcgcagctgggtctgaaaaccacttgcatcgaaaaacgtggcactctcggcggtacctgcctcaacgtcggatgcatcccttccaaggcacttttgcattcttcccacatgtatcatgaggctaaacatgcatttgccaaccatggggtcaagttttcatctgtcgaggttgatttgccagccatgatggcccaaaaagataaagcagtttctaatcttaccaagggtattgaaggtctattcaagaaaaacaaggtaaactatgtcaaaggttatggcaaattagtttcaccatctgaggtctctgtggacaccactgaaggtggaaatactgttgtgaaaggcaagcatattataattgccactggctcggatgtgaaatctctgcctgggatcactattgatgaaaagaaagttgtttcatcaacgggagctcttgctttgactgaaatccccaagagactcatagtcattggggcaggctacattgggctggaaatgggctcagtatggggccgacttggctccgagataacagttgttgagtttgcatcggagattgttccaaccatggatgcggaggtccggaagcagtttcagcgttctcttgagaagcaaggcatgaaattcaagctgaagactaaggtggttggagttgatacttctggggatggtgtgaagctaactcttgaaccagcagctggtggtgatcagactacacttgaagcagatgttgtcctggtatctgctggtaggaccccattcactgccgaacttgggttggacaagataggagttgaaactgacaagattggacggattttggtaaatgaaagatttgccacaaatgtctctggtgtttatgcaattggagatgtaattccaggcccaatgttggcacacaaggcggaagaagatggtgttgcttgtgttgagtacatagctggtaaggttggtcatgtggattatgacaaagtccctggcgttgtctatacaatgcccgaggttgcatctgttgggaagacagaggagcaggtgaaggaacttggagttgaataccgtgttggcaagttcccattcctggctaatagcagagctaaggcaattgacaatgctgaaggactggtgaagatattggctgaaaaggagacagacaagatattgggagtgcacattatggcgcccaatgcaggagagcttattcatgaagctgcaatagcactacagtatgatgcatcaagtgaggacattgcacgtgtgtgccatgcacatccaacaatgagcgaggctgtgaaagaagccgcaatggccacttatgacaagcccattcacatctaaagagacggttgctactttcttcttgttatcatttttgtccaagaattttacaatgacttggagatgataccacctctgttaaatttagattcagatttttaaatgcaaattagccccttgtttacttgtttgcataataagaggaatggttgtgttgttcttatccttgttgaataatatatatatctccccttctctctgggacaatattgtaattctgacagggtgaagacaacttaatggaagtgtgggacggttttgatt

SEQ ID NO: 8387 - DNA, 493 bp, Glycine max
  Clone ID: 700750758_FLI
caggaaacagtaccctcaagctgtcatactttatgctgattactatgatgcctaccgcactgtcatgaagaatccaagcaaatacggattcaaagagaccttcaacgtttgctgtggatcaggagaaccaccttataacttcactgtgtttgccacatgtggcacacctaatgccactgtgtgttcaagcccttctcagtacatcaattgggatggtgttcatctcacggaggccatgtacaaagtaatttctagtatgtttttgcaaggaaatttcacccaacctccgtttaattttttgttggaaaaaaaggagagggtggggtgaatggttagtatttgggatttgcttgtccctatgactttaatgcatcagctaatgtaactataagtgagggaatcaggtcttacctgttttgctacaacttgtgtcctctgcacatcatatatgatgagaagttctaaggaatatgttgtatttgtattagtatct

SEQ ID NO: 8388 - DNA, 1736 bp, Glycine max
  Clone ID: 700750783_FLI
cgagcactggtattaaggggactcggccaccgatgctgaagccgccgccgggggcgagggttcaggtggtggatgatagcacgtgttccacgtgggaccttttgagggacttggctcctcaaggggaagaagggttaccgttgaaccgttccgagaatgagagtgaagtagcgagagaagtagagagaggagcggtggagaaggaagaaggggaagttggtactagagagagtccgaagagggaagaggaagagaatgtggctgggctttcggagtcgtgttcgttttctacttccaacgaagatgattcttcgagtagtactacggaccctacgtctaataatatttctccgcaagggagaatcaaacggattattaccgccgaaagctggcagaagggtgagtttctcgggggtggctcgtttggctctgtttatgaagggatttccgatgatggattcttttttgctgtaaaagaagtttcactgcttgatcaagggactcagggaaagcagagtgtatatcaactggagcaggaaatagcacttttgagtcaatttgagcatgaaaatattgttcaatactatggcacagaaatggatcaatcaaagttgtatatctttcttgagcttgtaacgaaaggttcccttagaagcctctatcagaagtatactcttcgagattcccaagtatcttcctatacgagacagattctgcatggtttgaagtatcttcatgaccgaaatgtggttcacagggatattaaatgtgcaaatatattggtggatgcaagtggatctgtcaagcttgcagattttggattggcaaaggcaaccaaattgaatgatgttaaatcaatgaaggggacagcattctggatggcgcctgaggttgtaaaaggaaagaacaagggttatggccttccagctgatatttggagtctgggatgcactgtactggagatgttaacaggccaacttccgtactgtgatttggaatctatgcaggcattatatagaattggaaaaggtgagcgacctcgtattcctgattctctttcgagagatgcacaagattttatcctgcagtgccttcaagttagtccaaatgatcgtgccactgctgctcaacttttaaaccattcatttgtccaaaggccactttctcagtcctctggttcttcatttcctcatattcacggccggaagggttaaactgtcatcttcaactatgaaacattagggagttctgtctttcattgcatgtaacatttccaatgttcagtcttgaagttgctggggttcatctgggtccattgctgcagaaattgttgatttgctcgtgttgtagtttttagagtttggttgcttgtaacttatatcaaaatttcagcacgactttggatctaacacgtcatatggcactccaaagaaccaagttatcgactaggcaatatcctattggagaattatgctcaatacgtgttatctaattactctgatgatttgttcgttgtagcaaaggtgaagtatcaacgtccagctgaaaaagttaaccctgccttcttcccctcaaatcaggtgaccggcgaaaaacccatagggtttaactctgggagcaatagtagcaagaattagagactattctatttgtacatattatttattttttattattagttggcattgtttgtgtacatctgtatttcgtagttttcttttttattatttttgtct

SEQ ID NO: 8389 - DNA, 672 bp, Glycine max
  Clone ID: 700751057_FLI
gagctgcacctctcagaggcaacatatttgctttggaattgatggaggccaaattttttcgctttctcaagattgtgggtgttggatacaaagccagagctgaagctgcagggcgtctgttgtatctcaaattggggtacagtcatgatgtggaactagctgtccctcctgctgtccgtgttttctgcttcaaaaacaatgtaatttgctgcactggaatagacaaacaaagggtgcaccagtttgctgctactgttcggacttgtaagccacctgaagtttacaaaggcaagggcttaatgtatgttgatgaagttatcaagaaaaaacaaggaaagaagtctaaataactcaaataatcttaggtgatttcatgaagtctaggactcagatgtacattggctacaccttgtccgctcaatgattcactctaggtctctctagccttcaaacggtttcagttttggaatccttgaacatagcattatggtaatcatgtatgctttgaaataacaatagttttttgcttctgtatgattgatatgtacctttcagcgtttatcttactttgttgagatattttgtctaaggatataatattattttgaaagtctcattttctttttgttcccttctaacggttgaaacaaatattataggatgattagtttt

SEQ ID NO: 8390 - DNA, 803 bp, Glycine max
  Clone ID: 700751060_FLI
gagaaagaaaaaagaggcgcaagatgagtggtagggtttctgggaaggtgaagtggttcaacgatcagaaggggtttggattcataacccctgacgatggcagcgaggaactcttcgttcaccaatctcagatcaaatctgacggtttccgaagcctagctgaaggagagtccgttgagttcgctattgaatctgaatctgacggacgcgccaaggctgttgatgtcactggccccgacggcgccagcgtccagggaaccagacgcggcggtgatggtggccgaagctatggcgggggacgaggaggtggtggaggtggatatggcggtggcggcggctacggtggtggcggtggatatggtggaggcggtggctacggtggtggtgggcgaggcggtggtggcggggcttgctacaactgcggtgaatcgggacatctggctagggactgcagccaaggaggcggtggagacaggtacggcggaggcggtggtggtggtggcaggtatggaggcggcggtggcgggaggtacggtggtggtggaggaggtggtggcggcggaggaagctgctacagctgtggagagtctgggcatttcgccagagattgcccatcaagtgctcgttgaaattactgttatggtggtttatgttatgcggattgttttaagtttttactttaacatgttgtagggattttaatggtttctgtcaaagctgtggcttcttataagtagatgcgtgagatttttcttttttttggttatttaaatgaaagtttctgtgttatcgttacaatctgc

SEQ ID NO: 8391 - DNA, 1622 bp, Glycine max
  Clone ID: 700751091_FLI
ttcgcagacgaacattccgctcccatcgcatctgtaacaatggaagcgcgccatgcaactcttggtcgacgaacgttggaggaaattcggcaaaagagggccgcggagagattgagtaaaacctcttcgggaccagatctcacgcaggttcccagcacctccgagattgcgggaatgagcaagtccgagagcgcaaataagctctctgagacagatcttagtgctctattgtctcaattgaaaggactgcaaaagaagaacacggagttggaggaagaaaacacaaaaattagtttaaagcttcaaacgatggaaattgataatgagacaatgcacaagcaattaaatgatgtggaacaaaatacagtgccatctctaaggaaagctctgagggatgtcgcaatggagaaagatgctgcagttgttgcacgggaggacctttcagcacagcttcgtaccctgaagaaacgtctcaaggaagcagaagatgagcaatatcgtgccgaggaagatgcagcagcattgagagcagaattgaactcaattcagcaacaagcaatgactaatacagttagcacaatttcatcatttggtaatccacccgatcattttcaaattcaaagattacaaaaggagctagatgatttaaaactggaactgcaggagcaggaacaattagcaaaagagcaagcctgcattgcctcactgatatctgaaaagcaggagttggaagagaaactcatgtccatatctagagagcctgcagaagcctcagataaagctgctcacaaagcattttctttggaagacaagcagaaacttgataggcagttgtatgatatggctttagccattgagaggttggaaagcagtaggcagaaacttctaatggagattgactcacaatctacagaaatagagaggctttttgaggaaaattctagtctctcaaattcataccaagaggcaattggagcagcagcgagatgggaaaaccaggtgatggattgtcttaagcaaaatgaagagcttcgtgggattctagataatttgagaatggaactggctaggggtttgccagactcttctaaaaatggggcacatgagattgcttccttggcatctatgaagggccaacttgtgacagaacagagcagagcagaggcgctatctgcagaagtcatgcagctttctgctcaacttgaacaagtcaaacaagcatatgatggtcttgcacgcttctataggccagtgctgcgcaacattgaaagcaatctcataaaaatgaagcaagacaactcgttggctgtacgatgatggtaatgagcagtttcatgatgatattccggttgtaattgtgaagcccttctttgaagacatttccaatgcccacagaattgtttttaaccatttgatgttattagtttggtaaaagtggaacgagatggctcagtaactggtggtaatggttcttcattcttgagctgttttgttttgtggtaatactctgcataagaagcccttgttatacccaaacgtgaatttgtaaaacttgtcattctttatactaatattaatttgtaaacaagcacaaccattttatggagtatgattttgatgat

SEQ ID NO: 8392 - DNA, 1335 bp, Glycine max
  Clone ID: 700751125_FLI
aaaattttgtgaattctgagtgctcttgattttgataaaaaggtatgattacgggtggagcagcagcgacagttttctacaatttgaggcaaaaacatcctacgcttgacatgccagtgatcgactacgacttggcacttcttttccaaccagtgctggtgcttggaatcagcattggagttgccttcaatgtgatttttgctgattggatgatcacagtcttgttactaataattttcgtaggaattgcaaccaaggcattcttaaaaggagttgagacatggaaaaaagaaaccattatcaagaaggaaactgctagacaatcacaatttaatggcactgaaaggaccgcggaggtcgcatatgagcctctaccgggagggccaaacacaagcaatcataaagagcctaaaaaatccaaggaaacgggatcaattcttgagaatgttcgttggaaagcacttggagttcttttcactgtctgggtccttatacttgcctccgagattgcaaaaagtcacacaacaacttgttcagtggaatattgggtacttaatctattacaggtccctgtggcattaggagcgacttcatatcaagctgtgcttctgtacacagggaagagagtgatagcatccaaaggagatcaacgaactcaatggagagcgcaccagctaattatgtattgttcctgtggcatatgcgctggtatagttggtggcttgcttggtcttggtggaggttttattttgggacctcttttcctcgagctaggaatccctcctcaggtgtcaagtgctacagctacttttgccatgacattttcagcatctatgtcagtggtggaatattaccttctaaaacggtttcctattccttatactctttacttcgtggctgtatccacttttgcggcctttgttgggcaagttttagtgagaaagctggttgccatactagggagagcatcgctgatcatttttatcctctccagcaccatttttgtcagtgcaatatcactaggtggtgtgggcatatcaaacatgatccaaagaattgcaaataaagagtacatggggtttgaaaacctttgtacctactcagcctagatattagaattcggattacaaattcaatttcaaggactatataattgacatttttcaattcgaattgttttttatctagtcagaatttttagtagtgttatgtcaagaattttaagcgatgaaaaataattcagcgcttaattttttattttttatttgtcaaacatggctgtatcttggacagagtttcttaaatatataatcaacgatatctctcttagcttcc

SEQ ID NO: 8393 - DNA, 1537 bp, Glycine max
  Clone ID: 700751156_FLI
agaggctccattgctccgtcaaaaactacgattggggtctcccaggtcgcgtctccgaggttgccagactccacgcgctcaattccgcgtctgaattccacgcggaggacccttacgccgagctttggatgggtacccatgattcaggcccttcctttttagcttcctccaatggaaatgagaatggtgtctccctcaaggcttggatttccgagaaccctgatgtgctcggtcacaaggttcttcacaaatggggttctgatctccctttcttgttcaaggtgctgtctgtggggaaggccttgtcaattcaagctcacccggataaggagttggcaaggactctgcataagttgcaccctgatttgtataaagatggcaatcacaaacctgagatggcccttgcactcactaattttgaggctctctgtggattcatcactctcaaggagctcaagggtgtgcttcatactgttcctgaaattgtggaactggttggtgctacaaatacaaacctggtcttacaaactaatgatcaggatggtgaagagaaggtcaaacctgttctgcaggcagtgttcaccgacctcatgtcagctagtaaagatagagtaacggatgcagtaaacagattgaaaagccgtctgcttaaggagagtgaggtgaggcagttgacagataaagagcagctggtgctgcggttggaaaaacaatacccagctgatgttggtgtcatagcagccttctttcttaaccatgtaaaactcaatcctggtgaagctttgttcctcggggcaaatgaaccacatgcatatttatctggggagtgtgttgaatgcatggcaacttctgacaatgttgtgcgagctggcctaactcccaaacacagagatgtccagaccctttgctccatgctcacatacaaacagggttctcctgaaatcttgcgtggagtatctgttaatccatatgtaaataaatatactccaccatttgaggaatttgagattgatcgttgcattcttcctcaaggggaaacagtggtgttcccagcagttccaggtccttcgatctttttggtcacagttggtgaaggaacaatgaatacaggattacccaaaggacatgtggtcaccgaaggtgatgttctttttgccgcagctaacactgagattagtgttactagtgcatccgagttgaatttgtacagaacaggggtaaatagcaagttttttcaagcttcataagtttcaacaggggatcacccaaatttttatttttttttggtcatatgctgttgggagtcaaataatgcaactatctgttgcgtgtaatagaagcagtttaatgtacatgcaagagtaaaaaaaatcacttagtatattgagtcttagagaaatgttcattatagagaggtgggttgtcaattgtcattcgtttgttgttcataataatgttcgttaaaagccttttcggatggtattcctattaatcattttatatcaataaatgaagggcctacaattattttttatat

SEQ ID NO: 8394 - DNA, 1197 bp, Glycine max; identical to SEQ ID NO: 438
  Clone ID: 700751282_FLI

SEQ ID NO: 8395 - DNA, 746 bp, Glycine max
  Clone ID: 700751401_FLI
ggaaattaaagacactactaaagaaggatatagttttgaagagctatgcatcaagaaagaagccattgagggagaagagaagttttgtgcaaaatccttgggaacagtaattggttttgccatttcaaagctgggaaagaacattcaagtactttcaagttcctttgtcaataagcaagaccaatacactgtggaaggagtgcagaatcttggagacaaagcagtgatgtgtcataggctaaatttcagaactgcagtattttactgccatgaagtccgtgaaacaacagctttcatggttccattggtggctggtgatggaaccaaaactcaggcacttgctatttgccactcaaatacttctggaatgaatcatcaaatgcttcatcaacttatgggagttgatcctggaactaaccctgtttgccatttccttggaagcaaggccattttatgggtacccaatttatctgtggacactgcctatcagaccaacattgttgcttaattagtccatgcatcttgagcaccatgagaatgagattgtgtataaaataaattatcatgtgctgtgtgttgtgcaagtactaccttctctagctagattgctagagctagaatttcaacctacctatctgtactgataagatctgcttccctacttaaagagagcatcatcctgtgatcagtgtgcttcgtattctctctctctatatatatatggtaaaaagtggttatctcgtgcc

SEQ ID NO: 8396 - DNA, 1108 bp, Glycine max
  Clone ID: 700751413_FLI
gcataatggctgaattaattgtcaaggagcctctgttcaggggtaaaagtgaacttgaacaactcgacaagatttttcgaaccctgggtacacccgacgagaaaatttggccaggattatccaaattacctggggctaaagcaaattttgttaagcaaccgattaatacactaagaaagaagtttccagccgcgtcatttactggtttgccagttttatctgagctgggatttgacttgttgaagcggctgctaacttatgaccctgaaaagaggataacagccgaagatgctctccttcatgattggttccatgaagcccctcttcccaaatctgatttcaagccaatttttccttcttggcagtgatgggacaggtactcttgctggatgcatgaaataccaagatcaatgctatttttactgtcattatttccaactttgtcttaccttgttaatgatcatatacaaagaatgatatgattgcaagggacagggtaatggacttcattaggctcttgtttgttataaattagattagaagcggcagattgatgtatagacctgagaaggacaatttagtaatagatgatggatatttgctctggtaacgaggttgggtttctcactttgaaagttgcttcctgaaataaaatgatgtgttgtggcttattaaaaacagtgtgcaagattttgggggctatcgaggtttgttctttttctcctacgtttgatttttacagcaggaaatgctcctgaaaattttgggtgcattgatgcacaagcattgagctgttggattgtggatatgtagaagaataaatcaattgcaaggaatattcatcttgagcatgatcagcaggtgatgatgtcgggtttctcaatttgaaagtggttcccggaaagaaaatgatattgtgttgttggcttactaaaaaaaaaaggctaaaatgcaattttcattttctcaaatctttgattttagtctccccactttttaattgaggcatttcatccctttaaaaagtttgtgattttagtttcattttttaatcaaagacatttcgtcctccactttaataaaaaatctgtaattcattttttttggg

SEQ ID NO: 8397 - DNA, 584 bp, Glycine max
  Clone ID: 700751422_FLI
cattgatctaccaagcaatgtgaatgaaatacgacccggtcaagatgtcacagtggtgacagacaccgggaaatcatttgtatctacattgagatttgatactgaggttgaactagcttacttcaaccatggaggtatcttacaatatgtcatcagaaacttgatcaatgctaaacattgaatcagatataaaccaagtttgtaggttgaattgatagcacccactggcgctgattcttaactttggtcttaataatctagtatggctgctacaaagaaatccatgctattcagcaattgtattaataaaccaaggaactagatggctgctacgaggaagagttatgactggcgtttgttgaagaaatgtgattttctttttcaaaaattctattggtcattgaggatgaaaagtccttattacttcttttttactggttttgcagttgagtttttaggaaacatttaccttctatttctacctcccgattcttgagaattaagagaatcaggaacatctattgaaattatgagcaatgtgccgtaaatttcttaaggtataaagaaatgaacgaaggttggac

SEQ ID NO: 8398 - DNA, 597 bp, Glycine max
  Clone ID: 700751504_FLI
gccaaagctcccccttctggctcaagcttcagccaatgccaaaatgttgttgttgaagcactccatgttaatgcaacatgctcttacaaggattgcactttcggagggatatggaatggtggtgggggagctggagaaaacaacttttttattgcctcatttttctttgaagttgccgatgaggctggttttgttgatccaaacgcccccaatgccaaagttcgtcctgtggattttgagaatgcagcaaaggttgcctgtaacacagaattaaaggatctcaaatccattttccctcgtgttaaggatggagacgttccttatatatgcttagatcttgtatacgaatatacattgctcgttgatggatttggcatagatccgcagcaagagattacgttggtgaggcaagttgagtatcaagattctctcgtggaagcagcatggccactaggcagtgccatagaagccatatcatcattacctaaatttgagaaattaatgtatttcatttaagctttaaaacgaggagccatatgtatgtgtggaatgaactccatcactcttaaataaaaatcgttttgttcctttttttct

SEQ ID NO: 8399 - DNA, 1456 bp, Glycine max
  Clone ID: 700751645_FLI
ggcaagccccactcaaccaccacacctctcctcgttcacgctacccctttctgctcttcttctacctttcaagttttaaaagtataaagatggcagagacattcctatttacctcagagtcggtgaacgagggacaccctgacaagctctgcgaccaaatctccgatgctgtcctcgacgcttgcctcgagcaggacccagacagcaaagttgcctgcgaaacatgcaccaaaaccaacttggtcatggtcttcggagaaatcacgaccaaggccaacgttgactacgagaagatagtgcgtgacacctgcaggaacatcggcttcgtctcaaatgatgtgggactggatgccgacaactgcaaggtcctcgtcaacattgagcagcagagccctgatattgctcagggtgtacacggccaccttaccaaaaaacctgaagaaattggtgctggtgaccagggtcacatgtttggctatgccactgatgaaacccctgaattgatgccattgagccatgttcttgcaacaaaactcggtgctcgtctcaccgaggttcgcaagaacggtacctgcccttggctgaggcctgatgggaagacccaagtgaccgttgagtattacaatgacaatggtgccagggttcctattcgtgtacacaccgtgctaatctccacccaacacgacgagactgtcaccaatgacgaaattgctgctgacctcaaagagcatgtgatcaagcctgtgatcccagagaagtaccttgatgagaagaccattttccacttgaacccttcaggccgttttgtcattggtggccctcatggcgatgctggtctcaccggccgcaagatcattatcgatacttatggaggatggggtgctcatggtggtggtgctttctccgggaaggaccctaccaaggttgataggagtggtgcttacattgtgagacaggctgctaagagcattgtggcaagtggacttgccagaaggtgcattgtgcaagtgtcttatgccattggtgtgcctgagcctttgtctgtgtttgttgacacctatggcactgggaagatccatgataaggagattctcaacattgtgaaggaaaactttgatttcaggcctggtatgatctccatcaaccttgatctcaagaggggtggaaataacaggtttttgaagactgctgcctatggacactttggaagagaagaccctgacttcacatgggaagtggtcaaacccctcaagtgggagaaggcctaagtaattcattccactgctctatgctggaagttttttgagcgttgcccttataatatgtctaatatccataactttccacgtctcttactctgtgtgtttctctcctcttcctcctattttgttatttgtatgttcttttgtaattttttacgtgatcaactaaaaacatgtactctctgtttgtatgt

SEQ ID NO: 8400 - DNA, 1057 bp, Glycine max
  Clone ID: 700751664_FLI
gaaattcaccatggttttgctgacagaaattctagggacaaccatcgattgagttgtccttatagaggcagtgcttcaacagattatggaggttcaaattttcatgttaatgaggcaaagccggtcatattcccccaacagacggagtagtagtaggttttggttgaacaaaggactgttgggggaatatgacctactactactccgtctgttgttaacttggttccatctgttattgatctaaccggactcggagttccagaagatggcaagaaaatgatcactgaccttatgtcaatctatgatacaaatgttcaaagcaacaaaaatctaagttccagtaaccatgtatctgcagaaaatccaaaccttcctcagccaggcattcagcagcaacatgacaacttctttcgcagtcaaggaatcagtatggaaggaaacttctttgaagaagccaacatgtccaacaacaatcatcacatgtttgcaagggaggaaggtcaatttgaccggttcaaagctttgaatgcaccaccctttgagaccaatcacaacaacaacaacttccatttgatgtttggttccccttgtgatttggcatcctttgatttcaaggaggatatgcaaggaggagtagtagggatggatgctcttcagaaacagcctgatatctctatttggtaccagtgaaaatgacagcttaaagcttgaaacctcctcatcatcttcatctatcatggactcttttattttccttctaaaagggttggcacccccctaatcatgtgaagttcctttggccgaaaaagggtttcactgcaattttcttcacatgtaatcctgtaggcccagtagaactaaataatattttaagcttggcaggtctagtatgtgttatatacataataataataatatataataaaaacttgcatgttacccattatatgtagctttgtgaattgtgattgtgtgtttctatatcagtgtagccatcttgttgttacttaaatattattactcttatgtaagactgtgacataaataagatttgatg

SEQ ID NO: 8401 - DNA, 856 bp, Glycine max
  Clone ID: 700751669_FLI
gcgtaatgtcatggaagagatctcaaacatcagttgtcagtgttaccgcaatgtagtgtatgaaaatccagaattcctggcctacttccatgaagccacaccagaggcagaacttggcttccttaacataggtagccgccctacaagaaggaagagctcagtaggaatcggacaccttcgtgcaattccctggttatttgcatggacacaaacaagattcgttcttccagcttggcttggagtcggagcaggtttaaaaggagcttgcgagaaaggttacaccgaagagctaaaagccatgtacaaagaatggcccttctttcaaagtaccatagatcttattgagatggttttggggaaagctgacattcctatagccaagcactatgatgaagtccttgtgtcaaaggagaggcaagagcttggccatgaactaagaagtgagctcatgacagctgaaaagtttgtcatggttattagtgggcacgagaaacttcagcagaataataggagcttgaggaggctaattgagaatagacttcccttccttaatcccttgaacatgttgcaggtggagatactcaagaggttaagacgtgatgatgacaaccgtaagatcagagatgctttgcttatcaccataaatgggattgctgcagggatgaagaatacaggttgaccttgcttctcaaggactatattgtacaagccttccacaattcacatatgttcacccttgttttataataggtttgctaaggaaagattatcatagccataatggtgaatggtttgttctgtactcagatatactgttatataagaatgtgatgcaaaataattaagtttttccagc

SEQ ID NO: 8402 - DNA, 1028 bp, Glycine max
  Clone ID: 700751675_FLI
ggggaagtcatatggctcatgcctatgatttttacaagcctaatcttgccagtgaatatccagtggttgatgggaagctttctcaaacttgttaccttatggcccttgattcttgctataatcacttaagtcacaaatatgagaaacaagagggaaaacaattttctatttctgatgcagaatactttgtatttcactctccatacaacaagcttgtacaaaaaagttttgctcgtttggtgttcaatgacttcttgaaaaatgccagttttgtggatgaggctgccaaagaaaagctggaaccttttgcaacattatctggtgatgagagctatcaaagccgggatctagaaaaggcatcccagcaagttgcaaagcctcaatacgatgcaaaggtgcagccaaccaccttgataccgaaacaagttggcaacatgtacaccgcatctctttatgcagcctttatttcacttattcacaacaagcatagcacattggatggtaagagggtaatattgttctcgtatggaagtggcttaacttccacaatgttctctttgctattacgtgaaggtcaacatccatttagcctgtcaaacattgataaaatgatggatgttgctgggaaattgaagtcaagacatgagtttccaccagagaaatttgttgaaaccatgaagctaatggaacataggtatggtggcaaggagtttgtaacaagcaaggacaccagccttttatctccaggcacattctatctcactgaagttgactccatgtataggagattctatgcaaagaaaactagtgaaaatggtttggtcaccaatggtcactgacgttttacttagagaacgtgtaatacctggaaaccaggaattcaactgtgcttagcatttagaaggctgttctcgtttggattagtttcttcttaagggaagacaaacgaacaattatgaaatctgtaggagccaggtgttgttagttcaaaaattttccgaaactcttcaagtttaaatgattccacc

SEQ ID NO: 8403 - DNA, 1400 bp, Glycine max
  Clone ID: 700751677_FLI
tttttcttctctctcaacaacttcaccttcttcctcctcgatcatgtctcacttcaagggcaagtaccatgatgagcttatcgccaatgctgcgtacattggcactcctggaaagggtattcttgctgctgatgagtcaacagggacaattggcaagcgtttggccagcatcagtgtagagaacattgaatccaacaggcgagctcttagggagctgcttttcactgctcctggtgttcttcaatatctcagtggtgtcatcctctttgaggaaaccctctaccagagcacagctgcaggcaagccctttgtgaatgtcttgaaggaagctggtgtgcttcctggcatcaaggttgacaagggcacagtcgagcttgctggaactaatggagaaaccaccactcagggtctagatggccttggtcagcgttgtgccaagtactacgaagctggtgcacgttttgccaaatggcgtgcagtgctgaagattggtcccaacgagccatctgagctgtctatccatgagaacgcctatggcttggctagatacgctgtcatatgccaggagaatggcctggttcccattgttgagcctgagatccttgttgatggacctcatgacattcacaagtgtgccgccgtcaccgagcgtgtccttgcagcatgctacaaggctttgaatgatcaccatgtccttcttgagggtaccctattgaagccaaacatggtcacccctggatcccaatctgctaaggtttcccctcaggtggttgccgagcacactgtcagagcccttcagagaaccgtgcctgctgcagttcctgctgtcgttttcttgtctggtggccagagtgaggaggaggcatccgtcaacctcaacgccattaaccaggtcaatgggaagaagccatggtcactctctttctcctttggaagggcacttcaacagagcacccttaaggcatggggcggaaaagaagagaatgtgaagaaggctcaggaagcccttttggtaagagccaaggctaactcagaggcaactctgggaacctacaagggtaactcacagcttgctgatggtgcctcagagagcctccatgtttcgaactacagctactgatcaatcgaagttggtgttgtttgaagagactagtgcgagtaggaatcggtattatgggtacaacaaccgaatttcttgttgataagtattattgtggtttgactcttcccagaataatcgtttggaattttgctttttgttttcctagtgttccttttatgtcaattttagtaattcagtgtatttggtcaaacctgtgcaacagggaagggaatgtaactttgttttcttgaaagacaccaccgtgctgtgaatgaggctttgtgtttatttttgcgat

SEQ ID NO: 8404 - DNA, 719 bp, Glycine max
  Clone ID: 700751682_FLI
gttgaagaagccctactctctcgacgcctctttcctctccgacatcgagaacgaccccttcgagaacctgcaagagactcacgatatcttcgtcaaccagatgggtatcaagcccactaggcctgagcttgagcttctccgtcgtcttgccgaactcatcggtactcgcgccgccagacttagtgcgtgtggtgtcgcggctatctgcaagaagaagggctacaagactgcacacgtcggcgccgatggctcggtatttaacaagtacccccacttcaaggcccgtggtgctcaggcactcaaggagattctcgactgggagggtggccgtgacggcaaggcgctcggcaagggccacgacccgatcgagatcctgcccgctgaggacggttccggtgtcggcgcggccctcatcgccgccctcactctcaagcgtgtccaggaaggccaggttgctggtatccgtgaccccgagggtatgctcaagggcaccgctgccgccaagtccagcaccaaccaggtttaaattctcttatgaccctaggacgattggcgatggaacacatgcgatagacggtggcagggtgaaatccttgatgttgaaatgattgcggtccagaaacttgatcaggtagactccgaagttgtcgggtccaaccacctgagtagttagccaaaggctatgaaatgcacaaatgcaaatatgaactccatgactg

SEQ ID NO: 8405 - DNA, 1093 bp, Glycine max
  Clone ID: 700751721_FLI
ggaaatcctaaaagcacacccccttaaactatctctgtttatttcttcactcccttttttcttcttcaagggcaatggacagtggaggacactacaacccccgcaccgtcgaagaggttttccgggacttcaagggccgccgggctggcatgatcaaagccctcaccactgatgttgaggaattttaccagcagtgtgatcctgaaaaggagaatttatgtctgtatggattccccactgaacaatgggaagtaaatttgcctgctgaagaagttcccccagaacttcccgagccagcactgggcataaattttgctagggatgggatgcaagaaaaggactggctatctttagttgctgtacacagtgatgcatggctacaatcagtggctttctactttggggcaagatttggttttgataaagctgacagaaagcgcctgttcactatgattaatgatttgcctacaatatttgaggttgtaactggatctgcaaagaaacagacaaaggagaagtcatcagagaacaatggcaacaaatcaaagtccagttcaaaagggcgaggatctgaacccccaaagtattcaaagcaagtgaaggatgaggaggagggattggacgaagaagacgatgacgagcatggggagaccttgtgtggagcatgtggggagaactatgcatctgatgagttctggatttgttgcgacatatgtgagaagtggtttcatggcaagtgtgtgaagatcactcctgcccgggctgagcacatcaaacactacaagtgcccctcatgcagcaataagagaccaaggccttgatatcatagggatgtggggttagttatcacggccctgtaaatcatgctggactgctaactagttagtggcttaggcattctgtattgtgccatgttggtgcatcgtaggtattcactagtttggtcttgtcaacttcttaatgtggatagaattatttaatatttgatggtttctgattctgaacgtctctaacatttgtcctgcattgggatatttatgttcttagtacctgataacatattcgtgcagcaggcttcatttgtgcttggtat

SEQ ID NO: 8406 - DNA, 1010 bp, Glycine max
  Clone ID: 700751756_FLI
aaatataatggcggaatttacatccaccaccactaacactaacagtaacagcggtctcaggttgaaagccaaagtagccatagtcaccggaggtgcaagtggcatcggcgaagcgacggcgcgtgtgttcgcggagcaaggcgcgcgtatggtggtgctcgcagacatccaagacgagcttgggaatcaggtggctgcgtccattggaacccagcggtgcacctacatccactgcgacgtggcagacgaagaacaagttcaaaacctcgtccaatcaacggtcgacgcttacggacaagtggacataatgttcagcaacgctgggatccttagtccctcccaacagacggtgcccgaactggacatgtcccaactagacaggctgttcgcggtcaacgtacggggaatggcggcgtgcgtgaaacacgcggcgcgtgcgatgttggaggggcgcgtgaggggaagcatagtgtgcacggcgagcgtgggtgggagccacggtgggccaaatgcgacggactacataatgtcgaagcacgcggtgttggggttgatgcgttcggcgagcgtgcagcttgcggaacacgggataagagtgaactgcgtctcacccaatgggttggcaacgccgttgacttgtaaacagcgagggatgagcgaggaggaggggcaagaggtttaccggaaatacgcgagattgcaaggagtggtgctcacgcccaaacacgtggcagacgccgtgttgtttctcgtctctgatgactccgcctttgtcactgcccttgatcttagggtcgacggtggctttactttgcctagtatatcaatttcaaattctatactattgtaagacattgaagctcttgccaatttatgagcaacaacattggcttatatattgagttttagcaataatgtgacatgagcctacaatttcaaatctgagttggttgtaacacctctttcacttctggcttgcaattaattaacttcattgatcatgttatggt

SEQ ID NO: 8407 - DNA, 1495 bp, Glycine max
  Clone ID: 700751791_FLI
cgagcggtggccaacaccatcgtaacacctcacgtactggaccgttgggttgttcttcgagaccctctctgactcgccgggttgactcgctcgagtttgggggtttctgattcacccggggacggatctcaattttgtctcaggaaaagcaaagggcatcatattactatgaaggcactaattcttgttggagggtttggaacaaggttgaggccattgacactcagtgttcccaagcctcttgttgattttgctaacaagcccatgattctgcatcagatagaagctctcaaggccattggcgtcaatgaagtggtactagctatcaattaccaaccagaggtcatgttgaatttcttgaaggagtttgaggcaaaacttggtatcaaaatcacttgttctcaagaaactgaaccgctaggtactgcaggccccttggctcttgcgagggataagctaatagatgactctggagagccattttttgttctcaacagtgatgttatcagtgagtacccacttaaagaaatgattgaattccacaaaacccatggaggagaggctaccataatggtgacaaaggtcgatgagccatcaaaatatggtgtggttgtgatggaggagactaccgggcaggttgagagatttgtagagaaaccaaagttgtttgttggcaacaaaatcaatgctggaatctacctattgaacccctcagttttggatcgaattgaactgaggcccacttctatcgagaaagaggtgtttccaaagattgcagcagagaaaaagctatatgcaatggtcctgccaggattctggatggacattggacaaccaaaggactatatttctggcctgacactttacctggactcgctgaggaaaaagtctccttctaaactggccagtggtcctcactttgtggggaatgtcattgtgcatgaaactgccactattggcgagggatgtctcgttggacctgatgttgcaatcggtcctggctgtgttgttgagtcaggtgtcaggctttcacgctgcacagttatgcgaggagttcggattaaaaagcatacttgcatatctaacagtatcattgggtggcattccactgttgggcaatgggcccgtgtggagaatatgactatccttggagaagatgtccatgtttgtgatgaagtttatagcaatggtggtgtagttttgccccacaaggagatcaagtcaaacattctaaagccagagattgtcatgtgaggttactgtcttaaattcatagcatgtgattaggaagctctaagtttgtgtctgaaatgtgtttgtttgtttcatttgtttttccttttttttccgcatcccaatccgtttctctttgttacgtattgtacaagtcaatttcgtttagtttagaatgagtgatgccataatttacaatgttgaaaggtctgtgtctttgtaaagggtataaagttggtttactgttcctaagttgtgtaat

SEQ ID NO: 8408 - DNA, 1272 bp, Glycine max
  Clone ID: 700751793_FLI
ctccctttcattttccctcacactcatcattctcaaaaaacacgcccaaattctaatcaaattagggttagggttttcaactcccctcgaattatccctgtaatgcagtgcgattcccgggtcctaccatggagccatcagcaatgtacggaccctcccagcccctgaacatcccctcgcggatcggcgctggcgaaagagacgacggctccggcaacgagcccgccgtcgacggccaccaccaccacattcagtacgaaacgcacgcgctcgatgacggtgccgccggtggcgccgtggttgtcgaggatgttacgtcggacgcggtctatgtctccggcggtggaggccccgaggagtccagccagcttacgctgtcgtttcgtggccaagtttacgtcttcgatgccgttacgcctgataaggttcaagcggtgttgttacttttgggtggatgtgaactatcttcgggtggttcgccatgtgtggatcctggggctcaacagaatcaaaggggttcaatggaatttcctaaatgtagtctaccacaacgagctgcctcattagataggttcaggcagaagaggaaagagcgatgctttgataaaaaagtgagatatagcgtacggcaagaagttgcgctcaggatgcatcgtaacaagggtcagtttacttcatctaagaaacaagatggagctaatagttatggtactgaccaagattcaggacaggatgatagtcaatctgaaacctcatgtaaacattgtggcactagttcaaaatccaccccaatgatgcggcgagggccatctggtccaaggtcactttgcaatgcttgtgggcttttttgggcaaataggggtgctttgagagacctttctaagagaaatcaggaacactctcttccaccagttgaacaggttgatggaggtaatgacccagactgtcggactgccgctgccgaccctgcacaaaacaatcttgctgctttctcagagcctgttaatccagctttggtagctgatcgtaaggttttccaatctcagaaaatgttggagtagttgactctggcataagtaggtctatagttattccattcagattgaccaataggaatgtacagatataacaatactcccatcaatgcaagaactttgtttttatatggttggatcagtggcattaaccattgatctctggatgtatcacctgaaacttaaatgatgacttggtgatggtctcacccaataccttgaatttaattttacatgt

SEQ ID NO: 8409 - DNA, 1429 bp, Glycine max
  Clone ID: 700751809_FLI
ctcagaattctctaaaagagatctttttctgctctttgaagaaagaagggtctttgcttgattttggagatgtctctgctctcagatctcatcaaccttaacctctccgataccaccgagaaggtgatcgcagagtacatatggatcggtggatcaggaatggacctgaggagcaaagcaaggactctcccaggaccagttagcgacccttcagagcttcccaagtggaactatgatggttccagcacaggtcaagctcctggtgaagacagtgaagtgattttatacccacaagccattttcagggatccattcagaaggggtaacaatatcttggttatctgtgatgcctacactcctgctggagaacctattcccactaacaagaggcacgctgctgccaaggttttcagccatcctgatgttgttgctgaagtgccatggtacggtattgaacaagaatacaccttgttgcagaaagatatccaatggcctcttgggtggcctgttggtggtttccctggacctcagggtccatactactgtggtgttggcgctgacaaggcttttggccgtgacattgttgacgcacactacaaagcctgtatttatgctggcatcaacatcagtggaattaatggagaagtgatgcccggtcagtgggaattccaagttggaccttcagttggaatctcagctggtgatgagatttgggcagctcgttacatcttggagaggatcactgagattgctggtgtggtggtttcctttgaccccaagccaattaagggtgattggaatggtgctggtgctcacacaaactacagcaccaagtccatgagagaagatggtggctatgaagtgatcaaagcagcaattgacaagttggggaagaagcacaaggagcacattgctgcttatggagaaggcaacgaacgtcgtttgacaggacgccacgaaaccgctgacatcaacaccttcttatggggagttgcaaaccgtggagcttctgttagggttgggagagacacagagaaagcagggaagggatattttgaggacagaaggccagcttccaacatggacccatacgtggttacttccatgattgcagacacaaccattctgtggaagccatgagcaaaacctgcatgttttctccctttggatggaaaggaacagttatgcttttcttagtaggatttggtctctctctctttttaccttttgattggtactatggttggtgccttgttggttggtgcaactaactggcaagggttgttcattgttttcttctattcctttccctcgttttccgattgttacaatgacaataatttaatggttattatcagtcttgaacaaagaaatgctgattgtgaagtataataataatatatgaaattgtcatgttcattggagtagg

SEQ ID NO: 8410 - DNA, 1988 bp, Glycine max
  Clone ID: 700751810_FLI
gcaatttagaacaggaatcccacgccacttgcaattccatctcggtgtttgattctctgcttcgtcctttcattcctcttccgaatcgttaatcgttcgatcgatccatctcccgcttccaatgacaacccctaccgacaacaataacaaccctgcacaggaaaaccctaacaaaaccctagaccccaccgaaccagatccaatccctgccaccgaggacgacgccgccgccgacactaaggactccgacgccaaaaattccccgccgcccgattctggaaacgacgctccgctctccgatattcagaagaaaatgcgccgcgccgagcgattcggcatttccgtccagttgtccgagaaagagaagcgcaattcccgagccgaaagattcggcactggttccgcttcgcagggatcagagccatcgaaatcggaggagctgaagaggaaggctagggcagaaaggtttggaatgcctagtcctactacaacttctgacgaagaggcaaagaagaaagctcgacttgctaggtttgcacctgcttccaaagttgatcctcaagaagaagataagaggaaagcaagggctcttaggtttgcgaatccatcatcaacttctatagctaatgttaatggtgagggaaagattgagccggctgctattgcaggcaatgctggaggagggacctgaatgacagtttgcgtctttaatttgtaggattttttctttttttagtttttagcagttcaagatttgaagagcaacctccacacagtttctacttttcagcatattaatctcagatgtgcctatctttcatttgttcactgatgccctcctctatgagatggaagagattcaagtggtctgaagaagcttgttttttgttttgttgtagcgttggctttatagatgacagcttaaaaatcttcatagggttacttgtcttaaaaatcttcaaaaaattgaattttggaatctacagcctaaaagaatttaatagatgaagatatgcagaaacaaaactttttcttgattagtttcatccttatcgcggtctttaatctactgcttttgaaatgttccttatcattatcattatcattgtgctaaaaggtagtacaaggtaggttttttttatccaacatcatgctgatccagaatgaggtaatgttaggataggttttgttgcttgatatgtcttggaggagtgatgattaaatgagaaaataggccctcaaatagaatatagcttgtttgtaggatgaacttgtttctggttaatgctatacatcttttgggcattgaggggaagaggggttagagttaagagttaacatttcatcatccataatcttgaatcacttttttttcttttggttttacaatggtgttttgggggtagtgttctttaggttgtctgtcaaattggctgatggcttgtgtttgaaattgcttttcctcaatcctagtctcctttaggttgtttgttagtgttttttgcttcattgtttttcgatcttatttgaaagtagcttttaaagcacatcacgttgattagaagcatgtttcttgaaaaggggataaatatactatgtttgggtaccttgtggaaatgttatcatgtttggtatagagctattgcactactttactttggatcggcagaaatgttgaggctcaagttcctggtactatcttctggcactcaagaaaagagttagctgaatgttttggtggggctgaattctgtatgttttcaagtcggttttaaaactcggtttattttcaaggctgtagcttccaatttttattatctttactgtcaccttaagataagttaaaccctttgaagtttgaagatgtttcgttgtttacttggttgccaaaattcggaattgtacatttgtagggctggatgtggagggaactctttactttttgttgtattattaccctgtaatttattttaagctttgtttgttct

SEQ ID NO: 8411 - DNA, 646 bp, Glycine max
  Clone ID: 700751866_FLI
gcgccgtcctcaagtgggccattgggttgagcataggcatggttttgtcctacgtgtccactttctccgtcggagcgggtcccatcacgtgggtttatagctccgagatcttccccttaaggcttcgcgcgcagggtgcggctatgggagttgtcgtgaatagggtcactagtggggtcatctcaatgactttcctgtccctctctaataagatcactattggtggggcattcttcctctttgggggaatcgcaatgtgtggatggatcttcttctataccatgctccccgaaacacagggcaagacccttgaggaaatggaaggctcctttggtaaattcgcctcatggtccaagggtaaggacggtgataacggagacatccaattagccaattagccacccataatcgtgcttaatacttttgagccaatataatataataatataatggtgtgtaacagattagattagctttctaagtagtaacaagtctagtatgcgacgcaaaattatagtactacttcttttcatgaatgaggagagagagagagagagacgggtaataagtgtggtaagctattcgaaaactacattgttaatgtaacctttcctttttccgtggatattatttgatcatttgatgt

SEQ ID NO: 8412 - DNA, 1512 bp, Glycine max
  Clone ID: 700752057_FLI
caaaacctcagaacgcactttgatcttcccttcccaccctccttttctccaagaccaccccttccctctctcccacctcgacactgatcccaacctccaccttaccttccgctacctccgcgcgtacacctcaacaacaacaacaacctccctcgaccccttccacgtcatctcctcctccctctcccacgccctcccccacttctaccccctcaccgccaccctccgccgccaacaaacctccccccaccgcctccaactctggtgcgtcgccggccagggcatccccctcatccgcgccaccgcggacttcaccctcgagtccgtgaacttcctcgacaacccggcctcgagcttcttggagcagttagtgcccgacccgggacccgaggaggggatggagcacccgtgcatgctccaggtgacggtgttcgcgtgcgggggattcaccctcggcgcggcgatgcaccacgcgctctgcgacggcatgggcgggacgctgttcttcaatgcggtggcggagctggcgcgtggggcgacccggataacgttggacccggtttgggaccgtgcgaggttgctgggtcccagggacccgcccctggtggattcgccgttgattggggagtttctgcgtttggagaagggagttttgccgtaccaacagagtgttggtggggtcgcgagagagtgctttcacgtgaaggatgagtgcttggacaatttcaagaggaccttgttggagcaatctgggttgaacttcaccgtttttgaggctcttggtgcctacatctggagggctaaggtcagggcctcgggaatccaggctgatgaaaaggtgaagtttgcatactcaattaacatacggagactggtaaagccaccactgcctggtggctattggggtaatggttgtgtgccaatgtacgtacaacttagtgccaaagatttgatagagaaacccgtttgcgaaaccgcagagctaataaaaaagagtaaaagcaatgtcactgatgagtatgttaagtcctacatcgattatcaggagctgcattttgctgatggaatcactgcgggaaaagaggttagtgggttcacggattggaggcacttgggccattcaactgtggactttgggtggggtggcccagttactgttttgccccttggaaggaacttacttgggagtgttgagccttgcttttttttgccttattcaacagccacttcagagaagaaagaggggttcaaggttttggtgactttgagagaggctgcgttgcctgctttcagagaagacatgaaagtgttttgcaatagccaagagcagtggctgagccacatatagatgtggcttgagagttgagccattgatttgatgtaaacaagtgaagatgttagttttgccattgaatattagaattcccttcataatcaatggcacccactaacatttccgcccctatcaatattagaattcccttaataatcaaatagtttgtttgttgttat

SEQ ID NO: 8413 - DNA, 2222 bp, Glycine max
  Clone ID: 700752109_FLI
ggccaccaaactcaacatgctcctcaagctcctgcctttgttggtgttccttctgatcccagtttcatctcagccaaaccagctcttctatgctggattcaagggtctgggaagcaacaacatgacccttgatggggttgcagaaatagagccaaatggggtactgaaactcacaaatgattcaagtaaagtgatgggtcatgctttttatccaaccccttttcggttcaagaactctagtggtggtaaagctttctccttttcttcctcttttgctttggctattgttcctgagtttccaaagctaggagggcatggccttgcttttacaattgctccttctaaggatctgaaggctcatccaagccaatatcttggtattcttgactcaagtaacatagggaacttctccaaccacctctttgctgttgagtttgacacagcaaaggattttgagtttggggacattgatgacaaccatgttggaattgacatcaatagcttggcctccaatgcctctgcatctgcaggttactacactggggatgatgattcaagcaaacagaatctcaccctccaaagtagggtacctattctagcttgggttgattatgatgctgctaaaagtgtggtccatgtcacgatttctgcatcttctaccaaacccaaaaggccactcttgtcctatcatgtggatctttcaccaatccttaaggaatccatgtatgttgggttctctgcatcaacagggttgcttgctagctcccattacatcttgggatggagcttcaaaatcaatgggccagctccaccccttgatctctcttctctcccacagcttccagggccaaagaagaaacacacatctctgataattggggtttcagtctctgttgttgttcttgcattgtgtgctgtcttatttggcatctacatgtacagaaggtacaagaatgctgatgtcatagaagcttgggagcttgagattgggccacataggtactcctaccaagagctcaagaaagcaacaaaagggttcaaggacaaagagctgcttggacaaggtgggtttgggagtgtttacaaaggaacattgccaaattccaatacccaggttgctgttaagagaatttcacatgactccaatcaaggcctgagggaatttgtatcagaaatagccagcataggccggcttcgccaccggaatttggttcagttgctggggtggtgtcgccgcctgggtgacctcctccttgtgtatgatttcatggaaaatgggagcttagacaagtacttgtttaacgagccagaaacaatcctaagttgggagcaaaggtttaaggtcatcaaggatgttgcttcagcccttttgtatcttcacgagggctatgagcaggtggtgatacatagagatgtgaaggctagcaatgtgcttctagacggtgaactcaatggaagactaggagattttggattagcaaggttgtatgaacatgggactaatccaagtaccacaagggtggtggggaccttgggctatttggcacctgaggtgcctaggacagggaaggccactcctagctcagatgtttttgcatttggtgcacttttactagaggtggcatgtgggctaagaccacttgagccaaaggcaatgccagaagatatggttttggttgattgtgtgtggaacaaattcaaacaagggagaatactcaatatggtggaccctaaactaaatggtgtttttaatgaaagagagatgctcatggtgttgaaattggggcttctgtgttcaaatggttcacccactgctaggcctagcatgagacaggtggtgaggtttttggaaggagaagttggtgtgccagatgagttgagaaagccgggagagggaggttaccaggagggttttgatgaattcttgcactcacttgaatcttcttcgtttgatcagatgaacacaggttcctatggtagaaacagagacatggattctagttttccatctttaactggtacatctctttttagtccccatggtaaaggacaaacaatgtgatcatctacattttacttagagttgtactctatgtacttaagatatttgtttatcatatcaccccatgatgtctcataatagtacacagaaagtttttgtgatggtgaattaaatcccaatacaagaagttcgtattctaattcatccccccattggcatc

SEQ ID NO: 8414 - DNA, 1273 bp, Glycine max
  Clone ID: 700752125_FLI
caaacatgctttgcgtcaacactgccttcacctctttcttgcccagaaaatcaatttgcttcttttcctccaaatcaaccaccccaatttcctgcaccctccaaggaacagttgcagaaccaaaatctacagctgctggtgaacctcttttgctaaatgcagttcgtgggatagatgttgaaagacccccggtttggctcatgaggcaagcagggaggtacatgaagagttaccaaaccatctgtgagaaatatccttcattccgtgaaagatctgaaaatgttgatctcgtggtggaaatttctctgcaaccatggcatgtttttaagcccgatggagtgattttattctcagacattcttaccccactttctggaatgaatataccctttgatattgtgaagggtaagggtcctgttatatttgatcctattcacacagctgcccaggttgatcaagtgagggagtttattcctgaagaatcagttccatatgttggtgaagcactgacaattttgaggaaagaggtggataataaagctgcagtccttggttttgttggggcaccattcaccctggcatcatatgtggttgaaggtggttcatcaaaaaacttctcaaaaataaagagattggctttctctgaatccaagatcctgcactcattactgcagaagtttacaacatcaatggccagatacattcaataccaagctgacaatggagctcaagctgttcagatctttgattcatgggcaacagaacttagtccagtggattttgaagaattcagtttgccttacttgaagcagattattgatactgtgaagaaaagtcatccaaacctccctttgatcctctatgcaagtgggtctgggggtttgcttgaaagactagctttgacaggcgtggatgtagttagcttggattggacggttgatatggctgatggtaggaggcgactgggaccgaatatagctgtccaggggaacgtggaccctggcgttctttttggttcaaaagagttcatcactgatcggataaatgatactgtgagaaaagcaggtagagggaaacatatcttgaatcttggacatggcattaaagtaggtacgcctgaggagaatgttgcacatttttttgaggttgctaaatcaatcagatactaagcagctacttatgattaattcatttttttttgtttaattgcacttttagtttttttactatgatcggtgtttgattttgattctctaatgcattttctcagagc

SEQ ID NO: 8415 - DNA, 1587 bp, Glycine max
  Clone ID: 700752221_FLI
tttgaatctctggaaattgagatggcgaacgagaacgaacccgcgaagctgctgttgccataccttcaacgcgccgatgaattgcaaaagcatgaaccactcgtcgcttattactgtcgattatatgcaatggaacgggggttgaagattccgcaaagtgagcgcacgaagaccactaatgctcttctggtttcgctcatgaagcagcttgaaaaggataaaaagtcaatccagttggggcctgaagacaatttatatctcgagggatttgctttgaatgtgtttggaaaagcagacaagcaagatcgtgctggaagagcagatttgactacagcaaaaacattttatgctgccagtatcttttttgagattcttaatcaatttggagcagttcagcctgatctggagcagaaacaaaaatatgctgtgtggaaagcagctgaaataagaaaagctttgaaagaaggaaggaagcccacagctggcccccctgatggtgatgaggatctgtcagttcctttgagttcttcaagtgatagatatgaccttgggactactgaaaatactgtttccagtcctggaccagaatctgattcatcaagaagttatcataaccctgctaactaccagaatctgccaagcattcatcctgctgctcctaaatttcatgatactgttaacgaccaacattctgctaatattccatcatctatgccatttcatgatagagtagataataacaagcattcttccgttgtttctccatcatctcactctttcacacctggagtttatccttcccaagactaccattctcctccaccttcccgagactatcattctcctccaccatcccaagactatcattctcctccatcgtcccaagattatcatcctcctccaccatcccaagattaccatcctccaccgtcccaagattaccatcctccacctgctagatctgaaggttcttattctgagctctacaatcatcagcaatactcaccagagaattcacagcatttaggtcctaactacccttctcatgaaacttcctcttattcttatccccattttcagtcttatccaagttttacagaaagcagccttccatcagtcccatcaaactatactcattatcaaggatcagatgtttcatattcttcccagtcggctccgctaactacaaaccattcatcaagtgctcaacacagtagcagaaatgaaactgtggaacctaagccaacaactactcaggcataccagtacgacagtaactaccagccagcacctgaaaaaatagcagaggcacacaaggctgcaagatttgccgttggggcactggcatttgatgatgtctcagttgcagtagacttcttgaagaaatcacttgagttgctgacaaatccatcagctggccagtaaaattttttgtaaatcgaaatgtggatttcggtggtgttttctaccttttatttgcatgtcttgttttgtatattaggtacatcatgcatttaaagtgtgaaaaaatttgggaagatgaacggaaattataaaatctgctgggatctgcaatctttcttgttt

SEQ ID NO: 8416 - DNA, 1752 bp, Glycine max
  Clone ID: 700752239_FLI
cccgttttcctttactggtaagttgtaaccctataagccgttgctcccaccgccgccgcgcagatctccgtttcaacttgggttatctctaaggtcctaaacaatcctctttcaaaaacataccgagaaaagtgtggaaatgacgacaccatcattggtagagtctctagttcttcaactccatgagatctcagctgtcaaatttggcaacttcaagctcaaatctggcatcttctcaccaatctacatagacctccgcctcatcatatcttacccttctctcctccaacagatctctcaaacccttatttcttcagtctcttccacttcctttgacctcgtatgcggtgtcccttacactgccttacccattgctacatgtgtctctcttgctcagaacattcccatggtcatgcgccgcaaagaaatcaaagattatggcactgctaaagctattgaaggcgatttcaagcctggccaaagttgcttaatcattgaggatttggttaccagtggcacgtcagttttggaaactgcggcgccattgcgtgctgtgggattaaagatcagtgatgctgttgtgttgatcgatagagagcaaggtggcagagaaaacttggaggagaatggcatcaagctgcatgcaattattaaattgactgaaatggtgaaaattttgggcaatcacgggaagcttgatgaagagatggtaggggttgttacgaagttcttagaggataatcgtaaggttgctgctttggcaaaggtggagaagcctgtaactaaggtcaaagctttgccatttggggagagggctaagctgtcgaagaatccaatgggaaagaggttgtttgagataatggctgagaaggagagtaatctatgtttggctgctgatgttggaactgcagctgaattgcttgaaattgctgagaaggttggacctgagatatgcttgctgaagactcatgtggatatttttccagattttactgctgattttggctctaagcttctctcgattgcagaaaaacataacttcttaatctttgaggatcgtaaatttgctgatattggcaacacagtgaccatgcaatatgaaggaggggtttttcgtatattggattgggctcatatagtaaatgctcacataatctcaggtcctggaattgttgatggattaaaattgaagggtttacctcgtggtaggggtctattactgcttgctgaaatgagctcagctggtaaccttgccaagggagattatacaacttctgcagtaaaaattgctgaggatcattctgactttgtaattggcttcatctcagtcaatcctgcatcatggccaggggcaccaataaatccttctttcattcaggcaacccctggagttcaaatggtaactggtggcgatgctttagggcagcaatataacactccatattctgtgatccatgataggggcagtgacatcatcatcgtgggacgtggcatcatcaaagcagcaaaccctgctgagatagctcgtgaatatcgtcttcaaggatggaatgcatatttggctaaatgtaattgatgcctgcattcctagaataaaattatgagcttaaattatgttttaatgggacatctgatctcactgtaacccagatgaataaggtcttggggtacaatatgaagacatttttcggttggaatattgaagtggatttttcattttctctgaggaaaataaaattaaatataaaagat

SEQ ID NO: 8417 - DNA, 622 bp, Glycine max
  Clone ID: 700752365_FLI
gttcaatttgtcgccgttgttcgaggagaagaggaaggaggagatgaggttcgccaccgcggggacgccgagcagcgtcatttcgcgcctggaggaggtggccaaggcggggaagtttgacgtgaagagtagcgagacgaaagtgaggcttcagggacaggagcgtgggaggaaggggaagctagcgattgcggcggatatctacgccgtgacgccgtcgtttatggtggtggaggtcaagaaggacaatggggatacgttggagtataaccagttctgcagcaaacaacttcgtcctgcgcttaaggatatcttctggaattctgcacctgccagtgcttgaatggtatattatatatatgatgtctgattattgttttacaacaccatttgtcgaccttgttattttattttatttttgtttaggaactttgagttttgttgataagatctgtttgtgttttgttgtttaaattgttagtttggtacttggggactggttagtgggtacttactctctctgtcgcccagaattgttgttaagagatgcacacgttgtggatgattctgtcatgtttgtgtttcaattatgagtgtgtaatttggagtgcttgtggggctt

SEQ ID NO: 8418 - DNA, 1086 bp, Glycine max
  Clone ID: 700752370_FLI
aaatcgatgacttcgcaaaatggtgacgagagccaccacccaccaccgcaagcgcaagctgaaaaggttactgaagttggatggtacgttcttggcgaggatcaacaacagattggcccttacgccttctctgagttgtgccagcatttcttgaatggatacctctccgaaaatacgtttgtgtggtctgaaggaagtagtgagtggcagcccttgtcctcggtttctgacctgtgggctcaaattaaccggcagggacctgattcttcaactactgtgtctgctcctgatgttgatgagtttgaaagatggcaaaaggagattcaggaggtggaggcacaggtggaaggttcggaatttggatccttatctggcaatgttggtggtactggggcaggagaagattctgagagaccttcgacgccacctgagggtgaagaaggatttactgatgatgatggaactgtatataagtgggataggagtcttagagcttgggttccccaggattatccaactggcagcactaagccttatggggttgaagagatgaccttcttggaagaagaggaagtttttccaacaatacctaattctgatgcctctgaaaagtttgaagatagtccaaaattgagtgtttctgtgcctcccttaaaggaagaagaaaataataccaatgtgatatcaggtggaaaaaggatgctttcagatcaacaaacagacaagaaggaagctaataaaccccctgatagttggtttgaattaaagattaatacgcatgtttatgtcactgggttgcctgaggatgttaccactgatgaaattgtggaggtattttccaaatgtggaattataaaggaggaccccgaaaccaaaagacctcgtgtgaagctctatgttgataaagagacaggaaggaaaaagggagatgctctggttacatatcttaaggaaccttctgtggctttggcaattcaaattttggatggagcacctcttcgccctggtggcaagattcctatgtctgtcagccaggctaaatttgagcagaaaggagacaagtttgtatccaagcaagtagacggt

SEQ ID NO: 8419 - DNA, 1187 bp, Glycine max
  Clone ID: 700752407_FLI
cacaaccttctgcttctgtatttcttgccatgaatgcacttggaattatagccttttctttcagaggccacaatttggccctagaaattcagtccacaatgccttcaacttttaagcacccggctcgtgtgccaatgtggaaaggagccaaggttgcttatttcttcattgcaatgtgcctcttccctattgctattggtggcttttgggcgtatggcaaccaaatgcctcctggagggattctcactgctttgtatgcatttcacagtcatgacatctcaagaggaatactagccttagctttccttcttgttgtgttcaactgtttgagcagtttccagatatactcaatgcctgcttttgacagttttgaagctggttacaccagtaggacaaaccgtccctgctccatatgggtgagatcaggttttagagtcttctatggatttgtctccttcttcataggagtggcacttcccttcctctcaagtcttgctggtttgttgggaggactcactcttccagtcacttttgcatacccttgcttcatgtgggttctcattaagcagccaccaaaatatagcttcaattggtacttcaattggattctgggttggctgggggttgcttttagcttggccttttccattggaggtatttggagcattgtcaatgatgggcttaaacttaaattcttcaagcccaattgaatttttaataataggccatgcaaatgcacatgcactatatggtaatgctactctttaggcgtttcccaatggtctaataatatagttagtgcatgtcttcttccgccctaagctatctttggtggaagatttggttgtattgtgagaagtggtggtaaaaggaaagccaataattaatgaagagaatgatccttgtatgtctaagtggagacagagttagaccttgcaagttactaaagtttaaagagtatctctccatgccttcaccgttcctcttgttgtggttctcttttcactgggtgatatagcttgttatgtttagaacatttaatggtttgctcttattcatttttgtagagacctccagaacaaccccccctcccccaacaaaaatcgtcaaactctttcaaattatttgtacgttgtaacccgtgtgatttcaaaagttaatttctcagcgaatcctcctttcaattt

SEQ ID NO: 8420 - DNA, 1417 bp, Glycine max
  Clone ID: 700752432_FLI
gatgaagcgtcggttccttttggttctcttggttctctatgtcacagtggagcagagtaagctactccaccacgtagaagccgatggtgggtttgtaaaaacaagaggagtgcagcttatgctgaatgggagtccctactatgctaatggctttaatgcctattggcttatgtaccttgcctctgatccttcccagagaaacaaaatctcatcggtatttcaacaggcttcaaatcatggactcaacattgccagaacttgggccttcagtgatggtggatatcaacccctacaatactctcctggatcctacaatgaccaaatgtttcagggcttggatttcgcaatagccgaagcaagaaaatatgggatcaagatggtgttgagtttggtgaataactatgagaacatgggtggaaagaaacagtatgtggaatgggcaaggagtcagggacagtccataaattctgaggatgacttttttacaaatcctgtggtgaagggatactacaaaaaccacatcaaggctgtacttacaagacgtaatagcatcactggagttgcttacaaagacgacccaactataatggcttgggaacttatgaatgagattaggtgcccttctgatcaatcaggaaggacagttcaggcttggatcactgagatggcatcttacctgaaatccatagatggaaaccacttgctggaagctggtctagagggtttctacggccagtcaaaacctgagtctaaccctaacttcaatgtaggaaccgatttcattgcaaacaaccaaatcccagggattgatttcgcaacagtgcattcctaccccgaccaatggatatcaagttcaggttatgaggaccaaatctcattcttaggccggtggctgaatgagcacatccaagatgcacagaacacccttcacaagccacttctatttgcggagtttggtatttccacaaagagttatggtggcaactcaacaccaagggatcggttattcaacacggtatattcagcaatatactcatcagcaagcagtggcggggctgctgttggtggcctgttttggcaacttatggctcaaggaatggattcttatcgagacggttacgaggtggtcttagatgagagcccttcaacggctaatttgattgctcaagagtctcaaaaactaaaccgaattcgcaagatgtacgccagactcagaaacattgagaaatggaatgaagctaagcaaattagaggatgaaactgaatatatatatatatatatagagagagagagagagagagaagggtgagttagaaactttaatttataacttaatcgtagtggcaagaattgcctgttattacaagtgaagtgtcctacaaatgcaataaacataactattatagagatatatcg

SEQ ID NO: 8421 - DNA, 719 bp, Glycine max; identical to SEQ ID NO: 8404
  Clone ID: 700752579_FLI

SEQ ID NO: 8422 - DNA, 1236 bp, Glycine max
  Clone ID: 700752657_FLI
gaacgaaagacctcgacaattcttctgatccgtttcgttcagatcaaaacttgcctctttgcaacgctgcttctgacaaaaaacgttgtaccatccgaaatgtcggacacagtggaacatacagatcaaagagctgaagctattccccaatccacagctacaccaaattggactattcatgtgtcagacataagaacagttaaggttagcaacatatcattggttacttccaagaaggacattgaagaattcttttcattctcaggtgatattcgatatatcgagatgcaaagggaaagtggtcacactcaggttgcttatgttacatttaaggatacacagggagcagacacagcagttctcttaacgggttccaagataggtgatctatatgtcaccatcacaccagtggagaagtatcagctgccccctgaagcacttccttcaagtccaacaaaccaaagccctgatgcagttaagaaagctgaagatgtaatgagcaccatgcttgctaagggtttcattttaggaaaggatgctatcaacaaggcaaaagcctttgatgaacgtcatcagttgacctcaaatgcttcttccacagttgcttccattgatcgtagaataggtttaagtgataaactaagtatcggaacaactattgtcaatggaaaggtgagagagatggatgaaaggtatcagctttctgaaatgacaaagtctgctatggctgctgcagagcaaaaggcaaatagtgctggatctgccatcatgaacaattcttacgtaataagtggagcttcatggttttctagtgcctttaccgctatagcaaaggcagccggggatgtcagcacgatgaccaaggagaaggttgaacaggcagcggtggaaaggaatgagatcatttatagtgaaaggaaagggactgttgatgaatttgcaaagacgcacttagaggaggcttcagacattggccctgcagtagttcctgttaattcagatgatgaccgaaatctggcaacaattttataactcaagttaattcagaatcccttattcccacatacacagttggatttatttagttaacatagttattgtcagacttcagttcctgcaagtttgttgtacattgataagtcttgttgattgttatagtgatgtaaaggtttgtctgacagatgtggttcctaaatatggtcaacattcatttcaaaaaattatttgttatttgtt

SEQ ID NO: 8423 - DNA, 1489 bp, Glycine max
  Clone ID: 700752753_FLI
cccaaacccaatcctcttcctcttccctcaaatcataacacattttctctctttcccttctctgttccgttccttctcgcgcgatttgcatattccgaaattgagaaccccacccgcgcgaaaattgaaggcagagaagggcaaaagatttgatctttcaaacgaggagtttctggggtgtcccaggatgaggctaaacggtgaaatctcaagcggagaagaagaagaagaggagaaacaaacgggaacgacgacgttttcgtcgcagaaagtggtcgttggctacgctttaacgtccaagaaaaaaaagagctttctgcagccaagtttcaccggtctcgcacggaacagggggataaactttgttgctattgatctaaacaagccactaccagaacaaggtccttttgatattatcttgcataagttgtccggggaggtttggcgtgagattattgaggattatagggaaaaacatccagaggtaactgtccttgatcctccggatgcaatccaacatttacacaatcgccaatccatgctgcaagatgtgttggatctgaacttatctgattgtcatggcaaggttggtgttccacgtcagctagttatcacaaaagagaaagacccctctagtatcccttatgaagtcactaaggctgggatgaagttgccattagttgcaaaaccgctagttgttgatggcactgcaaagtcacatgaactatttcttgcttatgatgaattctctctttcagcggttgaacctccactggttctacaggagtttgtcaatcatggtggtcttctctttaagatttacattgttggggaaaccataaaggttgtgaggcgtttctctcttcctaacatcagtaagcgtgaactatcaaaagttgctggtgtattccgttttccaagagtttcatgtgcagccgcttctgcagatgatgctgatctagatcctaatatcgctgaacatccaccaagacctttattggagaggcttgcaagggagctccgtcatagattgggactccacttgttcaacatagatatgattcgagaatatggaaccaaggatgtgttttacgtcatcgacatcaactactttcctggatatggaaaaatgccaggctatgagcacgtatttacagattttctacttagcctagtggagagtaaatgtagtaataagaaacttgctgcctaaactagagcaggttagtagatgcattgaacagggctgttcttgctggtggctttcttaaaaatttatgcaaattagtatggaatttcaatgaagccaccaaaatgttgaaaaaggtcgaaatagggtctgtctaatttctccctctcaataatgagcgaaaatgcctttattgtaagttataatatatgcttatatccaaatcaatgaaagttttggtggtgctaaataactgctaagatttaaatttcattagtaaaagttccgaatagtttattt

SEQ ID NO: 8424 - DNA, 559 bp, Glycine max
  Clone ID: 700752832_FLI
ttcccctctaccctagcaaagacgaaaaaacaaaaacacccattcaagttcagttcatacttttattattattggtggccatttcttctgtgccctcttcttcctgtgccagccaggtcatgtacgcgactctcgtcgcgaaaaataaaacctgagaaatcgagaagggtttgtgtaaggctgcatacatgtttgttgtaatatgggaaaacagagaagaggttgttacagtggattgaggtaagaggagaaagtctctccatattgatttgaattgttatggatattcagagttgtgaaataaaaatggctgagaaagagtaggttgcagagaaatgtgtatgtatagggatgaatttggagaccataattcagggttgcatagacagtagtgacactttctgttgctgctgctgctgcatgtttgtggagtttattgttattgtgtctcttatatcatactttttttttttgttgctttaattttgtttctttatagtataatttatgaacattttacatgtattgattttctgaattgaggtaattcctttctcgt

SEQ ID NO: 8425 - DNA, 1062 bp, Glycine max
  Clone ID: 700752843_FLI
gcaagaatggcacttcgttgcttggtgatgtccctttctgttctcttcactcttggtcttgcgagagaaagccatgccagagacgaagatttttggcatgctgtttggccaaacactcccattccaagttcattgcgagatcttctaaagcctggccctgcaagtgttgaaatcgatgatcaccctatgcaaattgaagaaacacagtacccgaaaaccttcttctataaagaagaccttcatccaggcaaaacaatgaaagtacaattcagcaagcctccctttcaacaaccatggggtgttggtacatggttaaaggaaattaaagacactactaaagaaggatatagttttgaagagctatgcatcaagaaagaagccattgagggagaagagaagttttgtgcaaaatccttgggaacagtaattggttttgccatttcaaagctgggaaagaacattcaagtactttcaagttcctttgtcaataagcaagaccaatacactgtggaaggagtgcagaatcttggagacaaagcagtgatgtgtcataggctaaatttcagaactgcagtattttactgccatgaagtccgtgaaacaacagctttcatggttccattggtggctggtgatggaaccaaaactcaggcacttgctatttgccactcaaatacttctggaatgaatcatcaaatgcttcatcaacttatgggagttgatcctggaactaaccctgtttgccatttccttggaagcaaggccattttatgggtacccaatttatctgtggacactgcctatcagaccaacattgttgcttaattagtccatgcatcttgagcaccatgagaatgagattgtgtataaaataaattatcatgtgctgtgtgttgtgcaagtactaccttctctagctagattgctagagctagaatttcaacctacctatgtgtactgataagatctgcttccctacttaaagagagcatcatcctgtgatcagtgtgcttcgtattctctctctctatatatatatggtaaaaagtggttatctcgtgc

SEQ ID NO: 8426 - DNA, 1151 bp, Glycine max
  Clone ID: 700752938_FLI
gcagaacaaaggtgtggttcctctcgacaatgctctcttcaaacccctcactcctaataaggaaatggtcgaccccaacaccttgcttcactacaccaacgtcctcgacgctatggtcgacgccgcttatttctccatgaagaaccttaatatcaccgatgttgttgttcttgtcaccgaaactggctggcctgccaagggtgattctaaggaaccttatgctaccaaggacaatgctgatacttataactccaatttgattaggcatgtctttgatcgcagtggaacccctttgcatcctgagactacttccagtgtgtttatatatgaattgtttaatgaggacttaaggtctccgccgctgtcggaggcgaattggggtttgttttatgggaacactacgccggcttatctgcttcatgtgtctggaattgggacttttttggccaatgataccaccaatcagacatactgcattgccatggatgggtttgattctaagacgttgcaggccgcgctggattgggcgtgtggaccaggccgagccaattgttccgagattcagcctggagagagttgtttccagcctaataatgtgaagaaccatgcttcttatgcgtttgatagctattaccagaaagaaggcaaggctcaggggtcttgtgacttcaaaggagtggctatgatcaccaccactgatcccagtcacgggagctgtatatttcctggaagcaagaaagtgagcaacaagacaaaggaagtggtgaactctactatatcaagcaatgcaggggagaagttgaggttcaaaacctttaacagcatcaaaataagtgcaattggcaacattttgcacattttattggctgcatatctccctactttgttgttagtccttttatgaggtgctaataattcaattttttgttctttttggaattttgaatttcatagagttaaggatgaggtcataagagaaaaggaatcgagcatgatatgtaggtctaaacttagggcttatgtagatgcttccttttgttttaagaaagtagtgttaataatttttcgtggggctcttgtaattaacgtatgtattacttgaaattgtatttgttagttaatttgtttagaatgtgtatcaacatgtcacc

SEQ ID NO: 8427 - DNA, 1133 bp, Glycine max
  Clone ID: 700753078_FLI
atttttccctagtaattttccccttgtgcggctattccaccccacgacgaacctgcgcatctctctctctctcgcgcgcgccgcttttctctcagccagccctgcagctctttttctccgcccacaatgggtaaagctaaaaagggaccaaagtttgctgttatgaagaagattgtcacttccaaagcaatcaaaagctacaaagaagaggttttgaacccagaaaagaagaatcttatgaaggaaaagttacccagaaatgttccaactcattcttcagcgcttttctttcaatacaacactgcactgggacccccttatcgtgttttggtggacaccaacttcatcaatttctcgatccaaaataaattggatctggagaaagggatgatggactgcttatatgcaaaatgcaccccttgtattacggactgtgtgatggcagaactcgagaagttaggccaaaaatatcgtgtagctctaaggattgccaaggatcctcgatttgagagaatactatgtactcataaagggacctatgctgatgactgccttgttgagagagttactcagcacaagtgctacattgttgcaacatgtgatcgggacttgaagaggagaattcggaagattcccggtgttccaataatgtacatcaccaaacgcaagtactcgattgagcgattgcctgaagcaacaattggtggagctccaagaatttgatgcagtaaaactaaaacaggcagagctggctataacaataatattgatactaatttcttggtcgtgaagtatgaaatcctgctacagtacctagcatattcggtcttttgctggctgggctgaattctatcggaagcttgagacttgaacaaaagcagcacttcaatggtttatacctgaaattttcttagtgtaagttggtagatttaggttctgtcaaattttgttttcctcatattgcctatctaatgtatcatggtaaaccttggagagtgtctgaactatgatgacattttcatagttctgggcttgtggcaattaactctcttgaaacgatactttttttgttgcaagagaaaaaccttattttccttgaatctaaattttattagtttcaagcttgacatgcc

SEQ ID NO: 8428 - DNA, 918 bp, Glycine max
  Clone ID: 700753138_FLI
gaggttcttcatggaaaaaaggggggtcatttgcattgggacaccaggtataaaattgcggtggaggctgccaaggggctttgctatctgcaccatgattgttcgccactcattgtccatcgtgatgtgaagtcaaacaacatccttcttgattcaaatcatgaagcccatgttgctgattttgggcttgctaagttcctgcaagattctgggacatctgaatgcatgtctgctattgctggttcatatggatacatagctccagagtatgcctacacattgaaagttgatgagaaaagcgatgtgtacagttttggtgtggttcttttagaacttataacaggcaggaaaccagttggtgaatttggtgatggcgtggacatcgtgcaatgggtgaggaaaatgacggactctaacaaggaaggagttcttaaagttcttgatcctaggcttccctcagttccccttcacgaagtgatgcatgttttctatgtggccatgctgtgtgttgaagaacaggctgtagagagaccaacaatgcgtgaagttgttcaaatactgaccgagcttccaaagccacctggctctaaagagggagacttaacaataacagaatcctctttgtcatcatcaaacgctttagaatctccatcctcagcctccaaggaagatcaaaatcctcctcaatccccaccacccgaccttcttagtatttaaagtgctctgttgggtgtttcatcttattagttcccttggttgtgatagcttatccatttactttctttttctgtctctcttctggggttggggcttttcttcttcttctaactgaaggtattaatgctctgattttttaatggttttgtacagtaggattggtggggggggttattttcttatgaagtcactttcttcatc

SEQ ID NO: 8429 - DNA, 1426 bp, Glycine max
  Clone ID: 700753182_FLI
ccgggcttcccatgatacccagctatgttgaaaatcttcccactgggaatgagaaagggttgttttatgccttggatctcggaggaaccaacttccgtgtgctgagggtgcagttgggtggcaaagatgagcgtgtcattgccaccgagtttgatcaagtttccatacctcatcaactcatgtttgctacatctcaggagctgtttgatttcattgcttcggggctagcaaaatttgcgtccaaggaggatggtagatttcatatctcaccgggaaaaaagggagagattggcttcacgttttcatttcctgtgaagcaggcatctattgattctggcatactaatcaagtggaccaagggttttgcagtgtctggaacagcagggagagatgtggtggcttgtctgaacgaggcaatggaaaggcaaggaatagacatgcgagtttctgctctggtgaatgataccgtggcaacgttagctggagcagaatactgggataatgatgtcgtggttgctgtcattttgggtactggaaccaatgcttgctatgttgaacagatcagtgccattcctaagttacagggccatgtctcttcttctgggaaaatgatcattagcactgagtggggtgctttctcaaatggtctccctttaaccaagatcgatagggaaatggatgctgctagcatcaatccgggtgagcagatatttgaaaagacaatctcgggaatgtatctaggcgaaattgttagacgagtgttgctggaaatggctgaagagggtggtttgtttggaaaatctgtcccgcagaaactatctacacctttcatactcgggaccccagatctatgtgccatgcagcaggacagttctggcgatttacatgcagttgggtccctcctctatgataaagcaggggttgaatccaatttaagtgaaagaaaaacagttttagaggtttgtgagacaattgtaaagcgaggtgggagcttagctggtgcaggaatagtggggattctacaaaaaatggaagaggatcagagaggtctcgtctttgggaatgggaagagaagtgttgttgccattgatgggggcttatatgaaaattatcctcaatacagggcttatttgcaagattcagtcacagagctgctaggaacagaaaagtcaaacaatgtggtgatagagcatactaaagatggatctggaataggagctgctctattggctgcttcaaactccatgtacaaccaagacttatagtccattatcatgcaaataaaaattgaaggaataatccatttttccttttgtatatgggagaggaaaaggtcacttgatggaggtccaagattattatttttcctcataaacgtagtattgaaatttgtattttatataaaatactcaagtctcttgttact

SEQ ID NO: 8430 - DNA, 2336 bp, Glycine max
  Clone ID: 700753222_FLI
gtaataacctcaaagcaaccattaagcaaaggttgcttagtggttgtgtgtgtgactcttctctcctcacaatgctgcctcacaagcacactctggtggttgtggccactgtggccacactcgcgctggcggcggtgctcgcagcaccacaagcagatctggcctccgagcgagctgcattactctccctccgttcctccgtgggaggccgtaccctcttctggaacgccaccagggacagcccctgcaactgggccggggtccaatgcgagcacggccacgtcgtcgagctccacctccccggcgtcgctctctccggcgaaatccccgtcggaatattcgggaatctgacccagctccgcaccctcagtctccgtttcaacgccctcagaggttccctcccttcagatctggcctcctgcgtcaacctccgcaacctctacattcagcgcaacttgctcaccggccaaattccaccctttttgtttcatttgccggacctcgttcgcttgaacatgggcttcaacaacttctccggcccctttccgtccgccttcaacaaccttacccgtttgaaaactttgtttctcgaaaacaaccagctctccggcccaatccccgacttgaacaaactcaccctcgaccagttcaacgtctccgacaacctcctcaacggctctgtccctcttaagcttcagacattccctcaggactcttttctaggtaactccctctgtggccgaccactctctctctgtcccggagatgtcgccgatcccctctcggtcgacaacaacgccaagggcaacaacaacgacaacaagaagaacaagctgtccgggggcgccatagcggggattgttgtcggatcggtggtgtttcttctcttgcttgtgttcctcttgattttcctgtgcaggaacaagagtgccaagaataccagcgcggtcgacattgccactgtcaaacatcctgagacggagtctgaggttcttgccgacaagggtgtctccgatgtcgagaacggtggtcatgccaatgtcaaccctgcaatcgcttctgtggcggcggttgcggctgggaatggtggtagcaaggcggaagggaacgcgaagaagttggtgttttttgggaatgcggcgagggcgtttgatttggaagatttgctcagggcttcggcggaggttttggggaaagggactttcgggacggcgtacaaggcggtgttggaggcggggccggtggtggccgtgaagaggttgaaggatgtgacaatttccgagaaggaatttaaggagaagattgaggcggtgggagcgatggatcacgagagtttggtgcctctcagggcttactatttcagcagggatgagaagctccttgtctatgattatatgcccatgggaagcttgtctgcccttttacatggaaacaaaggagctggtaggacaccactgaattgggaagtgagatcaggcattgcacttggagctgcccgtggcattgagtacctacattcacgagggcctaatgtttctcatggaaatatcaagtcatcaaacatcctcttaaccaaatcatatgatgccagagtgtctgactttggccttgcacaccttgttggcccctcctctacccctaaccgtgtggccggctaccgtgcgccggaggtgactgatcctcgcaaggtgtctcagatggcagatgtgtacagctttggtgtgttgctcttggaacttctgactgggaaggcacctacccatgctctcctgaatgaggaaggagtggacctccccagatgggttcaatccgtggttagagaagagtggacttctgaggtctttgatcttgagctccttaggtatcaaaatgtagaagaggagatggttcagttgttgcaacttgcagttgattgtgcagcacaataccctgacaagcgcccttcaatgtctgaagtggtaaggagcatacaagagttgcgaaggtctagcttgaaagaggaccaggaccaaatccaacatgacaatgatatactattatagaagaacatgtatcttctccctcgactttgctttgtcagagtcggagcccatattttacttgctaaatcctgtgcgtatgttgcttgcattctgttggcttgggccgtcctcaaatttctttctttggcaccaaacttttgaattttcttcctttttttttcctcctcaaatctccattgtgccatctcccccctttttcttcccaatcaatacattgttccattagttattgttgttggattctggttgattgtaattattacttctgctttaacatgccttttacttttgttg

SEQ ID NO: 8431 - DNA, 181 bp, Glycine max
  Clone ID: 700753353_FLI
caacaattggaagaatacatcatcaaaatgtagtacaactaattggatattgtgttgaaggctcaaaacgtgcccttgtttatgaattcatgcccaatggatctcttgacaaatttatttttcccaaagatggaaatatacatttaacatatgacgaaatatataatatagcaattggagt

SEQ ID NO: 8432 - DNA, 1518 bp, Glycine max
  Clone ID: 700753375_FLI
ggaaagccaagggtggaccaaaaccatcatcataacccaaacccaacccaacccaacacaacacaacaccacctcctatcacataataacaaccttaaccttaaccttaaaccccccaattttcatgtctcggatcccgtgattcggatccccaacaaaaaaagaaacctcgtatttgttattttcgtcggatccggttgggaacgctcatgacgcggcgttgctcgcattgcagccacaatgggcacaactccagaacctgccctaaccgcggggttaagctcttcggggtccgattaaccgacgggtcgatccggaagagcgccagcatgggcaacctaacccactacgctggttccgggtcggccccgctccatgtcgggttgaataacccgggttcacccggggagacgcccgatcacgccgccgccgccgccgacggctacgcctccgaggacttcgttcccgggtcttcttctagctcccgtgaaagaaagaagggtgttccatggactgaggaggaacatagaatgtttttgctcggattgcagaagctgggcaaaggtgattggcgtggaattgcaaggaactatgttatatcaaggacgcctactcaagtggccagccatgctcagaaatatttcatcaggcaaagcaatgtgtccaggcgaaaaagacggtccagcttgtttgatattgttgcagatgaagcagctgacactgcaatggtacagcaagacttcttgtctgctaatgagttaccaactgaaacagaaggcaataaccccttgcctgctcctcctcccctcgatgaagagtgtgaatcaatggattccacaaactcaaatgatggagagcctgccccatcaaagccagaaaacacacatccatcttatcctatgttatatcctgcgtattattctccagtgttcccgtttcctctgccctattggtcaggatacagtccagagcccaccaagaaggaggaaacacatgaagtgctgaaaccaactgcagtacattctaaaagccctatcaatgttgatgaactggttggcatatcaaaactgagtttaggggagtctattggtgactcgggtccctccaccctgtctcgaaaacttattgaagaaggaccctctagacaatcagcttttcatgcaacaccaacatgtggtgatatgaatggcagtgccatccatgcagtttaagcgtgtgcctcgtgttccgaggaagggattgttatgtgagcattatggatcaacttggggcctgcatgaatgtggtcttgtgttcatcatacatctgtttgtggggtaacctaaataatttttttctttgcccattcacagtgattaacctagtttgtttatttgctggtagcagtagcgtctaggagttactttgggtctctaaactaaaactttatgtttgtccagtgattttatttgtcagggttatgtaaagttaatgttgattgtgcagtttgacaatctacctagtaccaagttgtgcttc

SEQ ID NO: 8433 - DNA, 792 bp, Glycine max
  Clone ID: 700753405_FLI
gcactctggctcctcagatttcctgcagctggggaaatgagactgagagcatatgctgctgcacaaggggtacagccggatcaaattattttcacagatgttgcaatgaagaatgaacacatcagacggagttctttagcagacttattccttgactcgcctttatgcaatgcacatacaacaggaacagatatactatgggcaggtttgccaatggttactctgcctcttgagaaaatggctactagggttgctgggtcactctgtcttgccactggactaggggaggagatgattgttagcagcatggaagagtatgaagatagagcagtctcattggctctgaatcggccgaagcttcaggctcttactaataagcttaaagctgtacgcatgacttgccctctatttgacacggcccgttgggtgaggaatcttgagagatcatattttaaaatgtggaatctgcattgctctggtcaacgtccacagcattttaaggtcactgaaaatgatctagaatgtccttatgacaggtagacgtaggaattagacgggaatgtagataaagaaaattaagaggcgtagttacccacattgttgaggcgtagttactcaaaatgttgatgggctatttagttactcattgttgatgatgtattaccttacctcggattagtaaaagagaaaattcgtgacgtactcatcaccgtcggtggactaccccgtagtagtaagagagtaaaacaatgtgacttattcttatttataaaagaaaatgtttggcttttt

SEQ ID NO: 8434 - DNA, 1455 bp, Glycine max
  Clone ID: 700753593_FLI
ctcctctctctcttttgctcatttcctttgactcctcattatcaaagaaaatggctctcattgggttgctcttgatgggttttctcacaatgttctcctctgctcatgcctatggtggagggtggactaatgctcatgccaccttctatggagggagtgatgcatctgggacaatgggtggggcatgtgggtatgggaatctctacagccaagggtatggaacaaacactgctgctctaagcactgcactgttcaacaatggcttgagctgtggctcttgctatgagattaggtgtgccaatgaccacaggtggtgccttccaggttctattgtggtcactgccaccaatttctgtcctccaaacaatgccttgcccaacaacaatggtggctggtgtaaccctcctctccaacactttgacctagctcaacctgtcttcctacgcattgctcagtacaaagctggaattgtccctgtctcctacagaagggtggcttgtaggaggaagggagggatcaggttcacaatcaatggacactcctacttcaacctagttctcatcacaaacgttggtggtgctggtgatgtgcattctgtttcaatcaagggttcaagaactggttggatgccaatgtcaagaaactggggtcagaactggcagagcaataactacctcgatggtcaaagcctctcctttaaggtcaccacaagtgatggcagaactattgtgtccaacaatgttgccccatctggctggtcctttggccaaacctacactggtgctcaattccgctagatcttgttgtccaaagttctaagtcacacattcaaatactactactatatagcataatagatatatggtattagtaggttctaagagtattattattatgagtttatgatgactggttagtatactagggtattagatagtatgctgctaggggaaggggtcagttttttggtaatttttgaaggccagggaattaagatttaagaaggggtatgttttaaattgctccttcattttaattttaatttcttttgtgtcaacaagtggggacctatttttttaggcccttcttgattacaggggtgtttttttatataactttttcagaagtgtttttttgaaccttcggtggctgaagagaagaagctagtgaaggtggagttcttttttatgggtgaggtactaaattggaagaggtggactttgttgttaccacccgccaattagtattgggatagtgtgtttttcattttggtgttgttattggcagttttattaagtgttgtttgctttttattactgatccttttgtcatcagcctgggctgtgtgtcttcggttgtgttggagactgaaaatgtaaattttcttgaaaggaaagttactgtagttactagtaatatttcctttttatttcttaattgctaattgttatattt

SEQ ID NO: 8435 - DNA, 1393 bp, Glycine max
  Clone ID: 700753668_FLI
ctcaagtccaacctacccctttttcttctcccaccaacttcaccgtcttcttcctcgatcatgtctcacttcaagggcaagtaccatgatgagcttattgccaatgctgcttacattggcactcctggaaagggtattcttgctgctgatgagtcaacagggacaattggcaagcgtttggccagcatcagtgtagagaatgttgaatccaacaggcgtgctcttagggagctgcttttcaccgctcccggtgctcttaaatatctcagtggtgtcatcctctttgaggaaactctctaccagagcacagctgcaggcaagccctttgtggaagtcttgaaggaggctggtgtgcttcctggcatcaaggttgacaagggcacagttgagcttgctggcactaatggagaaaccaccactcagggtctagatggccttggtcagcgttgcgccaagtactatgaagccggtgcacgttttgccaagtggcgtgctgtgctgaagattggtcccaacgagccatctgagctggctatccatgagaatgcctatggcttggccagatacgctgtcatatgccaggagaatggcctggttcccattgttgagcctgagatccttgttgatggatctcatgacattcacaagtgtgctgccgtcaccgagcgtgtccttgcagcatgctacaaggctttgaatgatcaccacgtccttcttgagggtaccctattgaagccaaacatggtcacccccggatccaattctgctaaggtttcccctcaggtggttgcggagcacactgttagagcccttcagagaaccgtgcctgctgcagttcctgctatcgttttcttgtctggtgggcagagtgaggaggaggcatccgttaacctcaatgccattaaccaggtcaatggaaagaagccatggtcactctctttctcctttggaagggcacttcaacagagcacccttaaggcatggagtggaaaagaggagaatgtgaagaaggctcaggaagcccttttggtaagagccaaggccaactcagaggcaactctgggaacctacaagggtaactcaaagcttgctgatggtgcctcagagagcctccatgttgaggactacaagtactgatcaatctaagtgcgggtaggaatcggtattttatgggtacaaccgaattttcttgttaatgagtattgtgcttcgactcttcccagaataataatcgtttggaattttgctttttgtttttcctagtgttccttcatatcaattttagtaattcggtgtattggtcaaacctgtgcaaacaggggaggggatgtaactttgttttcttgatagacaccaccaccttgctgttaacgaggctttgtgtttattttgc

SEQ ID NO: 8436 - DNA, 1269 bp, Glycine max
  Clone ID: 700753743_FLI
catctaccaccattccaggtgtagccatcaaaacaacgtttgtttaacaaaacccattatcagatcagatccgatcagatcctcttcagattcggatcaccgccgagtccatgagcacgccagcgctttcagggggcacgggcctcttctctggattcacgcgtttatgcaagggccttgcggtggtgcttgtttgcggtcacattgcggttcagtttatcccttcagctgttaactatcttgctcttattcccgccaggacaatcccatttgcctggaatctcattacagctggatatgttgaacaatctatatatggggtagtggtcagcacattaagtctcctgtttattgggaagctgcttgaaccaatatggggctccagggaattctttaaatttatctttgtggttaatcttctaacttcagtatgtttattcatcactgctattgccttatactacattacaaggctggagacttacctttacatgccactttctggatttcatggagttgtatctggtttcttggttggcattaagcaaattataccagatcaagagcttcctttcattaagataaaaacaaagtggttgccatctatcactgtattgctttccattgctattagcttctggacactagaggctacagcatatcttccaaccattatatctggcacgtatataagctggatttatcttagatactggcagaggaaaccagaaactaaacatagaggtgatctgagtgaagattttgctttctccacatttttcccagaatttttaagaccagtcatagaccctatcgcttcaatatttcatcgaatgctctgtggaagatatgatgcttctaatgatggtcaaggcaacagtctggaaagtgagcctttaccaggttcggactcaattgaggcatccaggagacgagaaagaggtgctcgagcactggaagaacgattggctgcagagaggttggctgttgcacgacgtgagttgcaaagagaggctgaggaaaatgtataattccccagcgtttgtaaattttggatcagttcaggcaatatgcacctattaggagtgatattttcagaggtcgtacagtaattagaaattttttgtttaggtcaaggaaaattttaatgtggttttgccatggactatgatctttacaaaaccgaaggtttctctttcttttgtcagataaatatatttgactttcttgtgtactttacacaaatacatagaatctaaagagtttttc

SEQ ID NO: 8437 - DNA, 1202 bp, Glycine max
  Clone ID: 700753767_FLI
cggattcggctcgggtaggccacagtcacacacagcctttgcctttgcctttgctgttcagtgctcccactcccagtccgggccgaggcagaaaatatcggaaactaacctttcacactcacacatccatcgtcatatctgaattggcaactcattattaaatcaattacgaaaacgaagaaacccaacaaaacaatggtagtagcttagctaattgcctaattgaatgaatctcaatggaacctcctctcatcaacgactccacattctcttccgctaacccttccttgtccgagatttggccctctcattttcccacagaccacactcccagtaacaagagacacctctccccctcgactgattgtggcagcaataaacatatcaaatcatcaggatcaggatcccaggatcaaaacggtgccttgaaggcgggtgaagtggacgcgacttcagtagccggtaacaagttacccgaacaaacggcgaaacctagttcttccgagcagccacctaagcaagactatatacacgtgcgagctagaagaggccaagccaccgatagccacagtctcgctgagagagctaggagagaaaagatcagtgagaggatgaaaattcttcaagatatagttcccggctgcaacaaggtaattggtaaagcacttgtgctggatgagataattaattatatccagtcactgcagcatcaggttgagttcctttctatgaagcttgaggcagttaattcgagattgagcatgagccctactattgaatgttttccttcaaaagaagttggcactcagccatttgaccttgccggaataatatttggatcacaaccggccaggggatatgctcaaggatcacagccgggatggctgcatatgcagatagctggtggttttgagaaagcaacataatttgagggaggttcattgggaatgacagaccaatcagtgtggttggttttccattgaaaaggaaaaagtcacttggctggttggttagcatgcgctgctctattaacaacctagtcaattgatgcaaaatgttgtaaggtctgtatgttctttgtcatagtatgatatcaatagtaagaaatgcatctaatttccttgcgcatcatctgactgggaacgtagtgtttcaccatgttagcaattgaaataatcttattgtggtttagttttcgtttc

SEQ ID NO: 8438 - DNA, 1284 bp, Glycine max
  Clone ID: 700753845_FLI
ttctgatcttcatcttcatagaattcaaagtatgaagatctatattttgctagtcattacttccttcacatttggtttccttgagaaagttgtttcaaatccaagtcctcgtccatataaggcaattttcaacttgggtgactctctaagcgacactggcaatttccttgcatctggtgccattttattcccagttatcggaaagcctccctatggtcaaaccttctttaagcgtgcaaccggccgttgctcagatggacgactaatgattgattttatagctgaggcatacgaattgccttatttaccaccctatctggcacttaccaaagacaaagacattcaacgtggagtaaattttgccgttgctggagccacagcacttgatgcaaaattcttcatcgaagcaggacttgcaaaatatctatggacaaataattcattgagcattcaacttggctggtttaagaaactgaaaccctccctttgcaccactaaacaagattgtgatagctacttcaaacgctctctctttctggtgggggagataggcggtaatgactataactatgctgccattgctggaaatattactcaacttcaagctaccgttcctccagtcgttgaagcaataacagcggccattaatgaattgattgctgaaggagcaagggagctgttggtgccggggaattttccaattggatgctctgcgctatacctaactttatttagaagcgagaacaaggaggactatgatgacagtggatgcttgaaaactttcaatggctttgcagagtaccataacaaggagctcaagctagccttggaaacactaaggaaaaagaatcctcatgcaaggatactgtatgctgactattatggtgctgccaaacgtttcttccatgctccaggacaccatgggtttactaatggggcgttgagagcatgctgtggtggaggtggaccctacaatttcaacatttccgcaaggtgtggtcacacaggttcaaaagcatgtgcagatccatccacatatgcaaactgggatggaattcatttgacagaagcagcttataggtacatcgccaaaggcctaatttacggtccattctcatatcctcccctcaagatctctcccaacaagatagcctagtgttggtgctatatatcagcaaattttctcgctgcatcgggaaaaaaatctataacagtgacctactaataatgattatgatgagaacattttggttgtggatttcacataataaatttttgtttaac

SEQ ID NO: 8439 - DNA, 994 bp, Glycine max
  Clone ID: 700753894_FLI
tataagctagtttatcgtgaggagaatatgaagttgtttgttttctttgttgctgcagtagttttggtagcatggccatgccatggcgcaggctaccaaaggttccctctccgaatgaaaactggctatggtgagcgttcttcggaggtaaaatgcgcaagttttaggcttgctgtggaagcacacaacatccgagcctttaaaaccattcctgaagagtgcgttgaaccaacaaaggactacattaatggcgaacaatttagatcagactctaaaacagttaaccaacaagctttcttttatgctagtgaacgcgaagtccatcacaacgacatatttatattcggcatagataacaccgtactctctaatatcccatactatgaaaaacatggatatggggtggaggaatttaatgaaaccttatatgatgaatgggttaacaagggcgacgcaccggcattgccagagactcttaaaaattacaacaagctgttgtctcttggcttcaagattgtattcttgtcaggaagatatcttgacaaaatggccgtaacagaagcaaacctaaagaaggctggcttccacacatgggagcagttaattctcaaggatccacatcttatcactccaaatgcactttcatacaaatcagcaatgagagagaatctgttgaggcagggatacagaattgttggaatcattggagaccaatggagcgatctgcttggagaccacagaggcgaaagcagtacctttaagcttcctaatcccatgtactacattgagtagtaccttcacctctctcaacaatctagctagagtttgctcctatctatatgtaataaggtatgctgatatgcactattcaaataggagcattagctatgtttgttaatgtcactttatgttatgtgggtaagtcacctaagacactccacgtacctacttgttgtctcttacgcggctttaataaatcttctgcccttgttcc

SEQ ID NO: 8440 - DNA, 905 bp, Glycine max
  Clone ID: 700753986_FLI
ctttcggtcatccgaactcctcaagcttcttctaagtcagttggagcctttagccgagcaacaattgatgggcatctacaacttgcagcaatcatcccagcagactgaagatgctctttcccaagggatggatgcattgcagcaatcactatctgagacattggctaatggttcgcccagctcatcaggctcctcgggaaatgtggcaaattacatggggcaaatggctatggccatgggaaagcttggtacacttgaggggtttcttcaccaggctgacaatctgcggcagcagacattacaacaaatgcttcgaatattaacgaccaggcaatcggctcgtgctcttcttgccatcagtgattatttctcacggctgagagcgctgagttctttgtggcttgccaggccaagggagtgaagcatttcacagccccattagtggacttctttcatgcctgactcccttaaacaccgatgatcattgaatcttgtgctctgaatgagttcaatggaagctggtgtcttttgacaatgaattcctcttgaagcctagttgtgatgctataaacattaaatgctatgatttttctactctgccaactgctggtgtggtgcaacatttttctttaagcttttgtggttttaaaatagtctcaataatttgattatataggtgtatgatagatagaagctgttgaagggaaaaatgtagaaatagtgtatctgtatttttaggttatagctgttcattgtatttcagaaatcagcttttatttgagggggtatttacctctctttagtttcatttcctgcttaatggtttgtggttggttgcacataaggctccatggtgtatgtatttatacgttctcttttggtatattagaaagacattactaact

SEQ ID NO: 8441 - DNA, 1481 bp, Glycine max
  Clone ID: 700754105_FLI
ttgaaatacactccatcggcggcggaaggttcttcggcggcggcggcgaccggaggctgaggccgcaccaccagaaccaccaccagcagccgccgataaaatgcccccgctgcgactcactcaacaccaagttctgctactacaacaactacaacctctcccagccgcgccatttctgcaagaactgccgtcgctactggaccaaaggcggcgtcctccgcaacgtccccgttggcggcggttgccggaaatcaaaacgctccaacaagcccaaaaccaccacctcagccgccgccaccaccagcagcaacaataacaataacaacccttcctcttcctcggaaaccgctgcggcaaccgcaccaacgccaccacaacaaccgcctccgccacttgagctagagcataattctcactctcactccagcagcgaaagctccacttataccgtcgctgccacggaggccatgtcagcgccgacaacgaatgcggtgtcgaacaacaatttattacttgacaacaaccgtgagtcgaagatgttcgctaaccctaacccctatttagagcagagtcgtagtggtggccttttctctgacatagagagcttcagcagcctcgtcaatttaaacaaccaagcattggggtttgggtttgggaacaataatagcaacatcagcatcctcgatgcgacgtcgtttcggtttggtgttagtgttactaatccgcacgggaatgatcaggtgcttgcggcaccaggtggaggccatggtcagtggcaacaacaacagcagaatcatcatgagttcggtacggcgtcgtttcttgatcacaccgtgccgcttgagttttcttcgctgcagcataaagctgggcatcagggagggtttggaccgttggattggcaacccggtggggatcaaggtttgtttgatcttcctaacactgttgatcaaccttactggacacaccacactcattggtctgatcaagataatccttcttctctctttcatcttccctgaaagtactcaagaaatttctctttttttttgttttttatgacctgagaggaaaagcgtaaaagaatatttgtttggagtctaaagcaacgtagaaaaacaaattggaagagaacctggaaggaacttctaattaaaatatgtaaatttctggtttttttacttttctttttttggggaggtgattgggcttgatcataagtagtgatgttctaatgttcatgtgaaactaacatccatgttagtttttttttgcttatgttttattttatgtacttattatttggaatttatttactaggggggaaaacataggagcgttttactttttaatatatactggggattggtgctgtaacaattgttgtttggttgcgtgtttgggattgtaatcttattctggcgtgtttgagatgctattttcatccgcactattgatggctatgaatttgaaaatgactc

SEQ ID NO: 8442 - DNA, 532 bp, Glycine max
  Clone ID: 700754143_FLI
gcgaagcacacgatcatccaccgcgacgtgaaaactaccaacattttgttggatgataagtgggtggccaaggtttcggacttcgggctttcgagaatcgggcccacgggcaacgccaaggcccacgtcagcaccgttgtgaaaggcagcattgggtatttggacccggagtattataaacgacagcgtttaactgagaaatctgacgtgtattcctttggagtggtgctgtttgagttactctgcgctcgtccgcctctgatcagaactgcggagaagaaacaggtgtcgcttgctgattgggcgaggcactgctgccaaaatgggaccataggccagattgtggaccccactttaaaggggaggatggcgccagagtgtttgaggaaattctgcgaggttgcggtgagttgtttgttggacgacggaacgctgaggccgtcgatgaacgacgtcgtttggatgctggagtttgcgttgcagttgcaggagagtgctgagcagcgtgaaaatactaatattgttgataatg

SEQ ID NO: 8443 - DNA, 1046 bp, Glycine max
  Clone ID: 700754169_FLI
gctaatgtggaaagaaagaaagaaaatttcaagggctgaaacatctatctttaattgtatcctcccttatgtttcctcacaaggttgcaagcatggcttttccaaacccatccatgtcagtttctccacagaagaagatgggaagggggaagattgagatcaagaggattgagaacaccacccaatcgccaagtcaccttctgcaagcgcagaaacggcttgctcaagaaagcatatgaattatctgtgctttgtgatgcagaggttgctctaattgtcttctctagccgtggacgcctctatgaatatgctaataacagtgtcaaagcaaccatcgagaggtacaaaaaagcatgttcagattcgtccggtgctggatctgcttctgaggctaatgcacagttttaccagcaagaagcggataaacttcgtgcacaaattagtagcctgcagaataacaacaggcaaatgatgggtgagtctttgggccctctgactgccaaggaactcaaaaacctggagactaaattagaaaaaggaattagtaggattcgttcaaaaaagaatgagctgctatttgctgaaattgagtacatgcagaaaagggagatagacttgcacaacaacaaccagcttcttcgagcaaagatagctgaaggtgagaggaaccaccataacttggccgtgttgccgggcggctcaaactatgattctttgcagacttctcagcagcaatttgattctcgtggctccttccaagtcactggattacaacccaataatcagtatgcacggcaagatcagatgtcgcttcaattagtatgatgtggttagtattgagacttgagatgttctgctcccttgtagtttgccttctagtatgatagcagatgaatgcaaagggtaatgtaagcagaatcatgtgtataggggatttaagcatacatcccctcagtattatatatgtaatggctttgtagactttcttaagactatcctgtatctattgtgaaacgctctctgatatgttagcatgtgtcctaatt

SEQ ID NO: 8444 - DNA, 471 bp, Glycine max
  Clone ID: 700754179_FLI
tgcttagacctgcttctcccggtactggggttattgcaggtgggtctgtgagaattgttctggaaatggcaggagttgataatgctttgggaaagcaactagggagtaataatgcactcaacaatgccagagcgactgttgctgctgtgcagaaaatgaagcagtttcgtgaggttgctgaggagcgtgggattccaatggaagaattgtggaagtaatgaaatttgtgaagggaatgtaatttttagatgtcgatgtttgtgatatacagctggtcatagttctgttaaggaagtgaaaaacattgttcaatttttgttgaaagttttatgaaagtgaacagtttcttcaaaaagctactttgttcaggttgaattcaatatattctttatctatctgtttaatttgtatttatggtcgtccaatttacgcttggctaaatcaatgtcaatgactcaattattcagttgc

SEQ ID NO: 8445 - DNA, 841 bp, Glycine max
  Clone ID: 700754245_FLI
tctgttcttgctgttgctggggctgaccctttggaaatggcagaggattggaaccgcacagcccttcttgtgatcgacatgcagaaagattttatagaagatgggggtcccatgctagtaaaaggagggaaagacattgtcccaaatgttattaaggctgtcgatgttgctaggcagcgtggaattctcatagtttgggtagtacgggaacatgatcccttaggaagagatgttgaactctttcgtcggcatctatatgcagcagggaaagttggtccaacctctaaaggaagtgaaggtgcagaattagttgatggactggtaattaaagaaggggattataaacttgtgaaaaccaggtttagtgcattctttgctacacaccttcattcagtccttcaaggagcaggaattaatagtcttgtggtcactggtgttcaaactcctaactgtattaggcaaactgtctatgatgctgtagcattggactatcaacctgtaactgttattgttgatgctacagcagcagccacacctgatattcatctcgccaatgtgtttgacatggaaaatattggagttgcaaccccaacattacaagaatggagcgaacccaaagcttgatctatatgaactatgaagcatgctactttttgcacccagtggtgtactggtgttcaattccaagactcaagaaaggtttgaagtgaagcaaacgtatctatgtttactgcataataaaatgatttacatggctaagtttgtttattttggtattcacttcacttttgttgtgactactatgaacttattttttctagtccaatgcactccaatttag

SEQ ID NO: 8446 - DNA, 2700 bp, Glycine max
  Clone ID: 700754281_FLI
gtcccgcaccagatctggtgcagggtgagagggttgggttcattaattttgtatcaatcttccttctgagcggtaggcgtggggataccagagtcttttcgggaagcaagagagggttctctccgttttcaatagatctctcactgtcttcttttgagggggaagccggggcctcggcctcggcggctttcaaagcccccaccttcacagccctatcaacaaaaaaccctaaccctatttttttcttcattttctaattcttttttgatcgtcgccgccgccactagagatgcctgccctggcttgttgcgtggatgctgcagcacctcccggctatgcatttgccggtgacatctcttttccggcgccggtcgcccttactggcgtacctccggccacgacagacgacagcaacaacaaccgttggtcgccgtccctctccgctgcgctctacaacgtcgacggctggggcggcccctactttgccgtcaacaccgccgggaacatctccgtgcgcccacacggttccgacacgctgtcgcaccaggagatcgatttgctgaagattgtgaagaaggcctccgatcccaaatctcttgggggtctcagcctccagcttcctctcattgcccgcttccctgacgttctgaagaaccggttggagtccctccagtcggcgttcgattatgcaatccaatctggagggtacgagtctcattaccaaggagtttaccccgtgaaatgcaaccaggaccggttcgtggtggaggatatcgtgaaattcggttcacccttccggttcggtctggaggccgggtctaagccggaactccttctggccatgagctgtctttgcaaaggcaaccccgacgcgcttttgatttgcaacggcttcaaggacgcggagtacatttctcttgccctggttgccaacaaacttgccctcaacaccgtgattgttgtggagcaggaggaggaggttgatttgatcgttgaattgagcaagaagctctgtattaagcccgtgattgggcttcgtgcgaagcttcggaccaagcattccggccatttcggtgggacttcaggagagaaggggaagtttgggctgaccaccgctcagattcttagggttgtgaagaacctggacctcgcgggcatgctggattgcctgcaactgctgcattttcatattggttctcagattccctcaacagcgttgcttgctgatggtgtgggagaggctgcgcagatctactgcgagttggttcggctcggggcgaacatgcgagtcatcgatattggaggtggactgggcatagattacgacggttccaaatcgtgtgactctgatatttccgttgagtacagtctcgaggattatgcagtcgcggttgttcacgcggttcagtgtgtgtgcgaccgaaggtccgtgaaacacccagttatctgcagcgagagtgggagagccatcgtgtctcatcattcggtcttgattttcgaggcggttggcaccagcagcaccaccgggggaggagcttcccctgcattgtccgctcaatatctggcggaggagctgtcggaggattaccgcaatctgtcggagctggcttttagaggggaatatgaaacgtgtctggtgtacacggaggagatgaaggagcgatgcgtggaacagttcaagcaggggacggtgtgtatggaacagctggcagcggtggaaggattgtgcgagttggcgaggaaggcggttggggcgggggaatcggttcggagatatcacgtgaacctgtctgttttcacgtccgttccagacgcgtggggaattgaacaggtgtttcccattatcccaattcaccgtttggacgaaaagccttcggtgaggggtattctctcggacttgacttgtgacagcgacgggaagattgacaagttcatcaacggagagtccagcctgccgcttcatgagatggaaggaggaagaacttactatctgggaatgtttttgggtggggcttacgaggaggcgctcggtggagtccacaacttgttcggcggccccagcgtggtcagggtgtcgcagagcgatggccctcacagctttgcggtcacgcgtgccgtgccggggccatcctgtggagatgttcttcgagtgatgcagcaccagcccgagctcatgttcgagacactcaagcaccgcgcgcaggagtatgtcagccacgacaacgcagcagcgcttctggctgctggccttgctcgcacctttgacagaatgccttatctgctgtctctgtcttcctttgtggctgacgatgttgccgctgctgttcctgctgctcaagatctgggggagcagtggtcttattaatggatgtgcttcaattcaaatagtctcgcactagtcatcattccctttgtttctgttgcttgcttggttgttcttcttcttcttgttgatcgtcgtggtcgttgaggtcttcaattttttttttattattattccgttttcgctgtttttagttttgtcctggatgcaatgcaggataaagacagggtcagtcagttattgttctctgcattttgttcccaaatgaaatgtctatgactttcgtcgtcaagttctagggtaacaaattttattgttgccttgcttgttattattatacttagaataaaaatgttctcgcatggacaagttctttt

SEQ ID NO: 8447 - DNA, 1710 bp, Glycine max
  Clone ID: 700754292_FLI
attaaatttctatgtagttgttgtttgtagtaatcatcaactcactcagttgccgtaggttgtcgtgatccatcacaacactttgtcactgaaattcagaaaaatggcatcagcaatgtttcgtaggaacatcatcacccactactccaagtttgcttcttctttgtcttcgttgcctcgccattcctcaatctacaaccctctctctatgtctgtttcttcatttcatagcgaaagtgttggtggtggtggtgggttgccatcttccatgcgtggagctgtgtattgggaaccgaacaagccgctaaccatcgaggaatttcacatgcctcgccccaaggccggtgaagttctcatcaaaacaaaggcctgtggagtatgccactctgatctacatgttatgaaaggtgaaattccgtttaccagtccttgtgttgtggggcatgagattaccggtgaggttgttgaacatggagcactcactgacagcaaaaccatagaaaggcttccagttggatctcgagttgttggggccttcatcatgccttgtggcaactgctcctactgttcaaagggccatgatgatctatgtgaagctttctttgcctataaccgggcaaaaggaaccctctatgatggtgaaactcgactcttttttcgaaacagtggaaaaccagcatacatgtatagtatgggagggcttgctgaatactgtgttgtgccagcaaatggagtgtctgtgttaccagactcattgccatatacagagtctgcaattctaggatgtgctgtttttactgcttacggcgctatggctcatgcagctcaagtgcgtcctggtgattctgttgctgttattggaactggaggtgttggttctagttgtttacagatagctagagcctttggtgcctcagatataattgctgtggatgtacgggatgaaaagctacagaaagcaaagacatttggtgctactcacactgtaaattcagcaaaggaagatcccattgaaaagatacttgaaattactggtggaaagggtgttgatgttgctgtggaagccttggggaaaccacagacatttgctcaatgtacacaaagtgtgaaggatgggggaaaagctgtgatgattggactggcacaagctggttctttaggagaggtggatataaatcggcttgttcgcagaaagatacaagttattggctcctatgggggcagggcaaggcaagatcttccaaagttaattagactggcagaaacaggtatcttcaatcttggccatgctgtttcaagaacatacacttttgaggaggcgggaaaagcattccaagatctcaatgaaggaaaaattgtcggtcgagctgtgattgagataatatagctctatattcccagaaatgcttttctgcagcagcaatagctatgcttttcacaccccacaagatatacatgctttggagttgcaaggtgttggtaccctgagaacataaataaatagatgtcttctgatgtttcattgcaggggcatgttcaaatgaaaactgtttttctttttgtgcatttctttgcttctaactcatgtaatcaggtaggtacaccaaggtgaagaataatagtctctgaatgctcatcattggcgtgtcgtaaaactgatgatgaaaatgcaggaaaataacagaaaagctagagatgctccaagaaagt

SEQ ID NO: 8448 - DNA, 700 bp, Glycine max
  Clone ID: 700754394_FLI
cacagttggaaaaaaaaaaaaaagttgttcgagatggcacgtacgaagcaaactgctcgtaagtccacaggaggaaaggcacctaggaagcagctcgcaaccaaggctgcacgtaagtctgcaccaactactggtggtgtgaagaagccacatcgttatcgtcctggtaccgttgctcttcgtgagattaggaaataccagaagagtaccgagcttttgatcaggaagctccccttccagaggctggttcgtgaaattgctcaggacttcaagactgatctgcgtttccagagccatgctgtgcttgcattgcaagaagctgctgaggcataccttgttggactctttgaggatactaatctgtgtgccattcacgctaagcgtgtaactattatgcccaaagatatccagctggcaagaaggattcgtggtgagcgtgcttgatgtggtggtggtggtggtggttgtgaagatgatgatgggtggctgcggatggtgttttgttattcagatttcttttttattcaaagatagggttgttagggagtaggtattaattgtgatacgggcaaatactgctaagtgtccatgactgtgtcttcttcctttcagaaaattggcatgtaattgatttttggacatatgtgtctgtctgtcataatgtttatgtttttacgggatgtgtgcagccactttggac

SEQ ID NO: 8449 - DNA, 1505 bp, Glycine max
  Clone ID: 700754423_FLI
tttgggagttaggttctgcacgctctgcttccagcgagtgttctttcttcgtttcaacaccttaatttgcacacgctgcttcttcagcttgagaaatggcacaagaaacctttctattcacatctgaatctgtaaacgagggtcaccccgacaagctgtgcgaccagatctctgatgcagtgctcgatgcgtgccttgaacaggaccctgacagcaaggttgcctgtgagacatgcaccaagaccaacatggtcatggtctttggagagatcacaaccaaggccaacgtagactatgagaagattgtccgtgacacatgccgcgaaattggattcatctctgatgatgttggtcttgatgctgacaaatgcaaggtgttggtcaacattgagcagcagagccctgatatcgcccagggtgtgcacggtcacttcaccaagcgcccagaggaggttggtgctggtgaccagggtcacatgtttggctatgccactgatgaaacccctgagtacatgcccctcagccatgtccttgcaaccaaactcggtgctcgcctcaccgaggttaggaaaaatggtacctgtgcttggctgaggccagatggcaagacacaagtaactgttgagtactacaatgacaatggtgccatggttccagttcgtgtccacactgtcctaatttccacccaacatgatgagactgtgagcaatgaccaaattgctgctgaccttaaagagcatgttatcaagcctgtcattcctgagaagtacctggatgagaagaccatcttccaccttaacccttctggccgttttgtcattggtggccctcatggtgatgctggtctcactggaagaaagatcatcattgatacctatggtgggtggggtgctcatggtggaggtgccttttcagggaaggaccctaccaaggttgacagaagtggtgcctatatcgtgaggcaggctgcaaagagtgttgtggcaaatggccttgccagaaggtgcattgtccaagtttcctatgccattggtgtccctgagcccttgtcagtgtttgtggacacttatggaactgggaagattcctgacaaggagattcttcaaattgtgaaggagaatttcgacttcagacctggaatgatcaccattaacttggaccttaagaggggtggccataggttcctcaagacagctgcttatggacactttggaagggatgaccctgacttcacctgggaagttgtgaagccactcaagtctgagaagcctcaagcttaagattgttgtgaagttaatcactcccttcaatggatgtcttgctaggtgtggatgaataatttgcgtgttccatgactactactacttcattcataggtctaatgtcatctcatcaatacttaaactgtttttttttttccttttctccttttactcacaatttattttttggttatgcaatgttaccgttttgatgcaatggaaattttatcagaattttgtacc

SEQ ID NO: 8450 - DNA, 1145 bp, Glycine max
  Clone ID: 700754576_FLI
tgatgcttctgggacaatgggtggggcttgtggttatggaaacttgtatagtcaaggatatgggactaacacagcagcacttagcactgccttgttcaacaatggcttgagttgtggctcatgctaccaaatcaaatgtgcaaatgacccacaatggtgcctccgtggcaccattgtagtcactgccactaatttctgcccccctggtggatggtgtgaccctcccaatcaccattttgatctttctcaacctgtgtttcagcaaattgcccaatacagagctggtattgtgcctgtagtttacagaagggtacggtgcatgagaagaggtggaatcaggttcaccatcaatggtcattcatacttcaatttagtccttgtgactaatgttggaggtgctggtgatgtgcattctgtggccataaaaggttcaagaaccagatggcaacccatgtcaaggaattggggccaaaactggcagagcaactcctaccttaatggacagagtctttcctttttggtcaccactagtgatggtcgcagtgtgctctcatacaatgctgcaccaccaagttggtcctttggacagacctacactggaaggcaattccgctactaatttatcaacccttttcatggagggtgcattttctctcaggtacagaaactttctagtaggagaaagaaacacaaagaaaattgtattttttttctctctctctctcctactgaacgacagtttcagtaaccagagacaaggcagaggagccaattcctttcatggaacatcaatttcataatgttggttacccacatgataatatggttgcattataaaaaagaactaaagccgtaatttaatagtgtacatgatgtgtcaatattgggccacaaaataggtggcttagtttagtccctttaatatattttggtttgtgttgcaagtttttttgcagatgaattgctggtaccttagtttatgctaagctatagtctcaagggtacttctgtttgtttgcctgctgaaagaaaagtaggttagaggtgggattttgtgagccttattgcactttggcaaatgggattcttgccttgttcagaaagatcaacttaaataataattgagtatattcttgttgtgcttt

SEQ ID NO: 8451 - DNA, 849 bp, Glycine max
  Clone ID: 700754722_FLI
ctccaacaagacaacgaagccttactcaaacagataaaggaattgaaatcgaggctggtgcaagaagagaacaacaacaacactgaaagcgatgtttcggtgaaggaagagatgatagccactctgcaggatagtaacccgctctgtgaatccgccattcctggatcggactcgaaggagttgagttacgagtgtttcaacaagagtgatgaggtgggagggggttctgtgttccctgtggatttcaaagatgggtcttctgatagcgactcaagtgcgatcttgaacgaggagaacaacaaccacagccccaacaacaacgcggcgatttcgtcgtgtggggttctgcaaagtcacgggcttttgtcgtcgccttcttcttcgtcgatgaacaactgtttccagttccagaaacagtaccagacgacgacgcagtacgtgaagatggaggagcacaattttctcagcgccgacgaggcctgcaatttcttctcggacgaacaagcaccaactctgcagtggtactgttcagaggaatggagttaagagggaagaagaagaagcttaattaattgagagcgagggagggaatagaaagaataaggcattttgcagggtgtatagtaatgggatggagagagaaacattgtaaaaatgaaatggtcaaggattgaagaagagagggaaattgaagagcttgagagagaggggatggggttgaagcacgcatggcgtggggtcggagatgagaggttgatgacgataaaaaaaaaggggggtaataataatcatcaacatccgtgcggggaaaggggagtaatttatgaataataataatgattaggtcgt

SEQ ID NO: 8452 - DNA, 1383 bp, Glycine max
  Clone ID: 700754812_FLI
gagaagctgagcgtgaaatgcaaaaaagaagagaagaaagtgacaaaatcccagtaaagcgtgacagtgccagctccctacctcaaccccaaagtcttgtgcttttcacatccccattttccccattcccctttctgcttcctctttctttcgccaaatgggtcatcatctccttctcccataacacaatcttcttcaccttttctttcttcttcgcttcccttcggtggggtttcaagtttcaccataggaataggatgttttctaggttgattcatccccatgaaggccaggaagacatgcagggtggttccaaccacgctcacctcggagacccttgtcttgttctcacctctgatcccaaacctcgtcttcgttggaccgctgaccttcacgaacgctttgttgatgctgtcactcaacttgggggtgccagtaaagccactccaaaagcgataatgaggaccatgaatgtcaagggtttgacgctctatcatttgaagagtcatcttcagaagtacaggcttggtaagcaatcaggaaaagattctgatgagggactcaaagatgcttcatatcttcaagaaagccctggtactgataactcttctccaaagttaccagcttctgatgctaacgagggtcatgaagtcaaggaggcattaagagctcagatggaagtgcaaagtaaactacacttactagtggaggcagagaaacacttgcagattcgccaggatgcagagcggagatacatgggcatgcttgagcgagcgtgtaagatgttggcagatcaatttattggggatgtaattatcgacagggatggccaaaaatttcaaggactggaaaacaaaacatcaagaagtcccctagttgatcatggaggcttttttcccgcagcgtgtactgaggtgggtggaatgcatgtttcagaagtaccacccattctccagcctcaaggggctgagtgctccagtgaaagttgcctaaaatcacttgagagtctgggagggttgacactagaaggatctcccggcggatcaaagaagaggatgctgaacttggactcaatggtagcacctttgatctggagcgaagccaacaccagaactcaaggaatccatttagcccaagttaatcctccaggaatgactaggtatggcatgtaggtaggatagggaaggctagttcctcatgaagagagttgaggacattgtgctttgttccaagcttttaggatgaagtaccgagttagattcttatctgttcttgcccatcaagttggtgggaatcaacttgtctcacatctttgtgtaaattgaaaatactatgtggcttaacttggactatcactactaaaggttggcgctgaccattgac

SEQ ID NO: 8453 - DNA, 735 bp, Glycine max
  Clone ID: 700754890_FLI
ggtagggtttctgggaaggtgaagtggttcaatgatcagaaggggtttggattcataagccctgacgatggcagcgacgatctcttcgttcaccaatctcagatcaaatctgacggtttccgaagcctcgccgaaggagagtccgttgagttcgccattgaatctgaatctgacggacgcgcgaaggctgttgatgtcactggccccgacggcgccagcgtccagggaaccagacgaggcggtgatggtggccgaagctatggcgggggacgaggaggtggtggaggtggctacggtggaggcggtggctacggtggtggtggtggctacggtggaggcggtggttacggtggtggtggaagaggcggtggaggcggtgcttgctacaactgtggtgaatcgggacatctggctagggattgcagtggaggcggtggtggggacaggtacggaggaggtggtggtggtggcagatatggaggcgccggtggcgggaggtacgttggtggtggaggcggcggcggcggcggaggaagctgctacagctgtggagagtctgggcattttgccagagattgcccatcaagtgctcgttgaatttactgttagggttgtttatgttttgcggattgttttaagtttttactttaatatgtcttagggattttaatggtttctgtccaaactatgggttcttatgagtagatgtgtgggatttttcttttttggttattt

SEQ ID NO: 8454 - DNA, 1479 bp, Glycine max
  Clone ID: 700754894_FLI
ctgtgattgtccgtaagagagagagagagagagagagatggtgatgcattcacgggtcagaagcgtcgccggaaacatcaaatgcgcagcgagactcttctgttcatcttcgacgaccacgccgccggctgcgccgttgcagttcccgcagactctggcggggctccgggcgcggctggcggaggagtcgccgtcgctgtcggacttcctcgcgttaaaatcggagagcgcgtactcggtggaggtcgggactaagaagaagccgcttccgaagccgaagtggatgaaggaggccgttcccggcggcgagaagtacgtgcagatcaagaagaagctccgtgaattgaagcttcacacggtttgcgaggaggctcggtgccctaatttgggggagtgctggtccggaggcgagaccggcactgccaccgccactatcatgattctcggcgacacttgtactcgaggttgcagattttgtaatgttaagacgtcaaggactcctccaccacctgaccctgatgagcccaccaatgtggctgaagcaattgcatcttggggtctggattatgtggttataacgagtgttgaccgtgatgatttgcctgatcaagggagtggtcattttaccgaaacagtgcagaagctgaaggcactgaagcctaatatgctgatagaagccttagttccagattttcgaggagatgctgactgtgtagagaaggttgccaaatcaggattagatgtctttgcacacaacattgagacagttgaagagcttcagagtgttgtacgggatcatcgtgctaattttaagcagtcattagatgttctaatgatggccaaggaaaatgctcctgctggaacacttactaagacttcaataatgttaggttgtggggaaacacctgatcaggttgtgaagacaatggagaaggtgagagcagctggtgttgacgtgatgacatttggtcagtatatgagaccttcaaagcgccatatgccggtatctgaatatgttacaccagaggcctttgataagtatcagaaacttggcatggaaatgggctttcgatatgtggcatctgggcccatggtgaggtcatcatacaaggcaggtgaattctatattaaatccatgattgaatcagatcgggctgcttctccctcaaagctgacctcttcttgatccaccatcttttttgttattcacacacttcattgtgcattatatgtaaggagtgcagacttactacattgctgttgatgctcatgccacgtgtaatatcagtaaaaagctataaacgggcatatgctgctgtctgcaatttttttcactgcctcctccccaacctatgagtgaataggttgatttatttagaaaatgcaaatttcaaaggttgattgtatatgttctcatttacatgaactcatttttctctattaaactggtgctaacttactccagttactgtagttatt

SEQ ID NO: 8455 - DNA, 943 bp, Glycine max
  Clone ID: 700755033_FLI
gtttgtatatcctcgaaaatgatgaatgaagcggctggtgaaccctaattagttgtcggtgtttgttggaagagcacatctctgttttcttcgtcatcttcccctcccctccccaaccagagatgcgccccgcaacacatatgtactaaagctttcaacttttcagcatcctttcagatgttagcgaaaacccataacaaaggggatggatctaagtccctggctaagatactggcaaaatggaaagaatataatgcccagattgattccagcagtgatgcggataagccagttcgcaaagttcctgccaagggatcgaagaaggggtgcatgaaaggtaaagggggccctgagaactcgcggtgtaactacagaggtgttaggcaaaggacttggggaaagtgggttgctgaaatccgagagccaaacagaggcaataggctttggctaggtactttccccactgccattggagctgcccttgcatatgatgaagcggccagggcaatgtacggttcctgtgcccgtctcaactttcccaatgtttcagtttccagtttctctgaagaatcttccaaagattctccggttgcgaatcattgtggttcgtcaatggcagtgtctgcaaacgagtccatgatttcaccaagtaactcgggggtaggtgcagaagatgatgttgatatggagcccatttccttatccttaactgtaaagcatgagaatggggaaggtgaatcggggataagttcttcccctccttccccatgatgtacattgggacatggctaaattttttagcgcatgtacttgttaatggttagcttaggtttaatcatatttgatcctggagattagctgttgtaaaactaaaatgaactccgttgcaaaaatggtcatttcttttggccacctaatttgcatggatatcctgtctattttt

SEQ ID NO: 8456 - DNA, 1480 bp, Glycine max
  Clone ID: 700755079_FLI
ggaaaggtcttgcctatgatgtttcagacgaccagcaagacatcacaagagggaagggtttggttgattccctcttccaagctccacaggatactggaactcactatgcaatcatgagctcttatgagtaccttagcactggacttaaacagtacaacttggataacaacatggacggtttttacattgctcctgcttttatggacaagcttgttgttcacatcagcaagaacttcatgaccctgcccaacatcaaggttcctctcattcttggtatctggggaggcaaaggtcaaggaaaatccttccaatgcgagcttgtctttgccaagatgggaatcaaccctatcatgatgagtgctggagagttggaaagtggaaatgcaggagagccagcaaaactgatcagacagagataccgtgaagccgcagacatgatcaagaagggaaagatgtgtgctctcttcatcaacgatcttgatgcaggagctggtcgtcttggtggaactacacaatacactgtcaacaaccagatggtgaatgccaccctcatgaacattgctgataaccccaccaatgtgcagcttcctggtatgtacaacaaggaagagaacccccgtgtgcccatcatcgtcaccggtaacgatttctcaacactgtatgctcctctcatccgtgatgggcgtatggagaagttctactgggcacctacaagggacgatcgtgttggcgtctgcaatggaattttccgcactgacaatgttcctaaggatgacattgtcaagcttgttgacaccttccccggccaatctattgatttctttggtgcactcagggctagagtatatgatgatgaggtgaggaagtggatttctgttgttggtgttgacttcattgggaagaagcttgtgaactccaaggaaggacctccaacctttgaccaaccgaagatgactttgagcaagctcttggagtatggtaacatgcttgtccaagaacaagagaatgtgaagagagtacaactggcagacaagtacttgaaagaggctgctcttggtgatgctaatcaagattccatcaacagaggaactttctatggcaaagcagctcagcaagtaaacattcccgttcctgaaggttgtactgatccaaatgcctcaaacttcgacccaactgcaagaagtgatgatggaacctgcttatacacaccctgagaacctaagcattctccacttggagagaagctaagagttgagataataaaataagttatcttgttcatattggattgttatcctgtataattttgagttacattgtctacattttacaatgtgtgcaatgttaaagtcttgatgtctttctctttccgcttgcgcatttgttgcttttctacatttaattttttccttgacacgatattaatgttatgctacctgttcgttttagttaataaagtttattttttgtaatttgtaac

SEQ ID NO: 8457 - DNA, 1777 bp, Glycine max
  Clone ID: 700755133_FLI
gttggtttcaagtgtgaagcttcgagggaaactgctgttgttatcatgaaccatgttaaccttgttgagatcctcatggacgtgaatcaatggtccacggtgttctctggcattgtctcaagagcaatgactttggaagtgctatcaacaggggtggcggggaattacaacggtgcattgcaagtgatgacagcagaagtgcaagtaccttcacctctggtgccaactcgagagagctattttgtaaggtattgtaagcagcacggtgacggaacttgggcagtagtggacgtgtccttggataatttgcgtcctagtccttcagccagatgtagaagaaggccctcaggttgcttaattcaagaaatgcccaatggctactctaaggtcatatgggttgagcacgtagaagtggatgacagaggtgtccataatctatacaagcagcttgttagctcggggcatgcatttggtgcaaaacgttggattgcaaacttggatcgacaatgtgaaaggcttgctagtgccatggcaacaaacattcccacagtagatgttggagtaataacaaacccagatgggaggaagagcatgttgaaactggctgagagaatggtcataagcttttgtgctggagtgagtgcatctactgcacacacatggacaacactttctggaactggtgccgatgatgtaagggtcatgacacgtaagagtgtagatgacccaggaaggcctcctggcatcgttctcagtgctgcaacttctttttggcttcctgtgtcaccaaaaagggtttttgaattcctccgcgatgagaactccagaagtgagtgggatattctttccaacggtggagttgttcaagaaatggcacacattgccaatggccgagacactggaaattgtgtctctctacttcgggtgaatagtgcgaattcaagccaaagcaacatgttgatattacaagagagttgcgcggactcaacgggatcttttgtgatatatgctcctgtagatattgtggcaatgaatgtggttctgaatggaggggacccggactacgtggcccttctcccttcaggatttgctatactcccagatgggaccactgcacatggaggtggcattggtgacattggacatggtggttctctcttgactgtggcatttcaaatattggttgattcggttccaacggcaaagctttctcttggatcagttgctactgttaacaatctcattgcctgcactgttgagagaattaaggctgctttatctggtgaagttgcttgacctaatggattatagtttagaagaaggataaaggggtgcattgcattttggacaaatgggaggtgttgggaacttcggcttataccaaaaaggatgagaattgagaagtcaagagcgcaccttgcatgatcctttcttagcacccaacacagtgctgaaaggattaaggttcgggaattgacttccctgaaaatcgtaaatgctaagagcttaaatcaagaccttagtaccttctctcttcaccttcaaagactacatatttatagttagtgttagctttttctatgattattaggttggagctgtgacttaacctcttatgttctttcttctaatgtttttttgtattttataagatcaagcgcgctagccttatagctagtaaatgggaagcttgcaccgttagtgtagtggttaagttctcactacactaccatgtttgaccctttttaaggttttcaaatgaatgttccttccaatt

SEQ ID NO: 8458 - DNA, 1382 bp, Glycine max
  Clone ID: 700755168_FLI
gtggctttgacatgatttgcagtgggagggacaagattgaaactccagagcagtttaagcaagcggaagaaacagctaagaagctagacttggatgggctcgttgttattggtggtgatgactcaaacaccaatgcatgcctccttgctgagaacttcaggagcaaaaatttaaaaacaagtgtaattggatgccctaaaaccattgatggtgatttaaaatgcaaagaagttcccacaagttttgggtttgatactgcttgcaagatatattctgaaatgattggaaatgttatgatagatgcccgatcaactggaaaatattaccattttgtgcggcttatggggcgtgcagcttcacacattacgctggaatgtgccttacaaactcatccaaacattactattattggagaagaggttgctgcaaaaaagctgacgttgaaaaatgtcacagactatatcgtagatgttgtttgtaaaagagctgaaattaattacaattatggtgttattcttatccccgaaggtctaattgatttcatacctgaggtccagcatctcattgcagaactaaatgaaattcttgcccatgataccgtggatgagggtgggttatggaagaagaaactcactgatcaatcgttgaagctttttgactttttacctcaagcaattcaagagcaattgatgcttgaaagagatccacatggaaatgttcaggttgccaagatagaaacagagaaaatgcttattcaaatggttgaaactgagttggagaagagaaagcaagaaggcaaatacaatggcgaatttaaagggcaatcccacttttttggttatgaagggaggtgtggcttgcctactaattttgatgctacttattgctatgctctgggttatggtgctggagccctccttcatagtgggaagactggattaatatcatcagttgccaatttatgtgctccggtagaagaatggactgttggtggaactgcactcacctcactgatggatgtggagaggaggcatggtaaattcaagcctgtgatcaagaaggcaatggtggaacttgaaggggcacccttcaaaaagtttgcctccttgcgggatgaatgggccctgaagaattgctacatcagtccaggtccaattcaattctctggcccaggatctgaagtaattaatcacactctactcttggagcttgaagcactagcttaggcataatatgaggtctttgttttgacggtggcaattcatattttctttttgggatatttcaataatatatttgatctgtgactagctagtgagtttacttttgaaattaaccggctaatgattcttgggttggttgatgagtataaattggtcaac

SEQ ID NO: 8459 - DNA, 2518 bp, Glycine max
  Clone ID: 700755180_FLI
ctctctctctttctctctttctctctgtctagaatgcctctattctcctctgtcggtcacacacagcgatagatagataatagagaagagaagcattcataggcgccaattgtgagtgagagagaagtttctgttttttctacttttccatttttttgggagagatagagagagagagatctgattcttcaccataactgtcattgctttgcttctctcactcagcacaagttgacaagaagggcattgccatttcaatcccatacaaaaagcacacaccccaattcaccaccattttcctaaagcttcactcttttctctgctaagagaagaaagcaagaaagaaaaagccaaaatggttgaatctcagcccaagttcttcatcccggactcaatcaacggcgtgaatttcgacgtagcggcgcagattaagatggtgtgggaagtgatgaaggcgccactgatcgtgcctctgctgaacctggcagtgtacattagcctcgccatggcgctcatgctcttcatggagagggtctacatgggcattgtcatcatcctcgtcaagctcttctggaagaagccacaccagcgctacaagttcgagccactccaagacgacgaggaactcggcaactctaattaccccgtcgtgcttgtccagattccaatgttcaatgagaaagaggtgtacaaggtgtcgattggagcagcttgtaatctttcatggcctgcggatcgtctcgtcatccaagtgcttgatgattctactgaccctacccgtcaagcaaatggtggagatggaatgccagagatgggcaagtaagggcataaacatagtgtaccaaatcagagaaacaagaggagggtacaaagcgggtgctctaaaagaaggcctaaaacgtaactatgtgaaacactgtgagtacgtggcaattttcgatgcagatttcaggccagagccagattttctcagacgttccattcctttcttggtgggcaaccccgacattgctcttgttcaagctcgttggagatttgtgaattctgacgagtgcttattgacaagaatgcaagagatgtccctggattaccatttcacagtagagcaagaagttggatcagccactcatgctttcttcggtttcaacggaactgctggtatttggagaatagctgctatcaacgaagctggtgggtggaaagacagaacaacagtggaagatatggaccttgctgttcgtgctagtcttaggggatggaaatttttgtaccttggtgacctccaggccaaaagtgagcttcccagtactttgagagccttcagattccagcagcacagatggtcatgtggtcctgctaatttgttccgcaaaatggtgatggagattgtgaggaacaagaaagttaggttttggaagaaagtgtatgttatatacagctttttctttgttcgcaaaatcatcgcccacatggtcaccttcttcttctactgtgttgtgattccccttacaatcttggtcccagaggttcatgttccaatctggggagctgtttatattccttctgtcatcaccattctcaattcagttggaacaccaaggtccattcaccttctgttctattggatcctctttgagaatgtgatgtctttgcaccgtaccaaggcaacatttataggtctcttagagtatgggagggctaatgaatgggttgtgactgaaaaacttggtgactctgtcaataataataagaataaatcaggagatgctgccaagaagaataatgccatcaaggccacccccaaaaagactcgatccaaatttgttgaaagacttaatttactggagttgggatttgctgccttcctcttcgtatgtggatgctatgattatgttcatgggaaacacaactacttcatctacctcttccttcagaccttaacattctcaattgtaggatttggctacgttggcaccatcgtgtaaacctcgttgagccaaatttctcaagttacttaagtttcatcaatgttgtgtccatatttttctagtttctcctaaaaaaaaatacatcaaaagaggctgatttcttcaagcaacaaactctgtaccaaatcatctacagctagtttagctcaaataattttcaattcggaaagaaaaaaaaaagtcctttccaaaatttcattgtcatccatcatcaagaagatacaaatcatcacaggcaaagtgctgttattactagaattgcattacacaggcttaagggcagctatgaagatgtaccaaaaacaaaaagtggttaaattagagccttagacatgaagtagagacagtgtgattttgtttgcatagattgttttgtgagattttatagttatatatttcgcgagtcctttatttgtttaggtttgcttagtctgagccaaaataatttggtggataaaaatgcgcttctaattcatgttatttgtcattttttcaccaaggaatgaattttatttaccatacatgcaatc

SEQ ID NO: 8460 - DNA, 2030 bp, Glycine max
  Clone ID: 700755250_FLI
gcgctgcgcaccattctcaatctccgatctataaacccccaaaccctcctccattcccagccatctctctctctctctctaaaaccaagtctcgtttctctctcctcttgctgggcctcttcttcgggcttcccggcccatcgccgactccaacgccacaacctttttctgctttttcgatttagggttttcgcgcgctctcccttccttctcctggatctgctaggagaagcgctgaatgctctgagcttcaacgctgtttgttagagatggcgtcttcgtatcccggttccgttagtgccgcacaggttggttcctacttcgtgggacagtactaccagattcttcgccagcaaccgaatctcgttcaccagttctactccgattccagcagcatgattcgcgttgacggagactccgttgaaaccgcgcacgatgtgttgcaaattcattcaattgtctcgttactgaattttactacaattgagatcaagacaatcaattctcttgactcttgggatggaggtgtgcttgtgatggcctcaggttttgtgaagataaaggatatcggtgggaagcggaagtttgttcaaactttctttcttgctcctcaggagaagggttactttgtaatgaatgatatgtttcatttcattgatgatggagtaatgtacccaaatctggtaccagtggcatccgaaacgattgacacacaaccacatctttctgcttctcttgctgagccaccagtttcagactacggcttagaggaagaagccagggaatatgccaactcagttcatatagatgatgatccagtggacaagtatagtcttcctgagcaccagcagcagctacaagaagaacttgaaaccgaaattgtggtggaggaaacttccgtacaggaggcatctccaccaattcataccgttgcacacactatccaagaaccccctgttgctcttgtggaagagtcctttgaggagcctcctaagaaaacatatgcatctattttacgagtttccaaagggctgccagtgttgtcagctgctccaaagcatgctccacattctttcaaaagtgctccacctcctccagagttgaaccatgtagcacagcctgctgttcagcagtcaagctctgcatctatgtatgctcccgagtcagggaccgaggcagcagaagaaggctatgcactagaagaagatgaagtaacatctgtctatgttagaaacttgcctgctaatgttactgaagtggagattgaccaagaatttaagaattttggcagaattaagccagatggaatattcattagggtccgaaaggaaattggagtctgctatgcatttgttgaatttgaagacattattggtgttcaaaatgcacttcagtcttctccactccaattggctggaagacaagtatacatagaggagcggaggccaaacagtgtcggtgcagctcggggaggaagaaggggaagaggcagaggcagctatcaagcagatgctccgagagggcgttttggtggtaggagcatgggaaggggaggttatcaggatggttcagactacaccagactaagaggtgatggttatcttcagcgtggttcacgatgaggaaaatgtggcaaaagcatgcacagggataccattcaagggcttatacaattagcgaaatctgtgcttggtgtgggtatttactacagaacatttgcttctgtggtttcagataaagtaatcttaacgttttgggtgcgtctttttcaagtaaaagccattgagacttaaactagtttgttttgcaagcatagatcagttggttccccttgaatgttagttattatgccattcaggtgggaagttttggttatttgtatttgtattggattgtgggggccttttaatgagaggggtgttgaaagtaacaaagtggtttagacatcaatagaggtggtgcttaattatcagatgttgcggtgcatttctgtgtgcatcacctcgttacctttgacttgttttgagagt

SEQ ID NO: 8461 - DNA, 2760 bp, Glycine max
  Clone ID: 700755286_FLI
cttgagtgttccctgggcatgagtggacgctataagactcagtgcactcactcactcactcactcactcagtgactgtgtctgaaaatgggcaaacaagtattgaattcctttcgtcccccagtggttttcttgttattcttcattgtcttttccgttgtttcctgtgatgaagcttccaagaccttcatctttcgcgtggattcccaatccaagcccaccatcttccccacccattatcactggtacacctccgagttcgcccaagaaaccagcatcctccacgtatacgacaccgttttccacggcttctccgcggtgctcacgcaccaacaagtcgcgtccataagccagcacccctccgtcctcgccgtcttcgaagaccgccgccgccagctccacaccacgcgctccccgcagttcctcggcctccgcaaccagcgcggcctatggtccgaatccgactacggctccgacgtcatcattggagtcttcgacacgggcgtctggcccgaacgccgcagcttctccgatttgaacctcggccccattccccgccgctggaaaggcgcgtgcgaaaccggcgtcagattctcccccaaaaactgcaaccgcaagctcatcggcgccagattcttctccaaaggccacgaggcaggtgcgggttcgggtcctctcaatccgatcaacgacaccgtcgaattccgatcccctcgcgacgccgatggccacggcacccataccgcctccaccgccgccggccgctacgccttccaagccagcatgtccggttacgctgctggaatcgcgaaaggcgttgctccgaaagccagattggctgcttacaaagtttgctggaaaaattccggttgcttcgactctgacatcctcgccgcctttgacgccgccgtgaacgacggggtggatgtgatttcgatctccatcggtggcggcgacggtattgcctccccatattatctggaccccatcgcaatcggatcctacggcgcagtttccagaggagtgttcgtgtcctcttccgccggcaacgatggtcccagcggaatgtcagtgacgaaccttgctccatggttaacaacagtaggcgcaggcaccattgatcgtgacttcccctcacaggtgattctgggcgacggtcggagactctccggcgtgtcgctatacgccggagcagctttgaaggggaaaatgtatcaacttgtttacccagggaaatcagggattcttggagactcactctgcatggagaattctctagatccgaacatggtgaagggtaagatagtaatatgcgacagaggaagtagcccgagggtagcaaaggggttagtggtgaagaaagcagggggagtgggaatgattctggccaacggaatatccaacggcgaaggactcgtgggagacgctcatcttctcccagcttgtgctgttggtgccaacgaaggagacgtaatcaagaaatacatttcctcttcaacaaaccccacagccactcttgatttcaaaggtactatcttaggaatcaaaccggcaccggttatagcttctttctcagcgagaggacccaacggtttaaaccctcagatacttaaaccggatttcattgctcccggtgtcaacatcctcgccgcctggacccaagctgtcggcccgaccggtttggactccgataccaggagaaccgagttcaacatcttgtctggcacttccatggcttgccctcacgtcagtggcgccgcggctttgctcaaatcggctcaccctgattggagccccgccgccctaaggtccgccatgatgaccaccgccaccgtcctcgacaaccgcaaccagatcatgaccgacgaagccaccgggaacagctcaactccttacgatttcggtgctggccatcttaacctaggacgagccatggatcctggcttggtgtacgatatcaccaacaatgattatgttaatttcctttgcggtattggttacgggcctaaggtgattcaggtgatcactcgcgcgccggcgagttgtccggtgaggaggccggcgccggagaatctgaattacccttcctttgttgctatgtttcctgcttcgtccaagggggtggcttccaagacgttcatacggactgtgaccaacgtggggcccgcgaactcagtttaccgcgtgagcgtggaggcgcccgcgagtggtgtcagcgtgacggtgaagccgtcgaggctcgtgttctcggaggcggtgaagaagcggagctatgtggtgacggtggcgggggacacccggaagctgaagatgggtccgtccggggcggtgttcgggtcgctgacgtggacggatgggaagcacgtggttcggagccccattgtggtgactcaaatagaaccgttatagagagcctcgaatcgatcatgtcgttttgatcgatgcggctcgtgactcgtgacgtaagtgggtggcacccccgtaggttgccacgactagtataaaagacaacaaaaacacaaatattttgtattttttctttctttttcatttttagatttttgtttaagtgaccaagtttggaggtgtaatccgttgttgtactttttttaataagtttttcttcttcttgggtttaatttagcttcaccttgtgtttatagactttttagtggtctatctatactcgataaaattataggagtaatttgtaatatttatgttaagccgtcattatttaattttaaccacgtttgatttg

SEQ ID NO: 8462 - DNA, 884 bp, Glycine max
  Clone ID: 700755370_FLI
atggttctcaaaactgaactatgccgattcagtggtgccaagatctaccccggaaagggcatcagatttgttcgtggtgattctcaggttttcctgtttgccaactcaaaatgtaagcggtatttccacaaccgcctgaagccctcaaagctcacctggactgctatgtacagaaagcaacacaaaaaggacattgctcaagaagctgtgaagaagaggagacgcgctgccaaaaagccttactctaggtccattgttggtgccactctggaagttatccagaaaaagagagctgagaagccagaagttcgagatgcagctagggaagctgctcttcgtgaaattaaggagaggatcaagaaaacaaaggatgagaagaaggctaagaaagcagaagttacagccaagtcacaaaaagcaggagggaaaggcatttctaagggtgctatgcccaaaggtcccaaactcggtggtggaggcgggaaacgctgagcttttagttttgttcctattttttgttacagtttaaatagagttgttttgacactgatgtaccgatatttcatttgcaagattaatcttttattgtactgttttattcagcctgtgtttggatcttcagaaggttggttattgattggattttgccatccttggaagttttatatttttacgccaatcatcctttacgttgtctattagtattggttcatgtttgattgtgattttgactaacagaagagatgatgatgctcaatcctgccttggttcatattttgcatttgttttgttgttcatttgaagcattagctcaactgattttgtttccaaatatgattagtaatttgatagagcaaaattcttccttttagaatctgttcttc

SEQ ID NO: 8463 - DNA, 1854 bp, Glycine max
  Clone ID: 700755389_FLI
cctttctctctctacgatggagccttcctcgatctctccaccgccagctccgcctgccaccgccgtccccttccccgccgaacccaacgaccaccttccaccacccattcccgaaccaccttctaaccacccaccctacgccgagatgatatacacggcaatcgaggcgctgaaggagaaagacggttctagcaagagggcaatagcgaagtatattgagcaagtgtatacgcagcttccaccgaatcactcagacttgttgactcagcacttgaatcacttgaagagtaggggattgctccaaatggtaaaaaaatcttacgcccttcctagatctgtgcccgtgtctgttcctggacctgcacccacacaagggacatcagcagtgccggctgctgttgttgccatcacgacgactccgaggcccagaggtcggcctcgcaaggcccaaaatccagttcagaactcgcctctgcctcaggacactgtcaacgtgcaggttcagcagaatgccgagccggtctgggctgcgcttgggcttgcagacgagcccgtgcaagcggaaggcagtggcaagaagcgaggtcgtccgaagaagagtggcatcttaggagcgggcctgaccaagaggggccgtcctcccggctctggaaaaaagccgggccgtcctcccaaggcaaccacaacagatgtttctgcttctgctgggcccaagagacgtccaggccgcccgcccaagaatcagtcgcagcccactctcattccctttgctccggctgtatctgccgcttccgtggatacagagcacgtggcagcatcagctgaaactgcgccggttgatgctgacgcggctctcggaccaagagcccgtggacggccgaagaaatatgctgacgagatgattgctgcgggccgaggcaggggacggggccgtgggcgcggtggcggcggaagaggacgagggagagggcgtggtgaattgcctgcacagcccagaaaaccaggggcaaggcccgtgggtcgtccgaaaaagggttcaacttctgctagtacttctcaaaatgctgcaaatgaagatctcaggaggaagcttgaacactttcaatcaaaagtcaaggaatctcttgcagtgcttaagcctcattttaaccatgaaagtccagtcactgcaattgctgctattcaagagctagaagtactgggaactatggacctcaatgtaccactaagggatgaaacacttccacatcaagtggagctgccaccaccacagcctccagtgcagcagcagcagcagccaccacagcagcagctgcagcagccaccacagcagccaccacagcaacacctagcaccacaacaactgccgccacagccaccgatatttcagcaaacatatcctccatttcatctgccgcagttccaccatcaccagccttcgctgcagttccagcaacagcagcagcagccgccacagccaccgccacagctattccagcaccaggcacagcctccttcccaccaacagtttcatccttaggaatcaggcccaggctaggaagaattacatggtcctcaatttgataatatgatgctaggaagaattacatggtcttcgatttggttatgaacaatctgaaacaagtgttttaacaaggcacatgaggggtaacatatttgtaaagcgagtaggcagtagcagaactgatttttcgtcaagtgaatcgattgtccatttagtttgttgttgtgcactattctagattgatccctgaagtaatttttagattttagagtactgataattctgttattgaagtaatatttgtttgactttggcagctttagattatt

SEQ ID NO: 8464 - DNA, 1059 bp, Glycine max
  Clone ID: 700755407_FLI
gatttttgtgtacctaatcccaatccgtttcttttcaatcttctcttcgaccccatttcctagatctgcttgtttcttccatcatcaactaatcatggttcttcacagagaactcgatcatctcttttcatcccctttcgttgaccctcccaaagatgatgcgaaatccagtggcatgtcaattgaaaagaagattgagttcctcgagagtttgactggaaaggtcacaaatcggaggtctcggaggtggttaaatgatcgtctcttgatggaactagtaccacgtttaaatgcagaggaaattagaggcttgtttgctccaccaccttggggtgatgaagttccaccttcaacattttccatgacgaacatggaggagtgggacagattcaggaatattgacatggataaagaggttaatataatccattccctggaaaactctatagaaaagaggaaaggtcacattgatgctgacaagatggcagtgttgaatggttggcatagaatcgattgtagaacaagagatgcgcttcgccgtagttgtctttctgagctcattgagggttatgaggaatgtgtacgagctttcataacagaaagcacagatggagatattcttgaactacaaattcaggatccttttcatagattgttactgcatggagtttgtgagttctacaatctggcgtcggatacagtgtcaggttataatggcgtggagtcgtcaaggattacaaagataaagaggaagaaaaagggttctcctgtgctcccaaatatcaccctgtcccattttctgaagatgtccaaggaaggaagttggtagtttcttcaggcagtgttgttcatacaataaaactgaaccttagtgttgtcccagggtgaacaatgtgcaatatttcgtatttattcagaatatcactgtaaattagttcgatgacctgtattttaattggtttataccatcggtctacgcaagttgttgattgttggtttacattgttgtagctgattattctgattttaacaaatactatatcttaaggttgaattttc

SEQ ID NO: 8465 - DNA, 1818 bp, Glycine max
  Clone ID: 700755416_FLI
ctcccaatttcagagcctattctattattcttattcttcttttcgtcaattcaggaagcgcccacaattaccaggaggcattgtccaaggcaatcctattcttcgagggccaacgttcgggtttcttgccgcaagaccagagacagaactggcgcgccaattcgggcctcggcgacggctggacctacaacgtcgacctcaccggcggctactacgacgccggcgacaacatcaaattcgggtttccgatggcattcaccaccacaatgctgtcctggagcgtcatcgaattcggagacatgatgcctcccaacgagcaccggaacgccttggtcgcaatccgttgggcaaccgattatttgctcaaaactgtttctcagccaaaccgcattttcgttcaggtgggtgatccaatctctgaccacaattgttgggaaaggcctgaggacatggacacaagcaggacagtgtatgctgttgatgcaccaaacccagcttcagatgtagctggtgaaactgctgcggcactagctgctgcatcaatggcttttcgttcatcggatcctggttattcagacactttgcttcgaaatgctgctaaggcctttcaatttgcagatacctataggggtgcctacagtgacaatgctgatgttaggagtggtgtttgcccatattattgtgacttcgatggttatcaggacgaattgttatggggagccgcatggctaaggagggccactcaggatgaaaatttcctcaactacattcaaagcaatggtaaaacccttggtgctgaagacaatataaatgagtttggttgggacaacaaacatgctggccttaatgttcttgtctccaaggaagttctagatggaaacgtaatgtctcttgaatcctacaagacttcagcagagagctttctgtgcacactcatacccgaaacatcaagttcacatatagagtacactcccggtggactcatatacaggcctgggggcagcaacttgcaacatgcaacttcaattgctttccttgaattggtttacgccaattacctatctcgcacttcgcaaaccataaattgtgggaacatctatgttaacgcacaaacacttcgccagcatgctaagaagcaagttgattacattttgggagataacccaatgcgtatgtcctacatggttggctacagcaacaagtatccgcaacatattcaccatcgtggctcctctttaccctctattaaggaccatcctcagttcattgcctgcaaagaaggctcaatctacttcaactcaagcaatcctaatcctaatgttctcgtgggagccattgtgggaggacccggagaagatgatgtgtatgaggatgatagggctgattttaggaagtccgaaccaaccacatacattaatgcaccatttgttgggattttagcatactttgttgccaatcccaacccttgattagttactataattggcgtacagctttttgtaaataaaaaacatatatatactacagaaaagatgtctctcatcttgagaaaaagcaagagtgaagaggtttgctctgtgttggatacataggaggaatgctacagagtttcaagtcccagaaattgttcgtatctttttcactgggaagcgtgaagagcaaaaaggtcgattacaacaaggtttttttttttttttcttgctttggccaagaaatatgagtgagattgccatagtgtggatttttctttctttctttttttcttttttactcaacacatcatattgtgtgtatcattcttgatcataattatttggg

SEQ ID NO: 8466 - DNA, 911 bp, Glycine max
  Clone ID: 700755427_FLI
gacacatcatctggttcaccttctcccaccaacggaaaatttaacatcttttgggacaaccaaaacctcacccctacccaagtttcttccattaaggccaaaaatccaaacgttaaggtagcccttagtctcggaggagacactgtttcaagtgcttttgcttactttgatccaacttcagttgattcatgggtttccaacgcggtttcttcactcaccaacataatcaaagagtacaacttggacggaatcgacattgactatgagcatttcaaggcagattctgaaacttttgctcagagcattggaaaattgatacaaactctgaaaagcagaggggtcattacttttgcttcaattgctccttttgataatgatgaagttcagagtcattatttggccttgtggaagagttatgggcacatcatagattacgttaattttcagttttatgcatatgacagaagcaccaccgtatctcagtttattgattactttaacaaacaaagctcgaattataatggtgggaaggtcttggtgagtttcaatagtgatgggagtcgagggttgatccctgataatggattcttcactgcgtgtagtatgctcaagactcagcaaaaacttcatggtatctttgtgtggtgtgctgatgactccaaggcaaatggtttcagctatgagaagcaatcacaggaccttttggtgactgccaattaggttttgaagtagaccaattttaatatgttagtgcgcttgatggctattacatttaaattaataacgtttgtgtgtgtaatgatgtatacatacatgtaacctgatgtaggcatgtagcttaagcctcctgtcttgaatgtgtgtaaacagacgtgtgctggtcataattttactttactcttttaatagtt

SEQ ID NO: 8467 - DNA, 1323 bp, Glycine max
  Clone ID: 700755470_FLI
ttctctttctctcttcaatggccggaatccgcttgcagccggaggactctgacgtctcccaacaatcccgcgcggtggctctctccgccaccgatctggtctccgacgacgaccgctccgtcgccgccgactcttggtccatcaagagcgagtacggaagcactctggacgacgaccagcgccatgctgacgccgccgaagctctctccaacgccaacctccgacctccctccgattacagttctgacaaggatgaacctgattctgaagcagtcacatccatgctgggatttcagagttattgggattctgcatatgctgacgagctcacaaattttcgtgaacatggtcatactggtgaagtctggtttggagttgatgtgatggaagtagtagcatcttggacaaaagccttgtgtgttgaaatttctcaaggtcacataccaaatggtgtcgatgaggttaaggctgaagctgacaaactaggtgataaagttttgtctacttggagtgtactagatattgggactggcaatggtttactgctccaagaattagctaaacaagggttctctgatttaactgggactgattatagtgaaagggccatcagccttgcccaaagccttgctaatcgtgatggattttccaacgtcaaatttttggttgatgatgtcctcgagacaaagttggaacaagagtttcgacttgtcatggataaagggacactagatgctattggattgcatcctgatggtcctgtcaagagaatgatgtattgggattctgtttcgaggttggttgcatctggtggaatacttgtgatcacatcatgtaacaatacaaaggatgaattggtacaagaagtggagagtttcaaccaacgaaaaattgctactgcacaggaacttggggcagtgaaggacgaggaaccgtgcagagagcccccatttcagtatgtaaatcatgtccgcacatatccgacattcatgtttggtggatctgtaggctcccgtgttgcaaccgtggcattccttcgaaaatgaaaatgttgtcatttgttatgattaaggtctctggtcggatggatttgaagttgttcctaactgttgtgtcaaacagtaaatatctttttgcgatttatgtgaagttccattacctctccttcttgggtgaatagtagttatcattcggagtttatactctataattagtaaggagaaaatacagttagttcagcgtagcaaaagattttgttattctggttcttttgtgattctgattacgaggtcgatgaaactatatgggaattttgtgtttacc

SEQ ID NO: 8468 - DNA, 832 bp, Glycine max
  Clone ID: 700755539_FLI
ctcactctctctctctctcttcttcacaccaattcacaaatcaccaaaagcaccactgctattgagagagaggattcagaaagacaacatcaaaatcaatcacaccaagatgctgctcggaaagagacctcgtcctccaatgaagagaaccacaagcatgtccgaaatgaccttggatctgaacaccgccgccgccgccgatgccgccgccaaccaacagagatcaggtgttggtcccggtgctgcagcagatcagactacgaggatgttggcaacacccaaaatcctcagaagacattcttcggatttcggagacacgcctcccttccttcgcgcctgctccctctgcaaacgttgtctggtgcccggtcacgacatctacatgtacaggggtgataatgctttttgcagcctggagtgccgccaacagcagatgaaccaggacgagagaaaagagaagtttgtcatggcgtcgaagaaaaaggtcgtggctactccaccgtctgggtctcaagtcgccgtcgccaccgccaccaagggtgaaacaaccgtggtggcgttgtagatgtgaaacccaaaccaaacatgtcaaaaacatgtttatatagctctccctttgtctctctttttgtttttttttttttctggcgtcttttttttttttaattttttttaccgtggcgaccttttggataatgggagtgcgggttgttttccttgctttcatgggcaaactaggcaagtgttatttttggaacttggaagtaccttgtagcaatcccccttgggattttgaatccatagataattaaaatggaaaacaaaatttcag

SEQ ID NO: 8469 - DNA, 1216 bp, Glycine max
  Clone ID: 700755553_FLI
cggaaattccttcagctacaaatgcgttacggtactatgcaggtgctgctgataaaattcacggtgacgtattaaaaatgaacggggatttccatgcttatacacttttggaaccaattggtgttgtgggacacataattccatggaatgcccccagcctctcatttttcatcaaggttagcccttccttagctgcaggctgtactatggtcctcaaacctgctgaacaaacacccctctctgctttgttttatgctcatctagctaagttggctggaatcccagatggtgtgcttaatatagtacctgtatttggcccaactgctggcgcagcaataagctcacacatggacatagatgcggtcagttttactggttcaattgaagtagggcgtgaagtgttgcaggctgcagcttggagcaatttaaaaccggtttcacttgaattaggaggcaagtctcctctcattattttcaatgatgcggatatagacaaagcttccgagcttgctctctttggcatcatgtctaacaagggagaaatttgtgtggcaggttctcgtgtgtttgtccaggaagagatctatgatgaatttgagaagaagttggtggagaaggcaaaatcttgggtcgttggggatccttttgatcccaaatcgctgcaagggcctcaggctgacaggaaccaattggagaaaatactttcatatattgagcacggaaagagagaaggagccacccttttgacaggaggtaatacagtgggcaacaaaggttactacatagaacctacaattttctccaatgtaaaggaggacatgctaatagcacgggatgaaatatttggccctgtactagcgctgatgaagtttaagaccatggaggaagcaattaaaagtgctaacaataccaagtatggcctagcagcaggaattgtaaccaagaatttggatactgcaaacactatgtcaaggtccattcgtgcaggcattgtttggatcaactgctattttaccgtagggagtgatgttccttttggagggtataagatgagcggatttggaagagatttgggattacaggcccttcacaagtacttacaagttaaatctgttgtaacacctattcataattctccttggctttgaatagttgaatgtctcctacgtgagcacaaatgtgagtcttttcatttggaataaattacactttaatt

SEQ ID NO: 8470 - DNA, 1283 bp, Glycine max
  Clone ID: 700755596_FLI
caactttgacagacaaggacaaggaagatatcttggcctggggaattccgaataaaattgacatgattgctctttcttttgttcgaaaaggttctgacctggtggaagtcaggaaagttctgggaaaacatgctaagaacattatgctcatgtctaaggttgaaaaccaagaaggggttgcaaattttgatgaaatccttgcaaattcagatgcatttatggtggcacgtggtgaccttggaatggaaattccaatagagaagatatttctcgcacagaaagtgatgatttacaagtgcaacatccaaggaaaaccagttgtcactgcaacccagatgttggagtcaatgatcaaatctcccaggccaaccagggccgaagctactgatgttgccaatgcagttctggatggcacagactgtgtgatgcttagtggtgaaaccgctgctggagcctatccagaccttgctgttcaaacaatggctaaaatatgcattgaagcagagagcacccttgactatggtgatgtgttcaaaaggattatggagcactcaccggtacccatgagcccattagagagtctagcttcttctgctgttagaacagccaactcggctagagcggctcttatcttggttttaactagaggagggagtactgcaaaattggtggcgaaatacaggccagggatgccaattctttccgtggttgttcccgagctcaagactgatagctttgattgggcatgcagtgatgaggcccctgcgagacatagccttatattccgcgggttggttcccgtgttgagtgcagcttctgctagagcttctcatgctgaaacaacagaagaagcaatagaattcgccatgcaacatgccaagtccaagggtctctgccacaacggggattcagtggtggcactgcatcgtgtgggcactgcatctatcatcaagatcttgactgtgaaatgatcacccccattacaaggaattcttctgctgtttatggcaaattttttggatggtgcaaaagaggtctcgatatacctcttcatatctacattggatgcaaacttcaattaaaagcatttattaggatcggttacctgtttttcacatatcatatattactggttttttttttttttgttacatttgccttatcattgtggcgagtagccacttgttttcatttgttaagattttgtacgaggcttttggtgaaccaaaaaactagccacttctggattttgaattttgcggtctaaagttgttttaactttt

SEQ ID NO: 8471 - DNA, 2028 bp, Glycine max
  Clone ID: 700756513_FLI
attcgctaaacccaaaacactattttattatcttcttcgtctgttctttgcattgaagaaaatttctttgaattgaagaaaacttgaaatcgaattgtgaaacagaaaataaaccaaaggaaatttttactgattgaattgcagagattggaaaaatggcgttgagtatgactcaacagatcgggaccctagctggtgcgacggtgccggattcctcggccggagaatcgaccgcggcggtgagtgccgccgcggtgtggaagtcaccgacggcgagtctgaagtgcaaggtaatgaggacggatggctgcgcggaggggctttcgccgccgctgagtccgtgcaggtcgccggtgctgcgggcggatctgtcggcggcgtgtcaggcattcacggcggaggtggcggaggaggagtacgttgccggagggaaggaggagaaggggaaggggaaggagggagtgccggtgtttgtgatgatgcctttggacagcgtgacggcggggaacgcggtgaaccggaaaaaggcgatgaacgcggcgatggctgcgctgaagagcgcgggggtggagggggtgatgatggacgtgtggtggggtttggtggagagagagaagcctggggagtataattggggagggtacgtggaactcatggaaatggcgaagaagcatggcctcaaggtgcaggctgttatgtcatttcaccaatgtggcggtaacgtcggagactcttgcactattcctttgcccaaatgggttgtggaggagattgataatgaccacgatcttgcatatactgatcaatggggaagaagaaactatgaatatatatcacttggatgtgatactttgccggtgctcaagggacgatccccagttcaatgttatgctgatttcatgcgtgctttcagagacactttcaagcacctccttggtgataccattgtggaaatccaagttgggatgggaccagcaggtgagttgcgttacccttcgtacccagagcaaaatgggacatggaaattcccaggaattggtgctttccaatgctatgacaagtatatgttgagtagcttaaaagctgctgctgaagctcacggtaagcctgaatggggaagcacaggccctactgatgctggccactataacaactggccagaagacactcaatttttccgcaaagaaggtggtggatgggatggtccatatggtgagtttttcctcacttggtactctcagatgctgttggaacatggtgacaggattctctcatcagccacgtcgatctttgacaacactggagttaagatctcagtgaaggttgccggcattcactggcactatggtacaaggtctcacgccccagaactcactgcagggtattacaacacccgattccgtgatggctacctccccattgctcaaatgctggcgcgccacggtgccatctttaacttcacctgtatcgagatgcgcgatcacgagcagccacaagaggccctttgtgcacctgagaagctggtgaagcaagtggctctggcaacgcagaaggcacaggttccacttgccggcgaaaacgcgctgccacggtacgacgagtatgcacatgagcagatcataagggcatcacaattggatgttgatggtgagtctggtgatagagagatgtgtgccttcacatacctgaggatgaatccgcatttgtttgaaccaaataactggaggaagtttgtggggtttgtgaagaagatgaaagaagggaagagtgcacacaagtgttgggaagaggtggagagggaagctgagcattttgtgcatgttacacagcctcttgtgcaagaggctgcagtgctgatgcactgagaattgttgaacatccttgtggtaatagggcttaggaataagtcacaaggaggctgtgtgaaagttttagtgaaccaacagcccaggtttgtggctttgaagatgtaaaattttgtattatattgttttgtattgtatgcacctaaaacttctatttgtgacc

SEQ ID NO: 8472 - DNA, 863 bp, Glycine max
  Clone ID: 700764345_FLI
gcattattcttttcatctgtctttctttttctttctctctgcctccatcaggatcattcaatttacctcaaaataaacaattttctcttgttatggctcttttggtgtatcttgtgcttttcctagccttcacttatcattcaagtgctctttactgtatatgcaaagatggtgtgagtgatcaaacccttcagaaagcaatagattatgcttgtggaactggagctgactgtacccctattctccaaaatggagcttgttaccaacccaacactgtgaaggatcactgtaactatgcagttaatagctattaccaaagaaagggtaatgctcctggaacctgtgattttgcaggtgctgccacaaccaatgcaaatccacctactacatcatctggatgtgtctacccttcaagtcctagcaatgcaggaacaacaccatctactggttcaccaccaggcacaacaccatcaacaggtggtacaacacccacatttgcaataagtccaacatctacaactggtatcaacaatgccaatggagctagttttaaacccactaacaacactaagttgctattgctcttttttgttctaaccctttggttagcaatgagggtctaaactaaaaggtacagtggcaccactggactaggaaaaaaattgtggggggttttcatgtaattttgcttctgggaatcttccacaagcaaaaccggtttttcttttttttttttctttctttcttcctagtgaaagaagagtagggaatttggttttctggtttagtggtgttatattttgagtatgtagggaatttggatttggaagtagaatttgattgaattttcctcttgacttttc

SEQ ID NO: 8473 - DNA, 506 bp, Glycine max
  Clone ID: 700764411_FLI
gtgcaatcgaatgcatgtttggactcgatggcctgctgaatgacactaaaggctcaggatggaaattggtgtatgtagattatgagagtgatgttctacttgttggtgatgatccttgggaggaatttgtaggctgtgtccgctgcataagaattttatcaccttcagaagttcagcagatgagtgaagaggggatgaagcttctaaacagtggagctttgcaagggatgaatgtttgaatatcaggtggtggctgcatccaatgtcactaagccatgctttgtgatgttcttgtacaaggcaatgtttgaaaagcaaaggcatatgttgtggaagaagtcagtattattaacttgtatggaacaaaccttgaagatggaagagagtttgagttttattatcacacagatcaaaagttgtaagatgatgttccaatgagtcaagggtgttgcataccttatgttgtaagaaattcttgctggcaagtggacatattatgctttatt

SEQ ID NO: 8474 - DNA, 2453 bp, Glycine max
  Clone ID: 700764456_FLI
tggtgaaagagtgccctagagaacaaagttcccgttttcaaaattgaagcttttgggtctctgaggtttgatctctgcacaagaaccttgttttctcatctgggtgtgttgcttttgcctctgctggctcgatatggctgtggaaaaccaaagggaagatgggggttgtgatcgttttcctgtgggtatgcgtgttcttgctgtggatgacgacccaatttgcctcaaggtgttggagaatctccttcgcaaatgccagtatcatgttactacaactaatcaggcagttgaggcactgacaatgttgagggaaaacagaaataagtttgacctcgttatcagcgatgtgaatatgcctgacattgatggatttaagctccttgagttggtgggacttgaaatggacctacctgtcatcatgttgtcagcacacggtgatacaaagctggtgatgaagggtgttacacatggtgcatgtgactatttgctgaaacctgttcgaattgaagagttgaagaacatatggcaacatgtggttcgaagaaagaattttgatagcagggatcagaacaaggcttccaatgaggagaaggctcctaattttgctgggggaggtagtcaaggcctaagatcagaaaacagtgctgaccagaataaaaggcttggtaaaaaaaggaaggaccaaagtgatgaagaagaagaaggtggggaagagaatgaagatgatgaggacccctcagcacagaagaaagctcgtgtggtttggtctgttgagctgcatagaaaatttgttgctgcagttaatcaactgggcctagataaggctgttcccaagaaaatacttgacctaatgaatgttgaagggcttacaagggaaaatgtggcaagccatctacagaaatatagactctatctgaaaaaggcagcccagcaagctaacatggttgctgcattgggtggtagtgattcttacctacgtataggttcaatagatggatatggagatttttgcacctcatctgggtctggaaggattacaaacgctacattaccatcatatgcatctactggaattttcagtaggctgaattctccagctgccttgaacatgagaggaattagttcttctgcacttatccggcctgttcagtctcaaaacatcaacagctccttaaacacacttggaaacattcagccatccatttttcctgcaaatcaaagctcaagtttattacaaggaattccaacatcaattgagcttaaccaatctaagcaaagaaactgtacaactggaatatcacagttaagccaagttgattcaagtggatttacagttgcctctggcttcccagaccatagggctactgttaatggtccaaacaattctctcccgtgtgtctcaaataatcatataatgttacaaggaaatccacaaacgcatggcccaggagcgtttagcaatcagtcttctgtcagagcggcttctttgtgtgctgaatcttttgacgtgggcttatgtggttcttctaatttgttggatcataatcggtgcaatgataactggcagaatgcagctcaattgtctaaatttcctgccaattccttgccactttgtgaggctttcagcaatgaccaactgcctcccactagcatcaatgattcgaactcaagtactcatattggcaacaacagtccagttgatttttcttctaggatgggaatttctgttcctttggaggacaccagaaatgagctgagatgccaagagggcttgattgggaatattgtacagccttcaagttacacaccacgacaaaggtgggaagaacataaactggattataaccaaaacatgagctgtccctttaattctgtaaattcacacgcttcctccagtggagtgacaagttctatggggcatgttttaaaccaaaataatacaatttgcagcaatagagttgatgcatcatctttggttggccaactaaatggagcatccccatcaatcagccggtgcactgaagttgagaaattctcttcagacattcgactgaagccaaatgaagcctacattttggagcaaatgaagtcccaagatggatttatgcagaatacttttgggaccttggatgacataatgggtgtaatggtcaaaagggagcaaaatgagtcgacattgttggatggagaaatgggatttgatgcctaccctgttggatcatgcaactgatttcttcttaaccagaacgaatccaggagcaataaaatcgtgaaacttgctccagtctctgaaaccgattaatgtacacctatttttatgttctgctactaaatttattttcttggccaacattttgttgtttcacttatggacttttgttagccatctgatctgttccatctttttttcctttcaatctgtagtgtatccccataaaaattgtctttggttt

SEQ ID NO: 8475 - DNA, 1582 bp, Glycine max
  Clone ID: 700764472_FLI
gtatgactcatgagcttgattcccctataatttgcacaattttgtatatcccccttgttcttatagattggcactaacgtgcttctcctccattcctccggcatgcgttttgacctcataatttcattaaagagtttggtgagccactccagacctctatctccaagagttttccacacttcaataggtatgttgtctggctccaccgccttaccgttactcattcttttcaacgtttcctttacttcctgtttctgaatccgacgataatacttatagttccggtcctcttctcttcatggtcaaattttccatcagaaacatggccctcatgatacttattatgtgcaataacattagctgtattgagacagatacattacctggagaatggctcagttgagatttacagtagacatgcagaacggaatactgggaagtttcctgatgttgttgctgctgtttcaaggttaaagaaaccaactgtatcatcattaattcttgattgtgaaattgttgcatatgatcgtcaaacacagacgatccattctttccaggcgcttagtactcgggctcgcaagaatgtagaaatggaagatataaaggttgatgtttgcatatttgcttttgatttgttgtatcttaatggccaagcacttcttcaggaaaacctgagagtccgtagagagcatctctatgcctcttttgaggaagagcctggatttcttcagtttgcaacaacgataacatcaaatgatgttgaggaaatacagaagtttcttgaccaagctgttggtgcaagttgtgaggggttaattattaaaacattaaatgaggatgctacatatgaacctttgaagcgatcactcaactggctaaaactgaagaaagattatatggacaatataggggactcactagatttggtacctattgctgctttccatggtcgtgggaaacgtacaggagtttatggtgccttcctccttgcttgctatgacagtgacaacgaagaatttcaaagtatttgcaagataggaacgggattctctgaagcagtgcttgaagaacgttcttctagtcttcgttctaaagtgattcccaagccaaaggcatactatagatttggagaatcaatcaatcctgatgtctggtttgaagccagtgagggcatatctcttcgatttccacgactacttcgagtcaggcctgacaaatctcccgaacaggcctcatcatctgagcaggttgctgaaatgtataacgctcaaaaacaaaatcacacgatcaaccaaaatgacgatgaagatgatgattgattgagtgaaaaaattctgtttctcacgctgagctataagatctcagtattttttgctctgatgatccattagagtgtaaatctgaattctttaccttcaagcataggtcagagagcataactgccttttcaacatgattgaaaattcggtgtaaaacgtgaaagaacctcatggagggtccgaaaagtagacatttgcgcttaaaccatgtttagtttgacaatttttcagtagaggcccccctgttcccttaattcttgtgt

SEQ ID NO: 8476 - DNA, 1423 bp, Zea mays
  Clone ID: 700801224_FLI
cctctctcctgtccccacttgacacatccatgtcccaatctcccccaacctcaggtcaaccgccgctacccaagatccagtctccgttctccctctcctctcgcttcatacacaccagggcggcagcggcagcggcaggggcccgccatcaccaacccacctcccttcaattataaacctataaaatatcatcattgacccaagctgaggcgactagtgggtattgatttttggtggggcagatcaaggagggggggagggggttaacttccaaggaaccagttcattgctggttctgctagcaggaggttggatttcagaggcagaagctttcagccaggcgggctcagggcgcgggcacatcaatggctggcaaggaaatcctccacaaggtgaaggacaaggtgaaagatgcatttagttcatcaggaccagaaacagggaaaggcaagacaaagttatcaggcaagcgtgtcaagcatggttaccatctggtgaagggcaaatctaatcatccaatggaggattatctagtggcagagtaccggcaagttggtgaacatgatttgggattgtttgctatattcgatggtcacctgggccacactgttccagactttttgagctcccatcttttcaataacatcttgagtgagccagaattcttgagtgatccagaaactgctatccgaaacgcataccaacttacggatcagaagatattggaaaacgcagcagagttgggaagaggtggctccacagctgttactgccatcttaataggaagtgacaagttcgtgaaactagttgttgcaaatgttggggattcacgggcagttattagcaagaacggtgtagcgaagcagctttcagttgaccatgaaccaaacatggagcgacaaacgatcgagcagaagggtggctttgtatcaaacctaccgggtgatgtgccacgtgttgatgggcagctggcagttgcaagggcatttggagaccggagcttgaagaagcacctcagctctgatccatatgtggtcgagcaaactatcgatgaaaatactgagtttttaattctagcaagtgatggcttgtggaaggtgatgtccaaccaggaggctgtcgacgagatcaaggattgcaaggacgcgcaggcagctgccaagcacctgacggagcaggccgtgaatcggaagagcaaagacgacatttcagttatcgtagtcaagttcatgtgctagcacatcgtcaggttaaatggtctcccgattgtataccgtgttaaattatcttttaagtcttgtgctcgctggtgtcggacattttgtttaccttctttggttttgggaccccacaaagagggtcaaggcttgtaacatattgttgtttgtttaaggctccaaataaagcatggtaccaccatagt

SEQ ID NO: 8477 - DNA, 1275 bp, Zea mays
  Clone ID: 700804137_FLI
gtattagttagataaccgtgctaatgcttattgattgtcaagtcccactgttcttgctctaaatctgtgtctgttgttttgcagatgagctcatcaagaatgctgcctacatcggcacccctggcaagggtatccttgctgctgatgagtcaactggcaccattggcaagcgcctttccagcatcaatgtcgagaacgtggaggagaaccggcgggctctccgtgagctcctgttctgctgccctggtgccctccagtacatcagcggtgtgatcctcttcgaggagaccctctaccagaagaccaaggatggcaagccttttgtcgatgtcctcaaggagggaggcgtcctccctggcatcaaggtcgacaagggcaccattgaggttgttggcaccgacaaggagaccaccacccagggccacgatgacctcggcaagcgctgcgctaagtactacgaggccggtgcccgctttgccaagtggcgtgctgttctcaagattggccccaacgagccgtcacagcttgccattgacctgaatgctcagggtctggctcgctacgccatcatctgccaggagaacggtctggtgccaattgttgagcctgagatccttgttgatggccctcatgacattgatcgctgcgcttacgtcactgagacagtccttgctgcctgctacaaggctctcaacgagcaccatgtcctcctggagggtaccctcctgaagcccaacatggtgactcctggctccgactctaagaaggtgacacctgaggtgatcgcccagtacaccgtccgtaccctccagaggaccgtccctgctgctgtgcctgctgttgtcttcctctccggtggacagagcgaggaggaggccaccctgaatctcaatgccatgaacaagctcagcaccaagaagccatgggccctgtccttctccttcggccgtgccctccaggcgagcaccctcaaggcctgggctggcaaggtggagaacgtggagaaggctagagcggccttcctcgccaggtgcaaggccaactccgaggctaccctcggcacctacaagggtgatgctgccgccgacaccgagagccttcacgtcaaggactacaagtactgagttgcttctctttgcgatcccgttgttttggaactcctgcctgcgagtaggttgctgagtgttgtttgcttgttagagcttttatattcggacatgaaaaaaacatgcttcctatgtggatgatggttatctttatattcgtatattaact

SEQ ID NO: 8478 - DNA, 1017 bp, Zea mays
  Clone ID: 700804277_FLI
tacagcagcaacaattgctgccatacaaccagttctctttgatgaatcctgtcttgtcgaggcagcaacccatcgttggaggtgccatcttttaggtgactcagaggattaagattaattcagcacggtgcccctaataacttgctatcagatccaagtcgctgcagaagggagcaaacaaagggagatgaagctcagagtcgtgtgcaggaagctgtatgactatgtgcggtatgacctcaaggagatagccttcccgtcgtcactcccggaccctcctcatatcaagaagcggcccaagctcacatggcatgaacgctggtgcatcctcaaggaggccacccggctgtacggcgcgtcatgggtccggaacatcggccctgagctgaggcctgacgactacaagaaggcagccgaggacgtggaggagcagtcgtccaatggcagccatcccagctctggcagtgacaggaaggggaaggcgagcagcgagccaactgtgctggaggacctcgctgtcgccgctaggggtggcgcagagacgctgaagcctgccctgcggcggatttacatggcccgcgcgtccacgtacactgacgcgatgaagaatttcgtggagacgtaccaggaggggctcaaggaccagctgcaggagaaggctcatggtggagaaggtggtggtggtggtggtcgtcatcatcatcatcaggagcagaaggaacatggcaatgaggatgaggcatcaaagccacctccgccataacatcatggttgtgttctgccagtgatggcatcaagtagtacttatttcagttcatccacccaaagtagaacaagatggttttgggtagcactgtagagtgcagaccctgttggcactgcagtaggagtgcttgagaaggatctccaattttgtctggtttatatttctaccaaatctcaatctgggtcctgccgaactacttgtaaactttggctggtgttgcctaaaatgatgtgtgatcctcgttactctcc

SEQ ID NO: 8479 - DNA, 1341 bp, Zea mays
  Clone ID: 700804314_FLI
gcaggcccagctctagcctttccaaagtgcgcgcaatctcctctgccgcatccgatattccgatctcgatcccgcgacgcggtgtctccggtcagcgccgccgccttctccctcgccggccgccactgcatcgccgcagtcgccatgaattatatcattggagcattcaagccaccttgtgacatctcgatcacattctctgatgcgaggactaggaagcaggtttcggttaagaaggacaatgggaagacaacgatggtccctgttttccagagcctcgaaactatatctggagaagtatcaatagcaccagttccaggtaaaaggattgaacacacgggtgtcaaaattgagttgctaggccaaatagagctctattttgaccgagggaacttctatgacttcacttcgttagtacgtgagttagatattcctggtgaaatctatgaaaggaagacgtttccatttgaattttcaactgttgaaatgccatatgagtcttacaatgggacgaatgtcagactcaggtacattttgaaggtgacaattggcagaaactatgttgggaatattgtggaatatcgggatttctgtgtgagaaactactcacctgtccctacaatcaataacagcattaagatggaagtaggaattgaggattgcttacatattgagtttgaatacagcaaaagcaagtaccatctcaatgatgtgattattgggaagatatatttccttcttgtcagaataaagataaaaaatatggaactggaaattaggcgtagggaatcaacaggatcaggctctaacacatatgttgaaactgagactcttgcaaagtttgagttgatggatggtgctcctgtgagaggtgaatctattccagtgaggctgttcctgacaccctatgagttgaccccgacttaccgcaacataaacaacaaattcagcgtcaagtattacctgaatctggtccttgtggacgaggaagatcggaggtacttcaagcagcaagagatcacaatgtaccgtctccaagaatctccccctgcctcctagatcccaacctgttgcatcatgttcacttctcaggttttgtacaagtggacgctgaggttagagcaatgtcctgtatataaactaaaatccagaagagcgccacagctggttactgctatggccatgcacgctgcactgtcgtgttcattgtttatgtttcgttgttctttcccttgagtatgacgccaccttgatagcccggggtagaattacctgcctatatttatcgtccttgtggtctgcaagaatcatgacgttattacttaggcacttattcatctt

SEQ ID NO: 8480 - DNA, 2439 bp, Zea mays
  Clone ID: 700804334_FLI
gtaatttaaaaataactagccaaattgattacaaactgcaatcactaaacctatatgttacattttagaatgaacgattccatgtgaattttagcacacaaccaactacccctaggtctgtatcatttttcaatttgcaagcacaaataacaaagttttctaatactatcagagaactaatttatcacgatgatgggaacagtataaaatttaccaaaaaaaaatctagtaatctgtttccaacgaactgaagaatcaagaatgtaaagaggaactaggatgagcttggtttttgcctctcctggctggaggtgtcccaaacatcatgctcatttgggctggaagcatatgagccacatggcatcccagtgcagccttgtgcattctccacaagtctatgataggacaaatgattcaccatgtaaaaccctagcacaaagggaggagggaggggggagggcaagtaccagccgccaccttacagggagaagaacaatgggaaggagctttgctggaattgcttctagtcttggtggtgttggcgcattggatgcgcgagggtcacatgacaacaaaacccagcctcaagtggggatgctcctcctttccctgtaggttgatgcgaattgggcttagaacaaatccaaccacatcattaccaaattctcttttggccgaaggcagttcctttcctggatgccgtggatctgcccctggaccacgccattccataggcttccaaatgaggcctttcaggacccttgtgacctaccatgggaacttgagcatgctcatagtgaaggttggtgatttttgtgggacatagccacataggattggattttagtctggttttggtgttttgctgtggacagaaagaagaccagaggtttgtgggagtatcgaaggtggtggtgattttgtagcgtggtgttgcagtttggttggaacttggagtgtagagggaagatttggtgatgagcagccgcagcccgccgccgaaggaccgcaggatgcgtactgaacgcacctcataccgtggcgcaccatatcggagggacagccgccatggtccaagcaggtttgagctaatctaagtcaaacaggacgagtgtttggcattgttcttccaaacatcactgcttcctcttgttatcatgtatatatttggctaaatgctatgtgaaattaccataattgttattttatttagatgtaaactttgcctatatttatcccattgcaaccacttatgcatgtatgtagcttaaataagggcacttgatattggttaatgtagcactatttttttttctgaaagtctagtaaaaagtgtatggtaaagtgatctgggattgaaattttttggatgaattcatgttgtgccatggttttaggagaaagcctatgcaggattgtaactagaaatgagtcatgacaagaatggtgaaattacttaaaaatttatgtgaatggaactgtaatatcttattattcagacatttggaatcttatgtatcctttagttatttccctttccattgtgcaggtttcggaatgatttgtgcaacaattgtaagcgtcctgggcattttgctagagagtgtcctagcgtggctgtctgtcatacctgcgggcttcctgggcacattgcagctgaatgttcttccaaaggtacctgctggaactgcaaagagcctggccacatggctaacagctgcccaaatgaagggatatgccgtaactgtggcaagtccggacatattgcaagagactgcactgctccaccagtgccgccaggagaagtgatcctttgcagcaactgctacaagccagggcattttcgtgaggaatgcaccaatgagaaggcctgcaacaattgccggcagagtggccatattgcccgtaactgcaccaatgatcctgtttgcaacctgtgcaatgttgctggccacctggcccgtcagtgccccaagtctgatacattgggcgagaggggtgggcctcctcccttccatggtgttggcgctcccttccgtggtgttggcgttcccttccgtggtggcctcagtgacgtgatctgccgggcctgcaaccagattggccatgcgagtcgtgactgcatggctggtgctttcatgatctgccacaactgtggcggccgtggccacacggcatatgagtgtccctctgtgagtctcattgagaggttcccacctcgccgtttctgaaggacgtccaagggctatccagatgactgttgttttcagcccattgtgtcaagaacactcatttccgttttcttttttttttccaaaccctaatggattctagatctttcagattcttaacttgtcagcactatttgtgattccctaatggattctagatatttcagattaataactcgtcagcaccatttataattctggattttct

SEQ ID NO: 8481 - DNA, 2222 bp, Zea mays
  Clone ID: 700804353_FLI
cggatcctttccccaatcccatccataatccatcggccacgagctgatgcgcaagcgccgccgacctccccacctcggcttctgtctatccctcgacaaaccgacctctcccgccgccgaccgccgtcgatctaccgatcggccggacgaaagacccacctctccccaaaataggcggctgagacatacgttcctatctccccttcgctgccggagaaaagcctcgcagcctgcccctccctcaccttcacctcgatttctctgggcctccgaaccccgccgacaggagcgttccagcatctcctatcccgtgccgcgtacgtctgcacggattagcgttccttctattggtaagtaggtcacataatgtcttctgaagataaagcaatggctaatcgtgtcacttcacactcgccaaaagctatggtgtcggaaccagatcccaacaggatgatgatgtttagatcaaatatggagtattcacaaacaaatggccagacaaatgctgttcttggtcctgtggctatcttttgggacattgagaactgtcctgttccatgtgatgtacggccagaagatgttgctggcaatgttaggatggctttgcgcatgcatcctgttgttaggggtgcggtgacaatgctgtctgcttatggagatttcaatgctttcccaaggagactccgggagggatgccagagaactggagtcaaacttgttgatgttcctaatggacggaaagatgctgctgataaggctatactggttgatatgttcctttttgcacttgacaatcacccaccatcatccattatgctcatatctggtgatgtggacttcgctccggcattgcatatacttggccagcgtggatacaccattgtcattgctattccgtcttcagttaccgtctcatcagctctgagcagtgctgggagtttcgtgtgggactggcctagccttgcccgtggtgaaggtgttgtgatccctaggtccttggtgcgccgtctggctgattatccatgttatgtcaacagtgggaatatgggacagttccctgataatcagaatgaagaggaggccattgtatataccggaacatcaaggaatgaatatggtggcagacctcccgtcaatcaaatgtattgttataacacttcccagacaactagagaaccaagcaaagctttgtatactgttgaagatgtgaactgtggtacatcatcaaggcctcataatttatcatgtcgtcagagtgaaagtcctgagacagaccaaggtttgacagatgagcagtcatggtgggttcgtcctggtgatcttcaaggattgaagggtcaactaatacgtctgtttgaattatctggaggatgtgtcccacttgttcgtattccctcagagtatctaaaactctttggcagacatttatatgtatcagaatatggagctgttaagcttgttcatcttttcgagaagctggccgactcttttgttgtcgttggtaagggtcataaaaagatgatctgtctctgcaattctggtgataggaacctgaagaattatccaagtacgccaatcattctgacgaagaaaaacagaggaaattctgctcttgaagaaagcacgataggagcatgtcagcaattaggcagctcatcagatgaattatcagaggatgaaccaattatcaacccagatataaatgttgcatgtgtgttcaatgagcatctagacagcttcagaagggagattcaggagctccttgtttgctactcctgccctgttccgcttggtaattttgagagtttatatgagcaacggtataagaagatcattgactatgagagcttaggagtcaccggtctggaggagctagttgagaaggtgaaagacgtggtagatttgcacgaggaccaaaccagcaaaagcaagttccttattgcaaactacacaaccggttaggctctttctgttgtcttgatgtcctagttcagctcctaaagtacttcagctcgtgtttccttaacatgtgtcacacagggtcggcatctttttttaccgtgccggtatgataagtgtgaatggcatagtaagtatttgtaatggcttccctcatgcctcagctaatctgtgcaaacagggagttgtttcttgtatgcaaaaagatgattatactaaagaacagtgaccatttatttggcaaatacatctaattccagttc

SEQ ID NO: 8482 - DNA, 1380 bp, Zea mays
  Clone ID: 700804376_FLI
caaaagcagccgtcctccctagctcgcccgcccgaagcgacgcctgacttcgcatctgtttcgttccacccgccccgcgagaagcttctagaagggggagacccgccggagccatgccggaggaggagtcgacgtcgatcccgctcagccaggcggcggaggccgtcgaccccgaggacccagccaagtcgccgccgcgacccagctcgcccaccacctccacacgcaaggcatgctgtgctgttcttcaaagttgggtctcaagaaaatttatgactggatgtgtagtccttttccctgttgcagtcacgttcttcatcacatggtggtttattcaatttgttgatgggtttttcagtcccctatatgcaaaacttggaatcaacatatttggtcttggttttttgacttctctggtattcatatttctggttggaatatttgtttcttcatgggttggttcaaccatcttctgggtgggagagtggtttataaagaaaatgccatttgtaaggcatatatattcagcgtcaaagcaagtcagcactgcaatttcaccagatcaaaatacgacagctttcaaagaagttgcaataattcgtcatccacgaattggtgaatatgcatttggattcataacatcaacggtggtccttcagactgacaaaggcgacgaagaactgtgtagtgtgtatgtgccaacaaatcatctgtacatcggtgatatatttctggtgaactctgaggaggtcataagacctaatttatctattcgagaaggaatcgaaataattgtttcaggagggatgaccatgcctcaggtgattgcatcactggagcccatgccacggaaaagccagaacattcgtctaaatagaatgacgtgatgtaaaacaagccacatgcatcaaggtcaaagtttccaacttatataacccagctggtttgttttgcatgtttactgatattgggatgtgcatcaagcagatagcatgacctgtggggcacgattcaggtgccttggctgtgtgcttagccatgtgatttggatagaggagcagctttgtgctgagccattgtggcattccgtagtgcaggggaagcatcgtgttgatgccctgggatattattctcacacaagttgtgctacccgttgttcggggtgtttggtttctaggtactaatttttagccttttcattttatttcataaattatcaaatacgaaaactaaaatagagttttagtttttgcatttggcaatttagagacaaatgaaataaaatagatggactaaaaattaaaattaatcctcagaaaccaaacacccctaatactggtccaaaatgctaacgtctatgcttgaggtgcattattgatt

SEQ ID NO: 8483 - DNA, 1912 bp, Zea mays
  Clone ID: 700804383_FLI
caacaaggagcgcggcggcccctccttccttcctcccacttctctcgcgcggcgctcgcttacctcgcctcgcattccgttcgagcaggggagcggcagtgagaagggagggaattaaggcaagatgttcatcgagagcttccgcgtcgagagcccccacgtgcggtacggcccgacggagatcgagtcggagtaccggtacgacacgacggagctggtgcacgaggccaaggacggcgcctcccgctgggtcgtccgccccaagtccgtcaagtacaacttccggaccagcaccgcggtccccaagctcggggtcatgcttgtggggtggggaggcaacaacgggtccacgctgacggctggggtcattgccaacagggaggggatctcatgggcgaccaaggacaaggtgcagcaagccaactactacggctccctcacccaggcttccaccatcagagtaggcagctacaacggggaggagatatatgcgccgttcaagagcctcctacccatggtgaacccagacgaccttgtgtttggaggctgggacatcagcagcatgaacctggcagatgccatgaccagggccaaggtgctggacattgacctgcagaagcagctcaggccctacatggagtccatggtgccacttcccggtgtctatgatccggacttcatcgccgctaaccagggctctcgtgccaacaatgtcatcaagggcaccaagaaagaacaggtggagcagatcatcaaggatatcagggagtttaaggagaagaacaaagtggacaaggttgttgtgctgtggactgcaaacactgaaaggtacagcaatgtatgcgctggtctcaacgacacaatggagaatctgctggcatctgtggacaagaacgaggcggaaatctcgccatcaacactatatgccattgcctgtgtcacggaaggggtgccattcatcaatgggagcccccagaacacttttgtgcctgggctgattgatcttgctatcaagaacaactgcctgatcggtggtgacgacttcaagagtgggcagaccaagatgaaatcggtcttggttgatttccttattggtgctggaataaagcccacctcgattgtgagctacaaccacttgggaaacaacgacggcatgaacctgtctgcccctcaaacattcaggtccaaggagatctccaagagcaacgtggtggatgacatggtctcaagcaatgccattctctatgggcccggcgagcatcccgatcatgttgttgtcatcaagtacgtgccgtacgtgggagacagtaagagggctatggacgagtacacatcagagatcttcatgggcggcaagagcaccatcgtgctgcacaacacctgcgaggactcgctcctcgccgcgcctatcatccttgatctggtgctcctggctgagctcagcaccaggatccagctaaaacctgagggaacggacaagttccactccttccacccggtggccaccatccttagctacctcaccaaggcaccactggttccgcccggcacaccggtggtgaatgctctggcaaagcagagggcgatgctggagaacatcatgagggcctgcgttggcctggccccagagaacaacatgatcctggagtacaagtgagccaagcggcgtggcctgcagctggatatggaggaggctgcacgaagggaactagagaggcgagattagttgtgggattgtgttggcttctcgtattttccttttgcgttcttttctggtcaccgctgtcgcgcttttgtattttatttgttggacccgtaactatcagggctcagctattagcgcatgaagcctgtaatggcatcgtatgataatgtgatcgagggtgctagtaagcattatttatataagttc

SEQ ID NO: 8484 - DNA, 1425 bp, Glycine max
  Clone ID: 700808477_FLI
attgaatctcagaattctctaaaagagatctttttctgctctttgaagaaagaagggtctttgcttgattttggagatgtctctgctctcagatctcatcaaccttaacctctccgataccaccgagaaggtgatcgcagagtacatatggatcggtggatcaggaatggacctgaggagcaaagcaaggactctcccaggaccagttagcgacccttcagagcttcccaagtggaactatgatggttccagcacaggtcaagctcctggtgaagacagtgaagtgattttatacccacaagccattttcagggatccattcagaaggggtaacaatatcttggttatctgtgatgcctacactcctgctggagaacctattcccactaacaagaggcacgctgctgccaaggttttcagccatcctgatgttgttgctgaagtgccatggtacggtattgaacaagaatacaccttgttgcagaaagatatccaatggcctcttgggtggcctgttggtggtttccctggacctcagggtccatactactgtggtgttggcgctgacaaggcttttggccgtgacattgttgacgcacactacaaagcctgtatttatgctggcatcaacatcagtggaattaatggagaagtgatgcccggtcagtgggaattccaagttggaccttcagttggaatctcagctggtgatgagatttgggcagctcgttacatcttggagaggatcactgagattgctggtgtggtggtttcctttgaccccaagccaattaagggtgattggaatggtgctggtgctcacacaaactacagcaccaagtccatgagagaagatggtggctatgaagtgatcaaagcagcaattgacaagttggggaagaagcacaaggagcacattgctgcttatggagaaggcaacgaacgtcgtttgacaggacgccacgaaaccgctgacatcaacaccttcttatggggagttgcaaaccgtggagcttctgttagggttgggagagacacagagaaagcagggaagggatattttgaggacagaaggccagcttccaacatggacccatacgtggttacttccatgattgcagacacaaccattctgtggaagccatgagcaaaacctgcatgttttctccctttggatggaaaggaacagttatgcttttcttagtaggatttggtctctctctctttttaccttttgattggtactatggttggtgccttgttggttggtgcaactaactggcaagggttgttcattgttttcttctattcctttccctcgttttccgattgttacaatgacaataatttaatggttattatcagtcttgaacaaagaaatgctgattgtgaagtataataataatatatgaaattgtcatgttc

SEQ ID NO: 8485 - DNA, 810 bp, Glycine max
  Clone ID: 700829506_FLI
ataaccttagtcatcctcttctttcatctttctccctaacggtaataacaatacaaatctcaatctttctttcttttttctgttttctctgcttttattttagggttttgaaatttgtgatctcaccggtggatcgcttccggtctcgtttcaggtatcgagggaaaaatatggcggaagaacacagatgccaggcaccgcgcttctgcgccaacaattgcggtttctttggcagccctgccacgcagaatatgtgctccaagtgctaccgcgatttccagctcaaggagcagcaatcttccaacgccaagatggttctcaatcagtcgctggttccttcaccgccaccggcggtgatttctcagccgtcgtcttcttcttcggccgcggtagatccgtcatcggcggtggttgatgacgcgccacgcgagtcggaggaggttaaggcgccgcagcagaaccggtgtatgacgtgcaggcggcgcgtggggctcacagggttcaagtgtcggtgcgggatgatgctgtgcgggacccaccgttacccggagcagcacgcgtgcgagttcgacttcaaggggatggggagagagcagatcgcgaaggcgaatccggtggtgaagggcgagaagctcgacaagatctgaaacgaatgaacgaagggtgttatggtaatttcgtgtttatcaagttggtggtgatggataacggatgcgaaacgcgggtcggatcattgacccgtaaaaggcggtgggtgagtgggtgagtttggtgggtcattgttatgtggttgcgttgtcattgtaaatt

SEQ ID NO: 8486 - DNA, 1208 bp, Glycine max
  Clone ID: 700829617_FLI
ttccgaataaaattgacatgattgctctttcttttgttcgaaaaggttctgacctggtggaagtcaggaaagttctgggaaaacatgctaagaacattatgctcatgtctaaggttgaaaaccaagaaggggttgcaaattttgatgaaatccttgcaaattcagatgcatttatggtggcacgtggtgaccttggaatggaaattccaatagagaagatatttctcgcacagaaagtgatgatttacaagtgcaacatccaaggaaaaccagttgtcactgcaacccagatgttggagtcaatgatcaaatctcccaggccaaccagggccgaagctactgatgttgccaatgcagttctggatggcacagactgtgtgatgcttagtggtgaaaccgctgctggagcctatccagaccttgctgttcaaacaatggctaaaatatgcattgaagcagagagcacccttgactatggtgatgtgttcaaaaggattatggagcactcaccggtacccatgagcccattagagagtctagcttcttctgctgttagaacagccaactcggctagagcggctcttatcttggttttaactagaggagggagtactgcaaaattggtggcgaaatacaggccagggatgccaattctttccgtggttgttcccgagctcaagactgatagctttgattgggcatgcagtgatgaggcccctgcgagacatagccttatattccgcgggttggttcccgtgttgagtgcagcttctgctagagcttctcatgctgaaacaacagaagaagcaatagaattcgccatgcaacatgccaagtccaagggtctctgccacaacggggattcagtggtggcactgcatcgtgtgggcactgcatctatcatcaagatcttgactgtgaaatgatcacccccattacaaggaattcttctgctgtttatggcaaattttttggatggtgcaaaagaggtctcgatatacctcttcatatctacattggatgcaaacttcaattaaaagcatttattaggatcggttacctgtttttcacatatcatatattactggttttttttttttttttgttacatttgccttatcattgtggcgagtagccacttgttttcatttgttaagattttgtacgaggcttttggtgaaccaaaaaactagccacttctggatttt

SEQ ID NO: 8487 - DNA, 1313 bp, Glycine max
  Clone ID: 700829958_FLI
tgaaattgtcagattttggactttgtaaaccattagattgtagtacacttgaagaaaatgatttttctgtgggtcagaatgtgaatggatctacacaaagctcaactcctaaacgctcacaacaggaacaactgcaacactggcaaataaacaggagaacacttgcttattccacagttggtacaccagattatattgctccagaagttcttttgaagaaaggttatgggatggaatgtgattggtggtcacttggagctattatgtacgaaatgctggtgggatatcctcctttttattctgatgatccaatgttaacatgcaggaagatagtaaattggaaaacttacttgaaatttcctgaagaagctaggctatccccagaagctaaagatcttattagtaaacttttgtgtaatgtcaatcaaaggctggggtcaaaaggtgcagatgaaataaaggctcatccattcttcaaaggtgttgaatggaataagttgtatcaaatggaagctgcatttattcctgaggtcaatgatgagttagatactcagaattttgaaaagtttgatgagtctgacagccaaactcaatcatcttcaagatctggtccatggaggaagatgctttcatctaagaaggatttgaattttgttggatacacttacaagaactttgaaattgtaaatgattatcaagttcccgggatggctgaactgaagaagaaacagtccaaaccaaagaggccaaccatcaagtcacttttcgaaacaccagaggcgtccgatacgtctgcaaatgatcaacctgctcaaggaagctttttgaagctcttgccaccccagttagaggtatctcctcatcgcgacaagaatcttcctcccaggtcctaacaggccccaaccacatgatctctgcagcagtctgacagtgtaggaatcatcataactcagcattttgaccatttccgcgtttaaaatatcactcttgatgcgttggatttgttctaagttacacgaaatcactaatatggcttggaccagtctcttgtcagtggccacaactattgatttgtaaatctctcactaagtatccgttgtcacacatgctacactaaaacagacaataccatgtatattcgcgttcttttaatgatagcaaagcatttatccctgtaacattggagtgtaatgattcacaagttatttagcagaacaagatatgtttgatttttttttaaaaatgtcaataatctgtaatttgttgtggttcgtttttttaatattattttttataatggacgagattcctct

SEQ ID NO: 8488 - DNA, 897 bp, Glycine max
  Clone ID: 700830067_FLI
cttcaaagttcattaaatgtgttactgttggagatggagctgttgggaaaacctgcatgctcatttgctacaccagcaacaagttccccactgattacataccaacagtatttgacaatttcagtgccaatgtagctgtggatggaagcattgtcaatttggggctatgggacacagcaggccaggaagactatagcaggttgaggccactgagctatagaggagcagacatttttgtcttagcattctcactgattagcagagctagctatgaaaatgttctcaagaagtggatgccggaattgcgtagatttgcacctaatgttccaattgttcttgttggtacgaagttagatcttcgtgaagaccggggttatgtagctgatcacatgggatctaatgtcataacatctgctgagggggaagaactgaggaaacaaattggtgcagctgcttacattgagtgcagttcaaagactcaacagaatgtcaaagcagtgtttgacactgcaattaaggttgttctccaacctcaacccccaaggaggaaagaaatggcaaggaagaaaaggcatagaaggtctggttgctcatttgtaagtattatgtgcggaggctgtgctgcttaatacgcacatcaattgcaccgtcacttacttttgaactggatgttattttgcaaaagcttcaagatctaagtgtggaaaccctgacatctgatcgcatatctaaatgtatccttatgcttgtattgtaacttatgtaagatgtaagatagtaatatccagttatttccactttacattttacaagaccctattagacactgaagggaatttttcattctctcagttatgtatttattttatattgccaatttttgttattttttccttg

SEQ ID NO: 8489 - DNA, 1062 bp, Glycine max
  Clone ID: 700755617_FLI
aaacgatccaaactcttttttcatttgcagcatcaaaatgagtggtagcaacgatggtagcggcagctggagctctaggtttttgaaggtggctagtgcagctgccgctacagccgccgttgccggcggtttatatgccattctttcatcctcaacctctgctagctctgagatggaagtgccgtttggcagcgcacggcgtgagagcaaagaacgtgacgatggtggctccgggtctcatcctcgcgagggtgccaccacggtcagtcgttggaagaaacctgagattggttgggtgaagctgaacgtggatggttcacgcgacccatacaaaagttcctccgctggttgtggtggtgttctgagggacgcatcagcaaagtggctccgtggctttgctaaaaaactgaaccctacttatgcagtgcaccagacagagttagaagccattctcacgggcttgaaggtggcttcagagatgaatgttaagaaactaattgtggagtcagacagtgactctgtggtgagcatggtggagaatggggttaagcccaatcaccctgactatggtgtcgtggaacttataaggacgaagcggcgtcgttttgactgggaagtgaggtttgtttctgtctccaacaaggcgaatcgtgtggctgataggctcgccaacgatgctcggaaattggcttgtgatgatgtttgtgaggagtatcttcatcccccggctaactgtaaccagttgctcttggaggatgagataggctgtgagagcttttagtcctttttttttttcttcttctttcaaaaataagaaaagaaaaattactatgacaaggtttttgaaggacaccatgggctacttaattaatttggcaatcatggaagattaagtgctttaatttgggtgggaattaagtatgaaattgaagccactgcttcttcaactagtttgatgcatgtatgatgtatctattattaggttgtcgatcttctgggaaatatgtgtatttatatctagtactatatatatggtatcttaatcaagtttgtattgatttt

SEQ ID NO: 8490 - DNA, 1776 bp, Glycine max
  Clone ID: 700755951_FLI
ggtgtcctcgtgggtggaaaccatacttcctccaggttttgcactcgctaatccccctctcttccccccttcggcttccgatttttctctctcaatctttgttcatcaaagtgctgcatctctctcactctcttacttaactcgacaacttcagccacattattccatggatgccaaggtattcaaattccagatcctccaaggctccatcgctaagcgcgtggtcattcgctcaatactactcgcgtgcgccgtctcaattgtctccatctaccgcgcgcaatccctcttcgatttcggaaccctcgctcccatcgccacgtacttcgactgcgtttccggcttcgagggcgtcacctttcgccctggttcccacttgctccgaacccgcttctgggcctccgccaattgcgagaaagacgccaacttgaccctctccgtggtcaccgacctaactggtaacaatttactctacaccggagcgaaaagcctctgcgtcggagaaggctcctcaatggccgtcacggcaatgaaacagttaggtttctccagcgtcagcgccgtccaaacgcaccgtttcgtgcagaggaacgtcctgtacgaggataactccttcgatttcgtgttctccagagacctagacaaggtttctgtcccagcattgctggtgctcgaggttgagcgtgtccttaagccacgtggcattggtgcctttcttgtaggcaccactagttctcaccccaatgatttgataagagcagccacacccgtttcctctttgttaaggtcttccaatgttgtgcatgttggttctgtcaacgagcttaaccttgttgttttcaagaaacgagttggaaacgctacttcattttaccaacatggtaatttacccgctgattgtcccagtctcacattcactaaatccctcatagagttgatggagcctctcgtgagtgagaaacaaaaaccaccacctcttgagtttcacaagaggattccctatttgcctaaatttgtggatgtttccactaggaagaggttggtgtatattgacattggggtaggggagcttcttgatgccaatgttagtgattggttcctaccatcgtaccccattgatcagaaggatttcaatatttattttgttcactacaacacttcgattatgttgtcccatgtgaagcaacctggtattacctttgtttaccaccctggcttgtctggtattgataaggtcaatgctaagcttggtagtgatgatgatgatgacatggatcctttacttggggaggaggagaagtttgatttccttgcctggttcaaagaaactgtgcaatatgctgattttgtggtcctcaagatgaatgcaggcagtgttgaactcaagttcctctctgatatatttgagaatggagctatatgctatgttgatgagttgtttctcaagtgtcccgagaggggaggtgatgccagcaagggaagttgcatggatatttacaaggatctccgaagcaatggtgtctatgtgcatcaatggtggggagactgaactgcattgtacctttgatgattattgtggtgttagagaaacctgtgtatgtacaagtttctcttgtgtttgatgtatttggattctagtcgtccaactttgtctgtgttgttgttgtgctgtgtttgttgtctgtgaaagtgtgtaggatgctatgaacatccgagtgctttatggttgggcgcttaattctaaataaacaaccaatgtcgttgtcgtttgctaat

SEQ ID NO: 8491 - DNA, 922 bp, Glycine max
  Clone ID: 700756003_FLI
gcagacacaacgaatcgtgaatggtgcactgttcctgatgactctgggtggtaacgacttcgttaacaactattttctcactcctgtctctgccaggtctcgccaattcactgtcccccagtattgtcgttacctcatcaccgagtatcgtaaaattctcatgaggttgtatgagttgggtgctagaagggttcttgtgaccggaactggtccattgggctgtgttcctgctcagcttgctacaaggagtagtaacggagagtgcgtgcctgagttacaacaagctgcacaaattttcaacccacttctggtccaaatgactagagaaatcaactcccaagtgggctctgacgtttttgttgctgtcaatgccttccaaatgaacatgaacttcatcaccgaccctcaaagatttggttttgttacatcaaagatagcctgttgtggacaaggtcgtttcaatggggtgggactgtgcactgcattgtcaaacctatgcccaaaccgtgatacttatgcattttgggacccttatcacccatctcaacgtgctctagggtttattgttcgagacatctttagtggaacctctgacattatgacccctatgaaccttagcaccatcatggccattgactccaacatctattaagaggtcttaatttattagtgtgagctagtgaggggcaaaaacctcatcaccattgtaattgtatgtgcctggatgtgtgtctcagtattaattacgtgcgtacctttgttaagcttcctcacgttatgtcatagcatatactacatgtaatgtatgtgcaggtgcaacatcactactagctagtgtgtgagatagtttagttataatggactggctgaggatttcaatgtaagttaattttaaaatctaaaaggaatttgccaataatct

SEQ ID NO: 8492 - DNA, 765 bp, Glycine max
  Clone ID: 700756037_FLI
gccgagactcggagatccacgggcaccgttaagtggttcaacgcgcacaaaggtttcggattcataactccccaagatggaaccgatgatctcttcgtgcacttcacttccatccgatccgacggctaccgttctttgtccgacggtcagtccgttgagtttctcctcgattacggcgacgacggccgcaccatggccgtcgacgtcacctcagccgttagatctcgtcttcccggaggatttcgcggcggcggcggtgggaggggcagaggaggaggacgctacgggggcggggaaggccgtggcagagggttcggtcggagaggaggaggccctgagtgttataactgtggaagaataggtcacttggcaagggattgttaccatggacagggtggtggtggtggtgatgatggtaggaatcggagacgcggcggtggtggtggaggaggaggagggtgttttaactgtggggaggaagggcattttgcgagggaatgtccgaatgttggaaaaggaaatgagtgagaatgtgttatggtttcttctattgaattgagtctgttactgttagttggggttggttaaatggattctgttatttttgtttctagccattggcatttccttccttccttccaaatatgtttttccagggctttgctaattgttttatctaatgcgcttcttttcaacaaagtgtgattcattatgcttgttcctcctcttgaatatgaagattgaagcgcaacggacggcttaatt

SEQ ID NO: 8493 - DNA, 1156 bp, Glycine max
  Clone ID: 700756148_FLI
ccctacctctcctttcaagatgcagatcttcgtcaagaccctcaccggaaagaccatcacccttgaggtggaaagctctgacaccatcgacaacgtcaaggccaagatccaggacaaggaaggaattcccccggatcagcaacgtctcatcttcgccggaaagcagctcgaggacggccgtaccctcgccgactacaacatccagaaggagtcaacccttcaccttgtccttcgtctccgtggtggcatgcagatcttcgtcaagactctcactggcaaaaccataaccctagaggtcgaaagctctgacaccattgacaacgtcaaggccaagatccaggacaaggagggaatccccccagaccagcaacgtctcatcttcgccggaaagcaacttgaggacgggcgcaccctcgccgactacaacatccagaaggaatcaacccttcacctcgtcctccgtctccgtggtggcatgcagatcttcgttaagaccctcaccggcaagactataaccctagaagtcgagagctccgacaccatcgacaacgtcaaggctaagatccaggacaaggagggtatccccccagaccagcagaggctgatcttcgccggcaagcagctcgaggacggacgtacccttgctgactacaacatccagaaggagtcaactctccacttggtgttgcgtcttcgtggtggtatgcagatcttcgtcaagacccttacgggtaagactattaccctcgaggtggagagctccgacaccattgacaatgtgaaggcgaagatccaggacaaggaaggaatcccaccggaccagcagaggcttatttttgctggcaaacagctagaggatggaaggaccctcgctgactacaacatccagaaggagtcaactctgcacttggtgttgcgtcttcgtggggggttttaagctggagctgatttctgtgtgatgttcgatgttggattttcccaaacattttaagaagaaatgtgatgtgtaatgggtctgtaatgacctttgaaaataagtttggtttgtgttgaactctattgtcccattaatgttactactgtttgttatcaatttgtggagctgatatataattatcaactgtatgctggcatattgtgtttgaattttgttctc

SEQ ID NO: 8494 - DNA, 910 bp, Glycine max
  Clone ID: 700756204_FLI
ccttggatcaggtttagggaatggctgcaatcttagctcgaaaatcactccttgctcttcgtgcgcgccaattggctgtaagcggtcaagggctgcacagctcccaatactatggccttcggttaagtgcacactccttctctaccaaaagagaggatgaggaaagggagcaactcgcaaaggacatttcaaaggattggagttctgtctttgaacgtagcattaacactctctttctcactgaaatggttcgaggactaatgctgactctgaaatacttctttgaaacaaaagttacaatcaattatccatttgagaaaggccctttgagccctcgtttccgtggtgaacatgcactccggcgatatccaacaggggaggaacgttgtattgcttgcaaactttgtgaggctatatgtcctgcacaagcaatcacaattgaggctgaggagcgagaagatggcagccgcaggacaactcggtatgatattgacatgaccaagtgcatctattgtggattttgtcaagaggcatgccctgttgatgccattgtcgaaggaccaaactttgaatttgctactgagactcatgaggagcttttatatgacaaggagaagctgcttgaaaatggggaccgatgggagactgaaattgcagagaacctgagatctgaaagcctttatcgctgaaattttccatgtgatccttgcctgttgctttttccgtctaattgggcaatgataaataaaatgaccagcgcatgattttaaagaactgtatgcatacacgattgttacatcagttttttttttcttttgtcaatgtttgcgttgctgttaagtgtacaatattgatgacttttatctccttgagatcttgaacaaatgtggaaataattgaatttttcaac

SEQ ID NO: 8495 - DNA, 1270 bp, Glycine max
  Clone ID: 700756224_FLI
ttcatgaaaaaaatggttcatcttggcttcttccttctggggtgtctctccatgatctcatatgctaatggttatgtcagcaatgggggttggaccaatgcccatgctacattctatggtggaagtgatgcttctgggacaatgggtggggcttgtggttatggaaacttgtatagtcaaggatatgggactaacacagcagcacttagcactgccttgttcaacaatggcttgagttgtggctcatgctaccaaatcaaatgtgcaaatgacccacaatggtgcctccgtggcaccattgtagtcactgccactaatttctgcccccctggtggatggtgtgaccctcccaatcaccattttgatctttctcaacctgtgtttcagcaaattgcccaatacagagctggtattgtgcctgtagtttacagaagggtacggtgcatgagaagaggtggaatcaggttcaccatcaatggtcattcatacttcaatttagtccttgtgactaatgttggaggtgctggtgatgtgcattctgtggccataaaaggttcaagaaccagatggcaacccatgtcaaggaattggggccaaaactggcagagcaactcctaccttaatggacagagtctttcctttttggtcaccactagtgatggtcgcagtgtgctctcatacaatgctgcaccaccaagttggtcctttggacagacctacactggaaggcaattccgctactaatttatcaacccttttcatggagggtgcattttctctcaggtacagaaactttctagtaggagaaagaaacacaaagaaaattgtattttttttctctctctctctcctactgaacgacagtttcagtaaccagagacaaggcagaggagccaattcctttcatggaacatcaatttcataatgttggttacccacatgataatatggttgcattataaaaaagaactaaagccgtaatttaatagtgtacatgatgtgtcaatattgggccacaaaataggtggcttagtttagtccctttaatatattttggtttgtgttgcaagtttttttgcagatgaattgctggtaccttagtttatgctaagctatagtctcaagggtacttctgtttgtttgcctgctgaaagaaaagtaggttagaggtgggattttgtgagccttattgcactttggcaaatgggattcttgccttgttcagaaagatcaacttaaataataattgagtatattcttgttgtgcttt

SEQ ID NO: 8496 - DNA, 1349 bp, Glycine max
  Clone ID: 700756233_FLI
gtagctatttctacttcccttctcttggaatgcacaaagctgccggagcatttggtggcatcagaatttggagccgccctctcattcctgttccttttcctcctcctgccggggactttaccatacttgctggagattggttcaagctcgaccaccgaaggctgagacgactcctagagaatggtcataatctccccttccctgatggccttcttatcaatggacgcggttggaatggaaacacattcactgttgatcaaggtaagacttatagatttaggatatcaaatgtggggctcacaacatcaatcaacttcagaatccaggggcacaggttgaaacttgtggaggtagaaggatctcatacactccaaaactcatattcttcccttgacatccatctcggacagtcttattccgtgctggtcactgccgatcaacccgtcaaggattactatatagttgtctctacaagatttacaagacggatactcacaacaacttccgttcttcattacagctattcaaaaacaggggtatctggtcctgttcctccagggcctacccttgatatcacatcatccgtctatcaggccagaactatccggtggaacctgacagctagtggaccaagaccaaaccctcagggatcataccactatggattgatcaaaccgagtcgaaccatcatgctcgcaaactctgctccttatatcaatggcaagcagaggtacgccgtcaacggtgtctcatacaatgcaccagataccccattgaaacttgctgactacttcaacatcccgggagttttctacgttggaagcattcctacctatcctaacgggggcaataatgcctatctccaaacttctgtcatgggggctaatttccatgaattcgtggagattgtgttccaaaattgggaggactctgtgcagtcatggcacatcgacggctattccttctttgttgtagggtttggtagcgggcagtggacagcagacagtagagtacactacaatctgagagacacagttgctagatgcaccactcaggtatatccaaggtcatggactgcaatctacatgtctcttgacaacgtgggaatgtggaatataaggtccgagaattggggaaggcagtacttgggacaacaattgtatctgagggtgtatacaccttccaagtcatggagggatgaatatccggtcccaaagaatgcgcttctatgtggcagggcaagtggtcgtcgcacaaggcctttctaatttcatgtcacgagagggtggcatattcatattgtgactgcttctgttttttagcatatgtgcaggaaattttactatcat

SEQ ID NO: 8497 - DNA, 712 bp, Glycine max
  Clone ID: 700756283_FLI
ccataacaacaacaaaaacggactcaagaaggcgaagtccgcgcgagtcagcccggtgagtcggagaaaaccgagtttctccaacggcgaacgatccaactcgttcgtcggcacggaagaatacgtctccccggaggtcgtccgcggcgacggacacgagttcgccgtcgattggtgggcgcttggaatactaatctacgaaatgctatacggtacgacgccgtttaagggaaagaatcgcaaggaaacgtttcggaatgttatcacgaagccgccggtttttgtgggaaagagaacggcgttgacggatcttattgagaagcttttggagaaggatccgacgaagcggttggggtacacgcgcggtgccgtggagatcaaggagcacgagtttttccgaggggttcggtgggagcttttgacggaggtggtgcgcccgccgttcattccgacgcgggacgacggcgccggagattcgacggataggatttccgaccggaattgtggcttcgatattaggggttactttctgaatcttaaatcgtcgccgtcgttgccgggttcgccgttgccatcgccgtcgtgcaggtttaagaagaatgtttcgctaacagaattctaacgcatgtgcagtattgcacgtgcgagagttagttgttgttttttttagtaatattgtaattttgtgcatatagaataacggtagatagtg

SEQ ID NO: 8498 - DNA, 630 bp, Glycine max
  Clone ID: 700756334_FLI
tgtgaagaagcctcatcgttatcgccctggaactgttgctcttcgtgagattaggaaataccagaagagcactgagctcctaatcaggaagcttcctttccagaggttggttcgtgaaattgcccaggatttcaagactgatctgcgtttccagagccatgctgtgcttgcattgcaagaggctgctgaggcataccttgttgggctctttgaggacactaacttgtgtgccattcacgccaagcgtgtgactattatgcccaaggatattcagctggcaagaaggattcgtggtgagcgtgcttgagttggtgcgttctgtgtttgtgaagatggattgttggtggctgcggatggtgttttgttactaagttttctttttgttgaagcctataggttattagggaaaaataggtgtttacttggtagtcatattaattgtcattggcaaatactgcctaagacactgtgaaggtctggttgttagaaatttggcatgtatttgatttttttggatcctttatttctcgttttatttctggttgtgcagccactttgggaattgtattggacaactttctgttgccatctaatctagttgaagctagcttatcgtgtctgtttgttctg

SEQ ID NO: 8499 - DNA, 1721 bp, Glycine max
  Clone ID: 700756337_FLI
cctcagtccacacctaaccctccaacctcaaacaaagtaacaaaaacccattttttcctcttctttgcatcatcattctcattccttctttctaaactaaccaactttttttcaaacaaattcgattctttcttcatttttaacctaattttcttttcgatccaaaaaatggctctctcgcgcgttgttgctcaatcgtcgcaatcgaatcttctgaaacccctagcgtcgtacttatcactacgacgccgttcggtttcgacttcgtcagacccactcacgatagagacctcggtgcccttcacctcccacaactgcgacgcgccgtcacgcgccgtggagacctcctcggcggagctctttgcgttcttccacgacatggcgctgatgcggcggatggagatcgcggcggactcgctctacaaggcgaagctgatccgcggcttctgccacctctacgacggtcaggaggctgtcgccgtcggcatggaggccgccatcacgcgcaaggactgcgtcatcaccgcctaccgcgaccattgcaccttcctcgcccgtggcggaaccctaatcgagatcttctccgagctcatgggccgccgcgacggctgctccaaggggaaagggggatccatgcacttttataggaaggaaggtggcttctacggtggccatggaatcgttggggcgcaggttccgcttgggtgtggcttggcttttgctcagaagtattgtaaagatgagaatgttacgttttctatgtacggtgatggtgctgccaatcagggccagttgttcgaggcgcttaacatttccgctctttgggatctcccctccattttggtctgcgagaataatcactatggaatggggacagctgagtggagagctgctaagagtcctgcttattacaagcgtggggattatgttcctggattgaaggtagatggcatggatgctcttgctgtgaaacaagcttgtaaatttgcaaaggagtttgctttgaagaatggtcccattattcttgaaatggacacatacagataccatggccactccatgtctgatcctggcagcacataccgtacacgtgatgagatttctggtgtgagacaggagcgtgatccaattgagagagtaagaaagctactattgactcacgagattgctactgaaaaggagctaaaggacattgaaaaggaaataagaaaagaagttgatgaagccattgccaaagcaaaggaaagtcaaatgccagagccatctgatttatttaccaatgtatatgtaaaaggctttggtgtcgaggcttgtggcgctgataggaaagaagttagagctattttgccctgatggaaaacttttcctttgaatttcttttccttagttttggaccgatcaaaataatgaagaataaaaggttcagaagatcatctctgcctatttgttgagctttccccaaattgtatatgaaattgattcttcagtagcaatggggcggaaattaatgttttgccatgtaattttggaggatctaacactcatatgacctcaattgattaagcatgcaactagtgtcctgcaaatttggaggatttcgttatgcaaaacctccatgattggcaaaattttgccattattttatttttaggtattcacaagattgtgttccaattgaaaccattttttggctataagagtctttggacagttaaaaattt

SEQ ID NO: 8500 - DNA, 1758 bp, Glycine max
  Clone ID: 700756373_FLI
gaccgttttccgatcctctttctcctcgccaccctcatcaccctcgcctccggtgcccgccacgatattctccggttaccctccgaagcatccacttttttcaaagcacccggtggcgatcaaaacgatgagggcacgaggtgggccgttttaattgccggttccaatggctactggaattacaggcaccagtctgatgtttgccatgcgtatcaactactgaggaaaggtggtctcaaagaagaaaatattgttgtatttatgtatgatgacattgctttcaacgaagagaacccgcgacctggagtcattattaacagtccacatggaaatgatgtttacaagggagtccctaaggattacattggtgaagatgtaactgttggcaacttttttgctgctatacttggaaataagtcagctcttactggtggcagtgggaaggttgtggatagtggtcccaatgatcatatatttatatattactctgatcatggcggtcctggagtgctagggatgcctactaatccatacatgtatgcatctgatctgattgaagtcttgaagaagaagcatgcttctggaagttataaaagcctagtattttatctagaggcatgtgaatctgggagtatctttgaaggtcttcttcctgaaggtctgaatatctatgcaacaacagcttcaaatgcagaagaaagcagttggggaacatattgtcctggggagtatcctagtcctccctctgaatatgaaacctgcctgggtgacctgtacagtgttgcttggatggaagacagtgacatacacaatttgcaaacagaaactttacatcaacaatacgaattggtcaaacaaaggactatgaatggaaattcaatttatggttcccacgtgatgcagtatggtgacatagggcttagcgagaacaatctcgtcttatatttgggtacaaatcctgctaatgataattttacttttgtgcttaaaaactcattggtgccaccttcaaaagcagtcaaccaacgtgatgcagatctcatccatttttgggataagttccgcaaagctcctgtgggttcttctaggaaagctgcagctgagaaacaaattcttgaagcaatgtctcacagaatgcatatagatgacagcatgaaacgtattggaaagctcttctttggcattgaaaagggtccagaactgcttagcagtgttagacctgctgggcaaccacttgttgatgactgggactgccttaaaacattggttaggacttttgagacacattgtggatccctgtctcagtatgggatgaaacatatgaggtcctttgcaaacttctgcaacgctggaatacgaaaagagcaaatggctgaggcctcagcacaagcatgtgtcaatatccctgctagttcctggagttctatgcacaggggtttcagtgcataattcctagaatgcgctccattgaagaccgagtatagtcgttgtaacattattctttacgagtgttatggactgtactctctgctcatgatttcttataccaaccctgtaaatacaaatgggacgctggggaaacctctttacattatagtttcctgcaaaatagatgctgtaacaaagacattttacttttacttggggagaggcagtggaaccataaggacccttggaacttctaattaatacgacagggcacaataccgtgtttgtaagccaacgctttgtttcaatttaatggtaaccccgttgtgt

SEQ ID NO: 8501 - DNA, 990 bp, Glycine max
  Clone ID: 700756577_FLI
attcggctcaggtgatttcagtgagtgatcggtgttcacttgatctcatcataatcgtcagcgtcaattgaagaagatgccgatcagaaacatcgccgtcggaaggcctgaagaggcgactcaccccgacacgttgaaggcggctttggctgagttcatctcaaccttcatcttcgtgttcgccggctcaggctccggcatcgcctacaacaagctcaccgacaacggcgctgccacccctgccggcctcatctccgcctccatcgcccatgcattcgccctcttcgtcgccgtctccgtcggcgccaacatctccggcggccacgtcaaccccgccgtcaccttcggcgccttcgtcggcggcaacatcaccttcctccgcggcatcgtctacgtcatcgcccagctcctcggctccatcgtcgcctccctcctcctggccttcgtcaccgcctccactgttccagcattcggactctccgctggagttggagttggcaacgccttggtgttggagatcgtgatgaccttcggtctggtgtacacggtctacgcaactgccattgaccccaagaagggtaatttgggaattattgctcccatcgccattggtttcattgtcggcgctaacattttgttgggtggggccttctctggagcggccatgaaccccgctgtgacatttgggcctgctgtcgtgagctggacctggaccaaccactggatctactgggccgggcctctcatcggtggtggaatcgctggccttgtttacgaggttgtctttatcagccacacccacgagcagcttcccaccactgactactagagggggggaaatgaaaataaaaaaaaaaaaaattgtgtattattgaatttctctggaatcttcttctgtgtatggttttccttccttgtgttttcttcctaattcactttcgagggttgtacttgttcctttcgtcttaaatccttggatggttgatgatc

SEQ ID NO: 8502 - DNA, 1438 bp, Glycine max
  Clone ID: 700756578_FLI
gttgtgttgtgttgtgttgtgtaacaatggctcagttgaaagcatcccctgttactgctccttcccttcatacaacaggtgttgccctacgtggaaaattgagtaaggttgtgctggcttacagtggtggcttagacacatcagtcattgttccatggctcagagagaattatggttgtgaagtcgtttgcttcactgctgatgttggccaaggtatacaagaattggaaggtttagaagcgaaagctaaagccagtggggctagtcaattagtggtaaaagacttgaaggaggaatttgttagtgactatgtatttccttgcctacgtgctggtgcagtttatgagaggaagtatttgcttgggacctcaatggcccgccctgtaattgcaaaggccatggttgatgttgccaaagaagttggagctgatgccgtttcccatgggtgtacagggaaagggaatgatcaggttcgttttgagctcactttctttgctctgaaccccaagctcaacgttgtggctccgtggagggagtgggatattacagggagggaagacgctattgagtatgctaaaaagcataatattcctgttcctgtgacaaagacatccatatatagcagggataggaatctttggcaccttagccatgagggagatattttggaagacccagctaatgagcctaaaaaggacatgtacataatgtctgtagaccctgaggatgctcctgatcaaccagaatatgtggaaattgggatagagtcagggcttcctgtttcagtgaatgggaggaggctttcaccagcatctttacttgctgagctcaatgagattggtggaaagcatggaattggcagggtcgacatggttgagaatcggcttgtaggtatgaagagccgtggagtgtacgaaactccaggaggaaccattctgtttgctgcagcacgcgagttggagtctttgacacttgatcgtgaaacaatacaagtcaaagattcattagcccttaaatatgcagagttagtgtatgctggcagatggtttgatccgcttcgggagtccatggatgcctttatgcagaagatcacggagaccacaacaggttctgtgactttgaaactttacaaaggttctgttactgcaaccagccgaacgagtccctttagcctgtataggcaagacatttcatcgtttgaaagtgggcagatatatgatcaagctgatgctgctgggttcatcaggctttatggtcttccaatgcgggtccgagcaatgcttgaacatggcatctaagtgttcgtttcatttccacatgtacttcatttcattgtccatttgcttgtttagacttgaagctagagagtactatggattgatagtcgatccgatcatccgaaccttaataaaatgaatcgtatttaatattcatcctg

SEQ ID NO: 8503 - DNA, 1747 bp, Glycine max
  Clone ID: 700756618_FLI
caaaagttggagtgcaaacatctcagatgcaaatgttaccaacaaatactcatatgttctcctgggagagttttgatgaagatatttcttctcttgatgacggctctgcaattacaatcactacttctggtctcctggaacagataaatgttacacgggatacgagtgattatctttggtatataactagtgttgatataggttcatccgaatcctttctccgaggaggcaaactacccactctcattgttcaatccacaggccatgctgtgcatgtttttatcaatggtcaactttctggttctgcctatggaacgagggaggataggagattcagatatactggcacagtaaacctccgtgctggaacaaacagaatagctctgctcagtgttgctgttggacttccaaatgtgggaggacatttcgagacttggaacacaggaatccttggtccagttgtactccgtggacttaaccaaggaaagttggacttatcttggcagaaatggacttatcaggttgggctgaaaggtgaggccatgaatcttgcatctccaaatggtatctcttctgtagagtggatgcagtctgcattagtttcagagaaaaatcaaccactgacttggcacaagacttattttgatgctccagatggagacgagccgttagcattggacatggagggtatgggtaaaggtcaaatatggattaatgggctgagcattggaagatactggactgctccggctgctggtatttgcaatggttgcagctatgctggcacattcagacctccaaagtgccaggttggttgtggccaaccaacccagcgatggtaccatgtacctcgatcttggttgaagccaaatcataatctgttggttgtttttgaggaacttgggggagatccttcaaaaatttcacttgtaaagagatcggtaagcagtatctgtgctgatgtgtctgagtaccacccaaatattaggaattggcacattgatagctacggaaaatcggaagagttccatcctccaaaagttcacttgcattgtagtcctagccaggccatctcttccattaaatttgcaagctttggaactcctttgggaacatgtgggaattatgagaagggagtttgtcattctcccacttcctatgccaccctagagaagaaatgtataggaaagccaagatgcacggttactgtatcaaacagtaactttgggcaagacccttgtcctaatgtgttgaagcggttatcagttgaagctgtttgctctccaaccaatcggaggggctgaatgattaaggaaggaagccacccttttacgtgtagtatgaagtgacttaacaagaaaaacgaaaggaccataatagtataggtaaagttaagtgtcatggttgtttttagggagaaagtaataatgtttatgatatgttggtgccgaaggcacgaggtttttagtttcatttagtgatgttgtgttgacgggaatgtataaaaattagtgattgtcggataggtgaatcttaatcagggagtccaaaattgggatccttggtggagtagttcccggccttttacgttttaactataggcacggggaagagagggaatttggtttgtgtgatgttttttcgttttactttgtggggttaaattaaactccaaatcaggttcaagttgggagcggatcctactgtaaccactctacgtttatttaaagcccattgttcaattctg

SEQ ID NO: 8504 - DNA, 2441 bp, Glycine max
  Clone ID: 700756638_FLI
gggatgagagttttggaattccgggagcattttacatcaaaaactatatgcaatctgagtttttccttgtgagtttcaagcttgaagacgttccaaatcatggaaccattctctttgcttgcaactcatgggtttacaacgcaaaattgtacaaaaaagatcgcattttctttgctaataaggcatatcttccaaatgacactccaactccactagtaaagtacagaaaagaagaattggaaaatctaagaggagatggaagaggggagcgcaaggaacttgataggatctatgattatgatgtctataatgatttgggcaacccagacgagaatgacgatctagctcgtcctattcttggcgggtctagtaagcatccataccctcgcaggggaagaactggtagaaaaccaacaaagaaagaccccagatgtgagagaccaaccagcgacacttacatcccgagagacgaaaattttggtcacttgaagtcatcagacttccttacatatgcaataaaatccttaactcaaaacgttttacctcaattcaacactgcatttggtttcaataatgagtttgatagcttcgaggacgtgcgttgtctctttgatggcggagtttatctccctacagatgtactcagcaaaattagccccataccggtgctcaaagaaatcttccgcactgatggtgagcaagccctcaagtttccaccacctcatgtcatcaaagttcgtgagtctgaatggatgactgatgaagaatttggaagagagatgcttgctggtgttaatcctggcatgattcaacgccttcaagagttccctccaaagagcaagctagatcccacagagtttggagatcaaactagtacaataaccaaagaacacttggagatcaaccttggtggactcaccgtagaacaggcactgaaaggtaacaaattgttcatattagatcaccatgatgcattcataccgtttatgaatttgatcaatggcctgcccactgcaaagtcttatgccacaaggaccatccttttcttgcaagacgatggcacattgaagccattagccattgagttaagtttgccacatcctaggggacatgagtttggagccgatagtagagtagtcttgcccccagccgcagtcaacagcgctgaaggcacaatttggttaattgccaaggcttatgttgctgtcaatgacactggctatcaccaactcataagccactggttaaatactcatgccacaattgagccatttgtcatagcaacaaacaggcatcttagtgtgctccaccctattcataagcttctcttgcctcactaccgtgacacaatgaatatcaatgcacttgcacgacaatcgctcatcaacgcagatggcgttatcgagcgatcatttttgcccggcaaatactctctggagatgtcttcggcagtttacaagagttgggttttcactgatcaagcccttcctgcagatcttatcaagagaggaatggcaattgaggatccctgtgccccccacggccttcgccttgtgatagaggactacccttatgctgttgatggactagaaatatgggatgctattcagacatgggttaagaactatgtctccttgtattacccaacagatgatgcaattaagaaagactctgagctccaagcttggtggaaggaagctgttgagacgggtcacggtgacttgaaagacaagccatggtggcctaagttgaacactcctcaagatttggttcacatttgctccattatcatatggatagcttcagctctccatgcagcagtgaattttggacaatacccttatggaggtttgatcctaaaccgtccaactttaaccagaagatttctccctgaaccaggaagcaaagaatatgaggagctttcaaccaattatcaaaaggcttacctgagaacaattacaagaaagattgaggcccttgtggacctttcagtgatagagatattgtcaagacatgcttctgatgagatctaccttgggaagagggacagtgacgattggactgatgaccaaaaggcaattcaagcctttgaaaagtttggaaccaagctgaaggaaattgaggccaaaatcaattcgaggaacaaagattcaagccttagaaaccgtaatggaccggttcagatgccttatactgtgcttcttcctaccagtgaggaaggccttactttcagaggaattcccaacagcatctctatctaaggccagagtgcgtttatgtgtggttctctttccaaacctacgttacctttctcgttgacgagtaaatatgcaagcttatgcatgcatataataattgtcttatgcattcttaagtgttgtatgtggacgttatctagttttcgtatttaataagaatggtatcaccattactttgttttt

SEQ ID NO: 8505 - DNA, 1084 bp, Glycine max
  Clone ID: 700756651_FLI
ggggtcacatggggtggttcctcttctgttgttgtttttctctacttttttttcattcttctgggtcacccagaagaaacttgcccatcatagcctttgaggatggctacacccccttgtttggggaccataatttggccatccatagagatggcaaatcagttcacctttcacttgatgaaagaacaggttctggatttgtgtctcatgacctttaccttcacgggtatttcagtgcctcgatcaagctgcctgctgattacactgctggagttgtggttgcattttatatgtcaaatggtgaaatgttccagaacaaccatgatgagatagactttgagtttttggggaacattagaggcaaagactggaggattcagacaaatgtttatggcaatggaagcaccagcattggtagagaggaaagatatggcttatggtttgatcctgctgaggatttccatcagtacagtattctttggacagattctaagatcatattttatgtggataatgttcctattagggaagttaaaagaacagaatctatgggaggagatttcccctcaaagccaatgaccatgtatgctaccatatgggatgcatctgattgggcaaccaatggaggcaaatacagggtaaattacaagtatgcaccctatgttgctgagttctctgacctgatcctgcatggttgtgcagttgatcccatagagcatgtggccaagtgtgaaagtgcccaaggttctgagaaagttccctctggtgtcaccccagtacaaataaccaaaatgagaaacttcaggttgaagcacatggcttactcttactgctatgacacagttagatacaaagtccctccaccagagtgtgtcatcaaccaccaagaagctgaaaggcttagaaaatttgatcccgtcactttcggcaacggccagcgccaccgtgggaaacgacaccaccatagtagtaaaggaagccaggaagagattactgcttcttcattttaatgtatggctccatatgcagattttgtcataaagaaaatattttcatatatgaatcagtttgatttacctgggtt

SEQ ID NO: 8506 - DNA, 1429 bp, Glycine max
  Clone ID: 700756694_FLI
taaatttcgcagaactatccttctctctctctctcatccacgccccaaatcttagggttttcaccaaataaaacaaccccaattcctcgaactcttcgattcgattacccaaccccacacgctgattccacatcctccatgagatttggttgattggatcgtacgatggcggcgccgaggaatgtgacggcgacgagggacgaagagaagggcgaggacgatgattcgccctccgcgaagaagcccaaatcggagaggttcccgctgaacacgtgggaattcgccgtcgccgtcgccgtcttcttggtgttctccaccggcctcttctgcatttacctcaccatgccctcggccgcttacaccaacctcaaactcccccgcaccctctccgatcttcgcctcctcaaggaacatctttcgacgtatgcgagtaaccaccctgcgcagttcattcttgggtactgctccacctacatcttcatgcaaactttcatgattcctgggacaatcttcatgtccctcttggctggggcgctttttggagttgtacgaggaatcctattggttgttttcaacgccactgcgggtgcatcttcctgtttctttttgtctaagttaattgggaggcctttggtttcttggttgtggcctgaaaagctaaggttcttccaagctgagattgcgaagcgtagggataggctgctgaattacatgctttttctgaggataaccccgacattgccgaatctgttcatcaatttggcgtctcccatcgttgatgttcccttccatatattcttttcggcgacattgattgggctcgttccagcctcttatattactgtcagagctggccttgctcttggggatctaaagtcaattaaggatctatatgattttaagaccttatcagtacttttcctcattggttttgtttccatagctccaacacttttgaagcggaagcgagtatatgaatgaaggtttcctggctcagcttgcacaatcaagtttgtcaaaaggcaagttacgtgatctaattagatgatgaagacagtggatcagagaagataatatttaagaaagatatccatgaaaaaggaatgtattgttattaacttaaacagtggcatatgctccattttattttctgtggtggagcctaagtttttttgtttcccttttcattttttgatcgtgtggagagagtaaggttagacttagctgattggtgtacaatcaattcagctaaggttacgaggctttgttggagcattaaattatgtattggccttgatgtcatcaggaagattgtggtgattgtttagcggtgctgtatgtatgtgcttcgcaccaaataggatctgactttttaccctgtagtattgctttattcaattataagatattatcgtagaaaatttcaagt

SEQ ID NO: 8507 - DNA, 898 bp, Glycine max
  Clone ID: 700756716_FLI
ggtctgttggggtcattttatttgagttgcttgttggtattccacccttcaatgcagagcaccctcagactatatttgataatattcttaatcgtaagataccttggccagcagttcctgaagagatgagtcctcaagcacaggatcttattgatcgattattgacagaagatcctaatcaaagactaggatccaaaggggcgtcagaggtaaagcaacatgttttcttcaaggacataaactgggatacacttgccaggcagaaagctgcatttgttcctgcttctgagagtgctctagataccagttacttcactagtcgctactcgtggaatacttctgatggtcttgtatatccagcaagtgatgatgaggattctagtgatgctgatagcttaagtggcagcagtagttgtttgagcaatcgacaagatgaagtgggagatgaatgttggggtcttaccgagtttgattctggcacatctgtcaattactcttttagtaatttctcctttaagaatctctcccagcttgcatcaatcaactatgatctcaccaagggatggaaagatgacccgccaacgaattctagtgcatagctgtatgtattaacctatgtcaaagtccagaatttggttttcgacctatgatccaagcaattttgggggcataagcaccttttgggtttgtataccttgtacatatttagaggttcaaagtggttcaggatgtactctttgcttgttaggttacagggcaacagtgggggtttaaatcttcggtttattgtgtatgaattgagaactgtaaattttaaatagcatattcactgttgctcacattgttctgtggtgtcctctttattattctggcaatgagaacacatccctttttgttc

SEQ ID NO: 8508 - DNA, 1105 bp, Glycine max
  Clone ID: 700756728_FLI
cttcttattcgtcgttcagttcaatttctcgcgagtttttcttccatatgctaccaatcgttgccgttgatccacgcgccggcgaatttcagttttgattctccgccaccgttttggctgttgttactttggttcttccgagagaagggagccatatatagaaagtattttatggtgcgccgatgagcagaactgatgttattggcagtagaaggaggaggattcttctctgcttcggcttcagggtatactaagggcctgagccttctcctcttgggtcagaggaatgaggataaacccatgagagtagcgccgtggaaccagtatcagttggtagaccaagaatctgaccctgagctccagctggcttccacaaagaatcgcctctcccgcggctgtgcctcctttgtttgctttggtcgcacttccgcaggacttgatactccgtctcctcttaaagtgggccctgctcaacaacatgatgtctcaccagggccactggtttccaacaagggaaaggatccttctgcacatgtagatgatgaaagtgataacagaaaggctacactaaaaagtagcataaagaagccacaaaatagaaaatccgttcctgttgaggttgctaatgaacatgaagcatcaagtggacaggggatttgtactcctggaggtcaacccgaaagaaggaaagtgcagtggacagataattgtggtagtgagcttgtggaaattcgagaatttgagcccagtgaagtggatggatcagatgatgaatttgatagtggaaatgacagaacttgttcctgtgcgattatgtaaattggagtttcattaagttgataggttcatcgggtcattcactgctaacatccatcactcgatttgagacaaaagaggcaaaggtttcagttctgtggagatatatacacaaacatcttgcctgagtgatgtgtctgttattgcttgctgcggctttaaattttgctcctctgcccctcatcaatttgtataattcttgtcatgtgtgaattctttgcctttgattcatcatttttatgctactttatgttcttatttttataaggattaacaaagttttctttct

SEQ ID NO: 8509 - DNA, 854 bp, Glycine max
  Clone ID: 700756762_FLI
cgacgaggtcttcaccttcgccaagaacatcgctgcgccttatgacctcgtcatgcagaccaagcagcttggccgcctccccgttgtccacttcgccgccggcggagtcgccacccccgccgacgccgcgctcatgatgcagctcggctgcgacggcgtcttcgtcggctccggcgttttcaagagcggcgatcccgcgaagcgcgccagggcgattgttcaggccgtgactcactacagcgaccctgagattttggcggaggttagctgcggattgggtgaagccatggttggtatcaatttgaccgatgacaaggttgagaggttcgccaatcgctctgaatgaaatgaataataattctcagatttgtttctctgtggcgcttcaatttggactattaagggttttagttgcttcttatatattataataaggttatgtttttagttttcggtgttttgaaccgtgttaattggattttagaaaaaccaaaaagaaaaaatagataggtagctatttgggcatgccttgtaatatgcctatacttgtttttacatattcagcgtcgtggtattgtgttgagttagtagtgcgttcgtggtaaacgagaatcgaatcattcttgtttttggatattcaatcctatttttgggtttaattttttttattggattcaaagtctgttgctttcagcttctcgttctagtttttgcattagttgaacgagttcgattcgaaattggcaatttttatgtccgctgaagtgaaaattggatgctgaaaaggaaggttactgttctgtgtatctgaatatcaattgtaactcaattcactttatttgtaatttttgctc

SEQ ID NO: 8510 - DNA, 1516 bp, Glycine max
  Clone ID: 700756777_FLI
tcgttttggggtgtgcgactattgtcccttctcttcgtttcgtcggttactaaaatacactaattgcctctctctttccctttcttcttcttctccgtcttcttcacactgagttgactgagtcttcgtaactcgctctctactgtctcagctactcatcgcattctctgcatttatcctccgatcacattttctctctcttcgttcgggatgtcggagaaagctcttagggatctcaatacaattcttggaactgaaaggaagaatgaggactccagtaaggcatgtttatccaagccttctgttgacaatgctgttgaaaatattgaagaatggcaaaagaaaaataatagtccctccttggtttctccagctgttaatggaaatctggctgtgactgctaattctggtgcggaggttgtaaatccagaagtagaatatattgaatctgagaacttgaatgatgtagacgatattgatacttgtctcaagaccctattagctggacttgactcaaaggattgggtcctggtttgtgacacactgaataacgtacgtcgattgtctatatttcataaggaagcaatgcttgatatgctgggggatgtgatcacatctattgcaaagtcactgaaaagtcctagaagtgctgtttgcaaaactgccattatgacatctgcagacattttcagtgcatataatgatcttataatagattcattggaccctctgctagtacaacttcttctcaagtcttcacaagacaaacgctttgtatgtgaggcagctgaaaaagccttgatatcaatgactatttggatttcccctatttctttattgccaaaattgcaaccataccttaagaacaagaatcctcgtatccgtgcaaaggcatcaatgtgcttttctcggagtgttcctcagctgggtgcagaaggcataaagacatatgggattgacaaattgatccaagtagctgcatctcagttgagtgaccagctcccagagtccagggaagcggcccgaactctacttctcgagcttcaaaatgtgtatgagaaatctcatgatctcatcaagccagctactcctactgtcaataatgagcatactgtgaatgaggagaatccagaggtgagttcttgggaaagcttctgtcagtcaaaactttctcctcttagtgctcaagctgtacttcgtgtaaccaccagtatcgctcgggagggtcttgtttcatgacacgcacattaaacctcactttgcggctttcatcatttccttgtttgcttatcattttcttctgtaaatacagtgcgacaattgagatgattgagttgagttgtcgtcgaagcacgtattgagcccaagatttataatgtgtattctattattttccccctagctgttgttacctatattacttttgattaatactactactactactagataatggaccgggaaaaattatgagtataatctttggtcttgtaactgtttttggatgattatggtt

SEQ ID NO: 8511 - DNA, 2796 bp, Glycine max
  Clone ID: 700756809_FLI
tgtgtgaaaacgaaagccacaatactcttttctctctcccttctctttctagaatctgcgtttccttttgttgctctgcttcgcgttcgtgttctacgtcgtcgtttttgagctggttaaagggattctattctagggtttcacgcaagaagaagaagaagaagatgacgacgacgatggagagcttgattgggctggtgaaccgaatccagagggcttgcacggtgctcggtgactatggcggcgctgataacaacaccttctcttctctctgggaagctcttccttctgttgctgttgttggtggccagagttcagggaagtcttcagttttggagagcattgttggtcgtgactttttgccaagaggatcagggattgtgactaggcgtccattggtgttgcagcttcataaactcgaaagtgggtcacaagagtatgccgagtttcttcacctgcccaggagaaagttcactgactttgctttggtccgccaagaaattcaggatgaaactgatagagtaacagggaagacaaaacaaatatctcctattccaattcatcttagcatctattcgccaaacgttgtcaacctaactttgattgatttaccgggtctgactaaagtggctatagagggacaacctgagaatattgttcaggaaattgaaactatggttcgttcttatgttgaaaagcctaattgcatcatactagcaatatctccagccaatcaagacatagcaacttctgatgctattaaacttgccaaggaagttgaccccacaggtgaaaggacatttggggtgttgacaaagctagatttgatggacaaaggaaccaatgctttggatgtccttgaaggaaggtcttatcgcctgcaacatccttgggttggtatagtaaatcgatcccaagcggacatcaatagaaatgttgatatgattgttgctagacgtaaggagcgtgagtattttgcaaccagttctgattatgggcacttggccaataagatgggttcagaataccttgcaaaacttctctcacagcatttggagtcagtaatcagggcaaggatacctagtataacatctttaataaacaaaagtatcgaagaacttgaatcggagatggatcatcttgggagacctattgctcttgatgctggggctcaattatacaccatcctagaactttgccgagcatttgaacggatattcaaggaacatttagatggagggcgtccaggaggagataggatatataatgtctttgacaatcagcttcctgctgctttacggaagcttccacttgaccggcatctttctctccagaatgtaagaaaagtggtgtcagaggctgatggttatcagcctcacttgattgccccagagcaaggttacaggcgcttgattgagggagctctcggttactttagaggcccagctgaagcttcagtagatgctgttaactttgttttgaaagaactcgtaaggaaatcaatagctgaaacaaaggaactgaagcgcttcccaacatttcaagccgaactagctgcagcagcaaatgaggctttagaaaggttccgtgaagagagtaagaagacaactgttcggcttgtagacatggaatcttcatatctcactgtggatttcttccggagacttcctcaagaagtggagaaatctggaactcctgctgccacaaatattgaccgatatgcagaggggcatttcaggagaattgcatcaaatgtgtcatcctatatagggttggtggcagacacgcttagaaacacaattccaaaggctgttgtctattgtcaggtcagacaagcaaaacagtcattgctaaaccatttctacacccaaatagggaagaaagagggtaaacagctatcgcaaatgttagatgaagaccctgcattgatggagaggagacaacagtgtgcaaaaaggcttgaactatataaagcagcaagggatgaaattgattctgtttcctgggtacgatgagcttggattctgttgccctcatcttgatgatagtgatcgatcatgggttggctggaccctgatgtaatttacatatttactatcatattttgttaatgttcttgattgtaggataacattggagttacgttgattgtctgaatgtatggtatacttcatacagaccttggtgatcccttctttggttgttactgtgatatgtagatagtagattaaatttgtgtatttgtgtgtattctttgtgatctccttctttggttgtctatttgtgttttctttgtaatctcagccttgagtctcaaaacgactattttggtattccaatgtttatcttccttttcttgacactgaaaaaccaaaagtggccgagaagtcgtcagccccagaggaaagttgacatgagttgacgatgaatcatacccaaattgaagattgattaaacttcggcaaaatagagatacgcagaagagacaacaaattgagtaaaaaataactcatctaattactaaggcaggaagttttacaactgatcttgttcaagtggcaaggttgaaggttatacagaagatcgttgaaaagttccaaggtttgaaggaaattatggaaaagtgccaaagaaaattacatgtcgaagaggacgcctaattagttagcagattccaatgtcttctgtacaggattttttcttattattctatctgtagttgcaccgttttctagttggtcctggttaatgtatatattaacttttttagagctattttgttattgttttattatt

SEQ ID NO: 8512 - DNA, 1090 bp, Glycine max
  Clone ID: 700756889_FLI
gaatgcccgccacgtgtgcggcgaggatcttccagctgacccgagagctcggtcataaatccgacggcgaaaccatccggtggctcctcgagcacgccgagcccgccatcatcgccgccaccggcaccggcacagtccccgccatcgcgatgtccgtcaatggaacgttaaagattccgaccacctcaccttccgatcaagaacccggagagccgcccgagaggaagaagcgcaaacgacccgcgaatagcgcctacgtggacataaacggcgccgccgtttcggtctcggccgggctcgcaagctctattattaataataataaccaaaacgcagcaacgacgatgacgacaacgatggcaattccgcaacatacagcaattccgttgccgcaaggaatggttcccgtgtgggccatcccttcaaacgccgtcgttccggctgcaggagctttttttgtggttcctcaaacggcgtcgtttcagcatcaacctcagtttttcaccatagcgagacctatctccgagtttgtctcttccatggtcacacccgtcgttcagcttcaaccaacctcgataaactcttccaccaacactaactctaacgcttcctccactgcgccgtcgtcgaagtccccggcgagagccaccgtcatggctccgacaaccaccaccaccaccacgaggcagatgctgagagatttctcgttggagatttacgacaagcaggagctgcagttcatgtcgcgcgcgtcttccaagcattgagagaattagaagaacgttgaatctggtttgtatcttcgtttccgccatgaacgacgacgacgacgacgtcgttgctgcgggagagagaggaagagcacgtgcgcacgtgcggcgggattaaaaaatggtggggaccacgtgtgtgtgtgtgtgggtgtgggtcaacacgaaaaaagtggagggcatggtggggacccagtgcggggtactacataaccagcaccagaagatcagaactacggagagaagttttttctttagtatttctcagaataataatgtccatgacaattaattagaataaattttagactttaattttc

SEQ ID NO: 8513 - DNA, 1769 bp, Glycine max
  Clone ID: 700756934_FLI
cttattaacactttccttagttcaatatggggaagcccttcttcactctctctctttcttccctttgcttgctactcttgtcgagtgcatgctttgctattacctccagcaagttcaacgagtgccaactcaacaacctcaacgcattggaacccgaccaccgcgttgagtccgaaggtggtcttattgaaacatggaactctcaacaccctgagctgcaatgcgccggtgtcactgtttccaaacgcaccctcaaccgcaacggcctccacttgccatcttactcaccttatccccaaatgatcattgtcgttcaagggaagggagcaattggatttgcatttccgggatgtcctgagacgtttgagaagccacaacagcaatcaagcagaagaggctcaaggtcgcagcagcaactacaagacagtcaccagaagattcgtcacttcaatgaaggagacgtactagtgattcctcctggtgttccttactggacctataacactggcgatgaaccagttgttgccatcagtcttcttgacacctccaacttcaacaatcagcttgatcaaaaccccagagtattttaccttgctgggaacccagatatagagcacccagagaccatgcaacaacagcagcagcagaagagtcatggtggacgcaagcaggggcaacaccagcagcaggaggaagaaggtggcagtgtgctcagtggcttcagcaaacatttcttagcacaatccttcaacaccaacgaggacacagctgagaaacttcggtctccagatgacgaaaggaagcagatcgtgacagtggagggaggcctcagcgttatcagccccaagtggcaagaacaagaagacgaagacgaagatgaagacgaagaatatgaacaaactccctcttatcctccacgacgaccaagccatggaaagcatgaagatgacgaggacgaggacgaagaagaagatcaacctcgtcctgatcaccctccacagcgaccaagcaggcccgaacaacaagaaccacgtggaagaggatgtcagactagaaatggggttgaggaaaatatttgcaccatgaagcttcacgagaacattgctcgcccttcacgtgctgacttctacaacccaaaagctggtcgcattagcaccctcaacagtctcaccctcccagccctccgccaattcggactcagtgcccaatatgttgtcctctacaggaatggaatttactctccacattggaacttgaacgcgaacagtgtgatctatgtgactcgagggaaaggaagagttagagtggtgaactgccaagggaatgcagtgttcgacggtgagctaaggaggggacaattgctagtggtgccgcagaactttgtggtggctgagcaagggggagaacaaggattggaatacgtagtgttcaagacacaccacaacgccgtgagcagctacattaaggatgtgtttagggcaatcccttcggaggttctttccaattcttacaaccttggccagagtcaagtgcgtcagctcaagtatcaaggaaactccggccctttggtcaacccataaataacaacaagcatatatgaaggtgtggtgaggccatcttatatgaaataatatcaaaatatattttgtgtaataataaaactatggcctatgtatttaccaccctccgacccagcctatgttaatatctgagtggcgttgtacctttgaatcgccttaataaaatgtcagtcttcaagttttgtcttt

SEQ ID NO: 8514 - DNA, 842 bp, Glycine max
  Clone ID: 700756960_FLI
caggagctgaacccttccttcgtaagaaatcaaagtgccaccctttacatcagccaatgagttcaagtcaatagagaagttcaaaattttcaacacaaataatttgtgggtgaacttaaacgcagttaaaaggcttgttgaagctgatgctcttaagatggaaattattcccaatccaaaggaagttgacggaataaaagttcttcagctggaaactgcagctggtgctgcaataaggttctttgacaaggctattgggattaatgttcctcgatcacgattccttcctgtgaaggcaacttcagatttgcttcttgtccagtctgacctctacactttggaagacggatttgtcattcggaacaaagctagggaaaatcctgaaaacccttctattgaactgggaccagaatttaagaaggttagcaacttcttgggccgcttcaagtcaattcctagtatcgttgagcttgacagtctaaaagtggctggtgatgtatggtttggagctggtgttatcctcaaggggaaagtcagcattgtatcaaagcccggtgtaaagctggaagttcccgacggtgttgccattgtagacaaggaaattaatggcccagaggacctgtgaggaagacagatgactttaactaaagaatgaattgtatcagaccgtatcttatctatctatatggtctagtgtttttactactcccatgtttgataggtaaagaaaataagaagtctttttgttgagaggatgtcttggtgtggatctttactccattgtcttggaattctgtttagaacagcaaaaaaatcacaagtttggtgataagtttcatgtc

SEQ ID NO: 8515 - DNA, 1494 bp, Glycine max
  Clone ID: 700757037_FLI
agaaaatatgattaggaaagaataagtcatcatattttcttgtattgatagccccgctgtcccttttaaactcccgagagagtataaaactgcatcgaatattacaagatgcactcttgtcaaatgaagggggggaaatgatactacaagccactaggcatgggtctagcaaaggaaacaataatgggaggtggaggccgtgtggccaaagttgaaattcagcagaagaagcctctctcaagggttccaaacacaaagccaccattcactgttggccaactcaagaaagccattccaccgcactgctttcagcgttccctcctcacttcattgtcctatgttgtttatgacctttcattggctttcattttctacattgccaccacctacttccacctcctccctcaccccttttccctcattgcatggccaatctattgggttctccaaggttgcattcttactggcgtgtgggtgattgctcacgagtgtggtcaccatgccttcagcaagtacccatgggttgatgatgttatgggtttgaccgttcactcagcacttttagtcccttatttctcatggaaaataagccatcgccgccaccactccaacacgggttcccttgaccgtgatgaagtgtttgtcccaaaaccaaaatccaaagttgcatggtacaccaagtacctgaacaaccctctaggaagggctgcttctcttctcatcacactcacaatagggtggcctttgtatttagccttcaatgtctctggcagaccctatgatggttttgctagccactaccacccttatgctcccatatattcaaatcgtgagaggcttttgatctatgtctctgatgttgctttgttttctgtgacttacttgctctaccgtgttgcaactatgaaagggttggtttggctgctatgtgtttatggggtgccattgctcattgtgaacggttttcttgtgaccatcacatatctgcagcacacacactatgccttgcctcactatgattcatcagaatgggattggctgaggggtgctttggcaactatggacagagattatggaattctgaacaaggtgtttcaccacataactgatactcatgtggctcaccatcttttctctacaatgccacattaccatgcaacggaggcaaccaatgcaatgaagccaatattgggtgagtactaccgatttgatgacacaccattttacaaggcactgtggagagaagcaagagagtgcctctatgtggagccagatgaaggaacatccgagaagggcgtgtattggtacaggaacaagtattgatgaaccaagcaatgggccatagtgggagttatggaagttttgtcacttatcacttaattagtagaatgttataaataagtggatttgccgcgtaatgacttgtgtgcattgtgaaacagcttgtagcgatccatggctataatgtaaaaatatgtggaaagtgttctgctt

SEQ ID NO: 8516 - DNA, 1889 bp, Glycine max
  Clone ID: 700757148_FLI
cacttccttagttcaatatggggaagcccttcactctctctctttcttccctttgcttgctactcttgtcgagtgcatgctttgctattagctccagcaagctcaacgagtgccaactcaacaacctcaacgcgttggaacccgaccaccgcgttgagtccgaaggtggtttgattcaaacatggaactctcaacaccctgagctgaaatgcgccggtgtcactgtttccaaactcaccctcaaccgcaatggcctccacttgccatcttactcaccttatccccggatgatcatcatcgcccaagggaaaggagcacttggagttgcaattccaggatgtcctgagacgtttgaggagccacaagaacaatcaaacagaagaggctcaaggtcgcagaagcagcagctacaggacagtcaccagaagattcgtcacttcaatgaaggagacgtactcgtgattcctcctggtgttccttactggacctataacactggcgatgaaccagttgttgccatcagtcttcttgacacctctaacttcaataaccagcttgatcaaacccctagggtattttaccttgctgggaacccagatatagagtacccagagaccatgcaacaacaacaacagcagaaaagtcatggtggacgcaagcaggggcaacaccagcaggaggaagaggaagaaggtggcagcgtgctcagtggcttcagcaaacacttcttggcacaatccttcaacaccaacgaggacatagctgagaaacttcagtctccagacgacgaaaggaagcagatcgtgacagtggaaggaggtctcagcgttatcagccccaagtggcaagaacaacaagatgaagatgaagatgaagacgaagatgatgaagatgaacaaattccctctcaccctcctcgccgaccaagccatggaaagcgtgaacaagacgaggacgaggacgaagatgaagataaacctcgtcctagtcgaccaagccaaggaaagcgtgaacaagaccaggaccaggacgaggacgaagatgaagatgaagatcaacctcgcaagagccgcgaatggagatcgaaaaagacacaacccagaagacctagacaagaagaaccacgtgaaagaggatgcgagacaagaaacggggttgaggaaaatatctgcaccttgaagcttcacgagaacattgctcgcccttcacgcgctgacttctacaaccctaaagctggtcgcattagtaccctcaacagcctcaccctcccagccctccgccaattccaactcagtgcccaatatgttgtcctctacaagaatggaatttactctccacattggaatctgaatgcaaacagtgtgatctatgtgactcgaggacaaggaaaggttagagttgtgaactgccaagggaatgcagtgttcgacggtgagcttaggaggggacaattgctggtggtaccacagaacttcgtggtggcggagcaagccggagaacaaggattcgaatacatagtattcaagacacaccacaacgcagtcactagctacttgaaggatgtgtttagggcaattccctcagaggttcttgcccattcttacaaccttcgacagagtcaagtgtctgagcttaagtatgaaggaaattggggtcctttggtcaaccctgagtctcaacaaggctcaccccgtgttaaagtcgcataaatgacaagcatgatggtgtgaggatgaggccatcttatgaaataataacaaataaataaattttgtatgataataaaaagtatggcccatgtaccatcccagcgagcctatgtttatatctgagtggcgttgtacctttcaatcgccttaataaaatgtcagtcttcacgttttgtcttt

SEQ ID NO: 8517 - DNA, 1342 bp, Glycine max
  Clone ID: 700757167_FLI
ggccaggcaagccccactcaaccaccacacctctcctcgttcacgctacccctttctgctcttcttctacctttcaagttttaaaagtataaagatggcagagacattcctatttacctcagagtcggtgaacgagggacaccctgacaagctctgcgaccaaatctccgatgctgtcctcgacgcttgcctcgagcaggacccagacagcaaagttgcctgcgaaacatgcaccaaaaccaacttggtcatggtcttcggagaaatcacgaccaaggccaacgttgactacgagaagatagtgcgtgacacctgcaggaacatcggcttcgtctcaaatgatgtgggactggatgccgacaactgcaaggtcctcgtcaacattgagcagcagagccctgatattgctcagggtgtacacggccaccttaccaaaaaacctgaagaaattggtgctggtgaccagggtcacatgtttggctatgccactgatgaaacccctgaattgatgccattgagccatgttcttgcaacaaaactcggtgctcgtctcaccgaggttcgcaagaacggtacctgcccttggctgaggcctgatgggaagacccaagtgaccgttgagtattacaatgacaatggtgccagggttcctattcgtgtacacaccgtgctaatctccacccaacacgacgagactgtcaccaatgacgaaattgctgctgacctcaaagagcatgtgatcaagcctgtgatcccagagaagtaccttgatgagaagaccattttccacttgaacccttcaggccgttttgtcattggtggccctcatggcgatgctggtctcaccggccgcaagatcattatcgatacttatggaggatggggtgctcatggtggtggtgctttctccgggaaggaccctaccaaggttgataggagtggtgcttacattgtgagacaggctgctaagagcattgtggcaagtggacttgccagaaggtgcattgtgcaagtgtcttatgccattggtgtgcctgagcctttgtctgtgtttgttgacacctatggcactgggaagatccatgataaggagattctcaacattgtgaaggaaaactttgatttcaggcctggtatgatctccatcaaccttgatctcaagaggggtggaaataacaggtttttgaagactgctgcctatggacactttggaagagaagaccctgacttcacatgggaagtggtcaaacccctcaagtgggagaaggcctaagtaattcattccactgctctatgctggaagttttttgagcgttgcccttataatatgtctaatatccat

SEQ ID NO: 8518 - DNA, 1467 bp, Glycine max
  Clone ID: 700757208_FLI
cacacacacacacacactaagaataatggcttctatcctccactactttttagccctctctctttctttctctttccttttcttcttatccgactccgtccccattccccaacaccacactaaccctacaaaacctataaaccttctggttctacccgttcaaaatgatgcttccacagggctccattgggccaacctccaaaaaaggacccctctaatgcaagtaccagtcctggtggacctcaatggaaaccacttgtgggttaactgtgagcaacactactcatccaaaacataccaagcacccttctgccactccacccaatgctccagagccaacactcaccaatgcctcagttgcccagcggcatcaaggccagggtgccacaaaaacacgtgtggcctcatgtccaccaaccccatcacccaacaaaccggtttgggtgaactaggccaagatgtgcttgcaatccacgccactcaaggctccacccaacaacttggtccattggtcacagtccctcagttcctcttttcttgtgcaccttccttccttcttcaaaagggtctccctagaaacattcaaggagtggctgggttaggccatgcaccaatttctcttccaaaccaacttgcctcccactttggcctacaacaccaattcaccacttgcctctctcgctaccctacctcaaagggtgctctaatcttcggggatgcaccaaacaacatgcaacaatttcacaaccaagatattttccacgatttggctttcaccccattaaccgtcacaccacaaggagaatacaacgtgagagtcagctccataagaatcaaccagcacagtgtgttcccaccgaacaagatatcatcaaccatcgtagggtcttctggaggaacaatgattagcacctcaactcctcacatggttctccagcaatctttgtatcaggctttcactcaggtgtttgctcagcagctggaaaagcaagcacaggtgaaatctgtggcaccgtttgggctatgcttcaactccaacaagatcaatgcatatcctagcgtggaccttgtgatggacaagcctaatggtcctgtttggagaatctctggtgaggacttgatggtgcaggcacaacctggggtcacgtgtttgggtgttatgaatggaggaatgcaacctagagctgaagttaccttagggacacgccagttggaagagaagctgatggtattcgatcttgcaaggtcaagggtcgggtttagcacgtcatcactgcactcgcatggagtcaaatgtggtgacctcttcaactttgccaatgcatgagccatgatcgagagagtttttatatatttgcttatttataattaagcaagcatctactacttgttatggtaaagtaatgtaagaataaagactttgaacaatataataatatgaaggcttctctggcgttgttcaatgag

SEQ ID NO: 8519 - DNA, 1543 bp, Glycine max
  Clone ID: 700757222_FLI
caattatattacaaaatctcataatattaataatgtcttccgatatctgtggcattctccctcgtattctcatcgtttccaggcgaaccgttcgcaaaaacaagttcgttgatttcgttggagaataccaccttgaccttatagtaagctacggtggggtgcccgtgattgtccctcgcgtttccggcgttcacacgttgctcaacagctttgagccaattcatggtgttcttctctgcgaaggtgaagatattgaggcatgttggtatgatcacaacgacgatcatgacagtgatggcttggatctttcccaagaggagttggaagaaatcagaaggcttcatgcgagtgacacctccattgacaaagagaaagactcaattgagttgagtctggccaaactctgcctcgaaaggaacattccctacttgggaatctgcaggggctcccaggttctcaatgttgcatgtgggggtaccctttaccaggacatagggaaagagctttcaaaaaaatgtgatcaaagccagagagtgatgcacatcaactatgatgattatgatggtcatagacatgctgttaaactggtcaaaaacacccctttgtgtcattggtttcagggtgaagaagaagaaaaagaagaaggggaagaaatggagattttggtgaatagctatcaccatcaaggggttaagaagttggctgaacgttttatccctatggcctttgcttctgatggtttgattgaagggttttatgatcctgaatgttataatcctcaagatggcaaatttatcatgggattgcaatttcaccctgagcgtatgagaaagcctgattccgatgaatttgattaccctggatgccccttcgcctataaggaatttgtaaaggcagtgattgcttatcagaagaagctgaatagtttgacatctgtgccaaagcctctgaaacttaacaaggaaatggagagcaagaggaaaattatagtgcgtagcttctcacttgccaaaaacctatacaccatgggtcgcgggaattgctcctccaaagactctgaacttgaaattggagcagaatttttggagtcaaacacggcgttaagtgtgcaacaagagaatcggttaaagcaaatgggggcaacagttaggaatggagggtcatacgttgagagactgaagctgaatgaagtaagggaaaaaatggccaaaaatgtaatgggaaagatgtcagtggagcaattgtctgatctgctctctttctaccgcaccatggaccagatttgctctcaagtattggaaagaaagctacatgacgttgtcaatgacttcacttcatgacttggacttatattttgtttttaatttggtgtcttttaccatgccactcacatgaatcttgtgtgctgtgcctccttgattccctctgtacatgtttaatatcaaccttttccctcttcatgaaagtgatgttaatctctcttgcttgggctaggattaatattatatattgagaaaaaaaaatatgcattcacattgaagtg

SEQ ID NO: 8520 - DNA, 2103 bp, Glycine max
  Clone ID: 700757258_FLI
tgtttctttccctcttccgtttattaacactcataccgcaccctcttcttcttcctctctttctctcttcttcgtcgctggccttgcctttcaagatccaaacctcttcccaatgaggaacctctctttcttcttcttcttcttcttcaccttcttcgccgccgtcagatctgatccctcagatcaccgctacaaagaaggcgaccccgtccctctctacgccaacaaagttggccccttccacaaccctagcgaaacctaccgttacttcgaccttcccttttgtgaaccaggtgatttgaaagagaagaaggaggcgctcggggaggtgctgaatggggaccgtttggttagcgcgccatacaagctggagttccagcgcgacaaggagttggtttccgtgtgcgacaggaagctctccaaacaggacgtggctcggttcagatccgcggtgaggaaggactactacttccagatgtactacgacgaccttcctatttggggcttcatagggaaggttgacaaggaagggaaggaccccagtgattataggtacttcctgtataagcacattcacttcgacgtcttctacaacaaggacagggtcattgagatcaatgtgcgcaccgatcccaatgcgctggtggatctcaccgaggatgctgaggttcaggccgagtttttgtacacggttaagtggaaggagactaacacgccattcgagaagaggatggacaagtactcgcagtcttcatcgctgccgcatcatttggaaatccactggttctcgattatcaactcctgtgtgacggtgttgctcttgaccgggttcctcgccaccattttgatgagggtgctcaagaatgattttgtcaagtatgcacatgatgaggagtctgcagaggatcaggaagagactgggtggaaatatatccatggggatgtgtttaggttccccaagtttaagtctctgtttgcggctgcgcttggatctggcactcagttgtttacccttacggtgttcatattcatattggcgcttgttggtgtgttttatccatacaatcgaggggcgctgtttactgcacttgttgtcatatatgcacttacttcagggattgctggatacactgcaacttcattctattgtcagttggaaggaacaaactgggttaggaatctgctgttgactggatgccttttctgtggacctctgtttctgactttctgctttctgaacactgttgcaattgcttacaaagctactgctgctcttccatttgggacgattgtggttatagttctcatatggtcacttgttacgtctcctttgcttgtattgggaggcattgccgggaagaatagcaaggctgaatttcaagctcctgttcggacaactaaatatccaagggagattccacctctgccttggtatcgtggaacaattcctcagatggcgatggcaggatttttgcctttcagtgctatatacattgaactttactatatatttgccagtgtttggggccacagaatttacaccatctacagcatcctgttcattgtcttcatcattctcttgattgttactgctttcatcactgtggcattgacatacttccagcttgctgctgaggatcatgagtggtggtggagatcattcctatgtggtggttcaactgggttatttatctatacctactgtctgtattactactatgcacgctccgacatgtctggattcatgcagacctcatttttcttcggatacatggcctgtatatgctacggtttcttcttaatgcttggaactgttggattccgtgctgctttgctctttgtccgccacatttatcgatccattaagtgtgagtaggcattttgtcctctcaagtccactagagcaattgtcttcatttcatagggaattctgtagaaaaattatagtaattttgcagttcttttgtgtactataagggaagctgggttgggtgggtttctggcttccagagcaacttgttagatggcaaagggtgcttttggggataacgtctgtgtactaccatctctttaaccaaactcttgcaatactttttggtcctt

SEQ ID NO: 8521 - DNA, 489 bp, Glycine max
  Clone ID: 700757329_FLI
ccggtgaagcccgtaactgataagggtctatccgctttggagttggagaagcttccaaaaatcaccggcaaagaactcgtcttgggcaccgaatgcgccgtctgcctcgacgagatcgagagcgagcaaccggctagagtggtccccggttgcaaccatggatttcatgtccaatgcgctgacacctggctctctaagcaccctatttgccccgtttgtaggaccaagctggacccgcaaatcttcacttcccaaagcccctgctgaacaatgaagcattcattattcaaggaatgaataagggaagccaaattttcaattagtaatttcataattatctttattgttttctttgtcagttctttatagtttcttgaacttccgttactaattattattattattattatgtgtcgtgtagtggttcagtggttgtggtgtgttatggcctggatgaatttagcagtagtacccgaaaattcagaagcc

SEQ ID NO: 8522 - DNA, 1470 bp, Glycine max
  Clone ID: 700757362_FLI
atacacacacacacacacactaagaataatggcttctatcctccactactttttagccctctctctttctttctctttccttttcttcttatccgactccgtccccattccccaacaccacactaaccctacaaaacctataaaccttctggttctacccgttcaaaatgatgcttccacagggctccattgggccaacctccaaaaaaggacccctctaatgcaagtaccagtcctggtggacctcaatggaaaccacttgtgggttaactgtgagcaacactactcatccaaaacataccaagcacccttctgccactccacccaatgctccagagccaacactcaccaatgcctcagttgcccagcggcatcaaggccagggtgccacaaaaacacgtgtggcctcatgtccaccaaccccatcacccaacaaaccggtttgggtgaactaggccaagatgtgcttgcaatccacgccactcaaggctccacccaacaacttggtccattggtcacagtccctcagttcctcttttcttgtgcaccttccttccttcttcaaaagggtctccctagaaacattcaaggagtggctgggttaggccatgcaccaatttctcttccaaaccaacttgcctcccactttggcctacaacaccaattcaccacttgcctctctcgctaccctacctcaaagggtgctctaatcttcggggatgcaccaaacaacatgcaacaatttcacaaccaagatattttccacgatttggctttcaccccattaaccgtcacaccacaaggagaatacaacgtgagagtcagctccataagaatcaaccagcacagtgtgttcccaccgaacaagatatcatcaaccatcgtagggtcttctggaggaacaatgattagcacctcaactcctcacatggttctccagcaatctttgtatcaggctttcactcaggtgtttgctcagcagctggaaaagcaagcacaggtgaaatctgtggcaccgtttgggctatgcttcaactccaacaagatcaatgcatatcctagcgtggaccttgtgatggacaagcctaatggtcctgtttggagaatctctggtgaggacttgatggtgcaggcacaacctggggtcacgtgtttgggtgttatgaatggaggaatgcaacctagagctgaagttaccttagggacacgccagttggaagagaagctgatggtattcgatcttgcaaggtcaagggtcgggtttagcacgtcatcactgcactcgcatggagtcaaatgtggtgacctcttcaactttgccaatgcatgagccatgatcgagagagtttttatatatttgcttatttataattaagcaagcatctactacttgttatggtaaagtaatgtaagaataaagactttgaacaatataataatatgaaggcttctctggcgttgttcaatgag

SEQ ID NO: 8523 - DNA, 1703 bp, Glycine max
  Clone ID: 700757393_FLI
atttgtctctcatcaatggctgccacgagaccggtgcagtgtttgttacgaagggtttgcagaggaagtaggactattggggttgccacagaagttaatgcttcttcttcttctcagaaaatcatcgacaaggaatatgaacacagtgctcacaattaccatcctcttccgattgtatttgctcaagcaaagggaacctctgtttgggatccagagggaaacaaatatcttgattttctatcaggttactctgctgttaatcagggacactgccatcctaaaattctgaaagcattgcaagaacaggcagaaaggttgactgtgagctctcgagccttctacaatgatcgcttcccagactttgctgagtatgtgacaaacatgtttggttatgatatggtacttcctatgaataccggtgctgaaggtgtggaaacagcactgaagttagcacgaaagtggggttacgaaaagaaaagaattcccaaagatgaggctattattgtctcatgttgtggctgcttccatggtcgtacactaggtgtcatatctttgagctgtgacaatgaagctacccgtggttttggtcctttattacctggcaatcttaaagttgattttggtgatgcagaagcccttgaacaaatttttaaagaaaaaggagagcacatagctgcatttattttagaacctgtccaaggtgaagctggggtgatatttcctccagatggttatttaaaagctgttagagatctttgctccaaatataatgtcttgatgattgctgatgaaattcaaactgggttagcaagaacggggaagatgctggcttgtgagtgggaagaagttcgcccagatgttctgatactagggaaagcattgggtggaggagttataccagttagtgcagttcttgcagacaaagatgtgatgctttgtatacaacctggacagcatggaagtacctttggtggaaatccaatggccagtgcagttgcaattgcctctctagaagtaataaaaaatgagagactcgttgagagatctgcccaaatgggagaggagcttactggtcagctgcttaagattcagcagcaatacccagactatgtgaaggaggtacggggaagaggattgttcattggagtggagtttaacagcaaaaaattgttcccagtatcaggctatgagctatgcaaaaaattgaagtatagaggagtccttgccaagccaacacatgatgcaattatccgctttactcccccactttgcataagtgtggatgagatccaacaaggttccaaggcactggctgatgttctggaaattgatctaccaaagttgcagaagacaaagccaatagatgctgctccagttgccactagtgcatgcgatcgttgtggtagagtcttgtattaaccataaaaagacacgtatgaattgcatgtgcctttagttttccttggaaaaaaatatatcacatgaagaatgttactccttatacatgaacagctggaaactatgttccaatattccatatatcatcataatataagttcatgatatatgtgataggtagctgtataaataaatatataggagttagaggactcattgtataactttcaatggttaatttgcgagataagatatatgattttattatggctagaacaaagttctctagacttgccattccatct

SEQ ID NO: 8524 - DNA, 1321 bp, Glycine max
  Clone ID: 700757460_FLI
gttccagggggaactgctgtattaccctcaacagctctgatgctttcagttcctgcacagattgctggatgtaaaactattgtccttgcaactcctccagctcaggatggtactatatgcaaggaggtagtgtattgtgcaaagaagggtggggtgactcacatccttagagctggaggagctcaggccatatctgccatggcttggggaacagaaacttgtcccaaggttgagaaaatttttggcccaggaaaccaatatgtcacagctgcaaaaatgatactacaaaacagtgaagccatggtttcaattgacatgccagctggtccatctgaagttttagtcattgccgacaagcatgcgattcctcgtcatgtagctgctgatttgctttcccaggctgagcatggtcctgatagtcaggttgtgcttgtgatttctggtgaaggtgtggatctgaatgttatagaagaggaactcaacaagcagtgccagagtctcccaagaggagagtttgctgctaaggccctaagccacagttttattgtttatgcacatgatatgcttgagtcaatcaagttctcaaacttatatgcacccgaacatctaattgtcaacacgaatgatgcagagaagtgggagggttttattgagaatgcaggttctgtatttttagggccgtggacaccagagagcgttggtgattatgcaagtgggacaaatcatgttcttcccacttatggttatgcaaggatgtatggtggtgtttcattggattctttcttgaagttcataactgtgcaatctctcacagaagaaggcctaagaaaactcgggccatatgtcgttaccatggcagaagttgaaggtcttgatgcccacaagctagcagttaccctaaggcttgaggacatagaagtcaggcaggtatcaacatgacatgataatctacggtaagcttactatcatttgatcgattacttgacttatgtaaaattagtacctaagcaactgctatttttaagtcatgtaactataaagggtattgaaattttaaattttgatgaaaatttggtttttttatagagtcaacgttaatcattgttgagtttttcgaagatcgtaagggagaaagtggtcagtgcaaagcaaagagctttgataccatatttgagatctagagttcagagaaactagaaagaaagtgagataaaattgagaaaaatgtatttctatattgaatcagttacaattgttgagttactcatatttactgttgagctcgactcataagtacagttataactgaattagagagacc

SEQ ID NO: 8525 - DNA, 1170 bp, Glycine max
  Clone ID: 700757563_FLI
gtaacagtctgtgtctgtgtgtgtgttcagtttaacaaatggatcaagctgtccactgatctgtaaccgtggtggactcgacaagacaacaacaatattcagaacattaacaagaccacaccacaccatgagcgtcatcgacattctcaccagagttgattccatttgcaaaaagtacgacaaatacgacgtccaaagccaaagggactccaatctctcctccgacgatgcattcgccaaactctacgcctccgtcgacgccgacattgaggccttacttcagaaagcagataccgcttccaaggagaaaagtaaggcatccactgtggcgatcaatgccgagattcgtcgaaccaaggctaggttgttggaggaggttcccaagttgcagaaattggctatgaaaaaggtaaaggggctttcatcacaagaatttgctgcccgtaatgatttggctcttgcattgccggataggattcaagctatcccagatgggacccctgcagcatccaaacaaactggaagttgggcagcttcagcctcacgtcctggaattaaatttgatacagatgggaaattcgatgatgaatacttccaacaaactgaagaatcaagtggattcaggaaagagtacgaaatgcgtaaaatgaaacaggatcaaggtttggatatgatcgcagaaggattggatactttgaaaaacatggcacatgatatgaatgaggaactggatagacaagttccactgatggacgagattgatactaaggtggacagggcatcttctgaccttaaaaataccaatgttagacttagagatacagtgaaccagcttcgatccagtcgaaacttttgtattgatattgttttgttgattataattttgggaattgctgcttatttgtacaacgtgctaaagaaatgatacggcatagaagaccattagatcaatttgtatggcttatcagtatttcttgtattttcttggtaatatcgtggtgtgactcgtgtctgcttctttttaaaacaatatttttggacttgttcctgcaacttgagagatgcacttgtcctttatcaacagatctatatgtcgccgtattatgtcaaacagtgtagatttgtatttatacttgtgtaatatactaattcaatgtttgccttgaggat

SEQ ID NO: 8526 - DNA, 1677 bp, Glycine max
  Clone ID: 700757601_FLI
acattttcgacgtgcagggcctcggcaaaaggtatactttaaatcggatgaagtgcatgcatgcattgtcacgtgtggtggactctgccctggcctcaacactgtcataagggaaattgtctgtggtctttcctacatgtacggtgttaacaaagtccttggcatagatggtggttatagaggcttttattccaaaaacaccattactttaacacctaaggtggtcaatgacatccataagcgtgggggtacaattcttgggacatcccgaggggggcatgatacgggcaagatagttgacagcatccaggatcgaggaattaatcaggtttatattattggaggagatggaacacagagaggagcgactgtgatttacgaggaagttagacggcggggtctgaaagtagcaattgctggaattcctaaaaccatagacaatgacatcccggttattgacaaatcttttggttttgatactgcggttgaggaggctcaacgtgccattaatgcagctcatgttgaagctgaaagtattgagaatggtattggtgttgtaaagctaatggggcgttatagtggttttattgcaatgtatgccactcttgctagcagagacgtggactgttgcttgattccagagtcgcccttctaccttgaaggaaagggtggactttttgaatttattcagaaaaggctgaaagaaaatggacatatggtcatagtcatagctgagggagcaggacaagatcttcttacagaaagcatgcaagccatggatcagaaggatgcttctggaaacaaactacttcaagatgttggtttatggatatctcataagatcaaggatcactttgcaaggaaggataagattcccatcaatcttaaatatatagatccaacttacatgatccgggcaatccaaagcaatgcatcagataatgtctactgtacacttcttgctcagagtgcagtccatggtgcaatggcagggtatactggatttacagttggactggtcaacggcagacatacttatattccattcaatagaatcaatgagaggcagaacaaggttgtgattactgacagaatgtgggcaagactcctttcttcaaccaaccagcctagctttttgagccccaaagatttagaagaagccaagaaagcagaacaacctccgactgaattgttggaaggaaacaattgcaatgatgttggtgatgccgggaaagaagaacaacctcccaaagatgaacaagaatcaggaaatcacgcagacaatggtatcaagacagaaaattagatttagacttgttcatctacaagactacaattgtatttggtgacatgttttatcattttgactcaagccctacaaccttcaaagcctggagtgttgggagctgttctttttgtccttttaatgttttgcaagttggtacgtctttctttataaagacctaccgtcttgcgtgattgttgttgtactcagaagattgttgaatgttaacctaggtcatattaagattggaacggaattatttgacgtgcttgaaggtactgtatctggttattgttgttctgtgttttggtagtgacttgagtttttatacgcagttttgctggaacgaggtataaataaacaattttctagtaactttttcttttcccttt

SEQ ID NO: 8527 - DNA, 1319 bp, Glycine max
  Clone ID: 700757648_FLI
ctttacaggggagatagaatttagatagtgcaagagaagcgtaatctccaagttctcatcttttttgttcccttttgttttcagagacatacataggccccagaagaacaaattgctacaacctattttgatttgagatctgtctgtctctttggtttcacttcagggctcaaagtgaggaatgcgaagaaaatggggaggaaaggaaatagttggttttctactgtgaagaaagctctaagccctgagccaaaggagaagaacgatcagaattcaagtagatcaaagaagaaatggtttcagaagcaaaaattgcagacttcagaatcaacctcacaatctgataatgcaccacctcttcctctacctgagattattttaactcatgtcgagagtgaaatcaaccatgatcgggttgaagttgcaactgcagtggatgctgaggaacctgttcttgcagttcagacagcagctgctgaggttcaagccacaacaattgttcagtttgacaataaaccaacagaagaaatggcagcaatcaggattcaaaaagcttttcgtggatacttggcaagaagagcattgcgggctttaagggggttggtcaggttgagatcactgatggaagggccagtggtgaaacgtcaagccattagtaccctccgttctatgcagacttttgctcatttgcaaactcagattcgttctaggaggctcaggatgttagaggagaatcaagcactacaaaaacagctcttacagaagcacgcaaaagagctagagagcatgcggcttggggaggaatgggatgacagcgtacaatcaaaagaacaagttgaagccaagttactgagcaagtatgaagcttctatgagaagagaaagagcaatggcttattcattctctcatcagcataactggaagaatgcatcaagatctataaacccaatgttcatggatccaaccaatccagcctggggttggagttggttggaacgatggacggcagcccggccctgggagagccatagccagatggagaaagagaagaatggcaataaatctctaagaagttctagccgtggcattaccagtgctgaaatcagcaaagcatttgctaagtttcagctcaattctgagaagcattctccaacagccagccaaaatccaggctcacctaacttcgagtcgcattcccaatcccattcaaatcctcccaagccaccttctccagcagttgctaagaaactgaagaaagcaagtcctaaggatatcttggctatagatgatgacaccaaaagcatgataagcgtgcagtc

SEQ ID NO: 8528 - DNA, 929 bp, Glycine max
  Clone ID: 700757783_FLI
ccttgcttatgagtacttgtctaatggctccttggataaatggatattcaagaaaaacaaaggtgagtttctgttggattgggatactaggttcaatatagctctgggaacagcaaaaggacttgcttaccttcatgaagattgcgactctaagattgttcattgtgacatcaagccggaaaacgtgcttctggatgaccacttcatggccaaggtttcggatttcggactggctaagctcatgaaccgagaacaaagccatgttttcacaacactgaggggcaccaggggctatcttgcaccggagtggataacaaactatgctatatcagagaaaagtgatgtctatagctatggcatggtgctactagagatcattgggggaaggaaaaactatgatcctagagagagttcagagaaatcccatttcccaacttatgcatttaagatgatggaagaagggaagctgagagatatttttgactcggagttggaaattgatgagaatgatgataggtttcaatgtgctatcaaagttgcattgtggtgcattcaggaagacatgtcaatgaggccatctatgaccagggttgtccaaatgttggagggtatttgtattgttcctaagccaccaactagttcttccttgggttctcgcctttatgccactatgttcaaatcctccagtgaagaaggggccacctcttctgctccctcagactgtaacagtgatgcttatctctccgcggttcgcctttcaggacctagataacgatacctgtctcttttgtgtgttgtattgttgagtaaattagtatgtaatacagcagagctactctggattgtgtggggttttcattcttccccccgctcttgtacattttgttcaagttcctcaaattttgtaatataaatagctattcataacc

SEQ ID NO: 8529 - DNA, 1908 bp, Glycine max
  Clone ID: 700757796_FLI
ccttcaaacttaattattaacacttccttagttcaatatggggaagcccttcactctctctctttcttccctttgcttgctactcttgtcgagtgcatgctttgctattagctccagcaagctcaacgagtgccaactcaacaacctcaacgcgttggaacccgaccaccgcgttgagtccgaaggtggtttgattcaaacatggaactctcaacaccctgagctgaaatgcgccggtgtcactgtttccaaactcaccctcaaccgcaatggcctccacttgccatcttactcaccttatccccggatgatcatcatcgcccaagggaaaggagcacttggagttgcaattccaggatgtcctgagacgtttgaggagccacaagaacaatcaaacagaagaggctcaaggtcgcagaagcagcagctacaggacagtcaccagaagattcgtcacttcaatgaaggagacgtactcgtgattcctcctggtgttccttactggacctataacactggcgatgaaccagttgttgccatcagtcttcttgacacctctaacttcaataaccagcttgatcaaacccctagggtattttaccttgctgggaacccagatatagagtacccagagaccatgcaacaacaacaacagcagaaaagtcatggtggacgcaagcaggggcaacaccagcaggaggaagaggaagaaggtggcagcgtgctcagtggcttcagcaaacacttcttggcacaatccttcaacaccaacgaggacatagctgagaaacttcagtctccagacgacgaaaggaagcagatcgtgacagtggaaggaggtctcagcgttatcagccccaagtggcaagaacaacaagatgaagatgaagatgaagacgaagatgatgaagatgaacaaattccctctcaccctcctcgccgaccaagccatggaaagcgtgaacaagacgaggacgaggacgaagatgaagataaacctcgtcctagtcgaccaagccaaggaaagcgtgaacaagaccaggaccaggacgaggacgaagatgaagatgaagatcaacctcgcaagagccgcgaatggagatcgaaaaagacacaacccagaagacctagacaagaagaaccacgtgaaagaggatgcgagacaagaaacggggttgaggaaaatatctgcaccttgaagcttcacgagaacattgctcgcccttcacgcgctgacttctacaaccctaaagctggtcgcattagtaccctcaacagcctcaccctcccagccctccgccaattccaactcagtgcccaatatgttgtcctctacaagaatggaatttactctccacattggaatctgaatgcaaacagtgtgatctatgtgactcgaggacaaggaaaggttagagttgtgaactgccaagggaatgcagtgttcgacggtgagcttaggaggggacaattgctggtggtaccacagaacttcgtggtggcggagcaagccggagaacaaggattcgaatacatagtattcaagacacaccacaacgcagtcactagctacttgaaggatgtgtttagggcaattccctcagaggttcttgcccattcttacaaccttcgacagagtcaagtgtctgagcttaagtatgaaggaaattggggtcctttggtcaaccctgagtctcaacaaggctcaccccgtgttaaagtcgcataaatgacaagcatgatggtgtgaggatgaggccatcttatgaaataataacaaataaataaattttgtatgataataaaaagtatggcccatgtaccatcccagcgagcctatgtttatatctgagtggcgttgtacctttcaatcgccttaataaaatgtcagtcttcacgttttgtctt

SEQ ID NO: 8530 - DNA, 1012 bp, Glycine max
  Clone ID: 700757806_FLI
atgaagatgaagacgaagatgatgaagatgaacaaattccctctcaccctcctcgccgaccaagccatggaaagcgtgaacaagacgaggacgaggacgaagatgaagataaacctcgtcctagtcgaccaagccaaggaaagcgtgaacaagaccaggaccaggacgaggacgaagatgaagatgaagatcaacctcgcaagagccgcgaatggagatcgaaaaagacacaacccagaagacctagacaagaagaaccacgtgaaagaggatgcgagacaagaaacggggttgaggaaaatatctgcaccttgaagcttcacgagaacattgctcgcccttcacgcgctgacttctacaaccctaaagctggtcgcattagtaccctcaacagcctcaccctcccagccctccgccaattccaactcagtgcccaatatgttgtcctctacaagaatggaatttactctccacattggaatctgaatgcaaacagtgtgatctatgtgactcgaggacaaggaaaggttagagttgtgaactgccaagggaatgcagtgttcgacggtgagcttaggaggggacaattgctggtggtaccacagaacttcgtggtggcggagcaagccggagaacaaggattcgaatacatagtattcaagacacaccacaacgcagtcactagctacttgaaggatgtgtttagggcaattccctcagaggttcttgcccattcttacaaccttcgacagagtcaagtgtctgagcttaagtatgaaggaaattggggtcctttggtcaaccctgagtctcaacaaggctcaccccgtgttaaagtcgcataaatgacaagcatgatggtgtgaggatgaggccatcttatgaaataataacaaataaataaattttgtatgataataaaaagtatggcccatgtaccatcccagcgagcctatgtttatatctgagtggcgttgtacctttcaatcgccttaataaaatgtcagtcttc

SEQ ID NO: 8531 - DNA, 1689 bp, Glycine max
  Clone ID: 700757865_FLI
ttctctccatttgtccttgaatataatactcagcatggctaagcttgttctttccctttgttttctgcttttcagtggctgctgcttcgctttcagtttcagagagcagccacagcaaaacgagtgccagatccaacgcctcaatgccctcaaaccggataaccgtatagagtcagaaggtggcttcattgagacatggaaccctaacaacaagccattccagtgtgccggtgttgccctctctcgctgcaccctcaaccgcaacgcccttcgcagaccttcctacaccaacgctccccaggagatctacatccaacaaggtagtggtatttttggcatgatattcccgggttgtcctagcacatttgaagagcctcaacaaaaaggacaaagcagcaggccccaagaccgtcaccagaagatctatcacttcagagagggtgatttgattgcagtgccaaccggttttgcatactggatgtacaacaatgaagacactcctgttgttgccgtttctcttattgacaccaacagcttccagaaccagctcgaccagatgcctaggagattctatcttgctgggaaccaagagcaagagtttctacagtatcagccacagaagcagcaaggaggtactcaaagccagaaaggaaagcgtcagcaagaagaagaaaacgaaggaggcagcatattgagtggcttcgccccggaattcttggaacatgcgttcgtcgtggacaggcagatagtgagaaagctacaaggtgagaacgaagaggaagagaagggtgccattgtgacagtgaaaggaggtctcagcgtgataagcccacccacggaagagcagcaacaaagacccgaggaagaggagaagccagattgtgacgagaaagacaaacattgccaaagccaaagcagaaatggcattgacgagaccatttgcacaatgagacttcgccacaacattggccagacttcatcacctgacatcttcaaccctcaagctggtagcatcacaaccgctaccagcctcgacttcccagccctctcgtggctcaaactcagtgcccagtttggatcactccgcaagaatgctatgttcgtgccacactacaacctgaacgcaaacagcataatatacgcattgaatggacgggcattggtacaagtggtgaattgcaatggtgagagagtgtttgatggagagctgcaagagggacaggtgttaattgtgccacaaaactttgcggtggctgcaagatcacagagcgacaacttcgagtatgtttcattcaagaccaatgatagaccctcgatcggcaaccttgcaggtgcaaactcattgttgaacgcattgccggaggaagtgattcagcaaacttttaacctaaggaggcagcaggccaggcaggtcaagaacaacaaccctttcagcttcctggttccacctaaggagtctcagaggagagttgtggcttagagccctttttgcatgtgctaccacactttcgtccttttgggcactagttagtgtgcgtagcaataaataagaacgaataaaacaacaaaggctttgctgccctttgttaagtataaaataacgggtaatgtaattgtacccttgtgtaatgagtcactcaagtacctatgcgggaaaatcataaattaaaagagaaattccaatgaatt

SEQ ID NO: 8532 - DNA, 432 bp, Glycine max
  Clone ID: 700757871_FLI
ttccgcacttccaaaggttgctcttcctgttgctgcctctgttgttgttctttaatgccaacaagttcaatgtttgcttctccttcattaatcactagtaccactatggcctttgaattgaagtgtggcagaaacctagtcaagtgcaggagcttgcgttccctgggtctgcaaaagatattgagaacctaataaagagccaaagtgagtcctactttgtggatgctcagcctcagcagaaagaggaggggaacaagggaagaaagggtcctttgtcttcaattttgagggctttttactgaataagtatgtagtactaaaatgtatgctgtaatagctcatagtgagcgaggaaagtatcgggctatttaactatgacttgagctccatctatgaataaataaatcagcatatgatgcttttgttttgtgt

SEQ ID NO: 8533 - DNA, 981 bp, Glycine max
  Clone ID: 700757904_FLI
ctgtgatgacaatagcatttgaatttgcatttgaaagccatatgcaagagcatgtaacatctatggcacgccaatatgttcggagcattatatcatcagtccaaagggtagcattagcactttctccttctcatttgagttcacatgcagggcttaggtcaccattgggtactcctgaagcacaaacccttgctcattggatctgcaacagttataggtttgtcaaatttactgtctttgcatactgaggttgaggatcatgcaatgcattttaccctgtgcgataggctgatagcattgttattcttgatttttataagagagccaaaattaatatgctctcattaaataaagaaactaacttaatgataggtttggtgagttgcatgcagagtgaaatttcctctttcctgattgtcagttcttgtcttctaaacaaatcccacctcctttatgtttgcatatttgcatagaataatcttaccagcgcagatgctgagttctttaagatgcatgggcagcatggcaccaagttttgaagtagtttattacttctaagtttctaactggctggcactggaagtgatgcaaatactcataaattgtaaaatcttgtgtcatcattcatcaaatactctgacaaggattaatcgagagacttcgatctaaaattcaagacctgcatatgaattagattgacatttttttcgtctttcatgaactcacagtactcacaaatttgtgaaccagaatttccctccctatttttatatttttttaaaatgctgttaataaaatccattgttgctttggttcaagctataatggagcatagggtttattttctaatgtagtgatcaattctgcctttttgggcttctcttctccttaaaaggaaaacttagcccaaacaatttcttaagctcttgaatatatatatatatatatatatatatatatatatatatatatatattagag

SEQ ID NO: 8534 - DNA, 1234 bp, Glycine max
  Clone ID: 700757965_FLI
caacaatgaagacactcctgttgttgccgtttctattattgacaccaacagcttggagaaccagctcgaccagatgcctaggagattctatcttgctgggaaccaagagcaagagtttctaaaatatcagcaagagcaaggaggtcatcaaagccagaaaggaaagcatcagcaagaagaagaaaacgaaggaggcagcatattgagtggcttcaccctggaattcttggaacatgcattcagcgtggacaagcagatagcgaaaaacctacaaggagagaacgaaggggaagacaagggagccattgtgacagtgaaaggaggtctgagcgtgataaaaccacccacggacgagcagcaacaaagaccccaggaagaggaagaagaagaagaggatgagaagccacagtgcaagggtaaagacaaacactgccaacgcccccgaggaagccaaagcaaaagcagaagaaatggcattgacgagaccatatgcaccatgagacttcgccacaacattggccagacttcatcacctgacatctacaaccctcaagccggtagcgtcacaaccgccaccagccttgacttcccagccctctcgtggctcagactcagtgctgagtttggatctctccgcaagaatgcaatgttcgtgccacactacaacctgaacgcgaacagcataatatacgcattgaatggacgggcattgatacaagtggtgaattgcaacggtgagagagtgtttgatggagagctgcaagagggacgggtgctgatcgtgccacaaaactttgtggtggctgcaagatcacagagtgacaacttcgagtatgtgtcattcaagaccaatgatacacccatgatcggcactcttgcaggggcaaactcattgttgaacgcattaccagaggaagtgattcagcacactttcaacctaaaaagccagcaggccaggcagataaagaacaacaaccctttcaagttcctggttccacctcaggagtctcagaagagagctgtggcttagagccctttttgtatgtgctaccccacttttgtctttttggcaatagtgctagcaaccaataaataataataataataatgaataagaaaacaaaggctttagcttgccttttgttcactgtaaaataataatgtaagtactctctataatgagtcacgaaacttttgcgggaataaaaggagaaattccaatgagttttctgtc

SEQ ID NO: 8535 - DNA, 1901 bp, Glycine max
  Clone ID: 700758126_FLI
cttaattattaacacttccttagttcaatatggggaagcccttcactctctctctttcttccctttgcttgctactcttgtcgagtgcatgctttgctattagctccagcaagctcaacgagtgccaactcaacaacctcaacgcgttggaacccgaccaccgcgttgagtccgaaggtggtttgattcaaacatggaactctcaacaccctgagctgaaatgcgccggtgtcactgtttccaaactcaccctcaaccgcaatggcctccacttgccatcttactcaccttatccccggatgatcatcatcgcccaagggaaaggagcacttggagttgcaattccaggatgtcctgagacgtttgaggagccacaagaacaatcaaacagaagaggctcaaggtcgcagaagcagcagctacaggacagtcaccagaagattcgtcacttcaatgaaggagacgtactcgtgattcctcctggtgttccttactggacctataacactggcgatgaaccagttgttgccatcagtcttcttgacacctctaacttcaataaccagcttgatcaaacccctagggtattttaccttgctgggaacccagatatagagtacccagagaccatgcaacaacaacaacagcagaaaagtcatggtggacgcaagcaggggcaacaccagcaggaggaagaggaagaaggtggcagcgtgctcagtggcttcagcaaacacttcttggcacaatccttcaacaccaacgaggacatagctgagaaacttcagtctccagacgacgaaaggaagcagatcgtgacagtggaaggaggtctcagcgttatcagccccaagtggcaagaacaacaagatgaagatgaagatgaagacgaagatgatgaagatgaacaaattccctctcaccctcctcgccgaccaagccatggaaagcgtgaacaagacgaggacgaggacgaagatgaagataaacctcgtcctagtcgaccaagccaaggaaagcgtgaacaagaccaggaccaggacgaggacgaagatgaagatgaagatcaacctcgcaagagccgcgaatggagatcgaaaaagacacaacccagaagacctagacaagaagaaccacgtgaaagaggatgcgagacaagaaacggggttgaggaaaatatctgcaccttgaagcttcacgagaacattgctcgcccttcacgcgctgacttctacaaccctaaagctggtcgcattagtaccctcaacagcctcaccctcccagccctccgccaattccaactcagtgcccaatatgttgtcctctacaagaatggaatttactctccacattggaatctgaatgcaaacagtgtgatctatgtgactcgaggacaaggaaaggttagagttgtgaactgccaagggaatgcagtgttcgacggtgagcttaggaggggacaattgctggtggtaccacagaacttcgtggtggcggagcaagccggagaacaaggattcgaatacatagtattcaagacacaccacaacgcagtcactagctacttgaaggatgtgtttagggcaattccctcagaggttcttgcccattcttacaaccttcgacagagtcaagtgtctgagcttaagtatgaaggaaattggggtcctttggtcaaccctgagtctcaacaaggctcaccccgtgttaaagtcgcataaatgacaagcatgatggtgtgaggatgaggccatcttatgaaataataacaaataaataaattttgtatgataataaaaagtatggcccatgtaccatcccagcgagcctatgtttatatctgagtggcgttgtacctttcaatcgccttaataaaatgtcagtcttcacgttttgttttt

SEQ ID NO: 8536 - DNA, 1694 bp, Glycine max
  Clone ID: 700758127_FLI
ctccattgtctttgaacactcatcaccatggccaagcttgttctttccctttgtttccttcttttcagtggctgcttcgctctgagagagcaggcacagcaaaatgagtgccagatccaaaagctgaatgccctcaaaccggataaccgtatagagtcggaaggtgggttcattgagacctggaaccctaacaacaagccattccagtgtgccggtgttgccctctctcgctgcacccttaaccgcaatgcccttcgtagaccttcctacaccaacggtccccaggaaatctacatacaacaaggtaatggtatttttggcatgatattcccgggttgtcctagcacttatcaagagccgcaagaatctcagcaacgaggacgaagccagaggccccaagaccgtcaccaaaaggtacatcgcttcagagagggtgatttgatcgcagtgcctactggtgttgcatggtggatgtacaacaatgaagacactcctgttgttgccgtttctattattgacaccaacagcttggagaaccagctcgaccagatgcctaggagattctatcttgctgggaaccaagagcaagagtttctaaaatatcagcagcagcagcaaggaggttcccaaagccagaaaggaaagcaacaagaagaagaaaacgaaggaagcaacatattgagtggcttcgcccctgaattcttgaaagaagcgttcggcgtgaacatgcagatagtgagaaacctacaaggtgagaacgaagaggaggatagtggagccattgtgacagtgaaaggaggtctaagagtcacagctccagccatgaggaagccacagcaagaagaagatgatgatgatgaggaagagcagccacagtgcgtggagacagacaaaggttgccaacgccaaagcaaaaggagcagaaatggcattgatgagaccatttgcacaatgagacttcgccaaaacattggtcagaattcatcacctgacatctacaaccctcaagctggtagcatcacaaccgccaccagccttgacttcccagccctctggcttctcaaactcagtgcccagtatggatcactccgcaagaatgctatgttcgtgccacactacaccctgaacgcgaacagcataatatacgcattgaatgggcgggcattggtacaagtggtgaattgcaatggtgagagagtgtttgatggagagctgcaagagggaggggtgctgatcgttccacaaaactttgcggtggctgcaaaatcccagagcgataactttgagtatgtgtcattcaagaccaatgatagaccctcgatcggaaaccttgcaggggcaaactcattgttgaacgcattgccagaggaagtgattcagcacacttttaacctaaagagccagcaggccaggcaggtgaagaacaacaaccctttcagcttcctggttccacctcaggagtctcagaggagagctgtggcttagagagccctttttgcatgtgctaccacacttttgtccttttgggctctagctagtgctggtagcagtaaataagaatgaataaaagaaacaaaggcttagatgccctttgttaagtgtagaataacgggtatagtaactatgtacccttgtgtaatgagtcactcaagtacctatgcgggaaaagcataaataaaagaagaaattccaat

SEQ ID NO: 8537 - DNA, 1694 bp, Glycine max; identical to SEQ ID NO: 8536
  Clone ID: 700758170_FLI

SEQ ID NO: 8538 - DNA, 1357 bp, Glycine max
  Clone ID: 700758287_FLI
acttgaagtgctttctctcagcagatccacaagctttgtcaacagtttgtgctgaattgagtgaggcatgcaagaagcatggcttcttccttgttgtcaaccatggagttgatagcaagctcatagctcaagctcataagctcatagatgatttcttctgcatgcaactctcacagaagcagaaggctcagagaaagattggagaacattgtggctatgctaatagcttcattggaagattctcctccaaacttccttggaaggaaacactttctttccattattctgcagataaatccagaaaaactgtggaggattatttccttaatgtcatgggggaagatttcaagcaatttgggagtgtgttccaagaatactgtgaagccatgagcaaactctctcttgggataatggagcttctggggatgagcctaggagttggcagggaatgtttcagagatttcttcgaaggaaatgagtcggttatgaggttgaattactacccaccatgccaaaaacctgagttagctttaggaactggacctcattgtgaccctacatccctaaccattctccaccaagatcaagtcgagggcctccaagtctttgttgatggaagatggtactctgtcgctcctaaagaagatgctttcgttgtcaatattggcgacacatttatggctctatcgaatgggatgttcaagagttgcttgcatagagcagttgtaaacaacaaaattgtgagaaaatcacttgctttcttcctatgtccaaatagagacaaagtggtcacccctccaaaagatctaatcagctacgaaaattcaagaacatacccagatttcacatggccaagccttcttgaatttacacagaaacactacagatctgacacaaaaacacttgatgctttctcgagatggctactagaaaaaaacaatccgaacaggggtgcccccacaaatgttccatggccaacaaaatctataaactgagctttaacttgcatctgcttgaatgaggaagatatgacatcatataaagtgaaaaagagggtgcttttggtgggtcgacttgtgaagaaaaagataacagaaacatcaaaaagggaagggctaatcatcagtaattagttgtggtgttagtgttgggagaatcctatatggtgcaaatggaagaagaactgaggccatattctttggaataaagagagttgatttgtgtagtgaagttattcgatgttgtcactacttatgcattattagttgtcttgaactatgttgtagttatgtgatatgcatgtatgtagaacttttaattaattaataataaactgcattgcattttctgtcatcag

SEQ ID NO: 8539 - DNA, 1209 bp, Glycine max
  Clone ID: 700758447_FLI
agacactcctgttgttgccgtttctattattgacaccaacagcttggagaaccagctcgaccagatgcctaggagattctatcttgctgggaaccaagagcaagagtttctaaaatatcagcagcagcagcaaggaggttcccaaagccagaaaggaaagcaacaagaagaagaaaacgaaggaagcaacatattgagtggcttcgcccctgaattcttgaaagaagcgttcggcgtgaacatgcagatagtgagaaacctacaaggtgagaacgaagaggaggatagtggagccattgtgacagtgaaaggaggtctaagagtcacagctccagccatgaggaagccacagcaagaagaagatgatgatgatgaggaagagcagccacagtgcgtggagacagacaaaggttgccaacgccaaagcaaaaggagcagaaatggcattgatgagaccatttgcacaatgagacttcgccaaaacattggtcagaattcatcacctgacatctacaaccctcaagctggtagcatcacaaccgccaccagccttgacttcccagccctctggcttctcaaactcagtgcccagtatggatcactccgcaagaatgctatgttcgtgccacactacaccctgaacgcgaacagcataatatacgcattgaatgggcgggcattggtacaagtggtgaattgcaatggtgagagagtgtttgatggagagctgcaagagggaggggtgctgatcgttccacaaaactttgcggtggctgcaaaatcccagagcgataactttgagtatgtgtcattcaagaccaatgatagaccctcgatcggaaaccttgcaggggcaaactcattgttgaacgcattgccagaggaagtgattcagcacacttttaacctaaagagccagcaggccaggcaggtgaagaacaacaaccctttcagcttcctggttccacctcaggagtctcagaggagagctgtggcttagagagccctttttgcatgtgctaccacacttttgtccttttgggctctagctagtgctggtagcagtaaataagaatgaataaaagaaacaaaggcttagatgccctttgttaagtgtagaataacgggtatagtaactatgtacccttgtgtaatgagtcactcaagtacctatgcgggaaaagcataaataaaagaagaaattccaat

SEQ ID NO: 8540 - DNA, 733 bp, Glycine max
  Clone ID: 700758467_FLI
gaaaagagttggcttcaaagactcaatctcatgcttacctttaccaacatcacccagagatctatgagtactattcactacaactcacatgcaacgaagatagcactggtgatcgatggcagagggcatcttcaaatatcatgtccacacatgtcatcaaggtcgtcacactcgaagcatgataagagtagcccttcataccatagaatcagttccgatttgaagcctggaatggtgtttgttgtccctcccggtcatcccttcgtcaccatagcttccaataaagagaatctcctcatgatttgcttcgaggttaacgctcgagacaacaagaagtttacatttgcagggaaggacaacattgtgagttctctggacaacgttgctaaggagcttgcctttaactatccttctgagatggtgaacggagtattcgaccgaaaggagagtttctttttcccttttgagttgccgagagaggagcgtggtcgtcgcgctgatgcgtgagaggtttagaacaatcaagaaaaggtgtgcatgtggctgaagatcacggggaatgtattaagcttcagagactctttaaattaaattttctgtattttgtgttatatgttactagttctttaaattagccagatggagtttatgtgtatctaaatgcagggatgctaatggaataaaatggccacttgtattgttagctatctcttatggtagcagaataagacgt

SEQ ID NO: 8541 - DNA, 1155 bp, Glycine max
  Clone ID: 700758505_FLI
cgacagcagcttttccatcacacatggctccccaagctccaacaggacagctgtcacagggcaccaacttcccccatcatggaggatctactgctcacactgctccgcatttgtcttcttattctccaactcatcaagcatcacagtttaacagccagagctttattggacaacaagggaatgcagccccctatagctcaccaattaccaatcaatcatttgcttctaatgcttcacaatccaattctttagtttctcaaccatccaaggacaagtttgagactaaatcaacagtttgggcagatacactaagcaggggattggttaatttgaatatatctggacctaaaacaaatccattagcagatattggggttgactttgaagccattaataggaaggaaaagagaatggagaagcccactaccacagctgtaacatcaactgtaactatgggtaaagctatgggatcgggttcaggtatgggtcggtctggtgctggttctctaaggcctcctcaaaacccaatgatgggttctggcatgggcaatggtcctggtgttggtatgggtatgggaggctatggaggaggcatgaatgcatcaatgggtatgggaatgggggggatggggggaatgggtatgggacaaggataccagatgcaacccccaactggattgcctcccggctccaacatgccaggtaattataataactccatgatgggttcaggtagttatggtcagcagccatatggtagttatggtcagcaaccatatggcggctaccgatgagatagaacattatgcctagatagcaaggtgaagtacattactgattgttttgctacaagttgagaaagagaaatgccaatacagtgctactagtagtagtctgtattttgaatttatagcggtgtatcattaaagctgcagtttgctgtaaagtgacccagtgtgatgtatgtgtatttcttgttataaatatgctgttaccattctttttgggtcaccctttctgtaggtgctttgagcatcaatgttgtgtaccagtgactggatataataaccttgcttgggttattgctttctttgcttgttcctcatttttttaacaccaacaggtggtttgatattaatataatttttccattgt

SEQ ID NO: 8542 - DNA, 1255 bp, Glycine max
  Clone ID: 700758634_FLI
catctgtatcagaacctagaaatgctcaactcgaagcaccggaactctcacaggctgataagaaatatcaaccatcatcccaggccattgacaaacctgcagatgatggctacaactggcgtaagtatgggcagaagcaggttaagggtagtgagtatccacgaagctattacaagtgcacacatctgaattgtgttgtgaagaaaaaagttgagcgtgcccctgatggtcacataactgaaattatctataaaggccagcataaccatgaaaagcctcaggcaaataggcgtgccaaagataatagtgattcaaatggaaatgtaactgttcagcccaaatctgagtcaaactcacaaggttgggttggacaattaaacaagtttagtgaaaaaattcctgattcttcagttgctaaaagtgaccagacctccaatcaaggggctcctcctaggcaactactacctgggtcaagtgagagtgaggaagtgggtgatgtagataatagggaagaggcagatgatggcgagccaaaccctaagagaaggaatactgatgttggggtttctgaagtacctctgtctcagaagactgtcacagaacccaaaatcatcgtgcaaacaagaagtgaagttgatcttttggatgatggctacaggtggcgaaaatatggtcagaaagtggtaaagggaaaccctcatccaaggagttattacaaatgcactagtgcaggatgcaacgtgcgcaagcatgttgagagagcttcaatggaccccaaagctgtcataaccacgtatgagggtaaacataatcatgatgtgcctgctgctagaaacagcagccacaacacagctagtagcaattcaatgccattaaaaccacataatgtggtgccggagaaacatcctttgctcaaggatatggattttggaagtactgaccaaagacctgtacatttgcgtttgaaagaagagcaaatcatagtataaaagtctggtgccaagctcacttattccacgtcctagtacagaatgaagttgtctagaagatgaaatggataatataatatgaaggtgtagtcactagtcatagttggcaatgtctattgttttctagtttcttttgtatgtaacaccttctttttgtacatctaaattatggaattggttgtataagatgttgtttacaggtatgaatatcatttcaactaatgtacgaacattattatataatataatttataaatactccttgt

SEQ ID NO: 8543 - DNA, 1090 bp, Glycine max
  Clone ID: 700758807_FLI
caccgatcgaaaagtttccttgacaatctaattctgcaaaaatggcaagcaataaggagtctaagttcccagcacagagccagaaaactcagccaggaaaagaacatgtaatgaatccactcccacaagccacaaatcctgatcacaaggccgccaataaactccagggaaaggtggcgttggtgacaggaggtgactcaggaattggcagagcggtttgcctgtgtttcgcaaaagagggtgcaaccgtggcctttacatacgtaaagggccatgaggacagggataaagatgatactctgaagatgctgcttgaagctaagacaagtggtgcagacaatccattggcaatagcagcggatattggctttgatgagaactgcaaacaggtcattgaccttgttgtcaaagaatatggccgccttgatgttctggtcaacaatgcagctgagcagcatttgacaaactctgttgaggaaatcacacaacagcagcttgagagagtcttcggaaccaacatcttttctcagttctttttggtcaagcatgctctgaagcacatgaaagaagggagctgcatcataaactctacttcagttaatgcatacaatgggaatccagaagcgttggactacactgctaccaagggagcaattgtggccttcaccagaggtctttctcagcagctagcgagtaggggaattagggtgaatggtgtggcacctggcccagtttggacgccaatacaaccagcttcaaagcctgctgagatgattcagaacttggggtgtgaggtgccaatgaaccgcgtggctcagccttgtgagattgcaccatgttatttgttcttggcaacttgtcaggactcttcctactttactggccaagtcctccatccaaatggtgggatggtcgtcaacgcttaagctatagtgtgccttcacctatttcctattgaactggtttttctagcttacccctcctgaataagcagtgttacgttcggatgcatattttacgttgaaatacattgtgtttgtagcatatatgccttgagatgaataaacctttacgtgagttatttatcttc

SEQ ID NO: 8544 - DNA, 781 bp, Glycine max
  Clone ID: 700758982_FLI
accatctttatgtagcaaatgttggagattctaggactataatatcaaaagctggtaaagcaaatgctctctctgaggatcataaaccaaatagaagtgatgagcggaagagaatcgagaatgctggtggtgttgtcatgtgggcaggtacttggagggttggaggggtgctagcaatgtctcgtgcctttggtaaccgtatgctgaagcagtttgtagtagcagaacctgagatccaggaccaggagatagatgaacaaattgaactgattattcttgcaagtgatggactctgggatgtagtacagaatgatgatgctgtttctcttgcccgcacggaagaggagcctgaggcagctgcacgaaagttaacagaagcagcattttctcgtgggagtgcagataacattacatgcattgtggtgcaattccaccatgagaaagcagaactagctaatcctgacaaagcagaagcagctagtgctcagcatgagtagatgatgtgaaagcacaaaatgcatgtgttggttatattcgcgtcaaattgaatgaattgaggtcagcatatgcatgatggctcactctgcatgtcaaggcaatttgtttattcattagttttcttatgtaagtcactcttgttcttgtattgggatttttgcatcgtgttcttctgatgatttcagcgtgtgtccgtatatatttaaagttttcctgtttgtagagaaatcaagttggtatttttgttctgatctaataaatgcaatatgcatttttttttatc

SEQ ID NO: 8545 - DNA, 991 bp, Glycine max
  Clone ID: 700759006_FLI
aacaattccttcacttgcagcactgttgcatcatcatcttcattgcaaaaccctaaacttcaccttcaaccatgaccacacaagtaccaccacacagtgtccaagtccacacaacaacacaccgctacgaagctggcgtcgtcccccccggagcccgtttcgaaccgccgcgttatgaagccggcgtcaaagcgccctccatttaccattccgagagaggtccaacgacttcccaggtcctcgccgtcctcgccggcctcccggtcggtggcatcctgctcctcctggcgggattgaccctggcaggaaccctcaccggactggcagttgccacgccgctcttcgtcctcttcagcccggtgctggttccagccacggtcgccatcggcctggccgtggccgggttcctgacgtcgggggccttcgggctcacggcgctgtcttccttctcctggatcctgaactacatccgggagacccagccagcctcggagaacctcgccgccgccgcgaagcatcacctcgccgaggcggcggagtacgtggggcagaagacgaaggaagtggggcagaagaccaaggaggttgggcaggatattcagagcaaggcacaggatacaagggaggcagctgcaagggatgcaagggaggcagctgcaagggatgcaagggaagctgctgcaagggatgcaaaggtggaggcaagggatgtaaagagaacaacagtgacagcaacaaccgcaaccgcatgatgagtaattctgatattagagggagcattaatgtgttgttgtgatgtggtttatatggggaaattaaataaatgatgtatgtacctcttgcctatgtaggtttgtgtgttttgttttgttgtctagctttggttattaagtagtagggacgttcgttcgtgtctcaaaaaaaggggtactaccactctgtagtgtatatggatgctggaaatcaatgtgttttgtatttgttcacttcc

SEQ ID NO: 8546 - DNA, 766 bp, Glycine max
  Clone ID: 700759039_FLI
tgcaggctgtatatttgctgaacttcttcttcgtcgaccttttttgcagggtacaagtgacattgatcaattaggaaagattttttcagcatttggcactccaacggcttctcagtggcctgatatggtatacctgcctgattatgtcgaataccaatatgttcctgccccccctctgcgttctttatttccgatggtaactgatgatgctttagatctgttgtcaaagatgtttacatatgatccaaaagctagaatttcagtgcagcaggcactagagcataggtacttttcttctgctcctctgccttcggatccagacaagctccctagacctgctcccaagagggaatctaggacttctgatttcaatttacaggagggtcctactgtattatcacctccaaggaagtctaggagagtgatgccaggacgtgatgggtttgaaggaagttctctgcaagcagataaggttgatgccagttttggtgatttcaactgatgataatacagtgctgacagatcatatttgaaacgaaaattagatctagaatttcaacagccagaatgaatattctgtggccgacacattcatacaaacttatggagggcaaaatacatttgaagaaaagtggtgaatcctcaaaggcttgctagtatgtcattctctatccctgtttctcagtgtgaagctacaacaaatatgtaactgaagaagtcactgaagattagttgcagttcagataccttaaagtaacttctatag

SEQ ID NO: 8547 - DNA, 1090 bp, Glycine max
  Clone ID: 700759066_FLI
aaaaccaaaacagtaaagctaacttcaacacctttaattttctaaaagtaattcagcggctgaataccaagcggagaagatgagtcaggagcagccacggcgtcccaaaggccaaaaccccatcaaatacggcgacgtttttgtcgtctccggcgaccttgcacagaagcccgtcgcaccggaagatgctgccatgatgcaaagcgcggaaactcgagtgctcggacaaacccaacccggcggagcagcttccgtcatgcaatctgccgccaccaggaatgaacaggctggccttgtcggtcaccgggacgtcaccgacgttaccggcgaccgtggcgtcacagtcacagaaactaaagtccctggaagacgcattataaccgaggctgttggtggccaggttgtggagcagtatgtggaggcaactccggttgaggcagggcgaagcagtgcaattaaggagaatgccataacaataggagaggcattggaggcgacggcacagactgtgggtcagaaagcggtggatcagagtgacgcctccgcgattcaggcggcggaggtgagagcaacgggaagtaacgttataacgccgggtggacttgcggctatggctcaatcagctgctgcttataatgctgactgcaagcttgaccaggacaaggtcaagctcgccgacattttggccggagccacagccaagttgcccgcggacaaggccgccacactgcaagatgctgaaggtgtagcgtgtgctgaggtgaggaacaaccctgatgccaccgccactcccggtggcgtagccgcttctgttgcggctgctgctaggctcaatgaaaatgttaagtaacgagtcatgttatgtgtcttgataatcatacttttgtttcatgatgtgtggtgttgatgtgttatagtctatagtgtattaataagtgtaagtggtgcaacatcttgtttttctttcttgtactctttgtgagttatattaattactggttttaaggactctacttaaggtgatgtatgtatactatgcgctatatgcatttctgtggttatcagttaataatatgtgctccaatcttgt

SEQ ID NO: 8548 - DNA, 998 bp, Glycine max
  Clone ID: 700759079_FLI
cattcagcgtggacaagcagatagcgaaaaacctacaaggagagaacgaaggggaagacaagggagccattgtgacagtgaaaggaggtctgagcgtgataaaaccacccacggacgagcagcaacaaagaccccaggaagaggaagaagaagaagaggatgagaagccacagtgcaagggtaaagacaaacactgccaacgcccccgaggaagccaaagcaaaagcagaagaaatggcattgacgagaccatatgcaccatgagacttcgccacaacattggccagacttcatcacctgacatctacaaccctcaagccggtagcgtcacaaccgccaccagccttgacttcccagccctctcgtggctcagactcagtgctgagtttggatctctccgcaagaatgcaatgttcgtgccacactacaacctgaacgcgaacagcataatatacgcattgaatggacgggcattgatacaagtggtgaattgcaacggtgagagagtgtttgatggagagctgcaagagggacgggtgctgatcgtgccacaaaactttgtggtggctgcaagatcacagagtgacaacttcgagtatgtgtcattcaagaccaatgatacacccatgatcggcactcttgcaggggcaaactcattgttgaacgcattaccagaggaagtgattcagcacactttcaacctaaaaagccagcaggccaggcagataaagaacaacaaccctttcaagttcctggttccacctcaggagtctcagaagagagctgtggcttagagccctttttgtatgtgctaccccacttttgtctttttggcaatagtgctagcaaccaataaataataataataataatgaataagaaaacaaaggctttagcttgccttttgttcactgtaaaataataatgtaagtactctctataatgagtcacgaaacttttgcgggaataaaaggagaaattccaatgagttttctgtc

SEQ ID NO: 8549 - DNA, 1477 bp, Glycine max
  Clone ID: 700759156_FLI
caaaccttgctctatactacacagtacacacactagaagaataatggcttccatcctccactactttttagccctctctctttcttgctcttttcttttcttcttatccgactcagtcacccctacaaaaccaataaaccttgttgttctacccgttcaaaatgatggttccacagggctccattgggccaacctccaaaaaagaacccctctaatgcaagtaccagtcctggtggacctcaatggaaatcacttgtgggttaactgtgagcagcagtactcatccaaaacgtaccaagcacccttctgccactccacccaatgctctagagccaacacccaccaatgcctcagttgccccgcggcatcaaggccagggtgccacaaaaacacgtgtggcctcatgtccactaatcccatcacccaacaaaccggtttaggtgaactaggagaagacgttcttgcaatccacgccacacaagggtcgacccaacaacttggcccattggtcacagtcccacaattcctcttttcttgtgcaccttccttccttgttcaaaagggtcttcctagaaacactcaaggtgtggctgggttaggccatgcaccaatttctcttccaaaccaactcgcttcccactttggcctacaacgccaattcaccacttgcctttctcgctaccctacttcaaagggtgctataatattcggggatgcacctaacaacatgcgacagtttcaaaaccaagatattttccacgatttggccttcaccccattaaccatcaccctgcagggagagtacaacgtgagagtcaactcaataagaatcaaccagcacagtgtgttcccactgaacaagatatcatccaccatcgtagggtcgacctctggaggaaccatgattagcacctcaactcctcacatggttctccagcaatccgtgtaccaggctttcactcaggtgtttgctcagcagctaccaaagcaagcacaggtgaaatctgtggcaccatttgggttatgcttcaactccaacaagatcaatgcatatcctagcgtggaccttgtgatggacaagcccaatggtcctgtttggagaatctctggtgaggacttgatggtgcaggcacaacctggggtcacgtgtttgggtgttatgaatggaggaatgcaacctagagctgaaattaccttaggggcacgtcagttggaagagaacctggtggtgttcgatcttgcaaggtcaagggttgggtttagcacctcatcactgcactcgcatggagtcaaatgtgctgacctcttcaactttgccaatgcatgatgagccaagatcgcgagactttttataatatgcttatttataattaagcaagcatctactacatgttatggttaataaaagtaataatgtaagaataaagactttgaactaaataataatatgaacgattctctttcgttgttcaatgag

SEQ ID NO: 8550 - DNA, 867 bp, Glycine max
  Clone ID: 700759318_FLI
ctccagcttcgttcgccaactcaacacctatggtttcagaaaggtggatccggatcggtgggagttcgcgaacgagtggttcctgcgaggacaaaagcacttattgaggaacatcgtgcggaagaagcacggtggagctgggaggaccaattccaattcgcattattcgcatcccttgaagctggaggagttggacgacgaggctatggtgatggagatagcgaggttgaaggaggagcaaaaagcgttggaggaagagcttcatgaaatgaacaagaggttagagacaacagaaaaacgaccacaacaaatgatggcttttctgtgtaaggttgtcgaggacccgcagattctttctcggattctccgagaaagagaaaagaaacacctgggagagaaaaagcgacgcctcattccgcctccgccgccgacggcagcgacgtcgtcgtcgtcgtcctccggcatcaagacagagttcgaagaagacgaaggtaattataatatcaagtcttcgtcgccggagacagggttggaaatcgacaacaatagtaacaatatttgttcgccgccgccgctggggtgttggggtgaacagggttgttatgggtacaattgcgcctccgtgccggcacctttgacggtggtagcgccggcgtttccgacgatgggaggagggtatttgaggcgtggggggttttggggggaaatgacggcggaggggaatgcggtgccgccttatccgttttcgttgttggaagggggcttttagatttagttttaggttatgaaatgaatgaattattactgccacaaaatttcatcttggattttctgtcgtattgaaagttctatccttttttgtgcgtt

SEQ ID NO: 8551 - DNA, 1691 bp, Glycine max; identical to SEQ ID NO: 8083
  Clone ID: 700759479_FLI

SEQ ID NO: 8552 - DNA, 959 bp, Glycine max
  Clone ID: 700759544_FLI
tggagatgtatcagatctggagcaggagaatagcgttgggagcgttcgcgtttgttctgcttttcctatcggcctcagcagacgacgtcgttgtgctctctgaagataacttcgagaaggaagttggtcaggacagaggagctctcgttgagttctatgctccttggtgtggacactgcaaaaagcttgctccagaatatgaaaagcttggtagcagcttcaagaaagccaaatctgttttaatcggcaaggttgactgtgatgagcacaagagtttgtgcagcaaatatggagtctctgggtacccaacaattcagtggtttccaaaaggatctcttgaacccaaaaagtatgaagggccacgcactgctgattcacttgctgagtttgtaaatacggaaggaggaacaaatgtgaagattgctacagctccttccaatgtagtggtgcttacatctgaaaattttaatgaggttgtcttagatgaaaccaaagatgtcttggttgagttttatgcaccctggtgtggacattgcaaaagtcttgctcctacttacgagaaagttgccacagcatttaaattggaggaagatgtagtaattgcaaatctggatgctgataaatataaggatctggctgaaaagtatgatgtgagtggatttcctaccttgaagttcttcccaaagggcaacaaagctggtgaagagtacggaggtggaagagacttggatgactttgtggcttttatcaatgagaaatctggaacaagtcgagatgtaaaaggacaacttacttcccaagctggtatagtagaaagcttggatgtcttggttaaggagtttgtagctgccagcgatgaagagaagataatgaaggaggaggaggaggaagaggagagcaagaaagaagaagaagagaggaagaaaaaagaagaggaggaggaggaagaggagaaaaag

SEQ ID NO: 8553 - DNA, 774 bp, Glycine max
  Clone ID: 700759569_FLI
aattaatgttcgagctatctagatcggatccgatgtgaaacaataatttgtgaggtagacagacagaggcggcagcaaataagaatggcttcaaatcccaaacctttgacttttgaggaggtggctaatcacaacaacaaaaaggattgctggattattatcaatggaaaggtgtatgatatcacgccatttctggatgagcatcctggaggagatgaagttttggtaacgtcaacagggaaggatgccaccattgattttgaagatgtgggccacagtgattctgccatagaaatgatggaaaaatacttcgtcgggaaggttgacacttccactcttccagcgaaagttaaccatagtctgccacaacctacacaagcaggtggcgctggcaatcaatcttctggatttgttgtaaagatcttgcaattcctgttgccattcttgatattgggccttgcctttgccctgcagtactatggcaaaaagaagcatgctagcacctcatgaaatatgaagttgagctagagccgaagtttcattaggtttgttaattcattgcctacttcaatgcagtattaaagtggtaatagactttagtcaatgttgtgtgtctgtcatttaaactcgttaccccacccttcaccatgcaggcccttgatgcactgtggtgtctttgctcagtcatgctagctgttcatttagacaaatgaatgattttttttttatttaatctctcatgtttgaatattttgaaatggattttattaaatc

SEQ ID NO: 8554 - DNA, 1762 bp, Glycine max
  Clone ID: 700759584_FLI
aacactttccttagttcaatatggggaagcccttcttcactctctctctttcttccctttgcttgctactcttgtcgagtgcatgctttgctattacctccagcaagttcaacgagtgccaactcaacaacctcaacgcgttggaacccgaccaccgcgttgagtccgaaggtggtcttattgaaacatggaactctcaacaccctgagctgcaatgcgccggtgtcactgtttccaaacgcaccctcaaccgcaacggcctccacttgccatcttactcaccttatccccaaatgatcattgtcgttcaagggaagggagcaattggatttgcatttccgggatgtcctgagacgtttgagaagccacaacagcaatcaagcagaagaggctcaaggtcgcagcagcaactacaagacagtcaccagaagattcgtcacttcaatgaaggagacgtactagtgattcctcctggtgttccttactggacctataacactggcgatgaaccagttgttgccatcagtcttcttgacacctccaacttcaacaatcagcttgatcaaaaccccagagtattttaccttgctgggaacccagatatagagcacccagagaccatgcaacaacagcagcagcagaagagtcatggtggacgcaagcaggggcaacaccagcagcaggaggaagaaggtggcagtgtgctcagtggcttcagcaaacatttcttagcacaatccttcaacaccaacgaggacacagctgagaaacttcggtctccagatgacgaaaggaagcagatcgtgacagtggagggaggcctcagcgttatcagccccaagtggcaagaacaagaagacgaagacgaagatgaagacgaagaatatgaacaaactccctcttatcctccacgacgaccaagccatggaaagcatgaagatgacgaggacgaggacgaagaagaagatcaacctcgtcctgatcaccctccacagcgaccaagcaggcccgaacaacaagaaccacgtggaagaggatgtcagactagaaatggggttgaggaaaatatttgcaccatgaagcttcacgagaacattgctcgcccttcacgtgctgacttctacaacccaaaagctggtcgcattagcaccctcaacagtctcaccctcccagccctccgccaattcggactcagtgcccaatatgttgtcctctacaggaatggaatttactctccacattggaacttgaacgcgaacagtgtgatctatgtgactcgagggaaaggaagagttagagtggtgaactgccaagggaatgcagtgttcgacggtgagctaaggaggggacaattgctagtggtgccgcagaactttgtggtggctgagcaagggggagaacaaggattggaatacgtagtgttcaagacacaccacaacgccgtgagcagctacattaaggatgtgtttagggcaatcccttcggaggttctttccaattcttacaaccttggccagagtcaagtgcgtcagctcaagtatcaaggaaactccggccctttggtcaacccataaataacaacaagcatatatgaaggtgtggtgaggccatcttatatgaaataatatcaaaatatattttgtgtaataataaaactatggcctatgtatttaccaccctccgacccagcctatgttaatatctgagtggcgttgtacctttgaatcgccttaataaaatgtcagtcttcaagttttgtctt

SEQ ID NO: 8555 - DNA, 1011 bp, Glycine max
  Clone ID: 700759858_FLI
aagcctggtagatttgagagtttcttcctatctagcactgaagctcaacaatcctacttgcaaggattcagcaggaacattttagaggcctcctacgataccaaattcgaggagataaacaaggttctgtttagtagagaggaagggcagcagcaaggggagcagaggctgcaagagagcgtgattgtggaaatctcgaaggaacagattcgggcactgagcaaacgtgccaaatctagttcaaggaaaaccatttcttctgaagataaaccttttaacttgagaagccgcgaccccatctactccaacaagcttggcaagttctttgagatcaccccagagaaaaacccccagcttcgggacttggatatcttcctcagtattgtggatatgaacgagggagctcttcttctaccacacttcaattcaaaggcgatagtgatactggtaattaatgaaggagatgcaaacattgaacttgttggcctaaaagaacaacaacaggagcagcaacaggaagagcaacctttggaagtgcggaaatatagagccgaattgtctgaacaagatatatttgtaatcccagcaggttatccagttgtggtcaacgctacctcaaatctgaatttctttgctattggtattaatgccgagaacaaccagaggaacttcctcgcaggttcgcaagacaatgtgataagccagatacctagtcaagtgcaggagcttgcattccctgggtctgcacaagctgttgagaagctattaaagaaccaaagagaatcctactttgtggatgctcagcctaagaagaaagaggaggggaataagggaagaaagggtcctttgtcttcaattttgagggctttttactgaataagtatgtactaaaatgtatgctgtaatagctcatagtgagcgaggaaagtatcgggctatgtaactatgactagagcttcaactatgaataaataaatcgacagcatatgatgcttttgttttgtgtccttc

SEQ ID NO: 8556 - DNA, 1716 bp, Glycine max
  Clone ID: 700759978_FLI
ctccattggtccttaaacactcatcagtcatcaccatggccaagctagttttttccctttgttttctgcttttcagtggctgctgcttcgctttcagttccagagagcagcctcagcaaaacgagtgccagatccaaaaactcaatgccctcaaaccggataaccgtatagagtcagaaggagggctcattgagacatggaaccctaacaacaagccattccagtgtgccggtgttgccctctctcgctgcaccctcaaccgcaacgcccttcgtagaccttcctacaccaacggtccccaggaaatctacatccaacaaggtaagggtatttttggcatgatatacccgggttgtcctagcacatttgaagagcctcaacaacctcaacaaagaggacaaagcagcagaccacaagaccgtcaccagaagatctataacttcagagagggtgatttgatcgcagtgcctactggtgttgcatggtggatgtacaacaatgaagacactcctgttgttgccgtttctattattgacaccaacagcttggagaaccagctcgaccagatgcctaggagattctatcttgctgggaaccaagagcaagagtttctaaaatatcagcaagagcaaggaggtcatcaaagccagaaaggaaagcatcagcaagaagaagaaaacgaaggaggcagcatattgagtggcttcaccctggaattcttggaacatgcattcagcgtggacaagcagatagcgaaaaacctacaaggagagaacgaaggggaagacaagggagccattgtgacagtgaaaggaggtctgagcgtgataaaaccacccacggacgagcagcaacaaagaccccaggaagaggaagaagaagaagaggatgagaagccacagtgcaagggtaaagacaaacactgccaacgcccccgaggaagccaaagcaaaagcagaagaaatggcattgacgagaccatatgcaccatgagacttcgccacaacattggccagacttcatcacctgacatctacaaccctcaagccggtagcgtcacaaccgccaccagccttgacttcccagccctctcgtggctcagactcagtgctgagtttggatctctccgcaagaatgcaatgttcgtgccacactacaacctgaacgcgaacagcataatatacgcattgaatggacgggcattgatacaagtggtgaattgcaacggtgagagagtgtttgatggagagctgcaagagggacgggtgctgatcgtgccacaaaactttgtggtggctgcaagatcacagagtgacaacttcgagtatgtgtcattcaagaccaatgatacacccatgatcggcactcttgcaggggcaaactcattgttgaacgcattaccagaggaagtgattcagcacactttcaacctaaaaagccagcaggccaggcagataaagaacaacaaccctttcaagttcctggttccacctcaggagtctcagaagagagctgtggcttagagccctttttgtatgtgctaccccacttttgtctttttggcaatagtgctagcaaccaataaataataataataataatgaataagaaaacaaaggctttagcttgccttttgttcactgtaaaataataatgtaagtactctctataatgagtcacgaaacttttgcgggaataaaaggagaaattccaatg

SEQ ID NO: 8557 - DNA, 1413 bp, Glycine max
  Clone ID: 700760203_FLI
caaagagtggcttgcagagttagacattctcggtgaccttgtccatccaaatctggtcaaattggttggtttctgtattgaagatgaccaaagattattggtttatgaatgtatgccccgtggaagtttggagaaccacctcttcagaaaagggtcgttgcctcttccttggtctatcagaatgaaaattgcacttggtgctgcaaaaggtcttgcttttctccatgaagaagctcaaagacctgtaatctatcgtgattttaagacgtctaatattctattagatgcggaatacaatgccaagctctctgattttggactcgccaaagatggtcctgaaggggaaaagacacacatatctaccagagtcatgggaacatatggttatgctgctcctgagtatgtcatgactggacatttgacatcaaaaagtgatgtctatagttttggagtagtgctacttgaaatgctcactggccggcgatctatcgataagaatagaccaaacggggaacacaatcttgtggagtgggcaaggcctgtacttggggaccggaggatgttattacggataattgatcctcgccttgaaggtcacttctctgttaaagggtcacagaaggctgcgcagcttgctgctcaatgccttaaccgtgatccaaaatccagacctatgatgagtgaagttgttcaagctctgaagcctttgcaaaaccttaaagatatggctatctcatcttaccacttccaggttgcgcgagtagatcgtactatgtccatgcctaaaaatggtatgcaagcacagttagcatctttatcaaggaagggtcaaccagtgaggatcttgtcaagtccaaaaggtcctcatggttctccatatcatcactatatcaagtcaccgaaacctaatggataagaatcatgtttctctctttgatttgcttctctattcattcagttccctcacaacttaggctatcaacagaacagaaactgtttgtgttttgaaaattgctctgaaacatgaggaattactagagttttctgaccttatctcatctcaaataaggttggggggaccatgagacagttcactggattttaaagtttagcggggaccaagttgaccaaacttgaatagaaaactagaacacagttttcacatgtggaatttgttactgtggagttgctatactttttctaccatttcacaagctttcttcttcctttcagaatgtacttttgtaaagaaaatagttggtggtgttaactcatgttattcatagatatttttacatactcatctgtcaatgtacttttcaattaatacctgtcaatgtaattaaatgttgtacgagaaacatgctagagtttggaatttgagagacttcaaaagttctggatatttttact

SEQ ID NO: 8558 - DNA, 1466 bp, Glycine max
  Clone ID: 700760275_FLI
cttgctctatactacacagtacacacactagaagaataatggcttccatcctccactactttttagccctctctctttcttgctcttttcttttcttcttatccgactcagtcacccctacaaaaccaataaaccttgttgttctacccgttcaaaatgatggttccacagggctccattgggccaacctccaaaaaagaacccctctaatgcaagtaccagtcctggtggacctcaatggaaatcacttgtgggttaactgtgagcagcagtactcatccaaaacgtaccaagcacccttctgccactccacccaatgctctagagccaacacccaccaatgcctcagttgccccgcggcatcaaggccagggtgccacaaaaacacgtgtggcctcatgtccactaatcccatcacccaacaaaccggtttaggtgaactaggagaagacgttcttgcaatccacgccacacaagggtcgacccaacaacttggcccattggtcacagtcccacaattcctcttttcttgtgcaccttccttccttgttcaaaagggtcttcctagaaacactcaaggtgtggctgggttaggccatgcaccaatttctcttccaaaccaactcgcttcccactttggcctacaacgccaattcaccacttgcctttctcgctaccctacttcaaagggtgctataatattcggggatgcacctaacaacatgcgacagtttcaaaaccaagatattttccacgatttggccttcaccccattaaccatcaccctgcagggagagtacaacgtgagagtcaactcaataagaatcaaccagcacagtgtgttcccactgaacaagatatcatccaccatcgtagggtcgacctctggaggaaccatgattagcacctcaactcctcacatggttctccagcaatccgtgtaccaggctttcactcaggtgtttgctcagcagctaccaaagcaagcacaggtgaaatctgtggcaccatttgggttatgcttcaactccaacaagatcaatgcatatcctagcgtggaccttgtgatggacaagcccaatggtcctgtttggagaatctctggtgaggacttgatggtgcaggcacaacctggggtcacgtgtttgggtgttatgaatggaggaatgcaacctagagctgaaattaccttaggggcacgtcagttggaagagaacctggtggtgttcgatcttgcaaggtcaagggttgggtttagcacctcatcactgcactcgcatggagtcaaatgtgctgacctcttcaactttgccaatgcatgatgagccaagatcgcgagactttttataatatgcttatttataattaagcaagcatctactacatgttatggttaataaaagtaataatgtaagaataaagactttgaactaaataataatatgaacgattctctttcgttgttc

SEQ ID NO: 8559 - DNA, 1637 bp, Glycine max
  Clone ID: 700760426_FLI
aggagctagggtttatcgagggtttcgttccttcctctctgcaacaacaatggcgaaacctgggcgaggtcgtcgctctccctccggttccgtttccggctcctcctctcgctcctcttccccctccgactctcgttcctcctctcgctcgcgctccctttctcggtcccgttctccctcgcgctccagatcctcttccccctcctcctcctcttcctcccgaagctcccgcagccgcagccctcccccgcagaggcgccgaagtcctgctgacgcaactaggcgaggtcggtctcctccacctcagtctaagagagcttcacctcccccaaggaaaccttctcctgtacgcgagtcacttgttcttcatgtagaaaagctcagcagaaatgtcaatgaagggcacttgaaagaaattttcagtaactttggtgaggttataagtgtcgagttggcaatggatcgaactgtcaatcttccaaaagggtatggatatgtgcagttcaagacaagaggggatgctgaaaaggcattattgtacatggatggtgcccaaatagatggcaatgtcatcaaggcaagatttactctacctccaaggcagaaagtttcaccacccccaaaggcttctgctgttgctccaaagagagacacccccagggctgataatgctagtgcagatgttgacaaggatggaccaaagcggcaaagagaatcttctcctcgtagaaaacctcctccctcaccacggaggagatctcctgtacctagaagagctggatctccaagacgaccagattctccacgtcgccgtgcagattctcctgttcgtcgccgattagactctccttatcgtcgtggaggagacacacctcctaggaggcggcctgtgtctcctggaagaggtcgttctccatctccacctagacgccttagatcccctgcaaggctgtcacctagaaggatacgtggaagtccaggtcgaagacgttcacctccacctcctcccaggcgccgatcaccacctagacgaccacgtagtcctcctagaaggtctccaattggtcgtagacgtactcgctctccaatacgtaggtctgcacgctcacgctcaaggtcattctcacctcgcagaggtagaccaccagttagacgtggaaggtcatcatcctactctgattcacctagtccacgcaaggtatcccggagatcaaagagtcggagcccaagaaggcctttgagaggaagaggcagtagcaacagcagcagcagcagttcaccaccaccaccaccaccaccaccaactcgcaagccatagataattcttgtacatctactgtctatttctgttgatgtatttattgagattctgtaccggctgagttctagcttgatgtgcttggggatatatgttgcttttcattgtggtctattaacacattttttcttattagcacttaaaagttgtttggaaactaggcattccgtttttgtttggatcctactttagttgttactttgctcaaaaatgcaaaacatgaaagacgatagtgctctgctttattgtatttctagaaattcagtggaattccatgtaactggtagtttctttagaaatttgattatgcgaagaaagt

SEQ ID NO: 8560 - DNA, 1691 bp, Glycine max; identical to SEQ ID NO: 8083
  Clone ID: 700760432_FLI

SEQ ID NO: 8561 - DNA, 1197 bp, Glycine max
  Clone ID: 700760504_FLI
gcagaagggtgcttggtatgttttggatgagtagtgttgctcacagttaacccaatgctccagagccaacactcaccaatgcctcagttgcccagcggcatcaaggccagggtgccacaaaaacacgtgtggcctcatgtccaccaaccccatcacccaacaaaccggtttgggtgaactaggccaagatgtgcttgcaatccacgccactcaaggctccacccaacaacttggtccattggtcacagtccctcagttcctcttttcttgtgcaccttccttccttcttcaaaagggtctccctagaaacattcaaggagtggctgggttaggccatgcaccaatttctcttccaaaccaacttgcctcccactttggcctacaacaccaattcaccacttgcctctctcgctaccctacctcaaagggtgctctaatcttcggggatgcaccaaacaacatgcaacaatttcacaaccaagatattttccacgatttggctttcaccccattaaccgtcacaccacaaggagaatacaacgtgagagtcagctccataagaatcaaccagcacagtgtgttcccaccgaacaagatatcatcaaccatcgtagggtcttctggaggaacaatgattagcacctcaactcctcacatggttctccagcaatctttgtatcaggctttcactcaggtgtttgctcagcagctggaaaagcaagcacaggtgaaatctgtggcaccgtttgggctatgcttcaactccaacaagatcaatgcatatcctagcgtggaccttgtgatggacaagcctaatggtcctgtttggagaatctctggtgaggacttgatggtgcaggcacaacctggggtcacgtgtttgggtgttatgaatggaggaatgcaacctagagctgaagttaccttagggacacgccagttggaagagaagctgatggtattcgatcttgcaaggtcaagggtcgggtttagcacgtcatcactgcactcgcatggagtcaaatgtggtgacctcttcaactttgccaatgcatgagccatgatcgagagagtttttatatatttgcttatttataattaagcaagcatctactacttgttatggtaaagtaatgtaagaataaagactttgaacaatataataatatgaaggcttctctggcgttgttcaatgag

SEQ ID NO: 8562 - DNA, 3201 bp, Glycine max
  Clone ID: 700760534_FLI
ttttctctaactcaaaaaaaggcaaatacgttattgagtattgacaccgaacgaaagaaacgcaacagcgtctatctgtgagctatggcggaggaggaggaagacgacgagagcttcggcgacttcacgttcgcgtcgtttccgagtcaaccgacctcaaacgacaccaatcccgtcgacgacgacgacgattggggcgacttcatgaaccattccaatcagatcaacggcaaacccttcgacgcgttcggggttcccacggatcccacgaacaaacacgtgaacgacaacaacggcgttgccgttcaggccgaggcggcgaaaaagcctaaaggagctatcccgctttcgatcttcggcgaggaggaagaagaagaggaagagcaacaggagaaacccgcttctgccaatgttttctccaacggtggtgcggtgaaaaggggatccgattcgaacgggtccgttggaatcagcgatttgatttcgagtttgtataaccagcagcgccctcaggtggattctcacaacaacggatcggtttcggtatccaatgttgatgctcccaattcgacgaactcgaacggaagcaaattgaattcggatgaggtggatgaggatgatgatggatgggaattcaagtctgcggaatgggaaactggaaccaagagccaggatgttaaggctgaaacgccaaaacatgatagtggtgctcttgatgtcggtactgtgttggattcatccaatgggatttcagacaaagctggtggatggcacatggagtttgagttcagtccacgttttgcatcgcaagatcatattaacccacaaccaagtccaaaaaatgaatcaaatgacattggaactgggtttgccatgtttaatcaaaattttggggagtttagttcagggtcagggccagggccaaatcaaaatttggaagcaccgaagaaggctggcatttgtgccactaatatggaattactcaaattcaatggtgcaactccccatggtactattgattcatctctcacgtcagaatctcatcaatctgatgaatggaacttcggatttaatttcaattctagttatgtgggtgaagacaatcatagttcagattcatatttcaaaaccaaaaacaaccaggatgataacaacagaaacaatgcttccccaactaatatagatgttgattcacatgtcaatttctttgactcagagagtgatgttacacaacatgagaagcccctaacaagcccagagaatcgtagggaagccttacctctgtcaatttttggtgatgagacaccagatactgatgaacatcctgtgtctcaagatttatctccctatacaccctcatccccaataaggaacagcttcactagccctggttccaacttttctatcaatgacatatggaatttatataatcaagctgaaaaccaaagttcttctaatgtgacaccaaaagcaagtgaaaatcagattcatgccccccctgaagtatcgggctccagtttggttaccggtaatgatgatttagatgatgacttctgggactataaggatgccgcaactgaaacaagatttaccaatgaatctgcacagaaaacttcttcaccacaagtcaatgagaatgggttgcagtcttccccaacatttttaaattctgatttgaccaacggtgatgatgattttgaggatgattcatgggaatttaaggaagctacctctggaacaattaatcaagatcacacatctactcttgatcacagaggtttaccacagttatcaacaaaactagagcaggttgattatgcagagttttatagcaaagtgaaggatgaattgtgcaattatgttctgttccatcttcagaatctgaagaaaactcaaaatgttgctgctctctcgggtgaagatgccaaagcaaaagctcttcaggaggaaatatcggaattctccaagatactgcatcaggatactatgagcatccccaatgaatatctctctgaggattattgcccaagaaatgtccgctttaatgagcttcttgaagttttgaaggaacctaagttccaacctgttgagtcagaatatcaactagcatcaaggttgtcgatggctgagaaggatattaaatatggtatggaacttttgaaagatacagtatcaacattaagaattctcaagctgggatcaagagaagaacaatctagttatcttaccatatggtccaaaatagcctttgtttgttctcaagagctgaaacatggtgcttatgtttggaagcaagctgtactacagaatgttcatgaccagatattatctagccagaaaggtgttcagtatatccttgcacttggagaaatttatagagtggcagaaattattgaagcttcagccaaacttcataaaccttggatgttgtcaggtgccatagatcataaaagtttatgtgcccttttgaatgaatgttatagcatatggttggcttcaggacttgaagaagcccttttgagtatagcaaatcagaataattttgagctagatggcatttcaagggaattagttgaatccattaagtatattcatgagcttgatgaacatgcacttcagagctttgtcatctctggagaacaaactacttgccagttgtcagccttgccagctggtttcataccagggttaaatttggtgaaatggaatgggaagcattacattgtcaaacttgcaaacttgtggatcaatctaataagttcagatccacccaagaagtgacacctgcaaattcaattgtctctcacaacaagtggagttttcagtctgttgttgagttgttttctccccaagaaaaaccagtgtgagattgtggcgggatccattgtttagttagtggggtgaggcctttggcgcactggcagcagttgtagtgataggagattgtgtatgggatgaaaatcattctattgagtcgggtcaggcaaagtcaccaattgagttcattctttcttcaataggttaccattctttcgggggaagctttagaacaataaccggatgttacaggtgtctggattcgatccagttctctgcagagggagtgatattgcgtagttatcaactgattctggtgttgtaaagtaactgggattcttcccttaacaattttacagagttttttttggcatgatttaaatt

SEQ ID NO: 8563 - DNA, 1770 bp, Glycine max
  Clone ID: 700760540_FLI
acttattaacactttccttagttcaatatggggaagcccttcttcactctctctctttcttccctttgcttgctactcttgtcgagtgcatgctttgctattacctccagcaagttcaacgagtgccaactcaacaacctcaacgcgttggaacccgaccaccgcgttgagtccgaaggtggtcttattgaaacatggaactctcaacaccctgagctgcaatgcgccggtgtcactgtttccaaacgcaccctcaaccgcaacggcctccacttgccatcttactcaccttatccccaaatgatcattgtcgttcaagggaagggagcaattggatttgcatttccgggatgtcctgagacgtttgagaagccacaacagcaatcaagcagaagaggctcaaggtcgcagcagcaactacaagacagtcaccagaagattcgtcacttcaatgaaggagacgtactagtgattcctcctggtgttccttactggacctataacactggcgatgaaccagttgttgccatcagtcttcttgacacctccaacttcaacaatcagcttgatcaaaaccccagagtattttaccttgctgggaacccagatatagagcacccagagaccatgcaacaacagcagcagcagaagagtcatggtggacgcaagcaggggcaacaccagcagcaggaggaagaaggtggcagtgtgctcagtggcttcagcaaacatttcttagcacaatccttcaacaccaacgaggacacagctgagaaacttcggtctccagatgacgaaaggaagcagatcgtgacagtggagggaggcctcagcgttatcagccccaagtggcaagaacaagaagacgaagacgaagatgaagacgaagaatatgaacaaactccctcttatcctccacgacgaccaagccatggaaagcatgaagatgacgaggacgaggacgaagaagaagatcaacctcgtcctgatcaccctccacagcgaccaagcaggcccgaacaacaagaaccacgtggaagaggatgtcagactagaaatggggttgaggaaaatatttgcaccatgaagcttcacgagaacattgctcgcccttcacgtgctgacttctacaacccaaaagctggtcgcattagcaccctcaacagtctcaccctcccagccctccgccaattcggactcagtgcccaatatgttgtcctctacaggaatggaatttactctccacattggaacttgaacgcgaacagtgtgatctatgtgactcgagggaaaggaagagttagagtggtgaactgccaagggaatgcagtgttcgacggtgagctaaggaggggacaattgctagtggtgccgcagaactttgtggtggctgagcaagggggagaacaaggattggaatacgtagtgttcaagacacaccacaacgccgtgagcagctacattaaggatgtgtttagggcaatcccttcggaggttctttccaattcttacaaccttggccagagtcaagtgcgtcagctcaagtatcaaggaaactccggccctttggtcaacccataaataacaacaagcatatatgaaggtgtggtgaggccatcttatatgaaataatatcaaaatatattttgtgtaataataaaactatggcctatgtatttaccaccctccgacccagcctatgttaatatctgagtggcgttgtacctttgaatcgccttaataaaatgtcagtcttcaagttttgtcttt

SEQ ID NO: 8564 - DNA, 1888 bp, Glycine max
  Clone ID: 700760632_FLI
cttaattattaacacttccttagttcaatatggggaagcccttcactctctctctttcttccctttgcttgctactcttgtcgagtgcatgctttgctattagctccagcaagctcaacgagtgccaactcaacaacctcaacgcgttggaacccgaccaccgcgttgagtccgaaggtggtttgattcaaacatggaactctcaacaccctgagctgaaatgcgccggtgtcactgtttccaaactcaccctcaaccgcaatggcctccacttgccatcttactcaccttatccccggatgatcatcatcgcccaagggaaaggagcacttggagttgcaattccaggatgtcctgagacgtttgaggagccacaagaacaatcaaacagaagaggctcaaggtcgcagaagcagcagctacaggacagtcaccagaagattcgtcacttcaatgaaggagacgtactcgtgattcctcctggtgttccttactggacctataacactggcgatgaaccagttgttgccatcagtcttcttgacacctctaacttcaataaccagcttgatcaaacccctagggtattttaccttgctgggaacccagatatagagtacccagagaccatgcaacaacaacaacagcagaaaagtcatggtggacgcaagcaggggcaacaccagcaggaggaagaggaagaaggtggcagcgtgctcagtggcttcagcaaacacttcttggcacaatccttcaacaccaacgaggacatagctgagaaacttcagtctccagacgacgaaaggaagcagatcgtgacagtggaaggaggtctcagcgttatcagccccaagtggcaagaacaacaagatgaagatgaagatgaagacgaagatgatgaagatgaacaaattccctctcaccctcctcgccgaccaagccatggaaagcgtgaacaagacgaggacgaggacgaagatgaagataaacctcgtcctagtcgaccaagccaaggaaagcgtgaacaagaccaggaccaggacgaggacgaagatgaagatgaagatcaacctcgcaagagccgcgaatggagatcgaaaaagacacaacccagaagacctagacaagaagaaccacgtgaaagaggatgcgagacaagaaacggggttgaggaaaatatctgcaccttgaagcttcacgagaacattgctcgcccttcacgcgctgacttctacaaccctaaagctggtcgcattagtaccctcaacagcctcaccctcccagccctccgccaattccaactcagtgcccaatatgttgtcctctacaagaatggaatttactctccacattggaatctgaatgcaaacagtgtgatctatgtgactcgaggacaaggaaaggttagagttgtgaactgccaagggaatgcagtgttcgacggtgagcttaggaggggacaattgctggtggtaccacagaacttcgtggtggcggagcaagccggagaacaaggattcgaatacatagtattcaagacacaccacaacgcagtcactagctacttgaaggatgtgtttagggcaattccctcagaggttcttgcccattcttacaaccttcgacagagtcaagtgtctgagcttaagtatgaaggaaattggggtcctttggtcaaccctgagtctcaacaaggctcaccccgtgttaaagtcgcataaatgacaagcatgatggtgtgaggatgaggccatcttatgaaataataacaaataaataaattttgtatgataataaaaagtatggcccatgtaccatcccagcgagcctatgtttatatctgagtggcgttgtacctttcaatcgccttaataaaatgtcagtcttc

SEQ ID NO: 8565 - DNA, 965 bp, Glycine max
  Clone ID: 700760643_FLI
gagaacagatttttgagaagataatttctggtatgtatttgggtgaaattgtaaggagagttttgttgaagttggctgaagaagttgacttctttggagatactgttcctccaaaattgagaattcctttcgtacttaggacacctgacatgtctgcaatacatcaagatacatcttcagatctgaaggtggttggaaacaaattgaaggatatattagagatcaataacacatccctgaaaatgaggaagattgttgtggaactctgtgatattgttgctaatcggggagcccgcctttctgctgctggtatttttggcatcctcaagaaaataggaagagacacagtaaaggacgggaagaaatcagtagtagcactggatggaggattgtttgaacactatactaaattcagaagttccttggagagtacactaaaggagttgttgggagatgaggcagctgagacaattggcattgagcagtctaatgatggctctggaattggagcagccctcctggcagcttctcactcccagtatttggaagtgcaggagtcctgaagatgtggtttaatgtcaaggtaaatcagtgtaacactagtttcatttttttgtatacctactagatcaacagattgaagcagaaaagtcttcgttactagtcctagagagcttttaaccaggaaggtggaccaagtccacagtggagttatttgtagggctgtgttcttcttgctgcaaatgcaacattgctgcttctcggctaattactggtgcattgttttggttacagtgtttgtctctcccacatcaaagaataataggagagatgtaaacttttgagttgtctcgttttcccaatgtaacatgttttcaatgagaataagtcaggattaatttattgacaaaggtgaatgatttcaattcaaggcttttgcgagttatcaatgaagagttgagttt

SEQ ID NO: 8566 - DNA, 995 bp, Glycine max
  Clone ID: 700760723_FLI
cacagtgccaccacacagtggtcatggttgaaggtgaagtttagggctaacactaatgaagatgatgatgatgcaaccatgaccacagtgccaccacacagtgtccaagtgcacacaacaacacaccgctacgaagccggcgtcgtcccgccggctcgttttgaggcgccgcgttacgaagccggcatcaaggcgccctcttccatttaccattccgagagaggtccgacgacctctcaggttctcgcagttgtcgccggccttccggtcggcggcatcctcctgctcctggcaggactgaccctggctggaactctcaccgggctggtggtggcaacaccgctcttcatcatcttcagcccggtgctgattccggccacggtcgcaattggcctggccgtggccgggttcctgacgtcgggagtctttgggctcacggcgctgtcgtccttctcctggatcctgaactacatccgggagacccagccggcgtcggagaatctggccgctgcggcgaagcaccatctggcggaggcggcggagtacgtggggcagaagaccaaagaagtagggcagaaaaccaaggaagttgggcaggatattcagagcaaggcacaagatacaagggaagcagctgcaagagatgcaagagatgcaagggaagcagctgcaagagatgcaagggatgcaaaggtggaggcgagagatgtaaagagaacaacagtgacagcaacaaccgcaaccgcatgaacgtgatgagtattaatgtgttgttatgaacttatgatgttggtttatgtggggaaataaatgatgtatgtacctcttcttgcctatgtagtaggtttgggtgttttgttgtctagctttgcttatttagtaattagtagaagggacgttcgttcgtgtctcataaaaaggggtactaccactctggcaatgtgatttgtatttgatgaattcaatgtgaaatgtgttttgcgttggtgtatgtt

SEQ ID NO: 8567 - DNA, 1437 bp, Glycine max
  Clone ID: 700760775_FLI
cgttagcagttttcgttctccattctctccattccttcgccatgtccgatctcggctccgatcttcctgctgccgccgccgctcttagtgctgaggatcgtgctggtctcgtgaatgcactcaaggacaagctccagctcctcgctgggcaacatgtggacatcctggagacactgccacccaaagtcaggcaacgcgtggaaattctcagagatctgcagagtcaacatgatgaggtggaggctaaatttttagaggagcgatcaaagctggaggctaaataccagaagctctatgaaccgctttacacaaaaaggtatgagattgttaatggtgtggtagaggttgaaggagttacaaatgttgcagtaccagaagaagccaacaaagctgcagaagacaaaggagtacctgagttctggctaactgcaatgaagactaatgaagcactggctgaagagattactgaacgtgatgaggggtccctaaaatatcttaaagatatcaaatggtgtagaattgacgatcctaagggcttcaagctggagttttattttgattctaatccttatttcaagaattccgtgctaacaaaaacatatcacatgattgaagatgatgaccctatattagagaaagcaatagggacggagattgagtggcatccaggaaagtgtttgacacaaaagattcttaagaagaagccaagtaaaggatcaaagaatgctaaacccatcacaaaaacagaaaaatgtgaaagtttcttcaactttttcaatcctccccaggtccctgaggatgatgatgatattgatgacgatgctgttgaagagctcgagaatttgatggaacatgattatgacattggttctacaatccgggacaaaattattcctcatgccgtgtcatggttcacgggggaggctgcacagagtgattttgaggatatagatgaagatgattatgaagatgaagaaggtgatgatgatgatgatgaggatgaggatgaggatgaggatgaggaggatgaggaggaaaagaaagggaagagcaagagtaagtctaaactgcagagtggtggcagggccatacctggtaaagatcagccgatggagcgtcctcctgaatgcaagcagcagtagtgtttggctgtgtacaaacagacctgggtatatttagtttcagagaagtaatcactgtagagtctgggctatttcagtcataatttgcaatttaattattattattattatgattattattattgtctgctcttttttattgggctgggggttggtggtggtaattttttgagttggcctgtgatatggattttatttctctctgcttttagtttttttctgaaaaagaaaaaagtaaagtgataagtatattcatgacgttgtccatatttattgtgtattataccgttatatg

SEQ ID NO: 8568 - DNA, 462 bp, Glycine max
  Clone ID: 700761002_FLI
tcttacttgagtacaacactacggttgttttgttctgtcatcttaaagcaagatatgagttcatcaggaattagagcatggagtggtggaggccttgaaagaccagggcatatgcaggtggaaccatgctttaagatcagctcaacaccatctcaaaacccattttggctcattctctcaggctaacaggctttctgcttctgctatgctctccacaacactaaaacatgagaagccaaagcaatcagaggagtccttcagaaatgtcatgtacttcagctgctggggtcccaactagatactataaggccagcaagaaaatattctttctctttcaatttctagaaatcaagcttagtcttaaggaagatgagagttgagatttctggggctgactcactgtatagtattcaaagattgccaaattttgataaatgatagtgttgagcattgccaaatttt

SEQ ID NO: 8569 - DNA, 1139 bp, Glycine max
  Clone ID: 700761096_FLI
tgtgaaaaggttttcttgtttggtttttctttctctggaaggaacatggcaggaaagaacacacgttatattcaggttgacttttctttgagaggaacttggtaagaaagagcacatgatgtataaaatgagagaaaagcaagagcatgagcgttcgtgatcacacacagaagatcgatctggtagaaacgatgaaggaactatgggcacaaatggggtcactaatggccactattgtgttcatgtacacaatctttgagcgcttcttccctccacacttgcgtgaaaaacttcaagcctatactcaaaaactcaccaaccatttcaacccttacatccaaataagcttccctgagttctcaggggaacgactgaagaagagtgaagcatacacagccatccaaacctacctgagtgcaaactcatcccagagagccaaaaggctcaaagctgaagttgtgaatgatagccaaacccctcttgtcctcagcatggatgacaacgaagagataactgacgagtttcatggcatcaaactatggtggagtgcaaacaaagtaagcaacaatccacaaagatacaaccctttttcttattacggttcctcagacgagaaaaggttctacaagctaacattccataagcgccaccgtgatattgtcaccatgtcttacataaagcatgttttggatgagggaaaggatattgagatgagaaacagacagttgaagctttacaccaacaatcctagtagtggttggtatggttacaagcaatcaaagtggagccacattgtgtttgagcaccctgccacttttgaaacactcgctatggatcggagaaagaaggaggatatacttaaagaccttgtgaagtttaagaagggaaaggattattatgcaaagataggtaaagcttggaagcgtggctatcttttgtacggtcctccggggactggtaagtctaccatgattgctgctattgctaatttcatgaactatgatgtgtatgatcttgagttaaccgcggtgaaggacaacactgagctaaggaagctgttgattgagactccgagtaagtctatcacggtgattgaggacattgattgctcactcgatcttaccggccagaggaagaag

SEQ ID NO: 8570 - DNA, 979 bp, Glycine max
  Clone ID: 700761163_FLI
aaaaaagtatctcttgaactcggcggcaatgcaccttgcatagtttttgatgatgctgacctggatgttgcagtaaaaggaactcttgcagcaaagttccgtaacagtggacaaacatgtgtttgtgcaaatagaattattgtgcaagaaggtatatatgagaagtttgcaaatgctttacgtgatactgttcagaatatgaaagttggggatggtttcagtgaaggtgtggcacagggtcctctaatcaatgaagctgctgtcaaaaaggttgagtccttaattcatgatgctacatcaaagggggcaaaagtaattcttgggggtaaaagacatagccttggatttactttttatgaacccacggtcatcagtgatgtcaacagtgatatgcgcatatcaagagaggaagcatttggacctgttgcaccccttttgagattcaaaactgaagaggatgctatcagaattgctaacgacactaatgcaggtttgggttcatacatatttacaaacagtatccaacgatcatggcgtgttgctgaggctctagaatatggacttgtgggtgttaacgaaggagtaatttcaactgaggtggctccattcggtggttttaaacagtccggcctcggaagagaaggctccaaatatgggatggatgaatatttagagatcaagtatgtttgcttgggaaacatgcacaaagcttgaacaaaggtatacatgaggcagtggctagctagagggaaaagtacttaccttcagtgagtttgttgaagaatatgcatatagctgcacacgtgttgtatacaaataagggcaggcttgcaaaggacctcctcatttttctttgtttttctttttcttttcattttcattgctttctttttatggtcttttagaatattaaaaaaatgcactatagaaggtaccgcacgaggttaacaaaaactatgaaaatagcctttgacccttc

SEQ ID NO: 8571 - DNA, 641 bp, Glycine max
  Clone ID: 700761173_FLI
cttggatatcttcctcagtattgtggatatgaacgagggagctcttcttctaccacacttcaattcaaaggcgatagtgatactggtaattaatgaaggagatgcaaacattgaacttgttggcctaaaagaacaacaacaggagcagcaacaggaagagcaacctttggaagtgcggaaatatagagccgaattgtctgaacaagatatatttgtaatcccagcaggttatccagttgtggtcaacgctacctcaaatctgaatttctttgctattggtattaatgccgagaacaaccagaggaacttcctcgcaggttcgcaagacaatgtgataagccagatacctagtcaagtgcaggagcttgcattccctgggtctgcacaagctgttgagaagctattaaagaaccaaagagaatcctactttgtggatgctcagcctaagaagaaagaggaggggaataagggaagaaagggtcctttgtcttcaattttgagggctttttactgaataagtatgtactaaaatgtatgctgtaatagctcatagtgagcgaggaaagtatcgggctatgtaactatgactagagcttcaactatgaataaataaatcgacagcatatgatgcttttgttttg

SEQ ID NO: 8572 - DNA, 1469 bp, Glycine max
  Clone ID: 700761316_FLI
tatacacacacacacacacactaagaataatggcttctatcctccactactttttagccctctctctttctttctctttccttttcttcttatccgactccgtccccattccccaacaccacactaaccctacaaaacctataaaccttctggttctacccgttcaaaatgatgcttccacagggctccattgggccaacctccaaaaaaggacccctctaatgcaagtaccagtcctggtggacctcaatggaaaccacttgtgggttaactgtgagcaacactactcatccaaaacataccaagcacccttctgccactccacccaatgctccagagccaacactcaccaatgcctcagttgcccagcggcatcaaggccagggtgccacaaaaacacgtgtggcctcatgtccaccaaccccatcacccaacaaaccggtttgggtgaactaggccaagatgtgcttgcaatccacgccactcaaggctccacccaacaacttggtccattggtcacagtccctcagttcctcttttcttgtgcaccttccttccttcttcaaaagggtctccctagaaacattcaaggagtggctgggttaggccatgcaccaatttctcttccaaaccaacttgcctcccactttggcctacaacaccaattcaccacttgcctctctcgctaccctacctcaaagggtgctctaatcttcggggatgcaccaaacaacatgcaacaatttcacaaccaagatattttccacgatttggctttcaccccattaaccgtcacaccacaaggagaatacaacgtgagagtcagctccataagaatcaaccagcacagtgtgttcccaccgaacaagatatcatcaaccatcgtagggtcttctggaggaacaatgattagcacctcaactcctcacatggttctccagcaatctttgtatcaggctttcactcaggtgtttgctcagcagctggaaaagcaagcacaggtgaaatctgtggcaccgtttgggctatgcttcaactccaacaagatcaatgcatatcctagcgtggaccttgtgatggacaagcctaatggtcctgtttggagaatctctggtgaggacttgatggtgcaggcacaacctggggtcacgtgtttgggtgttatgaatggaggaatgcaacctagagctgaagttaccttagggacacgccagttggaagagaagctgatggtattcgatcttgcaaggtcaagggtcgggtttagcacgtcatcactgcactcgcatggagtcaaatgtggtgacctcttcaactttgccaatgcatgagccatgatcgagagagtttttatatatttgcttatttataattaagcaagcatctactacttgttatggtaaagtaatgtaagaataaagactttgaacaatataataatatgaaggcttctctggcgttgttcaatg

SEQ ID NO: 8573 - DNA, 833 bp, Glycine max
  Clone ID: 700761358_FLI
ctcaattgaatcaaatgatggctgggaattttaatgctcaagcaagggttccttgtctagatctcggtaatgaagactcatcatcaattcatgcagatgagcggaagcccaaaaaaagaggtaggaaacctgccaatgggagagaggagccgctgaaccatgttgaagctgagagacaaagacgtgagaagcttaatcagaggttttatgccttgagagctgttgtccctaatatatctaaaatggacaaggcatctttgcttggtgatgccattacctttatcactgatctgcagatgaagatcaaggtgttggaagctgagaagaacatgggtaacaataaggaccaaaaattgtcattgccagatatggattttcaggaaagagaggatgacacagttgtgacagtgagatgccccttagatattcaccctgtttcgaatgttgttaaaacgttcagggagcatcaaattgtggctcaagactctaatgtttcaactgcagatgataaaataattcatacattctccctaagaactgagggaggggaggctgctgctatacagttgaaagaaaagcttgaagcatccctatccaaaagttgattgtcagatcatatttatgtgtagcatctcaatgatattgtaaaccatgttagaaatactctgtcttgtaggttaagtggctaacataatattgttcttagtgcactttgtttttacagtagtgtactttgttagttgtaatctgttttaaaatatgttcaggtcatcgtaaatgaccttaattatgtacttaagttgattaataattgaatttgatgttgatggatg

SEQ ID NO: 8574 - DNA, 943 bp, Glycine max
  Clone ID: 700761441_FLI
ggagattggtttagcattaaagaagttatttgaagagggtgtagtcaagcgagaagatttatggatcacctctaaactctggtgtacagatcatgctccagaagatgtaccagaagctctggacagaacattgagagacttgcaacttgattatatagatttataccttattcactggccaattcgaatgaagaagggttcagtgggctttaaggctgaaaacattgtgccatcagacatacctaacacttggaaggcaatggaagctttgaataaaagtggcaaggctagagctataggtgtaagcaatttctcaactaagaagttgggagaattgcttgagtatgctcgtgttactcctgcggttaaccagtcagagtgtcatcctgcatggaggcaggacaagttgaaggccttttgcaaatctaagggtgtccacttctctggatattcacctttgggttcccctgcctggcttgaaggtgatttccttaaccatccagttataaatatgatcgcaaagaaattaggaaagactccagcacaggtagctcttcgatggggactgcaaatgggccatagtgtgcttcccaagagttctaatccagcaaggataaaggaaaactttgatatttttgactggtccattcctgaggacatgcttgataaattttttgagattcaacaggaaagattactcaaggctagcttcttccatgaaccaaatgggggttacttaccagaagacgaattgtgggatgggggtatatgaaaagtcggttgaatgattagttaaaaaagtggatggaataaaagaaacgcatcttctgtttggggtgttaggctatatgaaaatactcttatctttagctatgtgcatcctttgtcactatcagtcttttaagttgcaacccttcaactgaaaaattaaaaattttcatgt

SEQ ID NO: 8575 - DNA, 1309 bp, Glycine max
  Clone ID: 700761573_FLI
gcgtcaccagaagatctataacttcagagagggtgatttgatcgcagtgcctactggtgttgcatggtggatgtacaacaatgaagacactcctgttgttgccgtttctattattgacaccaacagcttggagaaccagctcgaccagatgcctaggagattctatcttgctgggaaccaagagcaagagtttctaaaatatcagcaagagcaaggaggtcatcaaagccagaaaggaaagcatcagcaagaagaagaaaacgaaggaggcagcatattgagtggcttcaccctggaattcttggaacatgcattcagcgtggacaagcagatagcgaaaaacctacaaggagagaacgaaggggaagacaagggagccattgtgacagtgaaaggaggtctgagcgtgataaaaccacccacggacgagcagcaacaaagaccccaggaagaggaagaagaagaagaggatgagaagccacagtgcaagggtaaagacaaacactgccaacgcccccgaggaagccaaagcaaaagcagaagaaatggcattgacgagaccatatgcaccatgagacttcgccacaacattggccagacttcatcacctgacatctacaaccctcaagccggtagcgtcacaaccgccaccagccttgacttcccagccctctcgtggctcagactcagtgctgagtttggatctctccgcaagaatgcaatgttcgtgccacactacaacctgaacgcgaacagcataatatacgcattgaatggacgggcattgatacaagtggtgaattgcaacggtgagagagtgtttgatggagagctgcaagagggacgggtgctgatcgtgccacaaaactttgtggtggctgcaagatcacagagtgacaacttcgagtatgtgtcattcaagaccaatgatacacccatgatcggcactcttgcaggggcaaactcattgttgaacgcattaccagaggaagtgattcagcacactttcaacctaaaaagccagcaggccaggcagataaagaacaacaaccctttcaagttcctggttccacctcaggagtctcagaagagagctgtggcttagagccctttttgtatgtgctaccccacttttgtctttttggcaatagtgctagcaaccaataaataataataataataatgaataagaaaacaaaggctttagcttgccttttgttcactgtaaaataataatgtaagtactctctataatgagtcacgaaacttttgcgggaataaaaggagaaattccaatgagttttctgtc

SEQ ID NO: 8576 - DNA, 1733 bp, Glycine max
  Clone ID: 700762032_FLI
ccgtattgttataaccctagctcggaagaactaccatctctcgtccattgtctgcgtctcactcatcctcaactcttcctctcttttcttccaaacccgaatctggattctcctctctcccgatttcaattctcacggtcttcaccgatcgccagatctctaagcaccgctcttgttttcatcgattaaataacaaacaaaaattggctcaattttattttaacatcctaaccaaaaacaaacttttcacccgattttaacattcgagagtaaatttagtttacttgttgatttttttttttgtttgttttgattaagtttctgtttctatttaaatcgataaacggcgaggtcgagcgttagaattcgaatttcggagaaaaaaagttacaggtattattaggggaatcgcgtggaagcgttgaggagagtgtttgatctgaggaaggaaaaaaatggtgggaggtggaaacaggagggaggaagggtcgttggtgttgaacaacacgaacgtgtttgcggcgctggatactctgaagaagaagaagaagtccgataaggagaagagcaagggttcgtcgacaaaatcgcaggcccagtccgcgaaggccgaggcccaagtgttttgggccccggcgccgctgaacgccaagtcttgggccgacgtcgacgacgaggacgacgacgattactacgccaccacggcgccgccccaatcggtgtggggcgtttccgaacctcatcacagtaaggaggacaaacatgggaattttgaggatagtgagagtgaggaagatattttggatgaaggggatgatgaggtggaggaagagcatgatcatgaacccgaagaatctttgaaacccgaacctgaggttaagaaggatgctgaagtccctttgccaccaccaaaagagacagaaaggcagctctctaaaaaggaaaggaagaagaaggaacttgcagagcttgaggctcttctagctgattttggagtggcaccaaaacaaagtaaagatggtcaagatgagtctcaaggtgctcaggataagacaggtgttgagactgatggagatggagaaaagaaagaaaatgtccctgcagaatccaaaacttccaagaagaagaaaaagaaggataaagcttccaaggaggtgaaagaatctcaagatcaacccaacagttctgacacaaacaatgggcccgatttggccacaggcaccgaaaatgtggaggaggatacatctactgttgatgtgaaagagcgtctcaagaaagttgcttctacaaagaagaagaagtctagtaaagaaatggatgctgctgcaagagctgctgctcaagaggctgctgcaaggagtgcaaggcttgctgctgcaaagaaaaaagagaagaaccattataaccagcaacccatccggtaaaagaaccctgctccttgacatcaatacaggaatttgtatttcttgttcatatgatgatgccaaataaacagtgggctttaggctctggtgagaatggtgatgattctggtcgtatttcagtggacctgggaaattttcatctagttttttttggaaattaatgttgttcaattgttctggacttgctattttggcatagaaaattttagctttaaatattttacccgaactacataattgtgcattgtagttcttatatatctttgtggctgatcagtgatcaattagttctgactgagtgtttattct

SEQ ID NO: 8577 - DNA, 974 bp, Glycine max
  Clone ID: 700762309_FLI
ggggcaagcagcaagtcctatcccaaccctaaccctaacttcgaaccttcgtcctttctctcttcttccttcagattcatccgtaccgttagttactactggattcgcggttgattgctgctaccgggtttctcctctttcacgtataagatgcacttccggtcatcattttaccaacatgcagattttgagttggtttctgaatataaatggacgccaaacggttcatccagctggttgaggagaagaagaagaaaattatggagagaaaggaagctcctttgaaatgggagcagaagctggaagctgctgctgaagctaaagagaggaagctgaaggttgcaaagcatacaaaaagatctggctctgatagtgacagcgattatgacagtgatgatgagagtagaaagacaagtaaaagatctcacaggaagcacagaaagcattctcactacgactctggtgaccatgagaaaaggaaagaaaaaagttccaaacggaaaacaaagaaatggtcctctgaatctagtgattatagtagtgatgactctgagagtagctttgaggaggagagaagaagaaagaagaagcaaagcaagaagctgagagatcggggttcaagatcagattctagcaactatgattctactgctgatgaattaagcaagaggaaaagacagcacaaacggcaacgcccatcaaaatttagtggatcagactactctactgatgaaggagatagtctagttcagaaaagaaatcatggaatgcatagcaaacgccatcgacaatcagaatctagtgaatctgacttgtcaagtgatgacgctccccataagaaaggccacagaaagcaccataaacatcacaagcgatcacataatgtggagctgaggttgtctgattctgattatcgcagtcatggtcaaagaagcagatcaaagtcattggaagaaaattctgaagatgaaagc

SEQ ID NO: 8578 - DNA, 1256 bp, Glycine max
  Clone ID: 700762368_FLI
catgaacatcaacgcacttgccaggcaatctctaattaatgctaatggcataatagagacaacctttttgccctcaaagtattctgtggagatgtcttcggcggtttataagaattgggttttcactgatcaagcactacctgcagatcttatcaagagaggagtggcaattaaggatccatcaaccccacatggagttcgtcttctgatagaggactatccttatgccgctgatggactggagatatgggctgcaattaagacatgggttcaagaatatgtgcccttgtactatgcaagagatgatgatgtcaaaaatgattctgaactccaacattggtggaaagaagctgtagagaaaggccatggtgatttgaaagacaagccatggtggcctaagttgcagacacttgaagaccttgttgaagtttgcctcattatcatatggattgcttcagctctccatgcagccgttaattttggtcagtatccttatggaggtttgataatgaaccgcccaactgcttctagaaggttgcttcctgagaaaggcaccccagaatatgaagaaatgattaataaccatgaaaaggcttatttgagaacaattacatcaaagttgccgactctcattagcctttcagtgatagagatcttgtcgacacatgcttctgatgaggtctaccttggccagagggacaacccacattggacctctgattcaaaagcattacaagcctttcaaaagtttggaaacaagctcaaggaaattgaggaaaaacttgtgaggaggaacaatgatccgagtctgcagggcaatcgacttggcccggttcaactgccatacactttgctttatcctagcagtgaggaagggttaacttttaggggaattccaaatagcatctctatctaagggagcctgtggtttactctaattactctatatatagtgcatgtgtaccttccaataaaaaagatgcaagactagagatccgataaatcttgcatcttatctaatgtttcaattatcttgtgttttaattaatgttgtaattgagctcacagtttggttgtggtttgcaaataataagagcagtgagcactattagtttgtgtttagctcctgtcatcatgtttggtattatacattttgcagattacgtaacacaaatttatgttattagtaaaaaaactgtattgtacgaatattttgtattataagtatataagaaataaaaattattagtattagt

SEQ ID NO: 8579 - DNA, 951 bp, Glycine max
  Clone ID: 700762391_FLI
caacaatcctacttgcaaggattcagcaggaacattttagaggcctcctacgataccaaattcgaggagataaacaaggttctgtttagtagagaggaagggcagcagcaaggggagcagaggctgcaagagagcgtgattgtggaaatctcgaaggaacagattcgggcactgagcaaacgtgccaaatctagttcaaggaaaaccatttcttctgaagataaaccttttaacttgagaagccgcgaccccatctactccaacaagcttggcaagttctttgagatcaccccagagaaaaacccccagcttcgggacttggatatcttcctcagtattgtggatatgaacgagggagctcttcttctaccacacttcaattcaaaggcgatagtgatactggtaattaatgaaggagatgcaaacattgaacttgttggcctaaaagaacaacaacaggagcagcaacaggaagagcaacctttggaagtgcggaaatatagagccgaattgtctgaacaagatatatttgtaatcccagcaggttatccagttgtggtcaacgctacctcaaatctgaatttctttgctattggtattaatgccgagaacaaccagaggaacttcctcgcaggttcgcaagacaatgtgataagccagatacctagtcaagtgcaggagcttgcattccctgggtctgcacaagctgttgagaagctattaaagaaccaaagagaatcctactttgtggatgctcagcctaagaagaaagaggaggggaataagggaagaaagggtcctttgtcttcaattttgagggctttttactgaataagtatgtactaaaatgtatgctgtaatagctcatagtgagcgaggaaagtatcgggctatgtaactatgactagagcttcaactatgaataaataaatcgacagcatatgatgcttt

SEQ ID NO: 8580 - DNA, 1012 bp, Glycine max
  Clone ID: 700762414_FLI
gagagactgaaccgcatcgggagcgggagcggcgggacggtgtacaaggtggtccaccgcaccagcgggcgcgtgtacgcgctgaaggtgatatacggtcaccacgaggagtccgtgcggcggcagatccaccgggaaatccagatcctccgtgacgtgaacgatccgaacgtggtgaagtgccacgagatgtacgatcagaacagcgaaatccaggtgctgctggagttcatggacggagggtcactggaggggaaacacatcccgcaggagcagcagctggcagatctgtctcggcagattctgcgggggctggcgtacctacaccggcggcacatcgtgcacagggacatcaagccctcgaatctgctgataaactcgcggaagcaggtgaagatcgctgacttcggggtgggtcggattctgaatcagacgatggatccgtgcaattcatcggtggggacgatcgcctacatgagtccggagaggatcaatacggacataaacgacgggcaatacgacgcttacgcgggggacatatggagctttggggttagcatactggagttctacatgggaaggttccccttcgctgtagggaggcagggcgattgggccagtctaatgtgcgccatttgtatgtctcagcctccagaggctcctccttctgcttcacctcacttcaaggatttcatcctccgctgtttgcagcgcgatccctctcgccgctggtctgcttccaggctcctcgaacaccccttcattgctccaccgctgcccaaccataatcagactcctcccaacctccatcagctactccctcctccgccaaggcctcttccttcctagtattctccatccatgcctagctagccctgtttgctgctttcttttctttttttattttccatacataatcaaatctctataatattggattttctgccatacattacatgccctgtttgttttgccatgcttttcttatactattatcatccttttctttttc

SEQ ID NO: 8581 - DNA, 1654 bp, Glycine max
  Clone ID: 700762456_FLI
gacgatccggagccgccacctattcttttgttcatcacatattcaatggcttcctctcttctctctccatcatttacatccttcctccgcaccaaggatctctctctctctgctttcacttctcagcgatgcttcaaagcggtgccaaggaaaataatccgttgtgctattgcggcgcctcagcgccaaccttccaccactggatcagtgaggactgcaatgaccatgactgagaagatattggccagagcttctgagaaggcacagctgacccctggggataatgtttgggtcaatgttgatattttgatgacacatgatgtgtgtggccctggttctattgggattttcaagagggagtttggcgaggatgccaaggtttgggaccgtgaaaagcttgtaataatacctgaccactatattttcacaagtgatgaacgtgccaatcgcaatgtagacatattaagagatttctgccatgagcagaatatcaagtacttttatgatattaaggatcttagtaattttaaggtaaatccagactataagggtgtttgccatgttgctcttgctcaggaaggtcattgtaggccaggagaggttctcttaggtactgattctcacacttgtactgctggagcatttggtcaatttgctacagggattggtaatactgatgccggctttgtgctgggaactgggaaacttctgctcaaggtgcccccaactttgagatttgtaatggatggagaaatgcccgattatttgctttctaaggatttgattctgcaaattattggtgaaataactgtggctggggcaacatataaatcgatggagtttgttggtacaaccgttgaaagtttaactatggaagaacggatgacattgtgcaacatggttgttgaagctggtggaaagaatggtgttgttcctgctgacagcactacatttaaatatcttgagggcaagacatctctgccatatgaacctgtttatagtgacgatcaagcaagatttctcgcagagtatagatttgatgtctcaaaattggagccagtggtggccaagcctcattctccggataatcgtgctttggcaagagagtgcaaggatgtgaaaattgacagagtatacataggatcttgtacaggtggcaaaacagaggatttcatggctgcagcaaaagtttttctggcatcaggtaaacaggtcaaagttcctacatttcttgtgcctgcaacacaaaaggtttggatggacttgtactccctccctgtccctggatctggtggtaagacatgctcacagatatttgaagaagttgggtgtgacacaccagctagtcctagttgtggtgcttgtttgggtggcccaaaagatacttacgcacgcatgaatgaacctaaggtttgtgtttcaactacgaacaggaacttcccgggccgaatgggacacaaggaaggtcaaatctatttggcttccccttatacagctgctgcatctgcattgaccggttatgttactgatcctagagagttcttgtagtagaatgttgttacaatcatctcattgtgttgtactcgttgttggttatttgtgtattctctactctctactagtcataagttaaaactgacaactatttaagctt

SEQ ID NO: 8582 - DNA, 1215 bp, Glycine max
  Clone ID: 700762491_FLI
ctttggacttgcgaggatatatcaagctcctctgaagccgttatctgataatggggttgttgtaaccatttggtatcgtgcacccgagttgcttcttggagcaaaacattatactagtgctgttgatatgtgggctgtgggatgcatttttgctgagttgttgaccttgaagccgctatttcaaggggcagaagtcaaagctacatcaaatccctttcagctcgaccaacttgacaagatatttaaggttttaggccatcccacattagaaaagtggccttccttagcaagtcttccacattggcaacaagatgtgcaacatatacaaggacacaaatatgataatgctggtctctataatgttgtacacctgtctccaaaaagccccgcatatgacctcttgtcaaagatgcttgaatatgatcctcgtaagcgtttaacagcagcacaagctttggagcatgagtatttcaaaattgaaccattacctggacggaatgcacttgtaccctgccaacttggagagaaaattgtaaattatcccactcgtccagtggacaccactactgatcttgaaggaacaaccaatctgccaccttcacaaacggtaaatgcagtttctggcagcatgcctggtcctcatgggtcaaatagatctgttcctcggccagtgaatgttgttggaatgcaaagaatgccccctcaagcaatggcagcttataatctctcatctcaggcagccatgggagacggaatgaatcctgggggtatctcaaagcaacgaggtgttccacaggcccatcagccgcaacagttgagaaggaaggagcaaatggggatgccgggataccctgcacaacagaagtcaagacgaatataaggtttctgctggaagagagactacgtgaagataaatttggggtcaatacttcagtgcctgaactcatgcaggacatttctggacagggtttgtctcaatacttgcaaacctctcactttattgcaatcaaagattgggtgcattcttctctggaattttgatgctaaaatgccaaatgtatgctggaacaccaatgaagccataaaagggtataaacgtatgaaagggttaagctactgtaagcacatgtatatcatgattataacaatgcaattctattgtatttctcagcttttgggcaagatcaatgtcagtgaaaccaaatgttaatcatc

SEQ ID NO: 8583 - DNA, 1480 bp, Glycine max
  Clone ID: 700762533_FLI
attcaaaccttgctctatactacacagtacacacactagaagaataatggcttccatcctccactactttttagccctctctctttcttgctcttttcttttcttcttatccgactcagtcacccctacaaaaccaataaaccttgttgttctacccgttcaaaatgatggttccacagggctccattgggccaacctccaaaaaagaacccctctaatgcaagtaccagtcctggtggacctcaatggaaatcacttgtgggttaactgtgagcagcagtactcatccaaaacgtaccaagcacccttctgccactccacccaatgctctagagccaacacccaccaatgcctcagttgccccgcggcatcaaggccagggtgccacaaaaacacgtgtggcctcatgtccactaatcccatcacccaacaaaccggtttaggtgaactaggagaagacgttcttgcaatccacgccacacaagggtcgacccaacaacttggcccattggtcacagtcccacaattcctcttttcttgtgcaccttccttccttgttcaaaagggtcttcctagaaacactcaaggtgtggctgggttaggccatgcaccaatttctcttccaaaccaactcgcttcccactttggcctacaacgccaattcaccacttgcctttctcgctaccctacttcaaagggtgctataatattcggggatgcacctaacaacatgcgacagtttcaaaaccaagatattttccacgatttggccttcaccccattaaccatcaccctgcagggagagtacaacgtgagagtcaactcaataagaatcaaccagcacagtgtgttcccactgaacaagatatcatccaccatcgtagggtcgacctctggaggaaccatgattagcacctcaactcctcacatggttctccagcaatccgtgtaccaggctttcactcaggtgtttgctcagcagctaccaaagcaagcacaggtgaaatctgtggcaccatttgggttatgcttcaactccaacaagatcaatgcatatcctagcgtggaccttgtgatggacaagcccaatggtcctgtttggagaatctctggtgaggacttgatggtgcaggcacaacctggggtcacgtgtttgggtgttatgaatggaggaatgcaacctagagctgaaattaccttaggggcacgtcagttggaagagaacctggtggtgttcgatcttgcaaggtcaagggttgggtttagcacctcatcactgcactcgcatggagtcaaatgtgctgacctcttcaactttgccaatgcatgatgagccaagatcgcgagactttttataatatgcttatttataattaagcaagcatctactacatgttatggttaataaaagtaataatgtaagaataaagactttgaactaaataataatatgaacgattctctttcgttgttcaatgag

SEQ ID NO: 8584 - DNA, 1729 bp, Glycine max
  Clone ID: 700762591_FLI
ctctccattggtccttaaacactcatcagtcatcaccatggccaagctagttttttccctttgttttctgcttttcagtggctgctgcttcgctttcagttccagagagcagcctcagcaaaacgagtgccagatccaaaaactcaatgccctcaaaccggataaccgtatagagtcagaaggagggctcattgagacatggaaccctaacaacaagccattccagtgtgccggtgttgccctctctcgctgcaccctcaaccgcaacgcccttcgtagatcttcctacaccaacggtccccaggaaatctacatccaacaaggtaagggtatttttggcatgatatacccgggttgtcctagcacatttgaagagcctcaacaacctcaacaaagaggacaaagcagcagaccacaagaccgtcaccagaagatctataacttcagagagggtgatttgatcgcagtgcctactggtgttgcatggtggatgtacaacaatgaagacactcctgttgttgccgtttctattattgacaccaacagcttggagaaccagctcgaccagatgcctaggagattctatcttgctgggaaccaagagcaagagtttctaaaatatcagcaagagcaaggaggtcatcaaagccagaaaggaaagcatcagcaagaagaagaaaacgaaggaggcagcatattgagtggcttcaccctggaattcttggaacatgcattcagcgtggacaagcagatagcgaaaaacctacaaggagagaacgaaggggaagacaagggagccattgtgacagtgaaaggaggtctgagcgtgataaaaccacccacggacgagcagcaacaaagaccccaggaagaggaagaagaagaagaggatgagaagccacagtgcaagggtaaagacaaacactgccaacgcccccgaggaagccaaagcaaaagcagaagaaatggcattgacgagaccatatgcaccatgagacttcgccacaacattggccagacttcatcacctgacatctacaaccctcaagccggtagcgtcacaaccgccaccagccttgacttcccagccctctcgtggctcagactcagtgctgagtttggatctctccgcaagaatgcaatgttcgtgccacactacaacctgaacgcgaacagcataatatacgcattgaatggacgggcattgatacaagtggtgaattgcaacggtgagagagtgtttgatggagagctgcaagagggacgggtgctgatcgtgccacaaaactttgtggtggctgcaagatcacagagtgacaacttcgagtatgtgtcattcaagaccaatgatacacccatgatcggcactcttgcaggggcaaactcattgttgaacgcattaccagaggaagtgattcagcacactttcaacctaaaaagccagcaggccaggcagataaagaacaacaaccctttcaagttcctggttccacctcaggagtctcagaagagagctgtggcttagagccctttttgtatgtgctaccccacttttgtctttttggcaatagtgctagcaaccaataaataataataataataatgaataagaaaacaaaggctttagcttgccttttgttcactgtaaaataataatgtaagtactctctataatgagtcacgaaacttttgcgggaataaaaggagaaattccaatgagttttctgtc

SEQ ID NO: 8585 - DNA, 510 bp, Glycine max
  Clone ID: 700762635_FLI
gaaaggatcagaggcaaggggtttgggttgtgctgtatgaggaaccaaatcactaaaaaattactatgagcagagaattaaaagtgttttgggggtgaagggaaaacatgctgaaaagcttgtgttctcggatctgaagggttttgacttttgaatcactctagtgtatgcttttggcatacctttatacgaagttatactctgaagcaggagaagatggaagatacggtgcagtttcttcctcaagtttggcaacttttctggttattttgccatctgtggttggatgctacatgctatgctgttgtttccactgatcctttttgaagtttcatatgagaaatcttagagagatttgaaaatgaaactttgtgtagaagagagatagagaaaaggttatatgtaatattgtttaatccaagtttttatgttgtgttgatacaagaataccgtgtaatataccaagtttttatgttgtgttaatccaagtttttatgtttgcgcctgatt

SEQ ID NO: 8586 - DNA, 785 bp, Glycine max
  Clone ID: 700762745_FLI
caccaggtgcccttctaatgggagatgccttcaatatgcgtcaccctttaaccggaggaggaatgactgtggctttatctgacattgttgtgctaagggacttacttaaaccccttcatgatctccatgatgcttctgctctttgcagataccttgaatcattctacaccctacgcaagcctgtagcatctacaataaacacactagccggggcattgtacaaagttttttgtgcatctcctgatccagctagaaaggaaatgcgccaagcatgtttcgattacttgagccttggaggtgttttctcagatggaccaatagctctactctctggtctaaatcctcgtccattgagtttggttctccatttcttcgccgtcgctatatatggtgttggccgcttgctcataccatttccttctccaaaacggatgtggattggagctagattgatttcaggtgcatcaggcatcattttccccattattaaggctgaaggggtgagacaaatgttcttcccagcaactgtgccagcatattacagaacccctcctgtccatccattgaacacacatgaaggaaatacatggaattaatatataatggttcccttttcccacattctttccacctgtagtattccatttctgccatcaagaataagagagggaactcattccataattaggatactcattttgtgcaactgcaaccaatattatagtataaaaaaaacttgaatttgggacccgagaaagaagttccaaaactaatcgtgcaaaaac

SEQ ID NO: 8587 - DNA, 1724 bp, Glycine max; identical to SEQ ID NO: 7613
  Clone ID: 700762856_FLI

SEQ ID NO: 8588 - DNA, 1679 bp, Glycine max
  Clone ID: 700762905_FLI
gcactcatcaccatggccaagcttgttctttccctttgtttccttcttttcagtggctgcttcgctctgagagagcaggcacagcaaaatgagtgccagatccaaaagctgaatgccctcaaaccggataaccgtatagagtcggaaggtgggttcattgagacctggaaccctaacaacaagccattccagtgtgccggtgttgccctctctcgctgcacccttaaccgcaatgcccttcgtagaccttcctacaccaacggtccccaggaaatctacatacaacaaggtaatggtatttttggcatgatattcccgggttgtcctagcacttatcaagagccgcaagaatctcagcaacgaggacgaagccagaggccccaagaccgtcaccaaaaggtacatcgcttcagagagggtgatttgatcgcagtgcctactggtgttgcatggtggatgtacaacaatgaagacactcctgttgttgccgtttctattattgacaccaacagcttggagaaccagctcgaccagatgcctaggagattctatcttgctgggaaccaagagcaagagtttctaaaatatcagcagcagcagcaaggaggttcccaaagccagaaaggaaagcaacaagaagaagaaaacgaaggaagcaacatattgagtggcttcgcccctgaattcttgaaagaagcgttcggcgtgaacatgcagatagtgagaaacctacaaggtgagaacgaagaggaggatagtggagccattgtgacagtgaaaggaggtctaagagtcacagctccagccatgaggaagccacagcaagaagaagatgatgatgatgaggaagagcagccacagtgcgtggagacagacaaaggttgccaacgccaaagcaaaaggagcagaaatggcattgatgagaccatttgcacaatgagacttcgccaaaacattggtcagaattcatcacctgacatctacaaccctcaagctggtagcatcacaaccgccaccagccttgacttcccagccctctggcttctcaaactcagtgcccagtatggatcactccgcaagaatgctatgttcgtgccacactacaccctgaacgcgaacagcataatatacgcattgaatgggcgggcattggtacaagtggtgaattgcaatggtgagagagtgtttgatggagagctgcaagagggaggggtgctgatcgttccacaaaactttgcggtggctgcaaaatcccagagcgataactttgagtatgtgtcattcaagaccaatgatagaccctcgatcggaaaccttgcaggggcaaactcattgttgaacgcattgccagaggaagtgattcagcacacttttaacctaaagagccagcaggccaggcaggtgaagaacaacaaccctttcagcttcctggttccacctcaggagtctcagaggagagctgtggcttagagagccctttttgcatgtgctaccacacttttgtccttttgggctctagctagtgctggtagcagtaaataagaatgaataaaagaaacaaaggcttagatgccctttgttaagtgtagaataacgggtatagtaactatgtacccttgtgtaatgagtcactcaagtacctatgcgggaaaagcataaataaaagaagaaattccaat

SEQ ID NO: 8589 - DNA, 913 bp, Glycine max
  Clone ID: 700762915_FLI
cttgaaagtttttctaatccatcaaataaagaccagcttgaagaaagaatggcacgcatcaaagaggatccatctctgaaacatattttggaggagatagagactggcggtcctgctgctatgatgaggtactggaataatgaggaggttttgcagaagttgggacaagccatgggtcttgccaattcgggagatgcaggtgcctctgctgaaaattctggggcagatgagaccgaagatttgggaaatgaagatgaatcaattgttcatcatactgctagtgttggtgatgtggagggcttgaaaaatgcactagcctctggtgctgacaaggatgaagaagattcagagggaagaactgctttgcattttgcctgtggatatggcgaggtaaaatgtgctcaagttctcctcgaggctggagcaaaagtggatgctttggataagaataagaacactgctctccattatgcagctggttatggcagaaaggaatgtgtggcccttctccttgaaaatggtgctgcagttactctccagaatatggatggtaaaactccaatcgatgttgcgaagctaaacaatcaaaatgaagtcctaaagctacttgagaaagatgcttttctgtagttgtaatgcatgatgccatgctgtcaccaacaagcaaagggggaaactgaggggaagaaggcatggtgacttcgttattttctcttttggtttcttccagccatttagtgtgttaaactaaattgattagcgttgttggatgagttaccatagaatttgttatctatggtcttgtaatgcatttattgttacactgcatgattttgaagattagtgccgtcatgattttattaatgtttcaattttacttataatacattgcttcgtgggcaaattctggttc

SEQ ID NO: 8590 - DNA, 1901 bp, Glycine max; identical to SEQ ID NO: 7633
  Clone ID: 700762965_FLI

SEQ ID NO: 8591 - DNA, 980 bp, Glycine max
  Clone ID: 700763070_FLI
caaggtctcagattttggattggctagaacagcactggatgagagaaacaagcacatctccacacatgttatgggaacatttggctacttagctcctgaatatgcaatgactggccatcttctggtcaagagtgatgtttatagttatggagttgtactccttgagctcctaactggaagaaagcctgtggatttgtcacaaccaccgggtcaagaaaatctcgtgacatgggttcgtccacttctcacaagtaaggaaggcttgcaaatgatcatagacccatatgtaaagcctaacatttctgttgatactgtggtaaaagttgcggcaattgcatccatgtgtgtgcaaccagaagtctctcaacgtcctttcatgggagaagttgttcaggccttgaagctagtatgcagtgagtttgaggaaacagactttataaaatcaaagggttctcaagagggtcttctaaccgatgtgaaaggaattttttccgaagcttcaggtgaaagagtggaattttcagagtgtcaaaaaactttttctggctatcaatctaatgaagaaaaggtaagattatcagcatcagagttgctcagtacttcaggtcaggaatttgagtcgttcaggcagtattctcgttcagggcctctaattattgggaagaaaaggcagttctggcagaagttgagaagtttgtctagaggtagctccagtgaacatggatcccattaagcttttcgtaatcttgcgttttccataccgaattcatcgagttccatgaatcgcatgttagattcacttgagagaaaatattgtgataataatgtaacaaagtcacaaactacaacaacttttgtcaatgtataaactatgtccccatgttggtttctaggtaactatgtttgaacaattggtactgcggtacgtgtccataatattagttgtctgatatttaaaaatggactaatttgttgaaagg

SEQ ID NO: 8592 - DNA, 1694 bp, Glycine max
  Clone ID: 700763253_FLI
ctctccatttgtccttgaatataatactcagcatggctaagcttgttctttccctttgttttctgcttttcagtggctgctgcttcgctttcagtttcagagagcagccacagcaaaacgagtgccagatccaacgcctcaatgccctcaaaccggataaccgtatagagtcagaaggtggcttcattgagacatggaaccctaacaacaagccattccagtgtgccggtgttgccctctctcgctgcaccctcaaccgcaacgcccttcgcagaccttcctacaccaacgctccccaggagatctacatccaacaaggtagtggtatttttggcatgatattcccgggttgtcctagcacatttgaagagcctcaacaaaaaggacaaagcagcaggccccaagaccgtcaccagaagatctatcacttcagagagggtgatttgattgcagtgccaaccggttttgcatactggatgtacaacaatgaagacactcctgttgttgccgtttctcttattgacaccaacagcttccagaaccagctcgaccagatgcctaggagattctatcttgctgggaaccaagagcaagagtttctacagtatcagccacagaagcagcaaggaggtactcaaagccagaaaggaaagcgtcagcaagaagaagaaaacgaaggaggcagcatattgagtggcttcgccccggaattcttggaacatgcgttcgtcgtggacaggcagatagtgagaaagctacaaggtgagaacgaagaggaagagaagggtgccattgtgacagtgaaaggaggtctcagcgtgataagcccacccacggaagagcagcaacaaagacccgaggaagaggagaagccagattgtgacgagaaagacaaacattgccaaagccaaagcagaaatggcattgacgagaccatttgcacaatgagacttcgccacaacattggccagacttcatcacctgacatcttcaaccctcaagctggtagcatcacaaccgctaccagcctcgacttcccagccctctcgtggctcaaactcagtgcccagtttggatcactccgcaagaatgctatgttcgtgccacactacaacctgaacgcaaacagcataatatacgcattgaatggacgggcattggtacaagtggtgaattgcaatggtgagagagtgtttgatggagagctgcaagagggacaggtgttaattgtgccacaaaactttgcggtggctgcaagatcacagagcgacaacttcgagtatgtttcattcaagaccaatgatagaccctcgatcggcaaccttgcaggtgcaaactcattgttgaacgcattgccggaggaagtgattcagcaaacttttaacctaaggaggcagcaggccaggcaggtcaagaacaacaaccctttcagcttcctggttccacctaaggagtctcagaggagagttgtggcttagagccctttttgcatgtgctaccacactttcgtccttttgggcactagttagtgtgcgtagcaataaataagaacgaataaaacaacaaaggctttgctgccctttgttaagtataaaataacgggtaatgtaattgtacccttgtgtaatgagtcactcaagtacctatgcgggaaaatcataaattaaaagagaaattccaatgaattttctgtc

SEQ ID NO: 8593 - DNA, 2558 bp, Glycine max
  Clone ID: 700763388_FLI
aattcctggagcattttatatcaagaaattccactcccatcatcccattcaaaattaattttgaatgcagattggcctgctcccaaagttaattttgaatgggatgatgggagtggaattcctggagcattttatatcaagaattttatgcaaactgagtttttccttgtgagtttgactcttgaagacattccaaaccatggaagcatccactttgtttgcaattcgtggatttacaatgccaaactcttcaaaagtgaccgcattttctttgccaaccagacatatcttccaagtgagacaccagctccactagtcaaatatagagaagaagagttgcataatttaagaggagatggaactggagaacgcaaagagtgggaaaggatctatgattatgatgtctacaatgatttaggtgatccggataaaggtgaaaatcatgcccgtcctgttcttggaggaaatgacacctttccttatcctcgtagggggagaactggtagaaaaccaacaaggaaagatcctaatagtgagagtaggagcaatgatgtttatcttccaagagatgaggcttttggacacttgaagtcatctgactttcttacttatggactaaaatccgtatctcaaaatgttcttccattattgcaatctgcttttgatttgaatttcacaccccgtgagtttgatagctttgatgaagttcatggactctattcaggcggaattaagctgccaacagatataatcagcaagattagtccactacccgtgcttaaggaaatcttccgaactgatggtgaacaggcccttaagtttcctcctcctaaagtaattcaagtgagtaagtctgcatggatgactgatgaagaatttgcaagagaaatgcttgctggtgtaaatccaaacttgattcgttgtcttaaggatttccctccacgaagcaagctagatagccaagtctatggtgatcatactagtcaaataaccaaagaacacctagagcccaacttagaagggctcactgtagatgaggcaattcaaaacaagagattgttcctactagatcatcatgacccaatcatgccatatttgaggcgaataaatgcaacctccacaaaggcttatgctaccagaaccatccttttcctgaaaaatgacggaactttaaggccacttgccatagagttgagtttgccacatcctcagggagatcaatctggtgcttttagtcaagtttttctgcctgcagatgaaggtgttgaaagttctatttggctgctagcaaaggcttatgtagttgtgaatgactcgtgctatcatcaacttgtcagccattggttaaacactcatgcagttgttgagccattcatcatagcaacaaacaggcatctcagtgttgttcaccctatttataaactccttcaccctcactatcgtgacaccatgaacataaatggccttgctcggttatcactggtcaacgacggtggcgttatagaacaaacatttttgtggggaaggtattctgtggaaatgtctgctgtagtttacaaggattgggtttttacagatcaagcattgcctgctgatcttataaaaagaggaatggcaattgaggatccatcgtgccctcatggcattcgccttgtgatagaggactacccttatgctgttgatggacttgagatatgggatgctatcaagacatgggtccatgaatacgttttcttgtactacaaatcagatgacacacttagagaagatcctgaactccaagcctgctggaaagaactcgtagaggtgggtcatggagacaagaaaaatgagccatggtggcctaagatgcaaactcgtgaagagctagttgaagcttgcgctatcatcatatggactgcttcagcacttcatgcagctgttaattttggacagtatccctatggaggtttaatcttaaaccgtccaactcttagtaggcgattcatgcctgagaaaggttctgctgagtatgaggagctgaggaagaatccccagaaggcttacttgaagactattacaccaaagtttcagacccttattgacctttctgttatagaaatcttgtcaaggcatgcatctgatgaggtgtaccttggggagagggacaatccaaattggacatctgatacaagagcattagaggcttttaaaaggtttggaaataaactggcacaaattgagaataaactctcagagagaaacaacgatgagaaactgagaaaccgttgtggaccagttcaaatgccttatactctgcttttgccttctagtaaggaaggattaactttcagaggaattcccaacagtatctctatctgaagaggtttgtggttccttaagttttgtggctttgaataaaagatagaagagaaggaatctgaatttcttcatccaacctgcacatggtaatctagtgtgtttgagtgctttcatgtttggctttaataaaataaaagcagttgttttgtaaaatgttcagaatcaataaaagcatttactgctttgctttgtgcgct

SEQ ID NO: 8594 - DNA, 1694 bp, Glycine max; identical to SEQ ID NO: 8536
  Clone ID: 700763412_FLI

SEQ ID NO: 8595 - DNA, 1819 bp, Glycine max
  Clone ID: 700763420_FLI
tatttctcacactcgcaagtctcaagcaactcacacaggaagcggcaaacaaagcacacagaaagtaaaaagcggaaattaaggagcggtggtgacggtggtagtgaataaataaaagcagcaccataccatggggggagaagaagtagcaagagtcaaagcagagttgttcgacgacaacgaaagcgatcgcaacgacgacgacgttttgagcgagagcaaggactcgggagtgacgacggctcacgcagtgaaagaagagatggatgacggcgccgctaactggtcttcgtcgtcgtcgacttcgcccaaaccgatggaagggttgcacgaggtgggcccccctccgttcctgaagaagacgtttgaaatggtggaggaccctcacaccaaccccattgtgtcgtggagccaaactcgccatagtttcgtcgtttgggactcgcacgagttctccaaaacccttctcccaaagtacttcaagcacagtaatttctcaagcttcgttcgccagctcaacacctatggctttaggaaggttgattcggaccgttgggagtttgcgaatgaaggattccaaggagggaagaagcatttgctgaagaacataaggaggaggagtaagtgcaacaaactgcatcagggagcattcaatatgatgaagccagacgtggattctgaagtggagaagctgaagaaagaccagaacattttgaaggtggagattctgaagctgaggcagcagcaggaaaattctcatgttcagctcacaaatgttcaggagagaattcggtgtgcagagatgaagcagtttcagatgatgtatttcctcaccagaatggctagaaggcctgcgtttgttgagcagttagtccataagattaggcgaaaaagagagattgatggtaatgacatggttaagaggcctagattgatgggaaatccgtgccatgtacccttccctaagacaatggaaacaacacctaattttgattatagacaccaacaaggtcataaacaatttgcaacattgcaatctgagctcaatgtgacagaagtgaactccagtaggatggagcacccaactccctctcctttagaagatgaattaggcaactctttgcaagggttaagggctcatggttgttctagagcaagggcacaagatgcatcttcttctgcctatcatgttatgtcagaaaaactaatgagagaaaattctatagttgatgaagaactagatgtgaatgactccaatatctatcttgaattagaggatttgattactaagcctacagattggtctgttggatctgcaagtggattggtggaacaaactagttgaattaatctcactagtggaatagtgccttgtaatggttgcaagagtgtgcttgtgtggatgctctgctgcaacacaagatgaagaacttgatattataaggctcttcgattaccacttatcagtcttgaaagtgtaggacgtagatgctcgccccagctttttatatgatcaagcgagagtgcgagactttccatgtttctgtttggccgggtccaaattgttcatatgttgttgtatatatttccctctccgctttgtgttccttttgttaacttaggatctcaagtcctatattagcatatatagtaggcatagctaagcctcttgtgacgtagtaattaactatgtaaatgtaaagttgtaaatttgtaatgcagaaaatgtttttcagttccctgcttccctttgtctttcccacggaatcaaatcacttttttttttcagtcagaaataaaataactttttttttcagtc

SEQ ID NO: 8596 - DNA, 960 bp, Glycine max
  Clone ID: 700763445_FLI
gcgtttctattattgacaccaacagcttggagaaccagctcgaccagatgcctaggagattctatcttgctgggaaccaagagcaagagtttctaaaatatcagcaagagcaaggaggtcatcaaagccagaggaaaggagatgatttaggatgaaggagatagagtgggaagtgtgctgaaggccttgataggttgcggtgttgaacaacaagagtgcttttgttggaggcactttcaccattttttggatgagaatcagagcttcgtgcgactgggacatgtttcactaaccccagccacatttgaaaatcatagattacaatcaagccaacatggacatttttatttttattttttctcttttgttgattgtgatctcgttcccatctcaattctcacccttttcttcaatttcaataccctcaagcagtgacctcgtttgttatttcacatgctcatacactagataaagaaatgattcagttatcattctttaacacgtttcaatgcataaactacttaaatcaaatgaattgattcccaggcttcctaatatctttagaaaagacagtccagactcataactggaagaatcttgaagccgccaatttagattttcactgtatccccatcagaggaactaaggaaaaatgtgttactagctacctctttcatataattatttatatgatccctaaaatgtgacaagtataggtttattaaatggtgttgtccttttaatgggtgagcctccttcatggtttgacctatttaactttttgtctgatcatattagtctaactgtgtaggaaaatttgattgtgctcctcccctcatcaacaccaacctttggctcctgaagattactaggttcttatactagttgcatttgtgtatcaaaaaatgagtgttatgagttgctttggaatatctaaatatatgctatgcttgtgttttc

SEQ ID NO: 8597 - DNA, 885 bp, Glycine max
  Clone ID: 700763456_FLI
ggtcaccggaactccccatggctgggatgtcctcttctacatcttccagttcttccgcgtcgtcctcctcttcaccgtcatcgttctcgtcggcaccggctggtccttcctcaaacccttcctccaggagcgcgaaaagaaggtcctcatgatcgtcatccctttacaagtcctcgctaatgtggcttccgtcgtcatcggcgaaacggggcccttcatcaaggattgggttacttggaatcaggttttcttgctcgtcgacattatttgctgctgcgccatcattttccctattgtctggtccatcagatctctcagggaaacctccaagaccgatgggaaggccgcgagaaacctcgccaagttgaccctcttcaggcaattctacattgttgtcattgggtacttgtacttcacccgcattgtggtctttgctttgaagaccattgccgcttataagtaccagtgggtgagtaatctagctgaggaggccgccagcctcgcgttttatgtcgtcatgttttatatgtttaggcctgtggagaggaatgagtactttgtgctcgatgaggaggaagaagaggccgcggagatcgcgctcagggatgaagaatttgagctttgaaagaatgaaatagtttcgctttaccgaatttcagtgcaatatggtttcattcgcggatgacttggagaattgatgtttagagcaagtgaagcatgcaattgaacagagtgctgcctggatccatttttcttttactaaaagagtaccttgaagcatagcaaggattgattgatgatgggcaagtgggtggttatgtagttaactatatctcctaactgtttacatgttaaatgtatgtatgttttatttgctcctggttt

SEQ ID NO: 8598 - DNA, 2311 bp, Glycine max
  Clone ID: 700763470_FLI
gcgaaggcgcgtgtatggtgtgcaagggcttgccggggcaagaagagagactgttatgcgtcacgtgtgacaccccttggcacgtgccctgcctgttcgcccctccacccactctgtccgccaccgcacgatggctatgccctgattgttccattctggactctgacgttccaccagtccccgctcccgcccgcaaccaactggtggctgcaatgctggccgttgaaaatgacgcttctctcacccaacacgacaaggcccgaaaacgtcaagagcttttgactggaaaggctcccgcagacgacgacgacgacgacgaacaagagaataaatcatccttatcggatattctctccagatctctcaactgctccatctgtatccagttaccggagagacccgtcacgagtccgtgtgggcacagtttctgtttgaagtgctttgagaaatgggttcggcaagggaagaggaattgtgccaaatgccggcagattattccggccaagatgacaagccagccccgtatcaattctgcactggtgtttgcaatacgaatggcgaggcaggcttcaaacagtagtggtagtggccgaggaggagtgaggagtgttaaccatttccttcacaatcaagatagacctgatgagccattcaccactgaacgcgcacagaggagtggtcgtgccaatgcggctagcggtaaaatattcgtgacagtgcctacggatcattttggtccaatcacggcagagaatgaccctctgcggaatcaaggtctgctggtaggtgaaagctggagagacagactcgaatgcaggcaatggggtgctcacttcgtccctgtgggtggcattgctggacaatcagaccgcggtgcacaatctgttgttctttctggtggttatgttgatgacgaggaccatggagaatggtttctctacaccggaagcggcggtaaggatcttagcggcaacaaacgcacaaacaagagtcactcttttgaccagaagtttgagaaatacaaccgtgcacttcaagttagctgtctccagggttatcccgttcgagttgtcagatctcacaaagaaaagcgatcctcatatgcccctgagactggtgtgcggtacgatggaatttatagaattgaaaagtgctggcagatagcagggttgcagggtttcaaagtttgccggtatctattcgtcaggtgtgacaatgaacctgccccttggacaagtgatgatcatggagataggcccagacccttgccggtcattcgtgagctgaaaaaggctacagtcatacatgaaaggaccgaatctccatcttgggattttgatgaggaggattctcgttggaaatggaagaaaccaccgcctcccagcagacaaaaggtacaaaatgttgaacccgtagaggtagcaagggcaaagtcaaataaagaagtaaagaaattccaacttaagtcaatcaaggaacaattgcagagagggttctcgtgcatgatatgcaaggaggttatggtttcaccagtgacaacaccgtgtgctcataacttctgcaagtcctgtttggaaggtgaatttgctggtcaggcttttgtgaaggagagaagtaagggtgggagaacacttcggtcccaaaaaaatgtgatgaaatgtccttcttgttctattgacatttctgattatcttcagaacattcaggttgacatagatttgaagagtgcaattgagtcattgaaagccaaggtcgaagaaattggagaatcggtggagtcaagtgaagatgcagatggattacaggatgatggtgctggcaaggatgaagatactgactccagaaacaaaaattctgtgcaggagttgaatggtctacctgaaggatctgatgttggtgaacttgaagataccaccaataaggagccagatccagcaatgaagtgcaatggaaagagaaagaaaggtgattatggaaatcaatcgcctgatgataaaatggaaaaaagaggtaaaaattacaaaacaacagaggaagaattgcatgaagaaaatgattcttcatcaagtcctctccatcctcaatgaaatcttcatagactgaggaattttaacaactagaccttcagcttgttggattgcaacatgattctctttattttgctgatggttcagtattagtcttagaaatgctataaggactatcattgtatcaagttatactcttttcgttttagtttactttcttagtttgttatcacccttttgtgaatgttcatggttttatgggaaatggaactatcaaagacctt

SEQ ID NO: 8599 - DNA, 851 bp, Glycine max
  Clone ID: 700763650_FLI
ggaagaggaagaagaagaagaggatgagaagccacagtgcaagggtaaagacaaacactgccaacgcccccgaggaagccaaagcaaaagcagaagaaatggcattgacgagaccatatgcaccatgagacttcgccacaacattggccagacttcatcacctgacatctacaaccctcaagccggtagcgtcacaaccgccaccagccttgacttcccagccctctcgtggctcagactcagtgctgagtttggatctctccgcaagaatgcaatgttcgtgccacactacaacctgaacgcgaacagcataatatacgcattgaatggacgggcattgatacaagtggtgaattgcaacggtgagagagtgtttgatggagagctgcaagagggacgggtgctgatcgtgccacaaaactttgtggtggctgcaagatcacagagtgacaacttcgagtatgtgtcattcaagaccaatgatacacccatgatcggcactcttgcaggggcaaactcattgttgaacgcattaccagaggaagtgattcagcacactttcaacctaaaaagccagcaggccaggcagataaagaacaacaaccctttcaagttcctggttccacctcaggagtctcagaagagagctgtggcttagagccctttttgtatgtgctaccccacttttgtctttttggcaatagtgctagcaaccaataaataataataataataatgaataagaaaacaaaggctttagcttgccttttgttcactgtaaaataataatgtaagtactctctataatgagtcacgaaacttttgcgggaataaaaggagaaattccaatg

SEQ ID NO: 8600 - DNA, 466 bp, Glycine max
  Clone ID: 700763686_FLI
ataaagatgagtttgaagaacaacatggtggtgctaaaggtgtgtttgttgcttcttttccttgtgggggttacagctgcacgcatggaactgagcttcttcaaaagtgatcagtcatcaagttatgatgatgatgagtattcaaaaccatgctgtgatctctgcatgtgcacacgctcaatgcctcctcaatgcagctgtgaagatattaggctgaattcatgccactcagattgtaagagctgtatgtgcacacgctcacagccaggacagtgtcgttgtcttgacaccaacgacttctgctacaaaccttgcaagtccagagatgactagaaaaactaatagctctctcaaatggacgaagcccctttaggctttgtttgttatgttaggggagacaaataaaacaagaaataaaagctcagtggccagtaatttgcttttagcaaatttggtcatttttatt

SEQ ID NO: 8601 - DNA, 1641 bp, Glycine max
  Clone ID: 700763704_FLI
ttgctttctttactggtgtaaaccatcatgggcaacctgttctctttggttgtgctttcctaattaacgaatctgaagcatcatttgtgtggcttttcaagacatggcttatggccatgtctggatgtccgccagtgtcaataacaactgatcatgattctgcaattcggtcagccataatacaagtcttccccgagactcgtcaccgtttctgcaagtggcacatctttaaaaaatgccaggagaagttatctcatattttcctccaatatccaaattttgaagcagaatttcacaaatgtgttaacttgactgagtcgactgaggaatttaagtcttgctggtcaacacttgtagataaatatgatctcagggtccatgaatggcttcaagcaatatattcttcttgtaggcagtgggtacctgtatatttgcgagacacattctttgcagaaatgtccatcactcagcgaagtgatagcatgaactcttactttgatgggtatataaatgcttcaaccaatttaagtcagttctttaagctctatgagaaagcacttgaaagtcgcaatgagaaagaagtgagagcggattatgacacaatgaatactttgccggtattgagaaccccatctccaatggagaagcaagcatctgagctttacacgagaaaaattttcatgaggttccaggaggagttagttgggacacttgcattaatggcatccaaagccgatgatgatggggaggtcattacatatcatgtagctaaatttggagaggaccataaagggtattgtgttaaattcaatgttctggagatgaaagcaacttgcagttgccaaatgtttgagttttcaggccttctttgtaggcatgttttggcagtctttagagttaccaatgtgcttactctcccatctcattatatattgaaacgttggacaagaaatgccaaaagcaatgtaatattagaagaacatgcttgtgatgtatatacttactatttggaatctcatacagttagatataacaccctccggcatgaggctcttaaatttgttgatgaaggcgcgcggtctgctgaaacttatgatgtcgcaatagatgctttacaagaagctgcaaaaagagtttctcagggaatacaaaatgagggaaaaattcctatcagtaatggaaaggtaaggagtcacgtgctgaatgatgaaagtcatgctaattacacaagtgggtgccaggaagcaagcttgagccagcatatgtctaaggatgatttggataatattagaaaacttatgaatgagcttgagtgtgcaaatcggaagtgtgaaatttatcggtccaacctgctttcagttttgaaagctgttgaggatcacaagttagagttgtcagttaaggtggaaaacatcaagataagcatgaaagatggcatctaaagactatggataattaacattgaaacagatacgaaaacaaattctaaattctattttggcaaccctatcgcgcatcaataatgatcccatgacaacccgccgccccacaattgtcttgtagccctcttatgatgttgtataaagttggtttgcagtggattatttttttgttcagtactatatttattatattgatgtc

SEQ ID NO: 8602 - DNA, 1386 bp, Glycine max
  Clone ID: 700763723_FLI
gctaaagataggtcaaatccaacgctttcttcaacatacatatctcaattatgtagcattagcatacccttttttattctttcttctatttctctgcagtgctcaagccttcctagctcccttccttggctcaaaagattttcccttgattttgccaatttggtgcatatctgcttcgttttgctttctgtgtcttcaagtcttacttggaagggtcagatttgctgcaaatctctccatttccccatcatcagaaggtttaatttcttggtttactctatagctacttgaaagaagtcaaaaaaagagataatggtgaggggaaagactcagatgaagcgtatagagaatgccacaagcaggcaagtaactttctcaaagcggcgaaatgggttgctgaagaaggcctttgagctatcagttctgtgtgatgctgaggttgctctaatcatcttctctccaagagggaagctctatgaatttgctagctccagcatgcaggagtcaattgaacgataccgcaggcataccaagcatgttaatccaactacattcagatcagttgaacaaaatatgcagcatctgaagcaagaggcagaaaacatgatgaagaagattgaccttcttgaagctgcaaaacggaagttcttgggggaaggtttgggggcttgctccattgaggaactgcaacggatagaacaacagttggagaggagtttaagtaatgttagagcaagaaaggtttttaaggaacaaattgaacaactaaaagaaaaggaaaaagccctactagatgaaaatgccaagctcactgaaaatgccaggctctctgagaagcatgacatccatctacagccagcaacaaagaatcagaatgtgaatcaaccccaatgcaatgcagaaagtagttcaagttcagatgtggagaccgaattgttcattggacttcctgatacaagagcaagacacatctctcatcacgtctagtagaagattacttattccctggctatggaaaataaaataagggtaagcctaactgtatcatcaatgtatatgtatcctgatgctctagtaaagataataatagaataattttaaatcctcttacagtatcttcctaataatccttctaattattaatgaaatgaagaaaatattaaattttttctctgttttccaagtgttaaatgtttttacattttcatctaatattttctttatgaagtataagaaaattattgggaggatgttataggaggatataaattattctaaatagtagtggtaattggtgggagtgatttgttttgcttgattatatcctcaaacccatggtctaatgacccgttgtattgatacttatactttagactcagcagtatg

SEQ ID NO: 8603 - DNA, 891 bp, Glycine max
  Clone ID: 700763741_FLI
gatttatctgctccttgggctggtgaaatagagcaaaagattctaagctcaccagaagttggaattggaccttatgtggaggtagctttctaccacaaaccttcaaaaacactattggtgacagatgctgttatttttgtcccaagacagccacctgagtgtataagcaaagaatccttattagcatcagcaaaaaatggcttggctgttaaacttcttagtaaaggaaaggaggtacctgacgagccagtagttgacgacaaaaggaaccgacaaaaaggatgggaaagaatggttctacagatcttgtttcttggtccatcaaaccttttagaacctaatgcaagctttgaacagatgtcacaaaagttgattgtttcacctattgtgaagactctggtcttcagtaaagttcctgagaaggttagagagtgggttgatagcatttcgcgagattggaggttcaagagaataatccctgctcactttgctgctccaataagtgcaagtaggtctgatttcagggctgcatttgcatttttggatgagtttttgggggaaagtaatgctgcatggccttcactttcccttctcttctcatcaatcatgggaaaggcagccagctattttcctccggatgacatgaggaccctatcatcccttgaccagtttttggtgtctgttggtgctgtgaaaaaaactgtttcaggcaggaaaaggtgagatgagaggtgcatcacaacttggccttgccaatacttgttaacttttcaaatgtaaaataagtataattttgttacattaggagctcgattcttaaggaaaatgtaaatgttgtttgacattggactacatatacatgttgaggaaacaaggaaatgttttacatgg

SEQ ID NO: 8604 - DNA, 896 bp, Glycine max
  Clone ID: 700763765_FLI
gggaaagtttaaagccactgattctcctcttccgactgttccgggctatgatgttgcgggtgtggtggtgaaagttggtagtcaagtgaaggactttaaagtgggtgatgaagtgtatggagatgtaaatgagaaagcacttgaaggtcctaagcagttcggatctttggctgagtacacagctgttgaggagaaattgttggcaccaaaaccgaagaatttggactttgctcaagctgcttctcttcctctagcaattgagactgcttatgagggtttggagaggactggattttctcctggtaaatctattcttgttctaaatggttctggaggagttggaagcctagtgattcagctagctaagcaagtttatggagcttcaagagttgctgccacttcaagcactagaaatttggacctactgaaaagcttgggagctgatttggccattgactacacaaaagagaactttgaagatttgcccgaaaaatttgatgtagtttatgatgccattgggcaatgtgacagggcagtgaaggctgtgaaagaagatggcagtgtggtggcactcacaggtgctgttacaccacctggcttcagatttgtagttacttccaatggagaagttctgaggaaactaaacccttacttagaaagtgggaaggtgaagccaattgttgaccccaaaggtccattcccctttgataagcttgctgaagccttctcttaccttgaaacaaaccgagcaactggaaaggttgttatacatcccatcccttgaatcaagtaaaagggataggcaattttgccgtgtctgtctagtaaacttcatattctatgtaaatcagagtttagattaaagctaaaaaacaaaaataaagaacttcattttt

SEQ ID NO: 8605 - DNA, 1500 bp, Glycine max
  Clone ID: 700763807_FLI
ggtagaagcaactcaggtaaagtatgggaaaaatatgccagttgcggcagctgcagctgcagctgctgctgttgttgcatcttctatggtagttgctgtaacaaagtcgaacgctgactcgaatcttgagattcctgtagcagcagctgctactgctactgctgcagctgttgtagcaaccactgctgctgtaagtaagcagtatgagcagggaagttggagtggtggtgatacagagggtgctggttgtgagccgaagtgtagtggtgatggagagcataatgctttaggagaaaacacagaaggcgagagaaaatctgatcgatcagtaagtaatgacagcacaaagtctgattcagcgctagatgatgttgctgagtatgatattccgtgggatgaaattgcggtgggagagcgtattggacttggatcatatggggaagtttaccgtggtgaatggcatggaactgaagttgctgtaaaaaagcttctatatcaagatatctctggtgaattacttgaagaattcaaaagtgaggtccaaataatgaaaagactgaggcatccaaatgttgttctcttcatgggagctgtaactcgacctccaaatctttcaattgtttctgaatttcttcctagagggagtttgtatagattaattcaccgacctaacaatcaattagatgagcgaaggaggttgcagatggcccttgatgctgctcgaggaatgaactatctgcacaactgcactccagtgatagtgcatcgtgatttgaagtccccaaatcttcttgttgacaaaaactgggtagtaaaggtatgtgattttggcttatcacgaatgaagcatagtacattcctttcttccagatcaacggcaggaacagctgagtggatggctccagaagtgttgagaaatgaactttcagatgaaaagtgtgacgtttttagctatggggtcatactatgggagctctctactttgcagcaaccctggggaggaatgaatccgatgcaagtagtgggtgctgttggtttccaacatcgccgccttgacattccagataatgtagaccctgccattgcagatattatcagacaatgctggcagactgatccaaagttgaggcccacgtttactgaaatcatggctgctttaaagccattgcagaagccaattactgcttctcaagtgcatagactaagtgttcagtcatcacgagttgctgaagaccccgcaggataggagacaattatacaactaacattttgttttcattttactgctaaaaatgtgagggcaagttgtagagtatttaccatttgggattgacaaaagtgattgattccgctaacttacattctcattcaaggttttcactcctctagttccttctctttcttttgtttttgtccatttcctggtctcttctgtaatccacagtgcagtcattgtgctgataaaaaaaaaaacagtgcagtcattgtccaggttgtacc

SEQ ID NO: 8606 - DNA, 1471 bp, Glycine max
  Clone ID: 700763827_FLI
cacacctgccgccagtcacatcatccggatacgaaaggcgaccggtggcatcctcctcactgccagccacaaccctggtggccccgatgaggactttggcatgaagtacaacctcgccaacggtgccccggctcccgagagcgtcaccaacaagatctacgaaacctccaagaccctctcgtcgtacaagatcgccgatatccccgacatcgacttgagcacaattggcacacaaaagtatggcagcctcgaggttgagatcgtccactcaacagaggactacctgaagatgctcaaggacatcttcgactttgacctcatcaagtcgttcctcaagcagcattcggacttcaaggtcctcttcgacggcctgagcggtgtcaccggctcatacggtgtggacatcttcgagaaggagctcggcatccccaacagcacacaaaactgcgtccccaagccagactttggcggccaccacccagaccccaaccttgtctacgccaagtcgctggtcgacgctgttgacaagaacggcgtccactttggtgctgccagcgacggtgatggtgaccgaaacatgatctacggcgcaaactcgttcgtctcacctggtgacagcttagccatcatcgcacaccacgccgagcttatcccgtacttcaagaagcagggcatctatggtctcgcccgcagcatgccgacctctggcgcgattgacctggtcgcaaagaagaagggcgtcgagtgctacgaggtgcctacaggctggaaattcttctgcggtctcttcgactctaacaagatgaacatctgcggtgaggagagtttcggcacaggcagcaaccacatccgtgagaaggacggtctgtgggctgtcgttgcctggttgaacatcctggccggtgtcggacagcagacgggtaccacacccagcattgcctcgatccaaaaggacttttggaagacatatggccgcacattcttcactcgttacgattatgagggctgcgagactgagggcgcaaacaaggtcaccagtcacatgaaggaactcatcaccaccaagaaggacgagttcatcggctccaccgtcgctggccgcaaggttgtcgaggcagacgacttctcctacaccgacctggacggtagcgtcagcaagaaccagggtatctttgtcaagtttgacgatggtagccgcatcgttgtccgtctgtctggcacaggtagcagcggcgccaccattcgtctttacattgagaagcacactagcgacgagtcgacatacgacatggacgctcaggattacctcaaggacaacgtcaagcttgcgactgacctcctgaagctccaagagtacgttggccgcaccgagcccgatgtcaagacgtaagcgcgtttgttggagtggagaacacggagatgtaattagcatgattagacgacttgtacacgagaataccagtaaaaacag

SEQ ID NO: 8607 - DNA, 1433 bp, Glycine max
  Clone ID: 700763862_FLI
ttcacatttgacggaaacagggtagcgtgagagtcgagtcacctgccgaaatcctatagcaccattttgaccaaggcgatatagctaacagctattcgcccccccatactttttttaattttctccttctcccatggtgtaattgctccaactatggccgtggacctcatgacgaccggttacacccgaaacgacaacatcagtagtttcacaaccaaagccgaggaaaatgccgtccaagaagccgcttctggtctagagagcgtcgagaagctcatcagactcctctcccaaacccaagcccaagcccaagcccaccatcaattcaacaacaacaatagctctagtaatgaaatcgccatcgccatggactgcaaagccgtcgctgacgtggcagtctccaagttccagaaggtcatttccctcctcggccgaacccgtaccggccacgccaggttccgacgcgcccctctccccaaccaacaccaacacacccaacctccctccgaaccgcccgttctccacgctaccccgctgcaccagatcccacctccctcccttcaccaaatccccaaaaccgagaaacacctcaacgattcatcgtctaagacgcttcatttctcatacccctccgccgttacttccttcgtctcctccctcaccggcgacgccgccgacaacaaacaaccatccccggcggccacgaccacgacctcccactttcagatcacgagcctctctcacgtgtcgtccgcggggaagcctccgctttcgtcttcctctttcaagagaaagtgcagctctgagaatttaggttctggaaagtgcggtagctcctctagccgctgtcattgttccaaaaagaggaaaatgaggttgaagagggtagtgagggtaccagctataagcttgaagatggctgatattccaccagatgattattcttggaggaaatatggacagaaaccaattaaaggatcgcctcatccaaggggttactacaagtgcagtagtgtgagagggtgtccagcgcgaaaacatgtggaaagagctttggatgatccagctatgctggtggtaacatacgagggagagcacaatcacactgtctctgctgccgatgctactaatctcattctagaatcgtcttgaaattcgtagccaaaatcatcttttttccgtgacaaggtttagaaacgcaagccatcatttaatcaacgttacaagttttcaacggggtgcaattatggcgtgttgaattgaattgcaactttactactctagtcagtcaggggggcattaaaatctccaaagaaattagtagtgggtgttgttccctttccctgtacactattggattcttttttatctttattttttttttctcgttctcttcaaggctaaatggaacattgtgaatccgttgcatcatt

SEQ ID NO: 8608 - DNA, 970 bp, Glycine max
  Clone ID: 700763939_FLI
ggttgttgtattgtagtagtgtgtaaagtcttggtgatggatagacacaaatgcaagctttgttcaaggtctttcagcaatggcagagcccttggtgggcacatgaaggctcaccttgcttctctccctctccctctccctccaaagcttcactcttgtttctcttcctctgactcagaacaagaacaatctttaagggagaatcctaagaaaaccttgaggattctggatcctgaagacagagagagcgagacagagtctaataagaacccgactcgtcaacgatccaagcgcaactggaaatctaccatgcccaagctcagcctcggacaccccgaagccgaacctctcagctccgtctccgacacctcccccgaagaagacctcgccatgtgcctcatgatgctctcccgcgacacgtggcaggaacacaaactcgccaatgcaggtccacccaagactcgctgcagcagcggatcagagatcaagctcaagaacaaagtccgctccaagcacctctgccacgcttgtcacaaatcctttcgatcctctcgcgctcttgggagccacagaaccctgtgctctccccgtctggaagcccaaaataacagcatcattagtaataacaacattaaggtttttgaatgccccttctgttacaagctgtttggttctggccaagcgctcggtggacacaagagatctcacctaattccttcttcctcttcaaccgttaatcattctgtcaagttgaaacagagcttcatagatctcaacttgcctgctccggccgaagacgacgatcttagcgttgtttctgatgcctaattcgatctggcatatgttttaattgtttaatgtttagttgtctggtggtgttactcataaagtgaatttttcttcttcttcttcttcttcttcttctttataaaagtagctgagaatatttcattatgtttattgacagatc

SEQ ID NO: 8609 - DNA, 1207 bp, Glycine max
  Clone ID: 700763959_FLI
gtcttcacctcttcgctgctctggagggcttggtcttgacttgaaccaagtggatgaagcttctgacgtgggcaattgcttgagcagtaatcataaaattgatgtgccaattatgcaggtgaagccatcattgggtggtccaccaaatcgagaagtgaatgtccacagggactttgatttgaacaatggaccttcagttgatgaagtcaccactgaatcctcattgttttctctgcatgccaggagcagtgtgccatctcaaccgcttgtttctggacttagggtgagtactgctgagccagtcaacttctcttggcttccttccagtggcaacacctattctgctgtcacaatatcttcaattatgcctgatagaggggatcatcccttttcaattgttgccccaaatgggccacaaaggttgttgactcctgctgctggtggcaacccatttggacctgatatttatagggggccagtattgtcatcttctcctgcagtgtcatatgcatctgctccatttgaatatcctgtcttcccttttaattccagctttcctcttccatcagcttctttttcttctggatcaactacttatgtatatccaacatcaggcaatcagctttgctttcctgcggtaaattcacagttaatggggcctgctggtgcagtttcatctcattatcccaggccttttgttgttggccttgcagaaggtagcaatagtggtagtgccgagaccagtagaaaatgggcaaggcagggtttagatcttaatgcaggacctggaggttcagatgtggatgggagagacgggaattctcctcttccatctaggcaactttctgttgctagttcacaggccctagctgaggagcaagtaagggtccagctggctggtagtgttcgtaagaggaaggagcctgatggtgggtgggatggccacaaccaatcctcatggcaatagcaaaatatataatcatacaatctaatgaccacaaatgcttgtaagtgtttagatttgtatattcaaatgtttgtaacactttgtcacttgtgggagaggatctgaaaatatatcctgtgtcatgctgatgtaattcagtgagggggttacttttttcgttaagaaatatatttaaatgataaaggaataaatgctattgccatttctctgtgggcggtcttctgtcccatcttcattgag

SEQ ID NO: 8610 - DNA, 1042 bp, Glycine max
  Clone ID: 700764023_FLI
caataatttccacctgaagccggacaatatattccgtagaaacaaaataaattaaccaaaaccatatctccatataccttagattgaaattgaaaccaatcaagcatgtctaaagacaaagatggtgaggagccacttggtataggccttcaggtgatgctagcagcagctttctcattatttggtatgatcttattaatcatcatcttccatttttgtgtaaaatatttcattagacgccaacaaaggagacgccaaaacgaccttctttatcaaatcagcactcaaattgcaccaattgatgtgagttctgtggagccacgcaactctggccttgaccctttgatcatagcttccctgcctaagctcttgtacaagcaaacggaccaattcaagcaaggtgaagaagttgtagagtgctcggtttgcttaggcactattgtggaagatacaatcagtagggtgttaccaaattgtaagcacatttttcatgttgattgtgttgataaatggtttaattctaacaccacatgcccaatttgccgcaccgtggttgacccaaaggtgcaaccagaacatggtcatttaggtgccacacggcttcacaaccaagtccaacccacagcaccaccagctgagggtggtgatgagctaccagatggtaatgaattggagagggtgggatgttcaggtttgagaataggatcttttcataggatggttagtaacagggaaagatccgggagaaggactcagagctgtgatggatctaccatagtagatatagaaagacactaaattaagtagtgaatatattgttaattatttgttaattttctcctttcatttggatatattccttagtttaaattagtattggtatgttttcatttggatatattccttagtttgaattagtattggtatgttttttgtaatgagtgttggattgtttacgtcacaattttctcgcttgtttgtcaatgcttgtatttcaatttatttacttaggataccaaataatattatgtgaaatttgatt

SEQ ID NO: 8611 - DNA, 1405 bp, Glycine max
  Clone ID: 700764039_FLI
gttcctggtctttacgaggtacctgaggacatgattacattctaacaccacacattcctgttatttctttctctctgcgttcttcttcaatgcaactctattctgttcggtgacacaacaccactctgaagaacgtcgcacgcaccacccttctctctcttcaacaactcagctctcagaacagttacagtttccactgagtaaatcgcaatgcaggtaactgagacgaggactgttcaagttaagcagctttcagatctagctggtgtgagagagattcacgagttcttctccttttctggagaaatcgagcatgttgagatcctgagtgaagatgggaaatcaaagactgcatatgtgacatttaaagatcccaaagcccttgaaattgcattattgttgtcgggagcaactatagtagaccaggttgtgaagataactccagctgagaactatgtaccaaatcgtgaaatggaggaagtaagggtggtggaaaatgctataaatgttgctccttctgagaattctgagaatgtctccttgagtattgaggaggggaaagccagccccaccaatagaagaatctaccttagtaaagcacaagatgcagttacaagtatgctggcaaaaggttcagcaataagacaagatgcagtgaacaaagctaaagcatttgatgaaaagcatcagttgactgccaatgcatctgcaaaggtcatttctttggacaagagagttggactcacagagaaattgacagtaggcattgctgcagtgaaccagaaagtcaagtctgtggatcagaggcttcaggtttcagataagacaatggcagcaataattgcagctgagaggaagataaataacactggatcagctgtcaaaacaagcagatatgtgactgctggaacagcatggtttaacggtgcttttagcaaggtggcaaaggctggacatgttgcaagtactaaaactagagaaaaatttcatttggctgtttcaaacttgacagcaaaggaaccgtcagtggctgctgcataggccacaatttttggtaatcaagtcatttcatcaggtctttcagaacatgtgtttgaaactatttggtctttcagagcatgcgctgctttctttctgcccttcaacagttagatgcatgtggcaagtgcggtgattcaatttaatcctattttttgtattcttttgtcactctgttgttttagttgttgcttctatatcatttagcacgagtgattttggcttttttcccttttgtgaaaaggaaattataggtgtgatgctactgcatttcttctgtcaaagttcaaaaaaattgtgcgtgtataacttgacatatggttcaaagatttccgtgggaaattatcatcttgcagactacaatttc

SEQ ID NO: 8612 - DNA, 1073 bp, Glycine max
  Clone ID: 700764144_FLI
gctaacttcaacacctttaattttctaaaagtaattcagcggctgaataccaagcggagaagatgagtcaggagcagccacggcgtcccaaaggccaaaaccccatcaaatacggcgacgtttttgtcgtctccggcgaccttgcacagaagcccgtcgcaccggaagatgctgccatgatgcaaagcgcggaaactcgagtgctcggacaaacccaacccggcggagcagcttccgtcatgcaatctgccgccaccaggaatgaacaggctggccttgtcggtcaccgggacgtcaccgacgttaccggcgaccgtggcgtcacagtcacagaaactaaagtccctggaagacgcattataaccgaggctgttggtggccaggttgtggagcagtatgtggaggcaactccggttgaggcagggcgaagcagtgcaattaaggagaatgccataacaataggagaggcattggaggcgacggcacagactgtgggtcagaaagcggtggatcagagtgacgcctccgcgattcaggcggcggaggtgagagcaacgggaagtaacgttataacgccgggtggacttgcggctatggctcaatcagctgctgcttataatgctgactgcaagcttgaccaggacaaggtcaagctcgccgacattttggccggagccacagccaagttgcccgcggacaaggccgccacactgcaagatgctgaaggtgtagcgtgtgctgaggtgaggaacaaccctgatgccaccgccactcccggtggcgtagccgcttctgttgcggctgctgctaggctcaatgaaaatgttaagtaacgagtcatgttatgtgtcttgataatcatacttttgtttcatgatgtgtggtgttgatgtgttatagtctatagtgtattaataagtgtaagtggtgcaacatcttgtttttctttcttgtactctttgtgagttatattaattactggttttaaggactctacttaaggtgatgtatgtatactatgcgctatatgcatttctgtggttatcagttaataatatgtgctccaatcttgt

SEQ ID NO: 8613 - DNA, 1914 bp, Glycine max
  Clone ID: 700764284_FLI
atttgagaaggtgttgagtgccagtgacgcaggtcgaattggccgtcttgttctcccaaaagcctgtgctgaggcatattttcctcctatttcacaatctgaaggtgttcctttgcgaatgcaagatgtgaaggggaatgagtggacatttcagttcagattttggcctaataacaacagcaggatgtatgtattggagggtgtgaccccttgcatacaggccatgcaattatgtgctggtgatactgtaacatttagtcggatagatcctggaggcaaactagttatgggtttcagaaaagcatcaaattctacagatacacaggatgcctccacatctgcacaatctaattcagcaaagggaaccatctcttctggtactgagaatctgccatcaggaagtaatcatgccaatcttctccattcattgacagggaatgttgaaactcacttaaatggacatacagaacatctgcacttgggtactggaactgctggattgcttaaaactgaaaataatgagatgacaaacagcagttcaccacaacaacaaatttcggttttagagaagaagaggactcgcaatattgggcctaaaagtaagaggttgctaattgataatgaagatgccatggagttgaaacttacatgggaagaagcacaagatttgcttcgtcctcctcctagtgtcaagccaaacattgtcacaattgaggaccaagtattcgaagaatatgatgaaccccctgtttttggaaagagaactatattcagtgcctgttcatctggggggaaggaacaatgggctcagtgtgatgattgctctaaatggcgaaagctgcccgttgatgctcttcttcctcccaagtggacatgttctgaaaatgtttgggattcaagcaggtgttcatgctctgtgccggaggagttaagttcaaaggaattagaaaatcttctgaaaaccaacaaagattttaaaaagcggcgaattgcagaaagcagcaagtcaatccaagaacacgaggcttctggcctggatgcccttgccagtgcagctgtccttggagaaaatcttgttgacactgccgagtcatcagctggagccaccaccaaacatcctagacaccgtcccggctgctcttgcatcgtatgtattcagccaccaagtggaaaggggaggcataagccaacctgtacgtgcaacgtgtgcatgaccgtgaagcgccggttcaaaaccctcatgctaaggaagaagaaacggcaatctgaacgcgaagcagatactgcccaaaaagaccaaactctcctgaaagatgagccggataccaacggagcaccgagggacgatacaagtcggttggagaaagaggtgggactaaacaaaagtcaacatcaggtgggtgagtccagtactggacagatcgatctgaattctcatcccaaccgcgaagacatgcaagtggaaaccacaggacttaacatgtctagtcatcttgaaccagcaacaaaccatacagtaggagaatttatggacaaaaatgacctaagaagaagcttcaataatgaagtgcagactggtcagaattcttctttgcacactcctcctcaatctagtggagaaggtcagagatacttctctgatggaagatgctttgcatccattgtgtggaaccaggaaagaaaggatgaggtacatagtcaacccaatcagagtcaaaacaatctttcttaacaatttagttatttattttaatattcaaacctttttttgtttctttactggaattttttatgatatttctccttacttgcactcgcaaaagtatatatttttccttctttttcaaaggggtggtcaaagatagttcgttctcataaaaaaaataatgtaattttttgtatcgtttgtctttg

SEQ ID NO: 8614 - DNA, 663 bp, Glycine max
  Clone ID: 700764321_FLI
agacctgctccctaggcccgtcacgtgctccccacgtgacatccagaccgcggccacggccgcggcctccatggttaagttcgaccctgtgacacaatcctcagactcggagactccagagtcttcggagctgagcgagattgtcgaacttcccaacattgaagacagcagcgttgactcgacaccggagttcgtcttggtcgatgttgttgacagttgggtgtttcccccaatgggaatgggttcagagggaatcgagttctgtgccgctttttctgatgagttatttccgcaacagagttttattggttccgagatagagatactacccatttgggattgaatggtgagtgggattcatgtgccttttgctcgcttcacgtgggattggcaaatactagcattcatggctgttttgctgtcaatggtccagggccacttcaatttactctctactgtgtctgtgtgcactatatttttcacactgttacttatagttatagttagttagccttagcatttagcaagttccattgtcttcaacttcaatccctttcttccttccttccttccttctaccgagtaatttcctctgttttatacaagtagaaacagaaaatatgtgaatgcctaataaatttttaccacattaccttactgtac

SEQ ID NO: 8615 - DNA, 1037 bp, Glycine max
  Clone ID: 700764581_FLI
accgtgaccatggcggctgcgtttacaagtacaagtgcaacactgagactgtcaaatgttggagagagcagaggtttgcagctgcgtaagtgtaaccctaatcctaataagctgaaggttatgggggggtttggaggttgttctggagtggcagtgggtgtgagagaaagaaaaggaattggaagggttagggttcgggttcgggcgagttcttcgtcggacgaggcagtgagtgcgcagtcaaaagtgactcagaaagtattctttgacgtcagtattggaaatccagttgggaagcttgtgggacgtattgtgattggactgtacggcgacgatgtcccccaaacggccgagaacttccgtgccctttgtactggagagaagggctttggctataagggctccaccttccatcgtgtcatcaaggatttcatgattcaaggaggagactttgacaaaggaaatggaactggaggcaaaagtatatatggtcgtactttcaaagatgagaattttaatttgtctcacactggaccgggtgttgttagcatggcaaatgcaggacccaacacaaatgggagtcagtttttcatatgcactgtcaagacaccttggctggatcagagacatgtagtatttgggcaagttttggaaggcatggatattgttaggttgatcgaatcacaggagacagataggggtgaccgtcctacaaagaaggtgaccatcagtgactgtggtgagcttccaaatgcttgaggtggttcttgtgtaattttgttggttattccttctattaacttgttgagttgagaagggaaagaggggcggggaagaagaaactttggctttcttaaattttagtctgactattcttaaaatatgttctgtaacaccttattttcacactgaacctacaaacttttagcagccacatgtattctggtagaactatagtttgagttgtcgtcgggttggacaatttaataccccatttgaatggtatcttcttaagccaaagtgcagtttccatgggg

SEQ ID NO: 8616 - DNA, 1185 bp, Glycine max
  Clone ID: 700764593_FLI
attcggctcagtttgaggtcaagcagatgataaaaaaaatatctaggcatgcctcatcttcaaaagttacaaatttaaatgaagtgcttatatctcttattagtactattgtatgtagaattgttttggggagaaggtatgaagaggagggatctgaaggtagcagattccataagttgttcaatgagtgtgaagctatgttgggtaacttctttgtttcagattatattcctttcatgggttggattgataaactcaggggactggatgcacgtcttgaacgcaatttcaaggagatggataagttctaccaagaagccattgatgaacacatgaattctaagaaaaagactccagaggaagaggatttagttgatgtcttacttcaactgaaagagaacaacacgtttcccatagatctcaccaatgataacatcaaagcagtgctcttgaacttacttgtaggagctacaggtacaactgaagtcacaacaatctgggccatgactgaactaataaaaaatccaagcattatgaagaaagtgcaagaagaaattagaggcttaagtggtaagaaagatttcttggatgaagatgatattcaaaagttttcctacttaagggcagtgataaaagagacacttagattgcacttaccagcaccactacttataccaagagaaacaaataaaaaatgcatgttagatggctacgaaattccagccaagacattattatatgtgaatgcttgggcaattcatagagatcctaaggcttggaaagatccagaagagtttatacctgagaggtttttaaattgcgacatagatctttatggacaagattttgagtttattccattcggtgctggtcgtagattgtgccctggtatgaatatggcatttgctgcattggatcttatacttgctaatcttctttattcctttgactgggaattgccccaaggaatgaaaaaggaagacattgatactgaagtgttgccaggagttacacagcataagaagaatcctctgtgtgttgtggccaagtgctatatgtaaaatccaaaagtcgtaactactgctgaaaaaaataaaataaaataattaatgattgtactcttccaacgaagattattaaataaagatgtaagcactccaaaataaaaatatttctgttgtgttt

SEQ ID NO: 8617 - DNA, 570 bp, Glycine max
  Clone ID: 700764716_FLI
cgatgcaaaaggagttggcaacccagaagaaagaggcaaagatgagccaggcagagctggacaagcaggcggcgcgtcagcataacacggcggcgaagcaggctgccacggcagggcacatgggacaacccatggggacccatcagacgtcagctatgcccggtcatggaaccggacagcccacgggccatgtcaccgagggagtggtgggctcacaccctattggaaccaacagaggcccgggtgggactgctacggcccataatacccgtgcggggggaaacccaaatgattatgggtatggaactgggggtacttacaattaaataatgatgatttagaaaaggaaagctacgacccataagaaggtttagttaagagtatgacttttgttgtggttatcttcttgtttggttatctttttgtttgtgtctccttttctctccatttttgttgtggagaattgggtgtggttacacgacagtgttttcacttctactaggtgcaagcattctgtgtcgtgatgttgtattccttcgtttcaatgaataaataaaatcgtggttgtgc

SEQ ID NO: 8618 - DNA, 1495 bp, Glycine max
  Clone ID: 700764831_FLI
acttcgtgccttcagaaaccctaattcccaaatctcaaacgaaccatggaattcaccaagaagcgcaaaaccgaagagaacggcgacaccaccgattatccgccgcagcaatccaccgaagaatccccaatcgccgccgtagcccccgcccccctcgccgccgaagacatccgcaagatcctacaaccgttctcccaggagcagctcctcgacctccttcaatcggcatcgctccgccaccccgacgtcctcgatgccgtgcgcgccgttgcggacctcgattccaccctccggaagctcttcgtgcgcggtctcgccggcgagaccacgacggagaccctccgcggcgtgttctcggcgttcggcgaattggacgaggccatcgtgatcattgacaaggccacggggaggtccaagggctacggcttcgtcgtattcagccacgtggacggcgcaattctcgccctcaaggagcccagcaagaagatcgacggccgcatgaccgtcacacagctcgccgccgccggaggccccggcggcggcgacgtgtccctccgtaaggtcttcgttgggaacgtccccttcgagatttcctcggagaggctcctcgacgagttcctcaagttcggagaagtcgaggaagggcctctggggtttgacaaatcgagtggcaaaagcagaggtttcgccttcttcgtttacaagaccgaggaaggtgcaagggcttcgttggttgaaccattgaaaacaattgaggggcaccaagtgatttgcaaattggctgtggataacaaaaagacgaaaccttttgttgcggatcagcatcagcagcaacatcatcagcaacatccgcagcaacagatgcagcagcaaggttcaatgatggtgcctcagtatggtggatatggtggtaatggttatgggatgcagcagcaacagcagcagcatcaggtgccaccgtataataatcaaattccggttgccggtgctggcgggtatggccatggatatggtaattcacagatgggcgggccggtttctggtgattatggtgcgagggtgcctcccagtactggtggggggtaccctgatggctcgcagtatggcttccctccttcatcgggccatccgccgcagccgcagattccgatggcgagacctcctggtggaatgtaccaaggcatgccaccctattattgagataatgaaatctttggttttggttacatggactgctgtaatttgttgctgcttcactacctctgcatctatgtgttatggttccatttgtgatgggtgttagttgaagcttacatgacttggcgtagtacttgaatgtagtacttatgtagaatttatgtagaatttttggttcatagtttttacctagtttagtttcataagttattgactaaatgccaaggtggttacattaaattttgaaatgtctcttattgtgctctttcgtgcatatatgtactctgtggttgtcgtg

SEQ ID NO: 8619 - DNA, 346 bp, Glycine max
  Clone ID: 700764839_FLI
tatttgttgaatgagaatgatgatagcctcactgaagcagaagctggcattgaaattagagatttctaaaccatttcaaattcagatcatgatctggaggtctgtttggtagagctaaatgatttttcaaatgttgtgtaaatatggttttaaaagataccaaaatgcctcctgtatttttattaacgatatgcaaagagggttgcaagttgtaaacaagggtgatgtatcaaccatgtagctcgttaaattttcagcgtgtaacaatgtagattgagaccactaaaaagaattcttttagatgataaacaaacaaaataaaagcagaatagcagtagttatggac

SEQ ID NO: 8620 - DNA, 2276 bp, Glycine max
  Clone ID: 700764856_FLI
gaagattcttcttcaagcttctgatcaatcaaaattttatagtggagattgcttcatcttccagtatacatatcctggagaggataaagaagattgtcttataggaacgtggattggaaagaatagtgttgaggaagaacgagcttcagctaattcattggcaagcaaaatggttgagtcaatgaagtttcttgcttcccaggctcgtatatatgaaggcaatgaaccaattcaatttcattctatccttcaaagcttcattgtttttaagggtgggattagtgaaggatacaagacttacattgcacaaaaggaaattcctgatgatacatacaatgagaatggtgttgcattattccgcatccagggctctggaccagacaatatgcaagccatacaagttgaaccagttgcatcttccttgaattcctcttactgttacatacttcacaatgggcctgctgtctttacttggtctggaaactctacaagtgcagaaaaccaggaacttgttgagaggatgctggatttgataaagccaaatttacaatccaaaccacaaagggaaggttctgaatctgaacagttttgggatttgttaggaggaaaatcagaatatcccagtcaaaagattcttagagagcctgaaagtgatcctcacctattttcttgccacttctcgaaaggaaatttaaaggtgggtttacccactgatctaaagctctagtctctgcatacatgatttaagcccaagtgacacgtgattagtattgaaatagatgctagtttgatcaacctgacactgttgaaaaatgtgaccgaggtatacaacttctcccaggatgatttgatgactgaagacattttcgtcttggattgtcactcggaaatctttgtctgggttggccaacaggttgactccaagagtagaatgcaggctctatcaattggtgagaaatttcttgagcatgattttcttctagaaaaattatctcgtgtagctccaatatatgttgtcatggaagggagcgagccacctttcttcacacgcttctttaaatgggattctgcaaaagctgcaatgctgggaaactcatttcaaaggaagctgacaattgtgaaaagtgggggtgctccagttttggataaacccaaacggagaacatcagcatcttatgggggaaggtcgagtagtgtgccagataaatcctcccagcgttcctctcgcagtatgtctgtcagtcctgatcgtgttcgtgtgaggggccggtctccagcctttaatgctctagcagctaattttgagaaccctaattctaggaacctttcaaccccacctccagtaattagaaagctgtatcctaaatctgtgacaacagattctgcaatactggcgccaaaatcttctgccatagctgcacttagttcttcttttgaacaaccaccttcagcacgagaaaccatgatacctcgctcacttaaagtgagtccagtaatgcccaaatcaaaccctgagaaaaatgacaaggagaattctgtgagcaccagagtggaatctcttaccatacaggaagatgtgaaagaggatgaagttgaagatgaggaaggtcttgtgatttacccatatgaacgccttaaaataatgtccacagatcctgtaccaaatattgatgtgactaagcgagagacttatctatcatctgcggagttcaaagagaaatttgggatgtccaaggatgccttttacaagttacccaaatggaaacaaaacaaactcaaaatggccgttcagttattctgattcttgaaagttttcttagccttctgtcagctccctgcagttaggttgcagtgaggaactaaacatgtggaagtaaaagggacagcatcagtgttttttttagcatagctgcatctgctcccaagaaacttttcatgaagagaaactagagattttctacctctacccatctctttgcaatggtttgaatgtttagcgttatttctttgatgagttagctgcgtggcattaatttttttttatagggcagagtttgtttgtgagcttgcttttttatttttattttcattttttggggtctcatgttagtcttcattttattttttaatttaaaatttgttttggtaaagcaatttggcttgcaaatgcggtctacttaggttgtattgatattgaggatgaagtgtgtacagtgagtgtaacaatcagtcaactcgtaatttgttttggaaataaagtgtgattctttgttgtc

SEQ ID NO: 8621 - DNA, 1079 bp, Glycine max
  Clone ID: 700764887_FLI
ctgagaaggagagacagaaggaaggtgaattagctgatgaggaacagaagaaagtgaagaaagaggttaagaagaaaggctcttcatcttctaaggatggcactgctaaatcaacctcttctaagaaaaaagcaagtggctctgatgaagaccgcacttcacctactcacagtcaaattgacgagaaagaggaggctccagatgaagatgatgacgacgacgtgcaatggctgacagatacatcacttgatgctgctcgtcaacgtatccaagaacagttaagtgctgtgacagctgatatggttatgctttctacagatgaaccagagaagaagaaaaaaacagtaagtaacggaaatggtggttctcacaatggtaactcaatgcactacgggaccctggttggtgaagtgaaagcaaatttgaagaaaggtgttggggcaaatgaattgctgtcccatcttgcagcacttcctgcacctgctcaagaaaagatgagtgcactggttgaagctctatttgatggaattgataaaggttttgctaaagaagctgataagaagaagaactactttgctgctgctgttgccgaggagggatcccagctgttattgcttcatgctattgaagaattttcttgcaagtctacttccaatgctttaaaggaggttgccctggttctaaaggcattctacgatgctgatgtgttggaggaagagcacatagtgcagtggtatcaaaagggactgaagggcgataacaagaactctaagatttggaagaatgctcaacctttcattgattggcttcagagtgcagaatcagaaaccgaggaagaataattttcccatattctccgtttcttatgtttgcttgcttttgtcatgtcctttatttccaataaaagggtcttgttggccccagcgttgtggaactactatacttgtctgaagggtgcatgcttgctggactagtatagcatgtatgcgtcagtgagttttgtgatgtgtggttctaatttattttggttattggttgtttatgattatgttttatattttaataaaacgtgtcttgat

SEQ ID NO: 8622 - DNA, 1619 bp, Glycine max
  Clone ID: 700785919_FLI
agtcttttccgggtaaatcaccttgaatgcaggagatggactacaataatgaagcaagcaatggtatcaagttcaggaacttatatggttctataccagatgtggtggttccattaatgtatacggaatacactactcgcaaggtcctagttatggaatggattgagggggaaaagttgtctgaagtgaaggatctctacctgattgaggtcatttatgaaactagtttcaagcaagttattctaaatttttaatctgtagaattcttggattttgtatcatgatgctaaatatgtttcctatttcctgatgctgattaggtaggagtttactgctcattcaatcaacttcttgagtgtgggttctatcatgcagatccacaccctggaaatcttcttcggacatatgatggaaaattggcttatttagattttggtatgactggtgagttcaaacaagaattacgcgacggattcatcgaagcttgtctacatcttgtaaaccgtgattttgatgcattggccaaggactttgtcactcttgggcttcttccaccaactgcagacaaagaagctgttacaaaggctttgacaggggtcttccaaaatgctgttgccaaaggagttagcaatatcagctttggagaccttttaggaaacttaggaaccaccatgtataaattcaaatttaggataccatcatacttctctctggtcattagaagccttgctgtactggaaggaattgcaatcagctttaaccctgagtacaaagttttgggtagtacttacccttggattgctcgaaaagtacttactgacaactctcctcagcttaaatcttctttagagacccttctttataaggatggagtttttagaatagaccgtctagagtctttggtgacagagtctctccgtgccaaaacagaaaaggccatagtaaaacaaactgaaggcactgattcgacaatggttatgaaggaaattctttcttttacactaacagaaaagggtgaatttgtaagggaaataattgttcaagaatttgctaaaggtttagatgcacttggtctagcaaccatggagacagctgctgccagagttcctttcagtagtttcttttattcccctttaatgactaaagaagatataatcaacttgagaaacttccgacgccttatgctattgctgttgggggccagaagaaaagaagaatccagtacagaaagcaaacaggccagtcctgacaagaatcaaatactgtacatggaggagttgtcgttagttttaaatcaagttgaatccattcaagacattcttcctataatttctgtcattcttgagctcccaccagaatcccagcagcaattgcttcaattgccagttaacttggttagaaagttaatatctcgtgctgctgcaagaactgtaaggagggcctttttataacatggatgaagtagctgaagctgaaatctttttgtacttctcaacaagtgaccggagaacattgaaaaataaataaggctttatgacaaggcctttaatccttaatgcttcaatacactgttgattcaacaacatattcttcgctttcaatttcattttttttttatt

SEQ ID NO: 8623 - DNA, 919 bp, Glycine max
  Clone ID: 700785931_FLI
gcggcgatggcttttgcagttacgcccaagataataacggtgtcattcgataagcaaaaccaaaggaggagtttcgaaggattgtttgggaaaaggtatcgggtaagggtgaagcgaagtcaagatcattcagtgaagtgtggtattgagcgaagcagcagcgatggaaagaaagggggcggaggaggaggcgtgtcaaattcgaactacgtggtgccgctggacaacatggcgaactcatcctgcataacacgtcctttagccgagatactcagggacctcaataaaagaatcccggatactatcgtcaaacatgatcgcttcatcccctggtatcatgccaacaggatgctcagcttctacgccccaggttggtgtggcgagatacgtgatgtcattttctccgacaatggctccgtaactgtcgtataccgtcttactgtacggggatctgatggagaggcatatcgtgagtcaactgggacgatatcacccagtgatggctccattggcgatccagtttctgctgctgaggaaattgctttctgcaaatcttgtgcccggtttggtcttggcctgtatttgtatcatgaagatcaaatgtctaatttttaagcttctaaatttttgttttggttggatgtgatattgtattgtttcttctcgttgatgtgaatagaagtagacaataggtggctgttaggtacttttcataaagcactgtcaagtatggtggaaaacttgaagccatatctttgtttttatgagtatccgatgcttatgtgtattcaagtttcttttattgctcaggtacatttaagttttgtaagttatggtggcctaaagccttcaattaataaatgaacaattattattattattattattattattattattattattattatttgtgtct

SEQ ID NO: 8624 - DNA, 1176 bp, Glycine max
  Clone ID: 700785944_FLI
agagaattttgcttgtaaagttcaccatgggtctttttgagaatcctctagctgataccagcttagtcaatgagcttggaagccaggaacacagagacctagcaagggaagcagtgagaaaatctcttgtgctgcttaagaatgggaaaaatgaaagtgcttctcttctgcctcttccaaagaaagtcccaaaaatcctagttgctggatctcatgctgataatttgggttaccaatgtggtgggtggacaatcaaatggcaaggattcagtggcaacagtgacacaagaggaacaactattctcaatgccataaaatcagcagttgatacaagcacagaagtagtctttcgtgacaaccctgacaatgagtttgttaagtccaataacttcgaatatgccattgttgtagttggtgagcctccttatgctgagactgctggggacagtacgacacttacaatgatggaatctggcccaaatgtcatcaacaatgtctgtgggactgttaagtgtgttgttgtcatcatttctggcagaccgattgtcattgaaccatacatttcttctatagatgcattggtggctgcatggttaccaggcactgaaggccaaggcgtgacggacgtcctttttggtgactatggtttcactggtaagcttgcgaggacatggttcaaatccgtagatcaactcccaatgaatgttggggatcctcactatgatcctctttttccttttggtttcggactaacaaccgaatccgtcaaggacctggtagcaaggtcaacctcagctgctgttggtgcaagggcttgtatatttaccattatagtgaccctaatcatcagcttatacttacctggttaagcacaatttatgggagctttattggagcgggaggctagagaactaacttgggatacttcccggcttagtcttattctagtgtaattcattgtataccattgagacattattattcataaactagtaatttgagcacattctttttcataattggaacttggtttatcagactatttaggtattaaatctactaggcgttaagtagtgaagttatttgttagagtactgcaaaaatgttgatttgtgttccgtgcctctactcgaatcaccggaattaattcttcaaatgcaagtcttttttgtatat

SEQ ID NO: 8625 - DNA, 1766 bp, Glycine max
  Clone ID: 700785990_FLI
gactacgacccttctcatggggcctcgctcttatattagttcaacttcttttctcagctgccagttcattttccttcttcatatcatctctctcactgtcacatgctctctatctatcccagccactccaatagctttggttcactgccacccctgctgacatttttctcgttggaataaacaaactttgtgttaacttaaaaggtttaagggaaaaagaaaaactacaaaatgggaaggcactcttgttgttacaagcagaagcttaggaagggtctttggtctcctgaggaggatgaaaaacttctgaggcatattactaagtatggtcatggatgttggagttctgtgcctaagcaagcaggtctgcaaaggtgtggtaagagctgcaggcttaggtggatcaattatttaaggcctgatttaaaaagaggaacattctcacaagaagaagaaaaccttatcattgaacttcatgcagtattagggaacaggtggtctcaaattgcggcacagttgccggggagaacagacaatgaaataaagaatctgtggaactcttgcttgaagaagaaactgaggcaaaagggaatagaccctgtcacacataaaccactgtctgaggttgagaatggagagaaagcagcagaagtgtctaatgaactgaacctcctgaaatcagagagctccaagtctgattcagcatcctatgagcagagaacatcaatttctccaaaagcctatgcacctgagatggatggttcctgcagctccaagattgaaatcaattttgtaaccaacaacaactgttacaacaaagacttgttcctagacaggtttatgagtagtagccgccaagagagttacaccactagttgccagccctcagatttgatggggaattttccaattcagatgagttatgcaaccaatgatcagtgtctccctaatgattcaaactctagtcattggttcagccaaactggaaggtcttttgatatgaacactgagtttcctttcaatgccgctgtcacttctatcaatcctacacctacaaccaacttgtttcttcctaataattctttttgctacaagccttcacttgctgttccctctgacaatgtttccataccctatggatcccattactgggaagccagtgcctccaacaacagcaatagtagcacagaattgagaagtagcagccccttgaacatcttttcttcttggggattggcagattgtggcacctctactactaaagaggcacaaattcatatgatggagaatcataatacagaagaagctaagtgggatgagtaccttcataaccctatctcaatgctggcttcttctgtacaaaaccaagctcctgagtctctatgcaatgatataaaaacatccatgcatttggtacctgatactttaggggctatgctacctcataaccataccaagcagcaagaacagtctcaaacttctagtttcttttccaaggacatccagaagctcagggcagcctttggacacatgtaaaaggattttagaaagggttccaattcaagggattgctattcttagtacaggtgtgtgaaaccacagattttttgctcttgtatgtaggtctaatacaaaacatttattttcaccttttgtttttccttcactttgtttaacatttgtgagccaaaaaccatttgtcttttactttcttctttcgggtgtggggtagaattgaagaagaataagggttgctattctgtctt

SEQ ID NO: 8626 - DNA, 861 bp, Glycine max
  Clone ID: 700786045_FLI
attttacatctctctctctctctctatatatatatatataatcaacaccatccactactttctcacgcgccattaacaaagatatggtacaaacaaagaagttcagaggagttaggcaacgccagtggggctcctgggtgtcagaaattcgccaccctttactgaagagaagggtgtggctagggacatttgagacagctgaggcagcagcaagggcatatgaccaagcagccattttgatgaatggtcagaatgcaaagaccaatttccccacctcaaagaaccaagctgaagctgatgacaacaacaacactgacactttcttatctccaaaagctctttcagaacttctcagcacaaagctgagaaagtactgcaaagaccctgctccttccctcacttgtctgaggctagatgctgataattcccacattggagtgtggcagaaaggggcaggaccacattctggctccaactgggtcatgaggttagagcttggaaagaaacaaattaccgaggagggtagtgagtcaacggagtcaccacaaagtagtactaatggtgctactgaaaataatgaagtagaagaggaggatagagtggctttgcagatgattgaagaactacttaattggaactagaagaagaagaaaaaaaaaagggaaccttaatccgtgtcatatatagttcttgaatagtagtccttttttcatgctatccttttcaattcgtttacttttgtgctttctgtaaaaaaaatgtttgtcaaagtgctgatatctatatgatgatggccagtttgatagttacttatattatacactttttaagatatattgtgattgatggtaattatgcatc

SEQ ID NO: 8627 - DNA, 829 bp, Glycine max
  Clone ID: 700786047_FLI
gtcaaataatgcattggattcaaatggttctgtggttggctttcctcccaagcagtcctcatattcatgcattcaaatgaatggcaaagaagtctttcgctttgctgtacgatgtgtgccacagtcaattgaatctgctcttcaaaaggctggtctccctgcatctagcattgattggctacttctccatcaggcaaaccagaggattattgacgcagttgccactcggttagaactcccctcagaacgtgtgatatcaaatttggccaattatggtaacacaagtgcagcttccattcccttggctttagatgaagcggttcgaagcggtaaggtcaaggcaggccagactattgcaacggctggcttcggtgctggtcttacttggggttcagcaattcttcgttggggctgaatgcttttctttcacggcagaattgcaaatagagaagaatcagttgcaagtgcagctgtccaaataccccacattcttacacaattgtagaaaatggggtttggggaatttgcaaacggatagatatcattaacatccagcactccctaaacatttccctttctttttgtcttcaagttattttgtcttcaatttacattctccttgggcttcctttctcaagtaccatttttttttctttttgaggcatgtatttgtcattcagatttatttgaaacgaggcttactatttatgtttctcaatggtacttgtaattaaaaatgcagcatgccaagtgtttgcttgcttgtactttaaacaaacttgtcaacaccaagccaccccctttaatttagttatttgtttttggatct

SEQ ID NO: 8628 - DNA, 691 bp, Glycine max
  Clone ID: 700786051_FLI
acggaatcctcaaactcctcgacacgcgcctcgtcccctccgccgcctccggcgactccaaggtcttctacctcaagatgaagggagactaccacaggtacctcgccgagttcaagaccggcgctgaccgcaaggaggccgccgagagcacgctctccgcctacaaagccgctcaggacattgctaataccgagttgcctccaactcaccctatcaggctgggtcttgctctgaacttctccgtgttttactatgagattcttaactctcctgatcgggcttgcagccttgcaaaacaggcttttgatgaggctattgctgaattggatacattgggagaggagtcatacaaggatagcactttgatcatgcaactgctacgtgataacctcaccctctggacctctgacatgcaggacgatggtgcagatgaaattaaagaagccgcacccaaaggtgacggggaacaaaattaaacataccatactctctgcttattagtcattgaacttcccttctgtaatgttttcaaagggagaaggtgttgaatgctaatctcaatgttactgagattttgggcattcgtgttcttcgttatgaattgtggatgtactgggctattttagtttgtccttccatttatacgcgtttctgaactgcctattttcttaatgacactgaaatttccatt

SEQ ID NO: 8629 - DNA, 568 bp, Glycine max
  Clone ID: 700786094_FLI
caatttaatcaccattgtacaacccaattcccttcgtcgttttcgattaagagagcaatggcacgtaccaagcaaaccgctcgcaagtccaccggaggaaaggctccgaggaagcaattggcaaccaaagccgctcgcaagtcagccccggcgaccggcggagtgaagaagccccaccgcttcaggccaggaacggtggctctgagggagattcgaaagtaccagaagagcaccgaacttctgatccgaaaactcccattccagaggctcgtcagagaaatcgctcaggatttcaaaaccgatctccgctttcagagcagcgccgtttcggctcttcaggaagccgcggaggcttatctcgttggactctttgaggacactaacctctgcgctattcacgctaagcgagttaccattatgcccaaggacattcaactcgctcgcagaatcagaggcgagagagcttaagtttagggtttcgtgtcatttgacattaaaattaggttactgcttattgtaattcgtgttttcttcaaatgcctctttattgtaagattcatcttatttc

SEQ ID NO: 8630 - DNA, 974 bp, Glycine max
  Clone ID: 700786118_FLI
gctccaacactgaagtgaagagagaaacaatggccaatgtttcaattccactcccacgaaacggtttctccaaacccaattactcgacaaaacgcccatgtttcaccccttcagcttcaacactcagaatttcttgctctggagtggctgagtttgatggatctcatcagaaaaaaggaggtttgtttaatttcaatggaatcaagggcgtggcttgtggtattcttgcagcttgtgctgttacttctgctgcatttcctgttactgctgctactcagaggcttcccccattgtcaactgagcccaatcgctgtgagcgtgcatttgttggcaacacaattggtcaggcaaatggtgtatatgataaaccattagatctccggcaatgtgatttcacaaatgagaaaaccaaccttaaggggaagtccctgtctgctgcactcatgtcagatgctaagtttgatggagctgatatgacagaagttgtaatgtcaaaggcttatgctgctggtgccagctttaaaggggtggacttctcaaatgcagtcttggaccgtgtgaactttgagaaagctgatcttgaaggagctatatttaagaacacggtattgtcaggatccacctttgatgatgctaagctggacaatgcagttttcgaggacactatcattggttacattgatctccagaaactatgcacaaataagaccattggtgatgaatggagagttgaactaggatgtcgatgaaaagcaaagtcttcactgtcttctatttctagtatgctgctatgctatgacatgacacaaatattttgatgagggtaactagtggatgaatgctacgtccagaagtaaattcaattccttgcttttcctgtatgatattgtataacttatattattccctgtgattttaacatacaaattgaagacgctggtataattaataattctacttgtattttttttact

SEQ ID NO: 8631 - DNA, 1259 bp, Glycine max
  Clone ID: 700786128_FLI
gagagagcgagaggcataacataacataagaccacacaaagctgtgttgcgcgttgaagagcgaagaaggaagaagatgtcgggtatgggagatgggtacgtgggcaccgcccaagacgcggtgaggattcgacggttggagaagcagagagaagcggagcgtcgcaaaatccaagagctgaaaaccaagtctgcctccgccaaggaccaacccggtcttctccaattcggttccagcacttccgagattctagagactgcctttaagaaggaaactgtgggtttggtcactagagagcagtatgtagaaaagagggttaatattcagagcaaaattgaggaagaagagaaggagaaacttcagaagcaacaacaagaagaggaggagcttcaattacaaaagcgtaaaaagaggaagatcaggggcaattctcgattgtcctttgctgaggatattgacaatgaaccccaagaggacgaaccacatcacagtaaggataatctggaggcaaatagattacggtgtggtaagcttggcaaagaccctactgttgaaactagctttctacctgacagtgagcgagaggctgaggagcaagctgagcgtgaaaggctgcgcaaacagtggcttcgtgagcaggagcaaattcgaaatgagcctcttgaaatcacatacagctattgggatggaactggccacaggcgtgtgatccaggtacgcaagggtgacagcataggagagtttcttcgagcagttcaacagcaacttgctcctgaattccgagagattcgaacaacatcagtagaaaatttgttatacgtgaaagaagaccttatcattcctcatcaacatagcttctatgagctaattgtgaacaaagctagaggcaaaagtggaccgctttttcattttgatgtgcatgaggatgtacgaacaattgctgatgccactatagagaaggatgagtctcatgctgggaaggttgtagaaaggcattggtatgaaaagaacaagcatatatttcctgcttcaagatgggagatatatgatccaacgaagaaatgggaacgttatactatccacggggattgatttgaggctgccaaataatttgcattagcatttcctgtattgacatttaatttggtcatgcgtttgtacgccttggtgataattatgcttttgttagcatttcctgttattcattacagacaacatggacaattagtcagatctatattacagtggatttcgtgtc

SEQ ID NO: 8632 - DNA, 1311 bp, Glycine max
  Clone ID: 700786129_FLI
atgatttccttctaaggttgcacattgatggtggctgtgactctctaacgacctttccgctagatatcttcccaatactcaggaagatttttattaggaagtgtcctaatctaaagaggatttcacaggggcaggctcataatcatctccagagtctgtatatcaaagagtgcccccaattagaatcattgcctgaaggaatgcatgtcctccttccatctcttcatgatctgtgcataattgattgtccaaaagttgaaatgtttcccgaaggaggtttgccatcaaatttaaaatatatgagtctctatggtagttacaaacttatgtcctcattgaaaagtgccttgggaggcaatcactctctagaaagcttagttattggaggagtggatgttgagtgtcttcctgacgaaggtgtactgccacactctcttgtttatctagagatcaggaagtgtggagatctaaaaagactggactacaaaggtctctgccacctctcctctctcaaggaattgcttcttgttggctgccccaggctcgaatgcttaccagaggagggtctgcccaaatccatttcaactttgtggattatcaattgtccgttgctcaaacaacgttgccgggaacccgaaggcgaagactggccaaagattgctcacattaaacgcgtgtcgttattagattgaaagagctgtcaaccaggagctatgttagtacaggatttccaaattggtttgtactttgaagattaatcaatatcgggggagtaatagtttgtacgtcaaaagtatcatcagaaattccagccactgaatgcctccaaatattctagctttgaataaggagactaggaaattggtgaaggtcgtcaaactcaaattttcttgtgtccatggaaaagatacattgcacgatgaccaatgtcctcctggtgcctttgaaagtccttgagtgcaggtggttaatgagatgcagattagctacttgctatcctgggagatgcatgcttattctaaattgttttaaacattagtttatgtacagctaaatttgtaacaggattatgggcattgcttttatcgggaattcactgacttattaattccagagcttacatcatgcaagtacatttctaaaatttcaaatttgttttcttctaaaactgtgaattcatgatacttctaacttctttggggctctcttcagctatctgaatccatgtaaatactctataattattttctaaacccaaattttattcatgggtgtagacgtctgaattatttgtcagataagatatttaac

SEQ ID NO: 8633 - DNA, 2224 bp, Glycine max
  Clone ID: 700786224_FLI
ctgattcggggttcctttattggaaatggaaaccaagtgaatgccatcttccaaggtttgaccccaacacttttctccaattcataagtaacaaacatgtagcttttgttggagactctatatcaaggaaccacctagagtcccttctttgcatgttagccaccgtcacaaaaccaaaccgtgtccgacaccaaggttctcgtcggtggcattttccttctcacaacgctatcttgtccttctattggtccccatttcttgtacaaggtatcccaagaaaaaacccgggaccacattataatacagtgtttttggatcgtgttaatttgaggtgggcaagggatatggatcaaatggacatgatcgtgttgtcctttgggcattggtttaatgttccttcagttttctacgagggtgatgataaagtcttaggatgccataaccatcctgttactaattgcactaccgagattggtttttatggtccaataagaagggctttaaggattgctcttaatagcataattgagaggaaggtaagtaaaggaaatggagttgatgtaattgtgagaacatactctccttctcattttgaaggtgattgggatacggggggtacttgtgcaaagactaatccttatggagtagggcagaggcaacttgaaggagaaaatgctgtaatcagaaggattcagttggaagaagtggaaaatgctaaggtgaaagcaaaacaatttagagggtttaggttggaggtacttgatgtaacaaaattagcattgttaagaccagatggccatcctggtgcttatatgaatcctttcccatttgctaatggggttaatccaaagaagcctgtgcagaatgattgtgttcattggtgcttgccggggcctatagacacatggagtgggatttttttggagatgatgaaaaacatggcacgagcagcataggagagaagagtgaagcattactcatttttcttgttaattcattgcattgatttttccgccatacaggtgatgtgttgcattagaaactagaaagagtattttgtttttctctttgacagcaaacaacaactttagagtttgtaattagattcgtggtgggagtaatgagaattacagtcaaacttaattttgtaaaaataaagatgtttggttattattcggtaaaaatgaatttgtttcaaaaccttagtttgatttgaaagggattgaagtatgcattgagttggaaagtttacaataagttttatagcaaattttcttccaagattaaagctttcagacataaaacacgtactatcaatttataaatcaatttcattcaaaataaattttgcaaacacttatataggaaaggattgtatcaagtgatcagatatcataaatgaaagaaggaaaataaaaattaccgtagcttttcagggtatataagcccatttactttgccttttgtaatcaaggcattgggtgggtagttcatggtttggtggaaaaattaactccaccaccgacaaagaaaattgaggttcggacttcggatatgcatgtgtgtatccctttgtgtgagaaaaatgaagccaccgaaagtagaagaaagaaaaccatcgtgactgatcagaaaattgagaccagtggtgcggtaaagattaaaaaaaaaatgctctactatcagatctgttatccagtgagttttatcttggtatcaatttatctgtattttggactctttctactgtctgtagatacctatttgggtttattgcattgaggcagagcaccggaagcgaagacgaggtcccaaggtcaaaacctgctctgaagttgtccaacagatatataagctgtactccaaggattgagacagccgatgtgggacttggatatttcccaataagctctaggagaacttgtggcaaacccagtaattattattagtgaaagattttatttgttatctttccccaataattagctactcagcaagttacaagttaaatttttttagtttcaatactatttcaaacttaccttaaacatatgcaggaaaggttgatgcatggatagttggtattcataaaatcgttagtgaagcttaaacttttgattaatggatatgtgtgttcattagatcgatattgtaatttgtacttgtgtgataattgctcctcatgtataagatttttcttgcttctgccgaatgttaggcactc

SEQ ID NO: 8634 - DNA, 1704 bp, Glycine max
  Clone ID: 700786227_FLI
cattgttcttctcccaggttatttagaaaagcaaaatggtgaagatttgctgcattggtgctggatatgtggggggtcctactatggcagtcattgcacttaagtgcccatccattgaagttgctgttgttgatatctctaaatcccgcattgcagcctggaacagtgaccagcttcctatctatgaacctggccttgatggtgttgtgaagcaatgccgtggcaagaacctcttcttcagcactgatgttgaaaagcatgtctttgaggctgacatagtgtttgtctctgtcaacaccccaaccaaaactcagggtcttggagctggtaaagcagcagatttgacatattgggagagcgcagctcgcatgattgctgatgtttcgaagtctgacaagatcgttgtagagaaatccacagtcccggttaaaacagctgaggcaatagagaagattctgacccacaatagcaagggaatcagattccagattttatcaaaccctgaattccttgctgagggaactgcaatcaaagatctctttaacccagaccgtgttcttattggaggcagggaaaccccagagggccaaaaagctattcaagcattgaaggatgtttatgctcaatgggtccccgaagaaagaatactaaccacaaatctctggtcggcagaactatctaagcttgctgctaatgccttcttggcccaaaggatttcatctgtcaatgccatgtcagcactttgtgaggctaccggggcaaatgttcaacaggtgtcctattctgttggaacagactcaaggattggacccaagttcctcaacgccagtgttggttttggtggatcctgcttccagaaggatatcttgaaccttgtttacatctgcgagtgcaatggccttccagaggtggctgagtactggaaacaagttatcaagatcaatgattatcagaagagccgttttgtgaaccgtgtagttgcatcaatgttcaacacagtctcaaacaaaaagattgctattctgggatttgccttcaagaaagacactggtgacactagggagacccctgccattgatgtatgccaggggctacttggtgataaggccaacctgagcatatacgatccacaagtaactgaggaccaaattcagagggatctatcaatgaacaagtttgattgggatcatcctatccacttgcagcccacaagtcctactactgtgaagaaggtcagtgttgtttgggatgcctatgaagcaacaaaggatgcacatggcctttgcattctaaccgagtgggatgagttcaagactctcgactaccagaggatatttgacaacatgcaaaaaccagcatttgtttttgatggcagaaacattgtggatgctgataagttgcgtgagattggcttcatagtttactcaattggtaagccactggatccatggctcaaagacatgcctgctttggcgtaaaatagatcattgatcaagtacactgcaataccagtcaaatgttgaggcagtcagtttaattctttattattttttgtaagagtttttcttttcctgcttaactttctcataatagttggtgacataaatggggtataaattgtgggaaatgggagggtttatgttctatgttactttgtactccaatcttttatgaatgtactagggaaacttgttttgtttgatt

SEQ ID NO: 8635 - DNA, 1194 bp, Glycine max
  Clone ID: 700786228_FLI
cacctgttgcatatgcctcatgccccatagagacaatcaattatgtttctgctcatgacaatgaaaccctatttgacattgtgagcttaaagactccaatggatatcagtgtatctgagagatgcaggataaaccatttggcaaccagtattatagcattatcacagggtataccattttttcattctggagatgagatactccgctcaaaatcactggatcgagattcttacaattctggtgattggttcaacagacttgacttcacatacaatagtaataattggggtgtaggacttcctccacaagagaaaaatgaaaagaactggccactaatcaaaccaagactggcaaacccatccttcaggcctcagaagactgacatccttgctacggtggacaatttcttgaacctgctgtgtataagatactcttcaccacttttccgcttgaagacagctaacactatccaggaacgagtacgctttcacaacactggaccatcatgggtttgtggagtcatagtgatgagcattgaagatggtcacaatggctttcctgggttgtctcagttggatcccatatattcgttcattgtggttgttttcaatgcgagtccaaaagaagtatcatttgttagccctgccctgcaattgagaaatctccagttgcatcccatacaggtatcatcatctgacgaccttgttaagagctcaagatatgaggcatcttctggctgttttgttgtgcctcgaaggacaacagctgtgtttgtggagccaaggaaaacttgagtcactgcttcaatcaaacattgatttaagccaagaaagaatgtaaaagttgccttgggatactaatggggtgatgatgctagttttggttcatgaggatggattcttttgtgaccttcacacactgaacacgtttggatgttcccaaataatctcctcttaagccagggatggaacctgaaataaacaataagatattagttgcaaagggaacgaatgaaactgaaattaagcaaaaaactttaacttattatagactatagaggtcagactttcagctaaatgtgattgcagtcctgagtcagcatatcttccactcatgtctaatctaaaggattagcaaatgtggaaatgcaaaaaaagcaaattctccataaaatacagttcttgaaagggtgtc

SEQ ID NO: 8636 - DNA, 480 bp, Glycine max
  Clone ID: 700786258_FLI
gttttaacccgccaccttctctggctatgtatggagtgaccaaaacagcccttcttggacttactaaagccctggctgctgagatggccccaaacactcgtgtaaactgtgttgctcctggttttgtgccaaccaattttgcttcattcattacaagtaacgatgctgtgaagaaagaactggaagagaagacattacttggaaggcttggtacaacagaagacatgggtgctgcagcagcttttttggcatctgacgatgctgcttatataacaggagagaccattgtagttgctgggggaacgccttccaggttgtagattccactatcaatcttctctgttgtgggccagccccacacattcctgaagctcttgttcgtctgaaattattacatgattgaggattatgtgttactggcatgagattactaggctatgtttgccattactaatgaaataataaaagttatcacttttt

SEQ ID NO: 8637 - DNA, 1371 bp, Glycine max
  Clone ID: 700786265_FLI
cttggcggggataagattaaagattcaacaatggcctctgcttctgctactcttctcaagtcatctcctgttcttgacaagtgcgagtgggtcaaaggccagacccttcgccaacctctcgtgagatgtaacccttcctcagcatcagctctcaccatcaaagctgcttcctatgctgacgagctcgtcaaaaccgccaaaacagtggcctcaccggggcgtggtattttggcgatggatgagtcaaatgcaacctgcgggaagcgtttggcatctattgggttagagaacacagaagctaatcggcaggcataccgtaccctacttgtgacagtacctggtcttggtgaatacatctctggtgccattctctttgaggaaactctctaccaatccactgtcgatggaaggaagatcgtcgacgtacttgttgaccaaaacattgttcccggtatcaaggtcgacaagggtttggtgcccctagctggttcgaacgatgagtcatggtgccaaggtcttgatggtcttgcgtctcgctcagctgcatactaccagcaaggtgcccgtttcgccaaatggcgtactgttgtgagcatccccaacggtccctctgctctggcagtgaaggaagctgcctggggtctagctcgctatgctgcaatttcacaggagaacgggttggtcccaattgtggagccagagatcttgcttgatggtgagcatgggattgacaggacattcgaagtagcccaaaaggtgtggtcagaggtattcttctacctggctgagaacaatgtcctgttggaaggtattctcctcaagcctagcatggttactccaggagccgagtccaaggacaaggccactcctctgcaagttgctgattacaccctcaagctccttcacaggagaatcccacctgctgtccctggaatcatgtttctgtctggcggacaatctgaggttgaagcaaccttgaacttgaatgctatgaaccagtctccaaacccatggcacgtgtccttctcctacgccagagctctccaaaacacctgcttgaagacatggggtggactccctgagaacgtgaaggctgctcaagatgcactccttttccgtgccaagtccaactcactcgctcagcttggaaagtacactgccgagggtgaatctgaggaagccactcggggaatgttcgtcaaaggttactcctactaagatcatcttgccacacatgctacagtaacccaaggatccaacattaatttgtctaaattgtgtttgtggtttatatagtcttggacactatttttaatgatgattattacttgtaccttttctacttaatgaacttctagccaatcaattacg

SEQ ID NO: 8638 - DNA, 1212 bp, Glycine max
  Clone ID: 700786268_FLI
gatcagatgagcgttgaggatgagctttatcagcttcggccaatgaattgtccttatcatattttggtgtacaaaagcaagcttcattcctatcgtgatttccctatcagggtagcagaattaggaactgtttatagatatgaactatctggaagtttacatggccttttccgtgttagaggtttcacacaggatgacgcacatatattttgtttagatgaccagattaaagatgagatcaggggtgtcctagatcttactgaagaaatactattgcaatttggttttgaaaagtatgaagtaaatttatctacaaggcctgaaaaggctgtgggagacgatgatatatgggaaaaagctacctctgctttagaagatgctttggatgataaaggttggacctatcaaattgatgatggaggaggtgccttttatgggccaaaggttgatatcaagattgaggatgctcttggtaggaagtggcaatgctcaaccatacagcgttttgacatcacatatgttgactcaaatactgagaaaaggaggcctataatgatccatagagcagtgcttggatcattggaaagattctttggcattctcattgagcattatgctggtgattttccattatggctttctccaatacaagctcgagttttacctgttactgatgcccagcttgaatattgcaatgttgtgaccaacaaacttaaaatgtatggcatccgagctgaagtttgccatggtgagcgcctacctaaactaataagaaatgcagagaagcagaaaattccattaatggttgttgtgggctcaaaggaagttgaaacagaaacagtcactgttagatctaggtttggtggggagcttggaaccatgccagttgatgattttattgacagaataaagttgggaacagaaaacccaatatcattatgatgatattttaattggcaaaagatggtcatcttatttgtttatgtaatgattggaaaagaatgaaggcaataaacatttgaaacatcatactttgtatattagacaagtattgaatagtccacgtcgttgaagaacaaaggctctggcgtttgcaccaggtaagcatacgatttggctcgataatttgtacttgtatcaatgattatgaaatatagctaatgtaacatcagaattgaattgtagttaattgctattatcatcacatttctg

SEQ ID NO: 8639 - DNA, 993 bp, Glycine max
  Clone ID: 700786490_FLI
tccaaatcttgtcactctgattggttatcatgcttgtgaaacagagatgtttctcatatacaattttttatcaggtggtaatctcgaaaagtttatccaggagaggtccacaagggatgtggagtggaaaattcttcacaagatcgcattagacatagcccgtgcactcgcctatctgcatgatacgtgtgttccccgcgttcttcaccgcgatgtcaagcccagcaacatcttgttggatgatgatttcaatgcttatctatctgactttgggttggctagacttctggggacttcagagacacatgctaccactggtgtagccggaacattcggctatgttgcacctgaatatgccatgacgtgccgtgtttctgataaggctgatgtgtacagctacggtgtggtgcttctggagttgctctcagacaagaaggcattggatccttcgttttcttcttatagaaatggtttcaacatagtggcatgggcatgcatgctactgaagcaaggaagggcaaaggagttcttcactgctgggttgtgggaagcaggacctggagatgatttggtagaagtgcttcacttagcagttgtgtgtactgttgacattctctctaccagacctacaatgaaacaggttgtaagaaggcttaagcaacttcaacccctaacatgctagccccttgtgtgtgtggctgtgttcctttaacattattaatcttagaaatattccctttggaatttgtaatctgtaatttagcattttttgtggatttaggttgagttcccaatttgtacttattccccccgtgtacatttttatatagttgtgtccccaattttccatgctcttgactaggtatatttaggtttgggggcttggtgttgattctgcagaagaatgcagatatttgatttccccttcatacacgtgcattccatgtctatttgttcaataaaattgaagaatagaatatgtattttgaaagg

SEQ ID NO: 8640 - DNA, 1131 bp, Glycine max
  Clone ID: 700786512_FLI
taaacgaagaaacagaaagaaaaaaaatgaacaaacaaattggggtttgaaaagaagccggtgctgtctccttgttctccatcgtaagatataactaattatttttatatcttcatcaagatgcgccgagggagaaccgccgccgccgctgccgccgttgtggatcccacgccggaccaggccaaggagacgacgcggttccgtggcgtgaggaagcggccgtgggggcgattcgcggcggagattcgagatccgtggaagaagcagcgcgtttggctggggaccttcgattccgccgaggatgccgcgcgggcctacgacaaggctgcccgatccttccgcgggcccaaggccaaaaccaatttccccccccttccccggcccggcagaggcggaccaccactcgcagattccgctctaccaggcccatgggctttccaccaagttcgagcccgtcgtccaggtgaaccggcccacgagcagcggcatgagcagcaccgtggagtccttcagcgggcctagggttccctcctcctcctctcgcgctaagccccttgttgtggttgttaaccctatcatccctctcaacgacgacgaagacgattgccacagcgattgcgactcttcttcctccgtcgtcgacgacggccaggactgcgtcctcatctcctccttccggcaaccgctgcccttcgatctaaacctcccaccatccgatgccgacgacgacaacgacgacgacctgccggccaccgcgctgtgcctctgatgatgaagaagaagaagaacctcttctcggtataatcatcattttcttgttgttgttgttattgttgttgttgttgttcatctctggtttaattaattaattaaaagttgttagattgtgttgtggtgttgtagagtaatattataataggcatgaatgtgttgttgtaagttatttggatccattactgtgtcatagcattggacctgatctcaaaaactggttggtgcttatgctttcttcatggatctgcttcttacccttacccccaattagaacttactcttttcttttttttttgttgttgttgttctgtacaaaaattatggctatcagatcatagaataaattacattctaatc

SEQ ID NO: 8641 - DNA, 1286 bp, Glycine max
  Clone ID: 700786611_FLI
tacgaatgcccgggttgttttttgtatccacaacattgcttaccaaggaagatttgcattcgccgacttctcacttctaaatctcccagaccaatttaagagctcctttgactttattgatgggcatgttaaaccagtggttggaaggaaaatcaattggttgaaagctggacttatagaatcatggtttgtgataaccgttagtccaaactatgctaaagaactggtgtcaggtccagacaaaggagtggaattggacaacatcattcgcaaaattgatgatgatggtcgtttggttggaattgtgaatggcatggatgttcaggagtggaatccaaccactgacaaatatatagctgtcaaatatgatgtttcaacagtattggaagcaaaggctcttctgaaagaagccctccaagcagaagttggattgccagtcgacagaaatattcctctcattggtttcattggtaggcttgaagagcaaaaaggttctgatattcttgcagaagccattccccaatttatcaagcagaatgttcagttggtagccctaggaacaggaaaaaaacaaatggaaaagcagcttgaggaacttgaaatatcataccctgataaggccagaggagtggcaaaattcaatgttcccctagcccacatgataatagctggagctgattttatattggttcctagcagatttgagccttgtggtctcattcagttacaagctatgcgctatggatctgtaccaattgttgcctcaacaggtggattagttgacactgtcaaagaaggcttcactggatttcagatgggtgccttcaatgttgaatgtgatgctgtggatccggctgatgtggatgctatatcaaagactgtcaaaagggcccttgcagtctatggaactccagcttttacagaaattatcaagaactgcatggctcaagatctttcatggaaggggcctgctaaggagtgggaggaagtgctgctaagcttgggagttcctggcagtgaacctggaagtgatggagaagaaattgctccacaggcaaaggaaaatgtggcaacaccataataataagaacaaagatgtgagggaagcctctcctagtctgagtctcgtgaagttctcccagccccttgcttgttattaatattatgttttatatccttcttccaaatttttgttttcttctaaatagattatagaaatgtacatggacacggaaattacactattcgaatcagtgtaatgagtgcaggtctttcaagattagcat

SEQ ID NO: 8642 - DNA, 1024 bp, Glycine max
  Clone ID: 700786691_FLI
gaacatggggtttgaggaaactgagctaaggcttggactgcctggaaacgtaggaggcactggcactgaagaagtgctcatcaggaagagaggtttctctgagactgaaactgaaactgaggaggatgagtctgctaccactgtggatttgatgcttaatctttcttctaaggaagctgctgctgctgcagatccaactgataagcacaagactttgcctaaggagaagactcttctgcctgcagatcctgctaagcctccagccaaggcacaggtggtaggttggccacctgtgcggtccttccggaagaacatgttagctgtacaaaagagcgtcggagaagagaacgagaagaacagcagcagccctaatgcaagctttgtcaaagttagcatggatggagcaccttacctccgcaaagtggacttgaagatgtacaagagttaccgagagctctctgattctttaggcaaaatgttcagctccttcaccataggcaattgtgaatcccaaggaatgaaggatttcatgaatgagagcaagctgaatgatcttttgaacagctctgattatgtcccaacctatgaggacaaggatggtgactggatgcttgtcggtgatgtcccatgggagatgtttgttgaatcatgcaagcgtttacgcatcatgaaaggaaaggaggccattggtcttggtcttgcaccaagagccatggcaaaatccaagaacaggagctagactagtcgcacaattcatgacctgccccatcctttgtaattgcggtgcccagttggcttagttactaaagtaaggataattaagctgcagcagacacggatggacattgctaagtggttgaattatagttaatttgtgtcattatggtttgttataatatttcatcaaacaaaacaatgagatgcatgtctaattaagtactaatcatgaacaggaacataatgactctcaatcatgttgttagacttggctttcttatatatcgatctttgcttgttttgtgtg

SEQ ID NO: 8643 - DNA, 1218 bp, Glycine max
  Clone ID: 700786710_FLI
gttttccggtgccttcgcgtcgctctgaatgtcatcggcggcgagaactcccggtggcgaggagggaaagcactaccctgctccactcgcccctcacgagggcgtcgtgaaggactccactctcttctgggacactctaaggcgctttcactttgttatgggtaccaaatttatgattcctgtgattggagggaaggagctggatttgcacgttctttacgtggaagttacgagaagaagtggctacgagaaggtagttgcagagaagaagtggagggaagttggtagtgttttcaagttcgcagctaccaccaccagcgcttcttttgtactcaggaaacactactttagtcttctttatcattatgaacaagttcacttctttaaagctcggggtcctatctacactccatcagcagatgcattttccggcaacagcccttcgtggagacctgaattagctattgtggaatattcgcctaagcctatggataatagtcctgaatctcgtgctgaagatacttcatgcctttcaggaaatggaaccatcgagggaaaatttgactgtggttatttagtgtccgtgaagcttggttcggaggttcttagaggggtgctttaccatcctgagcaattggttcctcaccatcgattccaaacatgagagtgccattgtaccaatcaaccgcaaacctcaccgttctggtcgtaggaagaaaaacaaaagaaggtgggaccccaattatccaaagccgaataggagtggctataacttcttctttgctgaaaagcattacactctcaaaactctctacccaaacagagaaagggagtttaccaaaatgattggccagtcatggaacagtcttagcccagaagaaagaatggtttatcagaacattggcttaagagacaaagaaaggtacaagagagaattgacggagtacaaagagaagatgaagcttaggcagacctcagaagttggacgtccatagaatctcattggtacccgtttgtggaggcgaaagaatggcttagaaaatttttataatctgttgacttttacgtgcatattgttgtggataatggtccactggactgtggtctacagaactattgtttttttcttttcaaaagagaaaactagtgtctattgttagtcagagaccctttcatttcgtttaatcaattaattatcctcccaagtttgttctctgt

SEQ ID NO: 8644 - DNA, 2140 bp, Glycine max
  Clone ID: 700786711_FLI
cgatttgacgcttggtgagttgcttaagtataagtctgaggaaggggtgagagtgttgttgctggtttgggatgataaaacttcgcatgataaggttttcctcaagacggctggtgtgatggggactcatgatgaggaaaccaggaagttttttaagcattcttctgttatgtgtgttctgtcgcctcggtatgccagcaataaaatgagcttcttgaagcaacaggttgttggaacggtcttcacacaccaccaaaaatgtgtgattgtggacacacaggctgctggtaataaccggaagataactgcttttataggaggtcttgatctatgtgatggtcgctatgacacacccgagcatcgtctgtttcgtaatcttgacgatgtatttgatggtgatttccacaatcctacattttctgctggaacaagagttcctagacaaccatggcatgatttgcactgcagaatagatggacctgctgcatatgatgttcttattaactttgagcagcgatggagaaaagcaactaagtggaaagagtttgcgatccttttcaaaaaatcctctcaatggcatgacgatgctttaataagaatagaacgcatctcatggatattaagtccttctggtgctgctaccttaaaggataaatcggatgattatactgttccagaggatgaccctttagtatgggtttctagtgaagatgatcctgaaaactggcatgttcaggatccctgaaaggatttcccaaacgtgttgatgttgctctgtcccaggttcattaactagtgttttacttgcttgttcatcctatttcttctgtacagaaaactcaaaatatgttgagtgaactctgtactagcttgcaaaccaaacctagatattgagtttagaatcttatacattgaattgattagaatcatatcctgcactttctagttaacataattttggatgcagaatcttatctgtgctaaaaatttggttatagacaaaagcattcaaacagcatacattcaagcgatcagatctgctcaacactttatttatattgaaaaccaatacttcattggatcatcgtatgcatggccagcttataaagatgcaggggctgataatctcatcccaatggaattggcactgaaaattgctagtaaaattagagctaaggagagatttgctgtctacattgttttaccaatgtggccagaaggtgatcctaaaactggggctatgcaagaaatcctcttttggcagggccaaacgatgcaaatgatgtatgatgcagttgctagagaattgaaatcaatgcagcttactgatgtgcacccacaagattacctcaatttttattgccttggtaatcgggaacactttaatgaagatagttcaagcacaaatggtgcacaggtctcaacagcatataaatatcgccgttttatgatttatgtgcatgctaaagggatgatcgtcgatgatgagtatgttataattggatctgctaatataaaccaaagatctatggctggtactaaagatactgagatagctatgggtgcatatcaaccccattacacgtggtcagcaaagaaaagacatccacatggccagatttatggttacagaatgtcactttggggagagcatcttggcatgttagatgaaacttttgaagaaccagagagattggagtgtgtgcataaagtgaataaaattgcagacaacaattggaaattattcgcttctgaagatttctcacttttgcagggacatcttcttaagtatcctgtacaggtagattccgatgggaagattagatccctacctgactgtgagaatttccccgatgccgggggtaagatactgggggctcactccacgacaattccagatatcctaacaacttaaactcctgaattcatgtcgttgaagatttgtaaagattgtgatttgttgcctgccccttcctgagaaagaggacagaaaaagaagttgggggtaaagttatgtagctttctgtacttaaaaatgattgttcagatcacttgtaaatctttcacacagaattgattcatattttgaaaggatcaccagtttatagatatccgttaccctgtcctcctttatttggtc

SEQ ID NO: 8645 - DNA, 1769 bp, Glycine max
  Clone ID: 700786769_FLI
gctgaaagggaacaaggtttacttcagatactgactgagatggatggattcaaagtttccacagcacaggttctcgtgataggtgccacaaatagattggatattcttgatcctgctctattgaggaagggtcgttttgacaagatcattagagttggtttgccatcagaggatggaagatttgccattttgaaggtgcatgcgaggaataaattttttcgctctgaggaggaaaaggagactctacttaaggaaattgctgaactgacagaagattttactggggcagagctacaaaatatactgaatgaagctggaattttgacagccaggaaggatttggactacattggacgagatgagctgcttgaggcattaaagaggcaaaagggaacatttgaaacagggcaagaggatagtaccgaaattcctgaagaattaaaactgagattggcatacagagaagcagctgttgctgttctagcatgttattttcccgagccccaccgtccttttcttgagactgatataaattctatccgcagccagccaaatatgcgttatgctgaaatttctggccaggtttttgcaaggaaattagattacataaactctatagtgcgtgcttgtgctccaagagtaattgaggaggagatgtttgggattgacaatttgtgttggatctctgcaaaggcaacattagaagcttcaaagcgtgcagagtttttaattctgcagacaggcatgactgcttttgggaaagcatattacaaaaactatagtgaccttgtgcccagtcttgcaatgaagcttgaagcacttcgagatgagtatatgcgttatgctacagagaagtgctcatctgtgctaaaagagtaccatttggctgttgagacaatcacagatattttgcttgaaaaggggcaaatcaaagctgaggagatttgggacatttataggggtgctcctcgtgtagctcagcctgctgtcagtccagttgatgaatttggggcactgatttatgctggacgatggggaatccatgggatcagtcttcccggaagggttacatttgcgccaggcaatgttggatttgcgacctttggtgctcctcgccctacagagacacaaattgttagtgatgaaacttggaaattagtagatgatatctgggataaaaaggttcaaaacattaaagatgaagcttcaaaggtgattgaagaagagaaggaaaagccacaacttttgatggcaagccattttctttgagaggaacttaaatttgacctacagctgcaccatcaggatgctatccttcgctttgcccagagctctttttcagcatgaatatcaacttggaatgcatattatcaaaatgaagattgatacattctcgaactagctgaagggtacctaaaagactcattcaaatcattcaattttgtgaacgagagaccttttttttgccacagatgaagcaccgagggttttgaactgagctgttaagttaaatgcattactacccacattgtaatttatcagagtaaatgtatcaattatctcaaatgtttctatatagttgttactttgtgatcgtagttaatgataaattaaagggtgaaaattgttgcaccacttttcctttacatgcttttttcatcaccaaccctgcacagtagacagcggttagccatatctaatgatgtaaatgatagtgatgcacaccaaaagtgatgtgcctaaattattactctgatattgattgagtt

SEQ ID NO: 8646 - DNA, 171 bp, Glycine max
  Clone ID: 700786845_FLI
tgataagcttctcttggagcttaaaagtattggaatttccccaggcttctaagtgtgaaaaatttgcaaagcatttgtagccgccaccccactttgtttgtttgtacttaaactacattcccatttgtttttgctttttgagatttcatcatcctgtatttttggtttctg

SEQ ID NO: 8647 - DNA, 1137 bp, Glycine max
  Clone ID: 700786857_FLI
gcaatttatccttgacacgaaaattgaaatggcgctgaggctgactactgttgtttcaagtgttggtcattcggggaaacccaggtttaggttcagaatcagaagtgttgctgccacagttagaaacatggccttcagtgcaacctccaaggtaattgattcccatctccacgtgtgggcttcacctcaagaggctggcagattcccttattctcttggacaagaacctactttaccaggaaatgccgagtttttgctccagtgtatggaggaggcaggagtagatggtgcactcattgtgcagccaattaatcataaatttgatcatagttatgtcacaagcgttttgaataaatacccaacgaaatttgttggttgttgccttgctaatccagcagatgatggaagtgggcttaggcagtttgaagatcttgttttgaaggacggttatcgtgctgttcgattcaacccatatttgtggcctcctggagaaaagatgacaaataaagttgggaaggaaattttccaaagggctggagaactcaatgtgccagtgggcttcatgtgtatgaaggggcttgatctgcatatttctgaaattgagcaattgtgcacagaattcccatcaacagttgtattgcttgatcacttgggcttttgcaaaccaccaataaatgatgaggaaggtcttgtcttttctcaacttttaaatctgtctagattcccacaagtacatgtgaaatttagtgcccttttcagagtgtcaagagcacagtttccttatctagatttgtctcctctcttttcccaagttgtctctcactttggtgctaaccgtgtaatgtggggcagcgattttccatttgttgttgctgaatgtggttacaaaggagccaaagaagcagtgcatcttattgccagtgagatctctttgcctttatcagatttagagtggatcatggggaggacagctacacaactcttccaaaaccaattgactccagtcaatagttgagagtggggatgctgtttgagttgtataaaaagtttttagctgttatagtggaaattagatgttgaatacttgaatataaatttacaattctgacagcattgaagacgttttttagttgtctg

SEQ ID NO: 8648 - DNA, 1676 bp, Glycine max
  Clone ID: 700786894_FLI
cgggcggtggatcccgagggagagctggggggagacggagataaggctgatggccacggcggggctgaggatgctcgacgcggcggcgcaggagaggattctagcgtcgtgcaggaaggtgctgcgtgactccggattcatgtttagggacgaatgggcttctgttatcacaggttctgatgaaggagtgtatgcttgggttgttgctaattatgcacttgacactcttggaggtgatcctttggaaacaactgggattattgaacttggtggtgcttctgctcaggtgacctttgtatcaagagaagcagtgctgccttcattttcacgaactgttaaatttgggaataccacctacaacctttacagccacagctttcttcattttggcctgaatgctgctcaggactcgttgaaagaagcacttgtattgggagaatttaacttagcttctcaatctcttcaaaaagggttgcggatagatccttgtactcctacaggatactcttataatgttgaatcatggaagttccctcctagctcagagagtgaaaaaaaccaatatcagtccactgtacaagccaggggaaacttttcagagtgcagatctgtagcactaacactgctacaaaaagggaaagaatcatgttcctatcagcactgtgacataggatcaactttcataccaaagcttcaggggaaatttttggccacagaaaatttcttttacacatcaaagttttttggattgacgccaagggcctatctgtccaagttgatgaatgctgggaaagaattctgtggcaaggattggttaaggctgaagaaaaaatatgtctcccatgatgaggaagatttacttcggtattgcttctcttcagcatacattgttgctctgcttcacgacagtcttggaattgctttggatgatgagagggtcaaggttgctaatcaggtgggaagtattccgcttgattgggctttgggagcttttattctgcaaacagcagctgacgcagatataaagaaccataattggatcgccaccattttcagtgatgaatcacatactctcctctcaattattggaatttttatagtgttgttaacggcatggtctatatctaggtggaggaaacctcagttgaagacaatttacgatctagaaaagggacgatatattatcacacgagttggtagataatgcttgatggtagagcagatcgtggttcttggtttacatgtgtggaggcactgttgtgattatgatgaaaatatttagcctttcgtgatggccacatcatactttcgaaggtcatgccagcggtggggctcagattgtaaatcattggattttggatgcagtatatggagttactcttgctgaggaactagtgtagaatagcaacgtttctgtgtttagtggaaatccagggattgagtgttatgtatgcctctcgctttactgattactgataacagtaaggcaagaagtggagcaggtcagcctaggaattattcccagggggaactagatgctgcatccttcaacagaaaacactttattatgtggtttttgtacactgcataataaattattgagttgatgtttgcctattgctacatacaaaacgaaaaatcttcattccctacctgggaagtttaataattaaatt

SEQ ID NO: 8649 - DNA, 2025 bp, Glycine max
  Clone ID: 700786909_FLI
cgaaagttgtgattaggcatttgcccccttctctcactcaatccgatctcttccaacacatcgattctcacttcgcttctcgctacaattggttctccttccgtcccggcaacaacagtcacaagcgtcagaggcattcccgagcgtatatagacttcaagtgtcccgatgacgttttcgagttcgccgagttctttgatggacacgtttttgttaacgagcgaggtgcccagcataaagtgatagttgagtatgcaccttctcagcgtgttccaaagccaagtgccaaaaaagatggacgtgaagggactatattcaaagatccagattatcttgagttcctcaaactaattgcaaaacctcaagagcatcttcctagtgcagagatacaattggaaagaaaagaatctgagcaagttggggccagcaaggaaacacctattgtcacacccctgatggaatatattcgtcagaaacgtgctgttgacagtggtatgcaggcttcatcagcagtggcaaaagtttgcagaagatctagagctgctttgcctggtaagcctggctcaggcaatattaaacgtggatctgaaaagaaaaagtatgttcagaaggacaatgccaagagtgctactcgcaaagagtcaaaaaacatgtcagcctttattgtggtcccccggcgagacgatcaatttgctgaatcaagtataaaaggaatttctgacattaaaactttgcatggcgttgaaggttccatttctggaattccactgacttctgagtcaggaaagaaaaaattccttcttcttaaagggaaacagcaggacattcccagtgccactgaggccacagtaaaacagcaaaacgtacaatctggaaattctcctatttcaactcctgcaaaacagaaccagagacgtgaagctagtggaagattgattaggagcatacttctaaataatgaagctcgtcaaagtcagtctacaactggtacacaacataaaattcaaattttaagttctgagaatgggcagcgaccctctcgtcgttttggttcaaggtctgggttaaataatcaagtctcaaatcatgatgctgcacaaattaattccgaaggggattctagaagagcattggacgaaaagttcataaaaagggatcttcatggtttggggagcagtgccaaaacagaaaaacgtactagaaacaaggatagacctgatcgaggtgtttggacaccccttcgtcgttctgatgtttcgcatgctggtaacgactattcatcatcctcattggcacagcctactcagtcaaatcctgaatctgctgaaggagaagtaaaagaaaatgttccttctggaaacaggggaggtgaattctctgcttctgcaggtggacacggtggcaatccttcaattgagaatggttctcaaagaaattttattcatcatggagcttcctatgtagtgaaggatgatggtgcagtcagtagtataagcaaagggaaaccttccaagaaaagtgttgggcatagtgctcacgagaagcaagtctgggtccataaatcttcttcagggtcataaaatatctgcgtcagggcatcattcctgctatggtctccgtataggacgtaatcctcaactaattcaggtcaacctgagtctgagcgacttgaaagagcctctgcacaataaagggaatgcaaagttacagacctcgttgacatgattattactgaaaacagattggcattgttaaccatgctgatggatttagacccattacggttcgtgtctccttaaattgaatatttcagtgttgggaaatattgtgtttgggatgtaactgtaaagttcttggtacataacatgggatagtatgttggaaagagtgaagaatcttgtcttgttcagtggacaagtagttaaataatgttttgtattgaaggcttatactttagcgtgcacatgtccgtgttattgtaaggatattagaacgtctttggtcctcaagaatcatccttattcc

SEQ ID NO: 8650 - DNA, 1353 bp, Glycine max
  Clone ID: 700786937_FLI
cgccacacgaaggtcgatgggcgaggccgccggatccgcatgccggcggcctgcgctgccagagtgttccagctcacgcgtgagctgggacataagtctgacggcgagaccatcgagtggctcctccagcaggcggagcccgccgtcatcgccgccactgggacaggcaccattcccgccaacttcacctccctcaacatctccctccgcagctctggctccaccatgtcggccccgtcgcactacttccgcggaaactacttcaaccctagcacgttctccacgtccgccgccgcggcggcggcggctcagctgagaagccgcgcagagtgggaccggagcatgagcatggtgatggaggattctcgaaggagcatgctggagaacacttcttcaatctccgcaattttgaatttcaaccctatgggtaacgttaatgtaattcaacaagcgaaacaagagcttcgggaagaatccggcgggggcggcggtcttgaatcggtggcttctgattccgatggaagcttagggagaaagagaaggccagagcaagaactatcacaaatgggaagctatttgatacaatcaagcacagggtcgcttccggcgagccacgcttccaatacggcggcgttttggatggtggcgggtcacggcaaccaagccatgagtggtggtggcagcggcggcggtggcaacaatggtagcagcgataataatcccatttgggcaattccctctgttgggaatagtggtgtgtatagaggagctatgtctgctccaggtggcattcatttcatgaatttcgcttctccgatgaaccttatgcccggaggtcaactaggttccggtatcgttggtggcggtggcggcggtggtggcaacggcggtgctcaacttctaagtgaaagtaacttaggcatgcttgcagcccttaatgcctacaggcagattccggcgaacggcgtctcggagcctccgggcagtgccgggcaacatcacggcggagacgatggacgtgattccaccagtcaacattcctgagggtcaaaataatcacaagtgtatgatctgatgctagcttcttaatttttcttttaattactatattattcctagtgctattattactactattagctctactactaattagtgatttgcataatatatattaaatacgtaattatatatgttatgtccatttgcaaaaatatgcaagaagcgcaagtttgattgctttggtatattgagttcagtttgcggttttggttggacctttggtgtgattttgctgaggttgatcatgttagggtttaattcgagaagaaattaatacacgtatattttaac

SEQ ID NO: 8651 - DNA, 1732 bp, Glycine max
  Clone ID: 700786957_FLI
caccccgtgagcctcttgtcgagttcgctcgctacgttttcttcaagcaccacgcttttcgcgatttccgtgatgacccttttctctggaacgctctgctcaggtcccactctcacgggtgtgaccccagaggggccctagttctgctctgcttgatgatcgaaaatggggtgcgtgtggatgggtactcgttttcgttggttctgaaggcttgtgctagagtgggtttggttagggagggaatgcaggtttatgggttgttgtggaagatgaattttgggtctgatgtgtttttgcagaattgtttgattgggttgtttgtgagatgcgggtgtgttgagcttgcgcgccagttgtttgacagaatggctgaccgggatgttgtttcgtataactctatgattgatgggtatgtgaagtgtggggcggtggagagggcgcgtgagttgtttgatagtatggaggagaggaatttgattacttggaattcaatgattggagggtatgtgaggtgggaagagggggtggagtttgcttggagtttgtttgttaaaatgccggagaaggacttggtttcgtggaacacgatgattgacggttgtgtgaaaaatgggaggatggaggatgctcgggtgttgtttgatgagatgccggagagggattcggtcagctgggttaccatgatagatggttatgtgaaattgggtgatgttcttgctgcgaggcgattgtttgatgaaatgccgagcagagatgttatttcttgtaattcgatgatggcaggctatgttcaaaatggttgttgcattgaggctttgaaaatattttatgatatgaaaagggcaacaaatgtggtgcctgatgatactacgttgttgattgtaatcacagcgtttgcccaattaggacacgttgaagatggagttgtgatacatcattatttgatggacaaggggtactctctgaatggtaagcttggtgttgctctaattgacatgtattcgaagtgcggtagcattgataacgctatctcagtgtttgagaatgtcgaacaaaaatgtgttgatcattggaatgctatgatcggtggtttagctattcatggaatgggtttaatggctttcgattttctcatggagatgggaaggctttctgttattcctgatgatatcacattcattggagtgttgagtgcttgtaggcatgctggcatgttgaaggaaggactgatatgttttgagctcatgcaaaaagtatacaatctggaacctaaagtgcagcactatggatgcatggtggacatgcttagtcgcgcagggcacattgaagaagccaagaaactcattgaggagatgcctgttgaacccaatgatgtgatttggaagaccttactcagtgcttgccaaaattatgaaaacttctctataggagagcctatagctcagcaattgactcagctatattcatgcagtccaagttcctatgtgctcctgtctaatatttatgccagtttgggcatgtgggacaatgtaaagagggttaggacagaaatgaaagaaaggcaattaaagaaaattccaggttgtagttggattgaactggggggaattgttcaccagttctctgtacaagataggacacaccctcaggttactgagatttattctttgttaagtagcttgtaaattcctatttcgaagctgatctattatgtgatattgtttgagttggg

SEQ ID NO: 8652 - DNA, 658 bp, Glycine max
  Clone ID: 700787104_FLI
ggaagagaaaaggaaggccctgcaggctcaaaaaactgaagcaagaaaggtggacatcaaggaatttgcatccatgcagccactgtcaaacaagaaagaaaatgatgagatctttattaaattgggatctgacaaggataagcgcaaagatgctttggagaaggaggagaaatccaagaagtctgtcaacatcactgagtttctgaagccagctgaaggggaaaggtactaccctggtgggcgtggtcggggacgtggccgtggttctagaggaggttacagtggaaatgcatacagcaatgctccagctccatcaattgaggatcctgggcacttcccatccttgggtggcaagtgaggttttcctgaacccttctgacatttccctgtcctttttttgtcaattttgggttcttggatttggacttaaaagcaggaaaaaaactttggtaattggatttcctgaattagaagggttattattttgacttctatgccttaaaatgtaaatttaggttgttcttcatacgttgtagccttttccttgtgtttttctgttactatggttggacattccgggggggttatatggtggcggataagacaaatgttgttgagtttcgttttatttatagattgaattctcagttttgatttg

SEQ ID NO: 8653 - DNA, 1708 bp, Glycine max
  Clone ID: 700787122_FLI
cttggagttaaaagccgatcttcttgttttgttgagtgatgtagaaggtctttatagtggccctccaagtgatccacattcaaagcttattcatacgtatattaaggagaagcatcagaatgaaattacttttggtgacaaatctagagtgggaagaggtggaatgactgccaaagtaaaagctgctgttcatgcagctgatgctggcattcctgttgttattaccagtggttttgcagctgagaatattatcaatgttctccaaggacaacgcataggaactctcttccataaagatgcacatgagtgggtccaagtaaaagaggttgatgctcgtgagatggcagttgcagccagggaatgttccagaaggctccaggccatatcttctgaagaaaggaatcaaattttacataaaatagctgatgccctggaagcaaatgaaaaaataatcaggactgaaaatgaagctgatattgctgtggcacaagaagcaggatatgaaaaatccttggtggcaaggctagctataaaacctgggaagattgcaagccttgcaaacaacatgcgaattattgccaacatggaagatccaattggtcaagtattaaaaagaactgagctatcagatgggctaattttagagaagacatcatctcctttgggagtgctccttattgtttttgagtcacgccctgatgctcttgtacagatagcttcactggcaatccgaagtgggaatggacttctcttgaaaggtggcaaagaagctaggcggtcaaatgcaattttgcacaaagtaattactgaggccataccagatactgttggtggaaaacttataggacttgtgacctcaagggaagaaatccctgagctacttaagctggatgatgtaatcgatctggtgattccaagaggcagcaacaaacttgtttctcagatcaagagttccactaaaattcctgttttaggtcatgctgatggagtttgtcatgtctatgttgataagtctgctaatgtggagatggcaaggcggattgtacttgatgcaaaaatagattatccagcagcctgcaacgccatggaaacacttcttgtccacaaggatttgatagagaaaggttggttaaatgatattgttgttgacctacgaactgaaggcgttaaattatatggaggaccaagggcaagttctctgttaaatattccacaagcacaaacatttcatcatgagtacagttcgctggcttgcactgttgaaattgtggatgacgtgtatgcagctattgatcatataaatctttatggaagtgcacatactgactccatcgttgcagaagataaagaagttgctaatgtgtttctacgccaagtagacagtgctgctgtttttcacaatgcaagcaccagattcagtgatggggcaagatttggactaggcgcagaggttggaattagtacgagcaggattcatgctcgaggtccagtaggagttgagggattgttaacaacaagatggatactaaaaggaagtggacaagtagtggatggtgataaagggattgtctatacccacaaagacattgcaacttaatttgaatggtctaattgctatacttccttttgtagccttttcatttattttgacagttgagaacggtataaaattgggcaattaaataaaatagggtcatttgtatcatct

SEQ ID NO: 8654 - DNA, 879 bp, Glycine max
  Clone ID: 700787184_FLI
atttgacacaggaggcacgttgctatgagttgctctttctcaattttgcaattgcaagtgaagaagccctaattttttgcagatctggaaatggcgacggcaacataccctccaccgccaccttattacaggctttacaaagattacttgcaagaccctaattctgctcccgaccctccaccacctattgaaggcacttatctttgttttggagccaattacactactagtgatgttctacctaccttggaagaacaaggggtgcgccagctctattctaagggccctaatgttgatttcaagaaagagctgaggtcactcaacggagagttgcaactacatgttttggagcttgctgatattcttattgagaggccttcacagtatgcaagaagagtagaagaaatttcaactgtattcaaaaacttacatcaccttttaaattcattgcgtcctcatcaggcgagagcaacattgattcatattttggaacttcagatacagcgtcgtaaacaagcagtggaagacataaagaagaggagagaagaagcccgaaggctccttaacgagtccttggcaacacttgatggccattagagcattctctatcttgtattcacagcaagaatctaccgaggaaattaattttatttgaaaagtgaattttgtcctctagattttagcaaatgaaaagattaaaacaagaagttgtgcgacttccttgaaaatggtcacttgacataactgtctcatgttcttgatgaaggctgttttgcagcatgtgcaaagatattagaaatagaagaattgtgttaagagtgttgctactgttcttagaaatatttttagtagtgtataaagtctgaagtctgaactatt

SEQ ID NO: 8655 - DNA, 805 bp, Glycine max
  Clone ID: 700787220_FLI
ggcttactgagaaatcagatgtgtattcatttggggtggtgttaatggaagtgttatgcacaagaccagccttgaaccctgtccttccaagggagcaggttaacatagctgagtgggcaatgacctggcagaaaaagggtatgcttgatcaaatcatggatcaaaatcttgttggcaaggtgaatcctgcttcccttaagaagtttggggagacagccgagaagtgcttggctgagcatggcgtggaccggccgtcaatgggagatgttttgtggaatcttgaatatgcattgcagcttcaggagacctcttcggcccttatggagcctgaagataacagcacaaaccacatcactggaattcagttgacaccccttgaccattttgataacagtgtgagtatgattgatgggggcaactcttgcactgatgatgatacggaagatgttgccacaagtgcagtgttctcacaattggtaaatcctcgcggaagataagctcttgtgtatcaacaattctggccaaaagccatcaaagtaagcggctattctggtctgattggtgaatgaaggctatttcttatttagttactgcttttataatccattttttccaccacaatcaatttactttgtaatatacttgagtgatagtgatgggcaccattaagctggttagtaattgcatgcaaggtgccccataaaattctgttgtactaaatataaaccaattaggagttctgctcctcaagttgttcttacaccttacaatatatgaaggttataagttctttcttctgaacatg

SEQ ID NO: 8656 - DNA, 967 bp, Glycine max
  Clone ID: 700787288_FLI
ccagaagtcaggtgtcaaattggtttataaatgctcgagtgcgtctatggaaacctatgattgaagagatgtacaagcaagataattgtattgctggcatggactcaaattcttcatctgaaaatgtgtccaaggtaacaaaaagttatgtcaagacctccaatgatgtgggtgatgattcgcagcactgtcaaagtccaattgtggccgatacaaatcacagtggtggacaagctaaggacctcagacatgatcaggctcttgatacagaaatgatggcatccattggattagctagtcccataacctccatttatggggctgaaactgaacataggcgaaatttggatgattgtggtctcttctctaatgacacagttgttcagtctgatggagctactaataagaggtttgtgtcagttggtccaacatgccaaatgccagagtctgagaggttcaagtcaggaagtggagtgtctctaacattgggtttgcagcattgtgaaggaggtaattttttgcctggtaagacccatctcagtttggtttccatgagggaggacgacatctccaaagcgaccgcagcttcaacagttggagtagagacaacagaacttgagtgcattggtgctggaaaccaacaacaaaggttaaattcacctcatatgctacatgattttgaagtatgatgataatctcttgcaatcattccgtgggaaggaaaagagtggtgagtgctgatgttgggaccattttacagacagtgaatcatagaaggaactcagtggtccctcaaaggatgataggactgacaaaacagttgtatgatatcatgaaatttattgggaagatctatcttatggttaatgtgtagaaggaaacatgtatatttaggtctattttgctgtgaagaaatcaagaaacgtgagaatggtaaataataaatggattggctgattattgtatt

SEQ ID NO: 8657 - DNA, 1925 bp, Glycine max
  Clone ID: 700787309_FLI
cagacccttcaaagaggacgcaggaatctgtggcatctcactgcaagtcgtgtgtcagtattgctttcttctgctgcagtctgtactgctagcattcatcaattcttgaaaaattatgaagacctcggtgtctttattttgactggggaagccttttgtggaattgaagcagttgaatttaggcagaagttaaaggttgtttgtgaaaactatttcatagcttttcatcgacaaaatgtgcatgcactaaaaatggttttggagaaagagacttggctaaaattacccccagaaacagtacatatgatcagttttgcaggacttattggtgatggagcaccgttgatttctttatccagtggtaaatcaactaatgtcagtgcagtccattccattaaatcggtgaatatggttcacactggtgcaaggaagaatgggttttctcactggattaaaagtggaaaccctttccagcaaaaattaccaacctccaatgaaggtcgtggttactcgcaacctaatggatcagtttgtggtgaatttgacggaagttcaaccaataattttcatgacgataaaacacccagaaagaatgatatcaatcaaatgaatggtgccaattctgtttcagaagatgaaaatgaggatcttcttgctgactttattgatgaagatagtcaactaccaagtcgaagttctaaaccccatcattcaagagctctctcttcacatgttaatgacgaagagaatacaacacaaactggatcttctctctgtctattaaagtctatggataaatatgcaaggcttatgcagaaattggaagtggtaaatgttgagttcttcaagggagtatgccaattgtttggattttttttctattttatatatgaaacatttggtcagcaaaacgctagttcaactggaaaaggcacttctagctctcttaactatcgcctgagaacagctttatccagagtaaaccaagattgtgaagagtggattaagtctcaatcatcgtcaccaacatctttgagttcaccatttgtacatgctgagttgacacctacacaccctcccaatacaaattatggtcactcctcagggacttctttgggtctgaaggtggatgctgtaccagatcttacagaacatgttcatcggactacagtgagactactgttgcacattaatggatatgttgaacgtgttgccaattgtaaatgggaagtaaaagagcttggcatggagcataatggatatgttgatttgatgctgggggagtttaagcactataaaacacgacttgctcatggaggaattcgtaaagaggttcaagacctattattggattatgggcttgaaattgtggcggaaactcttgttgaaggactttcacgggtgaagagatgtagtgatgaaggacgggcccttatgtcattagatctgcaggttttgatcaatgggttacaccattttgtgtcgctgaatgtgaagcccaagctacaaatggttgagactttcatcaaggcttactaccttcccgagacagaatatgtgcactgggcacgagcacacccggaatacagtaaaagccaggttgttggactggtcaaccttgttgccactatgaaaggttggaagaggaaaaccaggttggacatactagaaaagattgaatgagcatgtcttttgttgtgtatcaagtcaggcaaatagaatcttctgctctttttcccctttgtctttcttttttggcagagcttcgtgtaaaggtagtgtatattgcttggcatttgatcccctattaattatggagtattttccaaatctgtgcgttggtgtcttgtagatagtcctttgaaaataagctgtaattgtactataattttaccttataattttttttatcatgttattcaggt

SEQ ID NO: 8658 - DNA, 500 bp, Glycine max
  Clone ID: 700787360_FLI
ctgaagtacatagatcctacttacatgatccgtgctatcccaagtaatgcatctgataatgtatactgcaccctccttgcccaaagtgctgttcatggtgcaatggcaggatacacaggcttcaccgtgggcccagttaatggcagaaattgttacattccattccatctgataaacgagggagagaagagggttgtgataactgatcggatgtgggcaaggttgctatcttcaacccatcagccttgcttcttgaacccaaaagaaatcacaggagaaagagaggaaagaacggaaaaccaaaccacagaagggcagaaccattcagaaatagcagactaaacagggcatatacagagcacaaatataacaccaagttaaaatgcctttaaaatgtggtgatcaagttaaatgatcaaatttaattaacgtaagatcaactgattgatcattgacgttggacaaaaccaaatctagtacatcttttgcagtatttaagc

SEQ ID NO: 8659 - DNA, 1762 bp, Glycine max
  Clone ID: 700787362_FLI
caccgtcacccttccacacccgtaaccggtttctgtgcctcctgtctccgcgaacgtctcgccggcatcgattcctcctccgccgactcgccggaactccgccgcaccaagtccttctccggccgcaccgccgacgctccatcctcctccgccgccccggagccccgccgcaggtcctgcgaggttggactgccgccgctgggcggcttgctgtctgaccccttcaacgttgccgacaagaacaagaagcctccgaatcggacagctgagatctgttccggccccgccggcgtcggaaccggagagaacgagggcggcaacgcggttagagtttctggcgatgacgacggagaggggaagacgatgaaggagttcatagatctcgaattgcgggacaaaaagaacacagggagagatttcagagacatcgctgcgagttttcgagatgcggcttccgttttcagcaagggattgatgaaatggcgacggaaagagaatccgaagagaaaccgcaacaacgacggcgccagtgccggcgttggttcggtcgaaaagctagggttgaggacattgcatgagacgcaatcggaggtcggagaatacggtttcgcgttaggtagaagatcgtgcgacactgatctgaggttatccgtggacgattcgcggttttcgttcgaagctcctcgagcttcttgggacggttatttgatagggaaagcgttccctagggtttccccaatggtttgtgttggtgatagggttttgcttgaagaagagggagaagagagtttggagaatggtgaagagtgttgtcctggtggttcagctcagactaagcattactattcagattggcataggaggagaaggagtttcgataggtcgaattcgcgtaagaagccgttaatgggggatgttgatgaattgagagtgatatctaatgctaaggtttcccctgcctccactgagttgttctatggggcaaaggtattgataactgagaatgatttgagggatgcgaatttgaaaacgtccaatagtgttctatctgatagtgtaatggagtctgcttctaaggatgatgcttgtgatgctgcatatggggatggccaaaagggattgaacaggtttcacaagtggggtaagtggtggtgtaaattagggatagtgcagaggagaagagaagataggttgggagaaggagagtatgctggtggtggtgatatggttaatgagccaattgcagagtcttggcagaagctaaggagggtggttaatggacaagcaagcgagtcggtttgtgagaagcttattcgtagccatagtgtttgttgtagagatccttgtagaacggtgggtttagccaatggctttgtgggttctgagactaaaggccatgttttcaatggaaggcagaagtttatgcttcagaggaaccggagtgttaggtattcaccaagtaatgctgacaatggcttgttaaggttctatttgacacccttgaaaagctataggagaagcaggtctggaaagactagcttaaagagttcaaatccaacagccagaagtttcttttgaggctgtaactaatggaagtatatctggttgtataaacatatataatgaaattgtttcttgtccttgcaatcaaagtacttcacattgttagattgcatcacaatagagagatataactgttgaaatctggctggttgcagctgttctcatgatgttggtagcagaataaaacattcattctgtg

SEQ ID NO: 8660 - DNA, 1374 bp, Glycine max
  Clone ID: 700787411_FLI
gtcaccaaatgcaagaatggccagaatagcttcacttgagaacatgctgagcatatcatctaattcacttgtagcaatggcttctcaactttctgaggcagaagaaagagaacgagccttctctaatcgtggacgctggaatcagttgcgctctatgggagaagccaagaatttgcttcaatatatgtttaattctgttgcagatgctaggtgccaactctgggagaaggacatggagatcagggaaatgaaagatcaaatcaaagaacttgttggtctcttacggcaaagcgagatgaagagaaaggaagttgagaaggagctaaaagtaagagagcaagctgttggaaccacattggctacaccaccatctggagactccccaaatccatcgaaacaatatgctgaagacatgaaggggctcttatcaccagtgtctatgccagtgcctaaacagctaaaatacacgccaggggttgccaatggtttggtgagagaatcagcagcatttgtagatcagggtagaaggatggtacccatcggacagttgtcaatgaaaaaactagcaattgtaggacaagcttctggaaagttatggaggtggaaaagaagtcatcatcagtggttactacagttcaagtggaagtggcagaaaccatggagactttcagaatggatacgacacagtgatgagacaatcatgagaacaaaaccacgctcacaggctttgtcacgtatcaggtgatcttttttaggatcagcccagttcatgtggctcggtatctttcgacccacaagaattatcctagacacatggcattggaaataacagggcactaggagcagtgtaatataattggttgctgaagaaatgtatatacctgtcagtattgaataatgctgtccagatcttggaaattttgccataatttgtgcatatggagcatcttggaggtatgttgaaatgtgatgtttggacggagatacccaaataatgaaaaaaacaaagatgtcgcttgcttgaagtcagtcgtagattctggacagaaactatctttggaaaatagtctctgttcatactaacactacaaagaaacaatgggaagattcttttgtcaagtcttgggaagcttattgtgtactttattccgtactgcaaactcttacgctcctattgtgtttaagcaaattgattttgttgataggttatgtgttgtagcatttgtcacataacagaaggaaattcttgtgtagttttttttttttttaaattctctagtgcttcttgtgtgtaaagaacattagctactatattgaaagatattctaccatacagattgtataataacatcagcaactgtctcatgtcctctt

SEQ ID NO: 8661 - DNA, 1159 bp, Glycine max
  Clone ID: 700787516_FLI
tttgaggatttcaggcttcaaaggcagcacccaaaatgatgattcaggaatcagagctaatcggttgaaggcacccaatacttctgttagattaggagagagcggggaggctcacaatgttccactgtcttatgcatctgaaacaaatgatagtattgcaacatcatctgctattcatagacttttcaataaatggctgacaatgttgcgcacgcaaccatcaagccaagaagtggagaaattttttgaagaacctacatcagcaggaattttaccaaaaactcaacaagggactcaaattaaggaaagccgtgcggttttgaaggtggcatggtcccattttctggccctcgatgcaacaataaagattcctttgctggtatttgttcctctctacctggctgttaatgtaaaatatggtgctgaagtttccaaggagctaactcctttatggattttgggcccatttattgtggctacccaagtcttggcaatccgatggttatgtgcactctatgttttcagcttcaaacagactgtcaaattactcaagaattctccctcttactgcattttggcccacagctacgttttccgtggcaagctcaaagaggatatctcaacttatgttctgcagcctatattgagcgtaaaaaatagagactataaacagctaacaagaaaaaagttgaaagaattgcaggaatggatagtggagatgtatcttgattatgtggaatcgatctggccctactattgtcgaacaatcagatttttgaagagggctaatcttatttaggtttgaaaattgaaaatattcttaggggtagtctcctgaaaggctaaagagagggatgaaggagggaatactacgtagcgttgaaatttttaaatgagatatggccaatcccattttctgttgggttttggtgttgagcaagttaatggtcatgaggaagttaagtttctaattcatgttatattgaaaacgttactttattcttagattagattgtaatattttttctaatcgctgcttttgttttgaggttctgtgtgagattgattctattctgcaactagtactatggcagagtttctccccaaccctccatcttttgtattattatgttaacttgggaaactattgatgtgtggg

SEQ ID NO: 8662 - DNA, 1288 bp, Glycine max
  Clone ID: 700787578_FLI
attggatcaaactgccttggaacgaaacaagaagggccatcttccccttcatcttgcttgcaaaaggggttgtgttgagatggtaaaagaattctttgaacctggatccggatggcccattaatccttatgttctcctcaatcaaaagggtcaaaacattcttcacattgcggcaaagaatggaagagataatgtggtagaatacctactaggaaattgcaacactggtgatctacatataaaccagaaagactatgatgggaacactccattgcatttggcttccaaaaatttatttcagcaagttatcagcttgatcacagaggataagaggactgatctgaatctcacgaatgaagacggtttaacggctggtgatatcagtaagacctttgaacatccaatgttgcgtggaagagagattttatccatggagttatcaaaaggagctggagtccctgtaaatcacatgttgcattctcaacgccaaccacagcctgaaaaagacacctctgattttcaacgcaaatcactgtctgaaaaagacacccgtgaggcatttttgattgttgcagcgttgttgatgacagtgtcatttgcagctggttttactgtaccgggaggtctatatagctctgatgacccaaaccctaaaattagaggaactgcagtttttgctggtgatccaggattctggatattcatcatcttcaataccataactatgtatagctctgcaatggcatgtggacttctgtctgtgggaatagttaatcagtctaaattaactcgtaacattcattttccgcacttgtttttgacatgtgcctttctggcagcatcagtggcctttttgtctgctgtagctctagttgtggccagtaaccgtttactcgcaggtgctacaatcctcattggagcctttcactatatcctctacatttttctaataaaataatgtcgagcaaatgaaactttgatgactgatgaaattaaatctaagtcatcacttccacttatttattccagtttgatcgaggagttttttctcgagaaatataggtggtaagcccaaaaatcttcttcattcccagaaagcaaacaaggacaaggacaatggattagaagagcatgtgcaacaaggcaatggagtagaagtttttattgtttttactgggatagaataagaaagacaattcagatcttgttcatttaactttcctttatgtatgagatgaaacttgggatttgtttgtcaaattgaatctgaaaaatttagtttaaaatt

SEQ ID NO: 8663 - DNA, 1196 bp, Glycine max
  Clone ID: 700787621_FLI
ctttctcttcttccctttcctcctcctcctcttctctatcaatttctccttcttttttatcatacacttcttcaaattctacacactttgccactcatgctgccttcagcatcagtgccagcgccgccgagaagaagaaggtgctcatcgtcaataccaacagcggcgggcatgccatcattggcttttactttgcaaaggagcttcttggtgctggccactctgtcaccatactcactgttggcgatgaaggctcagacaagatgaagaaacctcctttcaacagattctcagaaattgtgagtgctggagggcgcacagtgtggggaaatccagcacaagtagggagtgttgtaggaggggaagtgtttgatgtggtcttggacaacaatggcaaggatcttgggactgtgaggccggtgattgattgggctaagagttcaggtgtcaagcaattcctgttcatcagcagtgctggaatctacaaaccaacagatgaacctccacatgttgaaggggatgttgttaaagcagatgctggtcatgttgaagtggagaaatacattgaagaaacttatggaagttgggcagtgttccggccacagtacatgattgggtctggcaacaacaaagactgtgaggagtggttttttgacaggattgttcgggatagacctgtgccaattcctggctcgggactgcaactcagtaacatagctcatgttagggacttatcttcaatgcttactcttgctgttgagaatccagaagctgcaaatcagaccattttcaactgtgtgagtgaccgtgcagtgactctaaacggaatagccaaactatgtgctcaagctgcagggcgcccggttaacattgtgcattatgatccaaaagctgttggagttgatgcaaagaaggctttccctttccgcacctatcacttctatgcagaacctagagcagccaaagctaaattgggatggcaatcaaccacaaacctccctgaagacctaaaagaacggtttgaggagtacgtaaagattgggagagataagaaatccatccagttcgagctagatgataagatattggaggcattgaaggttccggtgtcagtgtgatccatttatatccaaaacaattatcagacaagactttaagattttttggtcgctcaattcaaatgatgtgcattgaag

SEQ ID NO: 8664 - DNA, 1424 bp, Glycine max
  Clone ID: 700787631_FLI
aagaaagggaaagcaactaaacattctctctcagtccttaaattctcatcgcaacacaacactctcattcacactccaaaatggtgacctcgtcgcaaaagattctggttaccggcggtgccggtttcataggcacccacaccgtggtccagcttctcaaaggaggcttcagtgtttcaataatcgacaatttcgataactccgtcgtggaagcagtggaccgcgtccgccaagtggtgggccctcagctttctcagaacctggaattcacccagggcgatctcaggaatagggatgacttggagaaactcttctccagaacaacttttgatgccgtgatccactttgctggcctgaaagcggttgctgaaagcgtttccaagccccgtcgctattttgattttaatttggtcggcaccatcaacctctaccaagttatggcaaagtataattgcagaaagatggttttctcatcatctgcaaccgtttatggccaacctgaaaagataccgtgtgaggaggatttcaggttacaagctatgaatccctatggacggaccaagcttttcctggaagaaattgcccgagatattcagaaagctgaaccagaatggaagatcatattactgaggtacttcaatccggttggggctcatgaaagtggtaaactcggtgaagatcccaagggcatcccaaataacctcatgccttacattcagcaagtagccgttggaagattgccggaactcaatgtatatggccatgattatcccacaagggatggctctgcgatccgggactatatccatgtgatggacttagcagatggtcatattgctgccttgcgaaagctcttcacaacagagaacataggttgtactgcttacaacctgggaactggtcgtggaacatccgtgcttgaaatggttacagcatttgaaaaggcgtctggcaagaaaattccagtaaaattatgtccaagaagaccgggagatgctactgaggtttatgcatctacagagagagctgagaaagaacttggatggaaagcaaaatatggtgtggatgagatgtgcagggaccaatggaattgggcaaagaacaatccccagggttacacggggaagccttgagttagcttgagaaatatactgctcatctacgaatgttttccacacaaataggcatctctttatagaatacttttatgttggatgatttgtttaggcagttcgttgtataatctcgagaataaaaatttggccgcatttcaagaagtaaaaactatgtattttaacaatatctttaaattagactggccatcgatttcatattgagagaagtttatccagtccaccatcgtttttaaaactaagttaaggttcaaattgaatcttaaatgttaataaatatggaaattggct

SEQ ID NO: 8665 - DNA, 640 bp, Glycine max
  Clone ID: 700787639_FLI
cctccaccaccaccattattattattatcatcaccacatggctatggaatgaggtcatcacctagtgatgaagtgaactgtggagatgaagtgaaggcagaaaacaagtcagaggcagcagacataaaagtgacattgattcaaacccatgtgaacttgaaaattgagtgccaaaggaagccagggcaattgttaaaggtcattgttgctttggaggaccttaggctaaccattctgcacctcaacatcacttcctcagagacttctgtcctttactccctcaatctcaagattgaagaagattgtaagctatgttcagcaagtgacattgcagaaacggttcatcaaatattcagcttcattaatggtgtagctagagaccactagctccaaccttagggagtggtagcagaagaataaaggacgaatcattgcaaggaagatggggaaacggggaacacagggcacccatttcttgtctacatttcaatgagatgtataatgttaggtggtagctcagagattatagatgatgatggtaatgctgaaggaggataaggcatgtggtgatatattatttgctctgctcaaatgtattctcgtgttataattaaaaatgctactatagttttgttgcatg

SEQ ID NO: 8666 - DNA, 1384 bp, Glycine max
  Clone ID: 700787648_FLI
ggaatagctattttgttggaaggaggtaaaggaagttcgtgacaaaagcggcaatggaaggagaagagggttcccagcagccacagttggtgctcggggacaagctattccttcttcgacaacccgatgttcaagacattgacaaggttcgctacaaggaggatgttttcactcacatcaaccaaaacgatatggtccccttgtatgaaaccctagtggccgattccgtgttggacttggatcgtgccctcttggactctatgcgcgctaaaattcacgatgagctcgccaacctcgacgaaaagattgctgatgctgaggaaaacttaggagagagtgaagttcgtgaggctcacttggcaaaatccttgtttttcatccggattatggacaaggagaaagccttggaacatctcaaggtaacagaaaccaagacagttgctgttggccagaaaatggacttggtgttttatacattgcagcttggtttctttgacatggattttgatctcatttccaagagcattgacaaagccaaaaacttgtttgaagaaggtggtgattgggaaaggaagaataggctgaaagtgtacgaaggactgtactgcatgtccactcgaaatttcgagaaggctgccaagttgtttttggattccatttcaacctttaccacctatgaactttttccctatgacacctttatattttatacagttttgaccagcattatatcattggatagagtttccctaaagcaaaaggtagtggatgctccagagatcttgacagtgattggcaaaatcccttatctttcagagtttttgaactccttatatgattgtcaatacaagtcttttttctcagcatttgctggcctgacggagcaaattaagttggaccgctatctgcatccacacttccgatattacatgagggaggtcagaaccgttgtttattcccaatttttggaatcttacaagagtgtgacaattgaagccatggcaaaagcctttggagtgacagaggatttcattgatgtggagctatcacgctttattgcagcagggaagcttcattgtaagattgataaagttgaaggtgttcttgaaactaatcgccctgatgctaagaatgctctttaccaagcaactattaagcaaggggacttcctattgaatcggatccagaaattgtcacgtgtgatagatctttaggtcattttttgcattttagactaaaagtttattggaaaggcagagataacgacaatttcacggtattttactacgagggtgaggcacggcatttctgtagtccatttgatgtgcaaatatgattaattaaatttgtcaaatccaaatatgtcaatcagttttcaattgtt

SEQ ID NO: 8667 - DNA, 1500 bp, Glycine max
  Clone ID: 700787662_FLI
ctctctctctctctcatttcattcatcattctcttcctcccccgaagaacttgttggcctttcatttaaagccctctctctctctttctctcattctccgctattcttcatctgtctattaattaagtaaataaaacccggtagcttcattttccaaatcccagttattacttactggccaaacaaggcagaagaagaagtactgttttggttcatacgcgcccacacactaacacagtgctcccctgatccaacatagccacagaaacgacatccaccacgccttagctttaaacccgctccccgaggtcccgatgaacgacaacgacgacgatttcatctccgagttaactcaccgcatgactcgcttcttacttccagatgacgacacttccgatttctcatccattggctctcactccatggatctagaaaattcgtcacgggactcaaaacatagtccagaagattcaggttcatctcaggaagcatcaccgcccgctacacctgaagagcgttgttggaaaatcgacatgattggaacgtttgagaagatgaagcctaacgaaacagggaatttcaacaaccagtttcagaactccaatactggactctattcttaccaatctctaattcgggaacagattcgagcaattgaattgtctggggttaagcaggagcatgtggctgtgtctccgaaaccaaaatccaacccgcgtcggaaaagtcaagcgcaagaggccaataaaggaaacggacggagggcacggccgccacaggttccacatcaaggtggtgcggggatgcgggccctatttctggatgggtccggttctagaggtgggaccggcgtcttcttgcctcggggtggtggagctactaccccatccgaatcaaccaaagctggtggcttccctcctctccatgatgttctagtgagtaacagggatggcatgtattcacttcagaagcccgagtcacggaaagcgccggcaagtatccagaatgatacgattctgcctcaagagtggacgtattgagaaatgcacatgcacatgcatttcccattactcatctttttacacatacagaataataattatcctgttttggcagtttttttgcccaaactgaagaacaaagaaacgaagataggtgtgaactgtgaagtgaagaagaataaaccagaaaagaaattcctatactacacagatcggatctatatagttagggaatcttttcacacgcagagtacgacaaatagggatcgatatacggatttaataaatatgcctggttttgtattttgctatttcttatggggtataagtttaagtaggtgtatactacgtactacgtacgtactcgtgagtcgtgacagaatacgataaagcaagaaataaaatctagctcaatctctttgtatgcaaagcaagaagctagagtgggtcggttgaatctaaatctcaacagaggatgtcttttaaaatcctttgtaat

SEQ ID NO: 8668 - DNA, 862 bp, Glycine max
  Clone ID: 700787666_FLI
aatattaatgccaaacaataatttcgaggtcaagaaaataaataatggtcacagtgttactagtactactactggtactgttgctactgctactactactacttcgccggtgaattcttcttcttctcggtggccgaaggcggaagttcatgctttgataaggataaggacaagtctagaaaccaagtatcaagagaatggaccaaaagctccattgtgggaagatatctcaattgcaatgcaaaggctagggtacaaccggagtgcaaagagatgcaaggaaaaatgggagaacatcaacaagtacttcaagagagtgagggagagtagcaaagaaaggcgtgaagatagcaagacatgtccctatttccacgagcttgaagctctatacaaagaaaagagcaaatcgtccaagaacccctttggcatcttccagaatatgaagcctaatgagatgatgctgatgatgacggagccactgatggtgcaaccggagcaacaatggaggcccccacctcaatcattggaagagggtgtagggatggagaatgcaagtgaagaatatcatgaaaatgaagaaaatggtggtgatgatgatgataacattgaagaagatggagatagtgtggaagatgaaggagcaaacccgtgtgagattgcgacaaataattaaacgtgcttcagtggacaccgttgaagtagacaagataaggaattttctgaatggagaaaaattacgtgtgcggttaaatttacttttacttatttcggaaaaaatagtcctttattttatttatcatttttttagacttcaaattgtgattatttcttaaggaaaacaaatgttgggtatagtatagtc

SEQ ID NO: 8669 - DNA, 1124 bp, Glycine max
  Clone ID: 700787704_FLI
ttctgttttcctttttctcgagaaaattgtgttagggtttctgtgattgagcctgcaaacacttccttgagggcacaaaagattccattgtttgcttctttcagattaatttttttgtcagatcttcaagaagaagaatccagagaagctatatatacatcatcgttgttctttgccaagacaaagaagaaaaatggtgagggggaaaactcagatgaagcgcatagaaaatgagacgagtaggcaagtaacgttctccaagagaaggaacgggttgctcaagaaggcctttgagctttcggtgctgtgtgatgctgaagtcgcactcatcatcttctctaccagagggaggctttatgagttctccagttcaagaggtgcctaagaaacttttaattcgttgtctattggagatgctccagtataaacaaaacagttgaacgctatcaaaggaagatcgaggacctgggtgtcagcaacaaaggaatccatgaaaatacacagcatctgaaggaagttgatatgagcatggcaaagaagatcgagcatctagaagattcaagaagaaagcttttgggagatgaattggataaatgcagtattgacgagttacaacagctagagaaccagctcgaacgcagcctggacaaaattagggcaacaaagaatcaattgttcaggaagcgaatcgagaagctaaaagaagaggaaaagtgcttactcgaagtaaataaacgcttacgtgagcagtaccggattgaacgacaacgttgtttgagtgatcaggatgtcgaattcgccacaaaaaaggagggagaagaggtggagacggagttattcataggaagacctgagagaagaatgccgttaaagttgaaacctacaacatatagtgctcatgcatacatagcgtaatctaaagattaaaaattactaatgcccatacaaacgctgctagcttccttgcagactgttatattcatgtcttattaagatatgtaattcttgttgtaccccaaatcacaacggcggttgtgaacgcctacttaaataatttatgtacaacagtcattatttcaaaactgttcgttagagtactatatatatcagtttggaattttttt

SEQ ID NO: 8670 - DNA, 1499 bp, Glycine max
  Clone ID: 700787720_FLI
tcgctgcttcttctacgaactttccagaagacagtttctccttcccactgaaccaaaccatgtccattttcatctagcttcgcttttcaatccattgtttctcagataccgcatggctcacaattacatcgccaccgattcacctctctctcgtcgcatagttcgtgctttcctccacttcctcaactccgttgaaccgggtcctggggttgatgctgaggggattgaggttgctagggagtgtttggcagaggcttttaagcttaatcaatctcctgtggctggtgatgatgtgaaatctgattcattgattgacatattcaagtctcttgaagctaaaaagcaatgtgaacctagcaagtcagacgttggtcctcagccggattccgtggatgcttccagttcattctcgggtgagaatcctgctcgtgggaagaatcattctgaggcgtcgaaatctacggatgaagattcaacacagggccctcatgcttttgtatctaaagatgaactgtgcggacaattctttgctgctctggagaaaaattgctatttttggagcaatactgatgggagtgatgacccagtgcaactggagaaagcaagttgtttattcaatgaggcttgtatggagttggaaagatctggttgtcaccagtttagtttgaagaatttggctgaatcactaaaaacactaggtaacaaggcaatgcaatctaagaaatactctgatgcaattgagttgtataattgtgccattgcagtccatgaaaagagtgctgtttactactgcaacagggcagctgcttacacccagattaacaaatatacagaagcgatccaagattgtcttagatccattgagattgatccaaactacagcaaggcatatagtcgtctgggtttggtttattatgcacaaggaaattacagagatgctattcataaagggttcagaaaagccttgcagttggatccaaataatgagtctgtcaaagaaaatataagggtggccgagcgtaaattgttagaagagcaacaccgtgcatatcaaaaccagaattcaagatcatctcaagaattcccaaaccaatctgcgcaaggaggatcaagaagccacagcgtgccacctccattttcctctatgtcatttaatccccgtgatattgcaagcatgttcatgaacatcacaaaccctacaaatgcacagccgcaggggtcacattctcatcaggaaaggcaagaagatagcaatggtagtggaactagtgagcctgaaataagaattgggggaaatattagtgtaaacatggaggatatgccagaggatataacaggggccttacaatcaatgatggaaatgttatctggggctgcaccccctgggcaaccgcaagatcaaacaaatggaagaacagcaccaaactaagctatttcagcattctgagactgtaaagactcacaaaattgttaaatattttttttgcctgtttaagttt

SEQ ID NO: 8671 - DNA, 716 bp, Glycine max
  Clone ID: 700787743_FLI
caaagctgaaatctgagtgcgaggaggcattgaaggatggtgacttattaatgaatgtgggaaagctgaaggaagcattgccctactatgagaaggttatggataaattaaccttccagagtgagcttcatggattagctgctttgcagtggtcgatttgtcaagactccctcagtaggtccaatgaggctcgaggtatgtatgagaagcttaaatctcatccaaatcctaaagtaagcaagaaagcaagacagttcatgtacagctttcaggctatggaaatgatgaagatgacaacaggatctcaattttatttaaagaactcagactaccagaattattttgatgcatttgttgaaaataaatctaactatcccggaggagatggcccggttcaagaaagtgcaatgaatcaggttttgccgtatattctttttcttgtttctcctatttttgtcgtactacttattgctgttcggaaaggaatataaatctctttcttttgtatacaaattccgtttgttttatttcatattgtcaaatgtcaatctctaagcaggagataattcttccagtttggactttggacaacttcattcgagtttgattacaaaaactaacctctacgattgtatgtatatatataggataggattgtaaatgtaagaattgtgcaagtactattattataaaggaaatgttctattttggtgtac

SEQ ID NO: 8672 - DNA, 1752 bp, Glycine max
  Clone ID: 700787747_FLI
ctcactcacagattcagcctttctcagtttctctctctagaaaaaccaaacctcgctactctcttctccctttttttttgtagttctttccttatttggccttcacactccgaactgcgaaatccttttttagcaaaaaaaaaaaaaaaaaaagagtgagagagcgtgagacagagagagtggtcatcagtcatcaccgttgattgattaagatgcagcaatcaaacggctctgattcgtccacgacggagcagaaagcgccgccgccgaggcaatcaccggcggtggcgaggccgcagcaatggctgccgatgcagtaccctgcggcggcgatggtaatgccgcaccacatgttgccgcctcagcattacgcgccgccgccctacgtgcccttccaccaccaccaccaccatcaccagtacgcggcgccgcacgtgccgaaccaacatcagcagcagcagcagcatcaccaccatcagaacggatccggcggcgagaacaaaaccatctggatcggcgatttgcatcactggatggacgaaaactatctccatcgctgtttcgcttccaccggcgagatttcctccatcaaggttattcgcaataagcaaactggcttatcagagggttatggatttgtggagttctattcacatgctacagctgagaaagttttgcaaaattatgctggaattttgatgcccaatactgagcaaccattccgtctgaactgggcaacatttagcacaggagacaagggttcagataatgttcctgacctttctatttttgtaggagatttagctgcagatgttacagatagtttgttgcatgaaacttttgctagtgtatatccttctgttaaagctgcaaaagttgtttttgatgccaatactggccgttcaaagggctatggtttcgtcaggtttggagatgacaatcagagaacccaggccatgactcagatgaatggtgtttactgttctagcaggcctatgcgtattggagctgcaactccaaggaaatcatctggccatcaacaaggtgggcagtcaaatggcacagccaaccaatctgaagcagattctacaaacacaactatatttgttggaggactcgaccctaatgtttcagatgaagatctcaggcagccattctcccagtatggtgagatagtctctgttaagatacctgttggaaagggctgtggttttgtccaattcgcaaacagaaataatgctgaagaggccttgcagaagctaaacgggacatcgattggcaagcaaacagttcgtctttcttggggccgtaatccagcaaataagcagtttagaatggatttcggcaacccctggactggggcatattatggggcccctatgtatgatggctatgggtacgcattgacccctcgtcatgatcccagcatatatgctgctgcttatggggcttaccccctttatggaggccaccaacaacaagtaagctgaacgaagtgcagtacagtgctggagtaccattcacaacaagttagacagtatcgagcttgaatgtgcaaattaagtttctctgttttaacttgcttgatctgttgaattcttaagacaagaatccctcctaattgtggagcggagatgaattttgatagcctgaggtagctctgtaggggattcaattagtcatttgtttaggcctgtaggagtaatgactaatgaggaccttaaacttattataggaataattgtcttaagt

SEQ ID NO: 8673 - DNA, 1688 bp, Glycine max
  Clone ID: 700787750_FLI
aagagctctttgctatgcaaacgatggcaatcagcagggaaggtcaccatctgttattgtcattggtggtggcatggctgggattgctgctgctcgttcgctccatgatgcttcgttacaggttgttctcttagagtcaagggaaagaattggtggccgaattcacactgattactcatttggttttcctgtggacatgggagcatcatggttgcatggagtttccaatgaaaatccactggcttcggtgattgggaggctaggtctacccctttaccgtactagtggggataattccatactctatgaccatgatttggaaagctatggactttttgatatggatgggaaacaggttcctcaagagttggtagcaaaagttggtgaaatatttgaggcaattttgcaggagacagataaaataaggcaagaatccagtgaagacatgtctgtacttcgtggtctttcaatcgttttcgataggaagccagaactgaggttggaggggattgcttataaggtacttcagtggtatttatgtagactggagggctggtttgctgcagacactgatgctatttcactgaaaggatgggaccaggaggtactgctccctggtggtcatggtcttatggtccgtggctacttgcctgttgtaaatagcctagccaagggtcttgatattcgattggggcacagggtcacaaaagtagttaggcgatataatggagtaaaggtaactgtggaaaatgggaaaacgttttttgctgatgctgctgttattgctgtcccacttggggtgcttaaggcgaagaaaatattgtttgagccaaagcttccagactggaaggaagctgccattgctgatcttgggattggacttgagaataaaatcattttacactttgaaaatgtgttttggcctaatgtggagttcttgggagtagttgcagatacaccttatgaatgtagctacttccttaatctccacaaggccacaggtcgtgctgttctcgtttacatgccttctgggcagcttgccaaagacgttgaaaagatgcctgatgaagcagctgtcaacttcgctttcatgcagctcaagaagatttttccagatgcttcttcaccgattcagtatcttgtgtctcgttggggatcagatataaattcactaggttcatatagctatgatgcagttgggaaaccccatgaactatatgagaggttacgggtcccagtagataacttgttctttgcaggggaagcaacaagcatgagctatccaggatctgtccatggggcatactccactggaacgatggctgctgaagattgccggatgcgtgtgctcgagcgatatggagaggttgatttattccagccagtgatgggagaagagggttccatgtctatcccacttcagatatcgcgtctttaatcgtctttgggtcacaactagtggacagaaacacaatctatctatgcttgttcttttgttatcaacctatatataagttatatagcaaatgttttggcaaatagtctttaagagtatatgtccacttgtgaaatcacattttgtgttggatttccttagtcaatgtttccagtaactggtaatgtgaatattgcgcacctaagaggcgttgtcacttctatcagtatacttataataaaattgtgacagc

SEQ ID NO: 8674 - DNA, 1073 bp, Glycine max
  Clone ID: 700787754_FLI
cggcaaagacgagaaggaggcagcgttgaatctttgctaaatacctgtgtgtcaaagttcaaattattgcgagttttggatttaaggaattcgacatgcaagactttgccacgttccattgatagttgaagttgtttgctgcaggttgactccactacagtcaaacctatataaacattttatacaatccaaaaatgttaagcgggcaattactgaagaactgaagcaatcaaagattttggcctacgtaacagctctcaaaaagttgtgcaatcatccaaaggttcctataaatgctgctggtttgatcagatataactggtgccaccccttttttggtaaaattatcatccatctcatgaatatgataatatatagctcactgctgcagctgtgaaagattggaggttcctatatcaatatccttttgggttgagtaggttcctataaattctactggtttgatcagatataggtggtgccaccccttttttggtaaaattatcgtccatgtcatgaatatgataatatacagctcattgctgcagatgtgaaagattggagatactggaaggacttcttgaactactacagaataaagaatgtgctcactggaaagctaagtatgtatctggctggatctaaatgatccaactatgcctttgaatgtcagaaactgcatgcagttagcttgatactccctagaaataccggtattttatgactgatattgctcatacttaaacaatgatccttagctttgacctaatatatagcctacttaataactcaaatttttcataatagttaaatgaaaaccgcagacagtttcatgcatgatgtatcatttacaataaagcattctttatgcttatgcacccttttttattttgttgagtacttcctgacgaggttagcattaatatttgtaaaaggccggtcaattatgtaggatttgtattacgaaaattctgaacaattgatttttgttctaacagttattagtttcagactcttatacatattcaaaatggtattggtagaagaaagtttaaccaaccttcttttttatt

SEQ ID NO: 8675 - DNA, 677 bp, Glycine max
  Clone ID: 700787755_FLI
atatattatgtttaggttcgattcattcaccgcactgcttcactcctgagcactggatcgatcgagtttcaatttcctctattatctttgttgctttccatgtaaccccacctcttatccatatatatccattcttcttcctcacacttgtttaatttgcacaaatatattatactccaaataaaccgtctcataatggaggagtcaggggaaaattggccttccgataattcttatctggatgaggtcaacgatgaatttggtagtgaagatgaagagggaggttcattttctggaatgggcgagaccgacagaaagaagagaaagcgagaactcgcagagaggttccttgcactttcagccaccatacctggcttcaccaagatgggtgagggttacaagatgacggtggatgaactagtgaagaccctgagagtagcgatatcttgatgactcattagctagcctgtcctaatgtacctaccaagcaagtgcagtattaattgtaatttgagaaaaagctagtaataaactcttgtttactcttttcaacacattcttttattgagtaaaattcatgaatcgtgtactaaacatgtgagtccgatgttccatttgaattttattatcatattattaaaacctacttgaattttaagcaataaaaaaatatgtcg

SEQ ID NO: 8676 - DNA, 2364 bp, Glycine max
  Clone ID: 700787835_FLI
cgcaacccaaagagggtgaccacaacctttaattcaatccatttcccctctctctctgttcaaagccacaatctaattaatttcccattcttctccaacaacttagggtttcccttttcccaacaacaatgccacccattccctaattagtaattacgctttttcttttcctattaaattcatttccccgacatggacggcggcgggtccactccggcggcgccgattccgaacgcgaacgcgccgccgccttttctgagcaagacctacgacatggtggaggacccttccaccgacgcgatcgtgtcgtggagcgcaacgaacaacagcttcatcgtgtgggaccctccgcagtttgccagagaccttttgcccaaatacttcaaacacaacaacttctccagcttcgttagacagttaaacacttacggtttcaggaaggttgatccagatcgctgggaatttgcaaatgagggttttttgaagggtcaaaagcacttgcttaggagtattacacgacgaaaacctgcccatggtcaaaatcatcaacagcctcagcaaccgcatggacagagttcatcggtaggggcatgtgtagaagttgggaagtttgggcttgaggaagaggttgagaggcttaaaagagataagaatgtgctcatgcaagagcttgtgaggttgaggcagcagcaacagaccactgataaccagctgcaaacaatggttcagcgccttcagggaatggagcaacgacagcagcaaatgatgtcattccttgccaaagctgtccagagccctggcttctttgctcagtttgtacaacagcaaaatgacagcaataggcgcataactgaagtcaacaaaaagcgtcggcttaaacaggaaggtatggctgaaacagagcatgctgctactccagatggacaaattattaaatatcaacctatggtgaatgaagcagcaaaagcaatgcttaggcagatcatgaaatgggatacttcttgtgtagaatctttgaataaaaattctgataactacgtgattggtgatgcttcatcatcttccagtggaatggacagtagcagctcttcaggctggacttctggagtaactcttaaagaggtctctccagcttcggtgcagtcttcacatgttccagctgcaactgggactcaagggcatgtcccctcaaccgttaaacctgaaattttatctgtaccacaagcagtagcttctgaaaaagttatgaaagatggagcacatgatccaccttctatccctgtgtctcaagcagatgtaatgatccctgatcttcctccaataacagagatggtgacaggaaatattcttgatattcctgaagaaaattatatggcaactgagacagatgagggatacatggattcttcattgggggctggtgggtcatttcccattgatttcgaaggtatttcacctgatgcagacattgatgatttgttagccaatcctatttgggatgaaattttgcaaacttcagttccagaggatatcgataccaatgtggctgaagcatccaaagggaatgaggtccaaccaatggaaaatggatggggcaaaactcaacatatggatcaccttacagagcagatgggtcttctttcttccgatgcaaaaagagtttgatatctatgatatatgattaatcttcatattgtctgaggtagtccctgacccaaacaatacatgactgaagtgatgtctataatatataattagtaattacactcccacttggtcactgaaaaagacaatgtttttcatttggtcttcaatggctttttttagtttgttgtgcataccaaggctaaatccaactttctcacacgtgcatttacattgatttttcattcgacttcgtgttgaaaacaagttatgaacttatggccttgtcatggcatcctcaggaagtgtttgtgatcacaagatcagtttttccaatgttataggcaatctgtcaagttgagttatatgtgaacgattcggttctttcccaattttcaagtttccttgatgaggggaaaaagagaacatgttgggtgatgattgactgctcaaggcgtctgaaaaatgcacattggaagatttgctttctgaacaagggcggcaacaatggacagcagtggtacgatgttaagctgcaggctgtttgcttcttcgtcaattttattttgtcctttccgaggttatgtttcaactgatggaaaatagaaggaaatgaaattgaatgatattagtcaccattgttgaaattgttcataacatgatggaattgaacttgatggaatttattccatttctttttatccaatgctcttaccccct

SEQ ID NO: 8677 - DNA, 2098 bp, Glycine max
  Clone ID: 700787846_FLI
attggtttgtttggggtcctgtggctgcacatatccaaccttaacttcggccgtcgaatctttctggtcattggttgtttttaattctttcaaaaattcaaacacaacccaaaatctcttgggaaatgctagattcactgcttctcctagcagcagattttgggttcttctgacccaattattcattttccccaacttggtcttgttgaatttttattggggttgtaaattccttgttgagtttgaaagttatttcctttttccccttctggattcaagtcccaagtatttgcttaaattggggtatttttttatatcagaattgttgctttgaggttttccaaggcttgaaatctgaaaatgacgattggtagtctagcacctaaggcagagaagaagaaatcaaggaagaacaagactgttgttgttaatgagaatgcacccttgttgccaaaaagtcatgttcaggagagtgatgctggttttgatgatttcaatggagcttcattttctggggctgtttttaacttatccaccacaattattggtgctggtatcatggccttgcctgcaaccttgaaacagttggggatgatacctggtcttcttgccatcatcatcatggctttgttgacagagaagtcaattgagcttttgattcggtttacccgggctgggaagtctgcttcttatgctggtctcatgggggattcctttgggaattatggaaaagctctggtgcagatatgtgttataatcaataacatcggtgttctgattgtttacatgattataattggtgatgtgctctctggaacatcttcaagtggagatcatcactatggtatccttgaaggatggtttggtgtgcaatggtggacaggccggacatttgttgtactttttacaacacttgccatatttgtacctcttgcgagctttaagcgaattgattcattgagattcacgtccgccctttcagtcgcacttgcagttgtttttctagtcattgccgtgggaattgctgttgtcaagatatttagtggaggcattgtgatgcccagactcttccctgtcacgactgatgtggcatcattcttcagactattcactgtagttcctgtgtttgtgactgcgtatatctgccactacaatgttcacagcatagacaatgaacttgaggactcctcacagatgcaaggggttgtacaaaccgcccttgttctatgctcttcagtgtatgtaatgataagcttctttgggttcctcctatttggcgaaggaactcttgatgatgtactggccaatttcgatactgatcttggaattcctttcggttctgtgctcaatgatgctgttcgtataagctatgctgcgcacctgatgcttgtatttccagttgtcttctttccgttgcgtctcaacatagatggtctcctcttctcaaaatcaaggcctctggttctggataacgtcagatttgcatcactcactgttgcccttattggtgttatcttcctgggagcaaatttcatacctagcatttgggatgccttccagtttactggagcaactgccgcagtctgtataggattcatttttccagctgccatcactctcaaggaccgctacaacattgctactaaatcagacaagattttgtctgtcattatgatagtccttgcagtcttctcaaacgttgtggctatatacagtgatgcatatgccttgatcaagcagaacaaaacttcacgcgaatgatggccatgattttagatgagaggaactgaattgacagggttattggtcaattagaaaatcggggttttctgagaggatctgatgggttgatttgaataaacagagaagctaccctgtgtacaaatgtgcttcagaagtgttgaggccagcaacatgcgttcagcctcctttgtaattttttgccattctgttgttatagttgaagtttttattgaatattactctctttccctgatttattcttccccaaatgtaataatagaaacctttgttggcatttgtatgtatttattgtattggagaaggaatgaattacttaaagaatgatatatagttc

SEQ ID NO: 8678 - DNA, 1968 bp, Glycine max
  Clone ID: 700787858_FLI
atttccattcaccacccaaatgctcttcacagattccctatttctctcttcttcaactttctcaggtattcgaagaaagaattctgggtgtattgaaagtttgaatcttttaagcctctaaatttcctccatacatttacctgcatttccaaattttgaagtttggatacggtaataatcaaaatggcctcttgcgtgtcaacaatttttgcaccttctaatactagaaatacaccaagggtgtttactgttggaggaagaaatctgacttgtaattaccctgggagagcttgtttcacgaaaatgtatgaccgcaggaatgggttttccggtggcatccaaatgtcgggtttacttcaagttaagtgttcagccaattcacacagtgtcagtccatataatagccaaggcccttttctagatttacatcctgaggtgtcaatgcttagaggagaagggagcagtacagtgaacagcccaagaaaggatagctcaggtggggatttatctgaaagcctaggaactacatctatccaaagtgattacaatgaagcaaaaatcaaagttattggcgttggaggtggtgggtcaaatgcagtcaatcgcatgacagagagcgaaatgcatggtgtggagttttggattgttaatactgatgttcaagccatgagaatgtcgcctgtctatccggagaaccgtttgcaaattggtcaagagcttacacgaggtcttggtgctggtggtaaccctgagactggaatgaatgctgcgaaagaaagcaaagaatcgatagaagaggcagtctatggagccgatatggtctttgttacagctggaatgggtgggggaactggcacaggtggagctccaattattgctagtattgcaaagtcaatgggtatattgacggttggtattgtcaccacccctttctcgtttgaagggagaaagagatctattcaagcccaagaaggaattacagccttaagagataatgttgacacgcttatagttattccaaatgacaagctactaacggcagtttctcaatctacccctgtaactgaagcattcaatctggctgatgatattcttcgacagggtgttcgtggcatatctgatattattacaataccagggttggtgaatgtagattttgctgatgttcgggctataatggccaatgcaggttcttcactaatggggataggaactgcaactggaaaatcaagggcaagagatgctgcattaaatgccatccagtcacctttactggatattggtatagagagggctactggaattgtttggaacataactggtgggactgatctgaccttgtttgaggtaaacacggcagcagaggttatttatgacctcgtggaccctactgctaatttaatatttggagcagtaatagatccatcactcagtggtcaagtgagcataacattaattgctactggattcaagcgtcaagaggagagtgaagggaggcctctgcaggccagtcaactcactcaagcagacacaaccttcggcaccaattggcggtcttcctctttcactgatggtggtttgtttgagataccagaattcctaaagaagagaggaggttcacgctatccgagggcgtaatctttttcatcctaatttctttgatcccttgcatttcttcacccttggatatacatagcattggtctagttcttaggtccctgtcttgccctttttcggattttagtcagagttgtgtatacagtttgttcatgaaagtttattacttcccactgtccagacttatgggtctaaccggaggtattgcagcatggatgcttttcttggcatatttgaattagtttattagcttgtacagagatttcagtaatgctgagagcttgttatagttctttggcatgttatagaaaattcattattattattcatcaagtaattatattttggtat

SEQ ID NO: 8679 - DNA, 1373 bp, Glycine max
  Clone ID: 700787908_FLI
attgaatctcagaattctctaaaagagatctttttctgctctttgaagaaagaagggtctttgcttgattttggagatgtctctgctctcagatctcatcaaccttaacctctccgataccaccgagaaggtgatcgcagagtacatatggatcggtggatcaggaatggacctgaggagcaaagcaaggactctcccaggaccagttagcgacccttcagagcttcccaagtggaactatgatggttccagcacaggtcaagctcctggtgaagacagtgaagtgattttatacccacaagccattttcagggatccattcagaaggggtaacaatatcttggttatctgtgatgcctacactcctgctggagaacctattcccactaacaagaggcacgctgctgccaaggttttcagccatcctgatgttgttgctgaagtgccatggtacggtattgaacaagaatacaccttgttgcagaaagatatccaatggcctcttgggtggcctgttggtggtttccctggacctcagggtccatactactgtggtgttggcgctgacaaggcttttggccgtgacattgttgacgcacactacaaagcctgtatttatgctggcatcaacatcagtggaattaatggagaagtgatgcccggtcagtgggaattccaagttggaccttcagttggaatctcagctggtgatgagatttgggcagctcgttacatcttggagaggatcactgagattgctggtgtggtggtttcctttgaccccaagccaattaagggtgattggaatggtgctggtgctcacacaaactacagcaccaagtccatgagagaagatggtggctatgaagtgatcaaagcagcaattgacaagttggggaagaagcacaaggagcacattgctgcttatggagaaggcaacgaacgtcgtttgacaggacgccacgaaaccgctgacatcaacaccttcttatggggagttgcaaaccgtggagcttctgttagggttgggagagacacagagaaagcagggaagggatattttgaggacagaaggccagcttccaacatggacccatacgtggttacttccatgattgcagacacaaccattctgtggaagccatgagcaaaacctgcatgttttctccctttggatggaaaggaacagttatgcttttcttagtaggatttggtctctctctctttttaccttttgattggtactatggttggtgccttgttggttggtgcaactaactggcaagggttgttcattgttttcttctattcctttccctcgttttccgattgttacaatgacaataatttaatggttattatcagtcttgaac

SEQ ID NO: 8680 - DNA, 1392 bp, Glycine max
  Clone ID: 700788114_FLI
tcaagtccaacctacccctttttcttctcccaccaacttcaccgtcttcttcctcgatcatgtctcacttcaagggcaagtaccatgatgagcttattgtcaatgctgcttacattggcactcctggaaagggtattcttgctgctgatgagtcaacagggacaattggcaagcgtttggccagcatcagtgtagagaatgttgaatccaacaggcgtgctcttagggagctgcttttcaccgctcccggtgctcttaaatatctcagtggtgtcatcctctttgaggaaactctctaccagagcacagctgcaggcaagccctttgtggaagtcttgaaggaggctggtgttcttcctggcatcaaggttgacaagggcacagttgagcttgctggcactaatggagaaaccaccactcagggtctagatggccttggtcagcgttgcgccaagtactatgaagccggtgcacgttttgccaagtggcgtgctgtgctgaagattggtcccaacgagccatctgagctggctatccatgagaatgcctatggcttggccagatacgctgtcatatgccaggagaatggcctggttcccattgttgagcctgagatccttgttgatggatctcatgacattcacaagtgtgctgccgtcaccgagcgtgtccttgcagcatgctacaaggctttgaatgatcaccacgtccttcttgagggtaccctattgaagccaaacatggtcacccccggatccaattctgctaaggtttcccctcaggtggttgcggagcacactgttagagcccttcagagaaccgtgcctgctgcagttcctgctatcgttttcttgtctggtgggcagagtgaggaggaggcatccgttaacctcaatgccattaaccaggtcaatggaaagaagccatggtcactctctttctcctttggaagggcacttcaacagagcacccttaaggcatggagtggaaaagaggagaatgtgaagaaggctcaggaagcccttttggtaagagccaaggctaactcagaggcaactctgggaacctacaagggtaactcaaagcttgctgatggtgcctcagagagcctccatgttgaggactacaagtactgatcaatctaagtgcgggtaggaatcggtattttatgggtacaaccgaattttcttgttaatgagtattgtgcttcgactcttcccagaataataatcgtttggaattttgctttttgtttttcctagtgttccttcatatcaattttagtaattcggtgtattggtcaaacctgtgcaaacaggggaggggatgtaactttgttttcttgatagacaccaccaccttgctgttaacgaggctttgtgtttattttgc

SEQ ID NO: 8681 - DNA, 522 bp, Glycine max
  Clone ID: 700788123_FLI
aatcatcttttgtttgttcttcagtactttagtgtgtgatttaattccaagattttgagaatgtctagctgtgggtgtggaagtagctgcaactgtggcagcaactgcggttgcaacaagtactcttttgacttgagctatgttgagaagacaaccacagagactcttgttttgggtgttgggtctgtgaaggcccaattggagggtgctgaaatgggtgttgcagctgagaacggtggctgcaactgtggatcaagctgcacctgcgacccatgcaactgcaagtgaggtcaagatttataaccttgaagcagagataactgtaatatatgtatcaacaaataataagaattacgtgttgtgtttaataaagtgatcatggctcgaatttgcaaattcaaatgttctaggatatttgttgcgagtgtttgaagtatggttgcttagtgtttggttggtctatcataaatatgtaaatttgaatcatcaatctctgcttataaatggactacttttggtgtt

SEQ ID NO: 8682 - DNA, 957 bp, Glycine max
  Clone ID: 700788136_FLI
tgttactggagcaaacaaagggataggatttgagactgtaaaagagctggcctcaaatggagtcaaggtggtgctcacagcaagagatgagaaaaaaggccatgaagcctttgagagattgaaagagtgtggtttctctgatttggttatttttcaccagcttgatgtcactgaatctgctagtatttcttcactagtagagtttgttaagaccaattttgggaagcttgatatattggtgaacaatgcaggaatcagtggtgccaatctggatgaagtggaaggatcaacatttaaatgggaggaactgactcaaaccaatgagatgactgaaaagtgcctaacaacaaactactatggtgcaaagaaaacaactgaggcatttcttacccttctgcagttatccaattcacctaggattgttaatgtttcctcccaagcagggttgttaaagaacatatcaaacgaatgggctaaaggggtgcttgatgatgctgataatcttacagaagagagaatagacgaggtactcaaagagtttatcaaagacttcaaagaaggttcattagcaaccaaagggtggccaaccttcttgtctgcatatattgtctcaaaagcagccatgaattcatacacaaggattctagccaagaagcaccaaaacatgtgcattaacagtgtgtgccctggttttgtcaaaacagacataaacaaaaacactggcatcttaaccgttgaccaaggtgctgctagtgttgtgaaattggcactgttgcctgatggttccccttcgggcctcttctatattaggcaagaattgtcaaacttctgaatgattttaaatgtaatgcaaatacattcatgcagacacatgaattaacacatgacagaatgttcctcttgcccgtattttttacccttatgcaagtacgaccattatcttctattcttgctagg

SEQ ID NO: 8683 - DNA, 829 bp, Glycine max
  Clone ID: 700788139_FLI
atgtactcatatgaagtgtacttttggtgggatatggaatggtggagggggggatggacagaagaacctttttgttgcctctttcttctttgaccgggctgctgaggctggttttgctgatccaaacttgccagtcgcgatagttcgtcctgcagattttgaggatgcagctaagcaagcatgccaaacaaaacttgagaatgccaaatccacttttcctcgtgttgatgaggggaaccttccctatctttgcatggatcttatataccagtatacactactcgttgatgggtttggtatatatccatggcaagagattacattggtgaagaaagttaaatacgacgatgccctggttgaggcagcatggcccctaggcagcgccattgaagctgtgtcatctgcgtaaaattactgggactatcgcttagatttgtctgaaatctaggggcacatgagtttcatcaccgggattttgtggtgaaatactgtcattcatgatgatcagagattaactttcaggctgaactgagattggatatgggtctgtgattcagaaataatgggagattatagcttcattatttttcatatgtaattaattcacaaacatctaatttgcgattttggaagattcattcgattcattaagggcatctatatatgttctatatatgttgtcttcagagacgaacaaaatggtgatactaacaccatttcatttttgtttctattaatggtttcgttcgtgatcatagttaatctttattacttctcatcttgttgatggcccagacctagcctgtcgcttgcaggagtgtgggttagt

SEQ ID NO: 8684 - DNA, 1893 bp, Glycine max
  Clone ID: 700788247_FLI
ctaagcacagagaaagaggaagagatggaggcagaggcagaaggtgaagaaggtgcgaagctaagcatttacaaggcggcgagaagcataaagcgaagagagaacagtttgtacaacgcactgagatccatctaccaagactccatcttcgtctccgagatctctcttctatggcctcagctccctctcctcgccaacctccgctgcggcctctggtactcccgccccgccgccttccactccacctgctacttcaagtccaccgacggccacaccaacaactgctccttcaccaccgcccgcctcaacctccacgtcgccctactcgccggacagaaaggaggctgcatcatcgtcgattccactcgaagaggaaagcgcttccctgatagcatgtctaaaactatacccatctggacctctgttctcaatcgtgccattaaagactttcgtgattctaatggctgtcctcttgaatgggattgttccttgcaccttcccctgtgggtttcccaaactgaaagagcttccattgagaggcggttagatgagtggactctgttactgaaagcaagtggggctgatattgcctcccttgctgcttgcttgaggaaacccctgcgccctctctggatttcgcagaaaactgtcatctggttgaatgaagtgcctcaccatgaatcttgggatttcacacccatcattcttctctccgcgtcgtcttcttcatcggtcgttggcgcgagccaacacaggactacctctgagttcagctggaattacattcccggtgctggagacgacgaagaaagctgggctaggggtttaactcctgctttcttctggaaacatgtttatgatcttattaactcagctcctgaagtctgtaaccagaaggttgcagatatagttgaaaagagtagagtatcccgtgcttatagaggagaaagtgcaccacagatcacagttaaaccgctcaagtcagcctccctttcattgcatgaagaaccatcagtagcttgtgatttttcaaacattaaaattgactccgagtcttcggaagattttggaatatcttggttgggctcaactaatttggcagttggcacggctcaagctgctgcagatgctgctgatgttgattgcatattgaattgtgatcaggagtcaatctctgtctgtcttcccagtgctgaatcatatttgcatcttccaatggtgacttcaaagtttgatcggttttcattattaaacaatcttcctaaagcggttagctttgcaaagttcaatctcagcctgggaaaaagacttctagtctgttgtaataacggggaagatattagtgtatgcgtttgtttagcaatcttgatgtcattatttgatgaaaaaggtatgtttgatggtgggaaatccttcagtgcagcacaagtcactaaatgggatatgagacgtaggcttgtatttgtctgcaagtttgcaacagatgctcgaccatccagaggaaatttgaggcaagtttttaactttctaattggtggaaaattcaatcatcctctggacacgggaagagatgagtaattggaattgcgagggcagatgattgaatgaatatttttggccattcctaaaactttccgaacttaataccttggaatcttggattttgcattgcgcagatgtgaaactattccaaagtcagttttcagagaattgttgtatgcctaagtttatgcgaaatttgacatctctcgaacctatgattcttttcatgttctggtctgaatacacaaatactgagatgtctatgactaggttatagagtatagacccatgtgatgcacgtgttagacattcaattttatggatgaataattaatatagaacaattaaagt

SEQ ID NO: 8685 - DNA, 1406 bp, Glycine max
  Clone ID: 700788278_FLI
cttcataatggttgcaacagctgctacggcgtcgtttctccctgtgccttcgccggacgctggaaaagggaaacccaagggtggtggtggcggcggcgtttctgtgaacctcggaggactcaaagagaagcaaggtttgtgcggttgcttgcaggtcaaggcaaacgcacaagcccctccgaagaccatggagaaggttgagaatgatttgccatggttgccgtcgtcgtcgatttcgcacgccccgaggacttttataaatcagttacctgactggagcatgcttctggccgccatcaccaccgtgttcctcgcggcggagaagcagtggatgatgctggattggaagccgcgccgccccgacatgctcattgacccctttgggattgggaagatcgtgcaggacgggctcgtgttcaggcagaacttccccataaggtcttacgaaattggcgcagacaaaactgcgtcaatagagaccttaatgaatcatttgcaggagactgcacttaatcatgttaagaccgctgggcttctaggtgatggatttggttccacgcctgaaatgtgtaagaagaacctgatatgggtggtgactaagatgcaggttgtggttgataaatatcctacatggggtgatgttgttcaagtagacacgtgggtttctgcatcagggaagaatggtatgcgtcgtgattggcttgtgcgtgacgccaaaactggtgaaatcttgacaagagcctccagtgtttgggtcatgatgaataaagtgacaagaagactgtctaaaattcccgaagaagtcagggcagagataagctcttattttgtggattctgctccagttgtgccagaggataacagaaaactaaccaaacttgatgattcagctaatttcattcgcactggtttaagtcccagatggcatgatctagatgtgaatcagcatgttaacaatgtgaagtatgttgggtggattctggagagtgctccgcagccacttttggagagccatgagctatgtgccatgacattggagtacaggagggagtgtggcaggaacagtgtgctagattccctctctgatctctccggtgctgatgttggaaacttagcagatgatggattttttgagtgcaagcacttgcttcgacttgatgatggtgctgagattgtgaggggcaggaccgaatggaggccaaaacccttaaacagaaactttggtcatgttttgagtcaggttcctgttccagcagaaagcacctgaatctcattgattgacatcaatggaagagtggcataattcatgttcccacttgcagattggagagctttgcttgttgccttaaaatataaaacaaacaaaaaataataataaaaaaactcggtcttatcattttgtaatt

SEQ ID NO: 8686 - DNA, 602 bp, Glycine max
  Clone ID: 700788328_FLI
gaagcatgtacagggagagtaatgggaacctttggatacatggctccagagtatgccttggacggattcttttcaaccaaatccgacgttttcagctttggagtagtccttctagagattctcagtggaaaaaagaacactggattctatcagtccaagcaaatttctagccttttgggtcatgcatggaagttatggacagagaataagctactggatttaatggacccatctctttgtgaaacatgcaacgaaaatgaattcattaagtgtgcagtcattggactcttatgcgtacaagatgaaccaagtgatcgacccactatgtcaaatgttttgttcatgctcgacatagaggcagcaagcatgccaattcccacgcagccaaccttttttgtgaaaaagcatctttctagctcagcttcctcttcgagcaaaccagatataggtcagtatgagagcagttatcaagaaggtcgatagtgcatgattgaagctattgttagagtacgtgtaaaataattaatgatattttaattgtattttataacaatttagagtattctgtattatttttaaggataaattttggatttcctgtc

SEQ ID NO: 8687 - DNA, 1977 bp, Glycine max
  Clone ID: 700788389_FLI
gagtacacttgtggtgtggggtgtactatttaatatttagagcaagtgaagtgagaaaaagtaattgatacgtttagggatggaaggattaggaggactgggccacctttttgtgacaatgtttgtgacggggtttggtggtgtcatagttcttccggcaatcaccgacgttaccatggctgcactttgccctggccaagatcagtgttcccttgccatttacctctctggcttccaacaagctatggctggagtggggtcagtggtgatgacaccattaataggaaacttgtcggaccgatatggcagaaaagcgttgctcacacttcctctcactgtctctgtcattcctcaagtgatattggcatatagcagggatacccaattcttctacgcgtactatgtggtgaaaactctggctgccatggcaggcgaagggtccttccactgcctggctcttgcatacgtggcagacaaggttccagatgggaaacgaacatcagcattcggaatacttgctggtgttggatcagcatcgttcgttggtggaacattagctgctcgtttcctatccactgctttaacatttcaggttgcttcagtcttgtcaatggttgcattggtgtacatgagaattttccttaaggatagtgtacctggtggtgccatcagacagccattattgaaagtggtcgaggaatcatgtgctgaggatgattcaacaccaaagtcagcaggaacatttaagaaactgccctcactgggggattttatttgtttgctcaagtgtagccccacattctcccaagcagctattgtttcgttcttcaatagtcttgcagatggtggcttgatggctgtattgctgtattatttgaaggcacgttttcaattcaacaagaaccagtttgctgatttgttgatgattactgggattggagccactcttgcacaactatttttcatgcccattttagtgcctgtaataggagaggagaagctgctctccacagggctcttaattagctgcataaatgtcttcgtctacagcatagcatggacagcatgggtaccttatgctctagcaggttgctctgtgtttgcagtttttgtgcgcccaagtttatgcagcattgcatcaaaacaagttggacctactgaacagggaatggttcaaggatgtctttcagcaattagttccttcgccaacatcattgctccattaattttcagtccactgacagccttgttcctgtcagaagaagcaccgttttattttcctggcttcagtctaatgtgccttgggctagcactgatggtagcattttttcagagtctaatgattcgtgctgttcctcctattgcgggtggcaaaattagcggtaaccgctgcacggataccttggtctgaggaggagactagagtgtttcagtcaataaacataaactctttaagtttcattttgcctcggcaaaaatgtggttcatagcatatcagacgataacttagaaagatagcaaaaggaattgcactgtaagtgtagattctagggtcgacatatatgctttggcacttggagataaagaacaccaaatagcaaaatacagaaaatagaacatgaagttggttctgaaaaataataatcaggtgaatcaactgcagaagcacagatttctttacagttatgaagaggaaatgtggcacatattaatgaatcatagggtctcatcagttacatattaaccattcaaacattgcaatttgcaacattaaccattgtgtgtaagcacacctttaggccttagccagttagccatatgctgcctacatttctagctagtatatttttcccaagtttctttgcgtagtcattggtcaaggactttgtaattttcatattttatgtaatggatggttgagttttgaagtatatgaatttgaaccctgtaatgcaatatcgactgattttactattt

SEQ ID NO: 8688 - DNA, 1483 bp, Glycine max
  Clone ID: 700788392_FLI
caagaacaacatgaattttctaaccttcgttactgttctactcttcatactaccagcaacctcatcttcccagtatttggggaacaaccttctcactcatcgcaagatattcctaaaaaaagacaacattattacctcgtacgctgtcatctttgacggtggtagcacaggaacccgtgtgcatgtcttccattttgaccagaatttggatctccttcccattggtgatagtcttgagcttaataaaaagatcacacccggtttaagtgcttacgaggatgatcccgagcaagctgcagaatctctgattccacttttggaggaagcagaaagtgtagttcctgaggacttgcgtcccaacacacccgttaggctaggggcaactgcaggcttaaggcttttgaaagggaatgcttctgaacaaatattgcaagcggttagggatatgctgagtaacagaagtaccctgaacctacaatctgatgcagtaactattcttgatggaaaccaagaagctgcttatatgtgggtggcattgaactatctattgggcaatttgggaaaagtgatttcaaagacggtgggagtagctgatcttggaggtggatcagttcaaatggcatatgcagtctcaaagaatacagctaaaaatgcaccacaaccaccagaaggagaagaatcatacataaagactcttgtacttaatggaaaaacttatgacctctatgttcacagttacttgcactttggtaaagaagcatctcgtgcggagatgttgaaggtcactggtgattcagctaacccttgcattttagccggttataatgggacctacacatattcgggagttaaatataaggccttggcctccacttctgggtccaatttcgataaatgtcgagaggtagctcttaaagctctgaaagtgaatgaaccatgccctcatcagaattgcacttttggcgggatatggaacggtggaggggggagtggacaaaaagtcctttatgttactacatctttctattatctggttatacaggctggtatagccgatgcaagtaaaaccagttccaaagtttatcctgcggaattcaaggccgcagctaagcgagcgtgtcaagtcaaatttgaggatgctcaatccacttatccacttatgatggaggatgcacttccatacatttgcatggatattacgtatcagtatacgttgctcgtcgatggatttggcctggatccttggaaagagattatagtagcaaatgaaattgaataccaaggtgctcttgtggaaggagcatggcctctaggcagtgccatagaagccatatcttcattgcccaaatttaataaattgatgtattttatataacacttaaagagaagtgggcttcctttaattactaaataaaatgaagctcgatgtatatcaactctttctatccttattccattgtgtgtatgtggtcaccatttccgt

SEQ ID NO: 8689 - DNA, 1706 bp, Glycine max
  Clone ID: 700788603_FLI
agcacatagagtgattaggctggtagcaagcgcgacatggcactgcagtgcaggttaagctcacaccattgatatcactagccatattctcctttcgctaattcccgcaagctactactcttcttcaacgctctctctgcaaaagatgcgctccaaggacagaatcgcttacttctacgacggtgatgtcggtagtgtttactttggggcgaagcatccgatgaagccccaccggctttgcatgactcatcatcttgttctctcatacgatcttcataagaagatggagatttatcgtccacacaaggcttatcctgttgagcttgcccagtttcattcagctgattatgttgagtttttgaacaggattacacctgacactcagcacttgttcttgaatgaactgacaaaatataatcttggagaagactgccctgtatttgacaacttatttgaattttgtcagatttatgctggtggaactatagatgctgcacgtcgattaaacaatcaactgtgtgatattgctatcaactgggccggtggactacatcatgccaagaaatgcgaggcatctgggattttgttacatcaatgacttggttttaggaatcttggagcttcttaaatatcatgctcgtgttttgtatattgatatagatgtgcaccatggtgatggtgtagaagaagccttctacttcactgacagggtgatgactgtcagttttcacaagtatggagattcgttcttcccgggtactggcgatgctaaggaaataggagaaagagaaggaaagttttatgccataaatgtcccattgaaggatggaatagatgacagtagcttcactcgacttttcaagactattatttccaaagtagttgaaacatatcaacctggtgcaatagttctgcagtgtggagcagattcgcttgctggagatcgcttgggttgcttcaatctctctattgatggtcatgctgaatgtgttagcttcgtaaagagattcaatttgccattgctggtcactggaggtgggggatacacaaaagaaaatgttgctcgatgttggactgttgaaacaggagttcttctagatacagagcttccaaatgagattcccgcaaaatgattatattaaatactttgcaccagaattttctttgaaggttccaaatgggccgatagaaaatttgaatagtaaatcatatcttagcaccattaaaatgcaagtcttggaaaatcttcgttgcatccagcatgctccaagcgtacagatgcaggaggtccctcctgacttctacattccagaattcgatgaagatgagcagaaccctgatgaacgcattgatcagcacactcaagacaagcacatccagcgcgatgatgaatattatgacggtgacaatgacaatgatcaaatgaatatttcatgaagtgcagttgccgtttgccttttggcgggggattgaccgttttaagagagaaggaaaatgttaattagacaaacacctagatgtatcaacaaagcggtagtactagcccaagaaacttgtatatttataagatttttattgttttcagttgctaatatatttgctcaaagttacattattaatgatgtttcttccctgtcatttttttgaatgaaaatggacggtgttagagcaactctgacaacaagagcttgcataacattcttttt

SEQ ID NO: 8690 - DNA, 1322 bp, Glycine max
  Clone ID: 700788604_FLI
ggaattccaggctaatccattttatattgctggagagtcttatgccggagtttatgtgcctactcttgcttttgaagttgctaaaggaatccggagtggtacaaagcccgtgatcaattttaagggttacatggttggaaatggtgtcacggacgaaatatttgacggcaatgctcttatcccatttgtgcacgggatgggcctcatatccgacagtatctatgagaatttacaatcttcttgcaaaggaaactactacgatgcttactctttggacgaaaacgatgtgtgttacaagaccattgaaaaagttgatagggccattgatgggcttaacgtgtacaacatactagagccatgctaccatttccccgatgctgccacagccaaagaaaatggaaccttaccaaggagtttcaagcaattaggagttactgagaggcctctcccagtgagaaagagaatgtttggtagagcttggccttttagagcaccagtcaaacctggtcttgttccattatggccccaattggctcaaactaggcacgtcgcatgtgttagtgatgaagtagcaagttcatggctaaacaacgttgcagtcaggaaagccatccatgctgaatcggaaaaagtggcgggtccgtgggaattatgttcgagtaggatagagtaccatcacaatgctggaagcatgattccttaccacaagaacctaaccaggcttggctatagggcacttattttcagtggcgaccatgatatgtgtgtaccgtttactggaagtgaggcttggacacgatctttgggttacaagattgtggatgaatggaggccatggaactcaaataaccaagttgctgggtacttgcaagcgtacgagaacaacctcaccttcctcacaatcaagggagctgggcacaccgtgccggaatataagccgcgggaggcgttggatttttacagccgttggttggaagggaagctaatataaggaaatgcatcatgtggcgtaaaataaaacatacatgatcgattattaatgaatagaagttacagcagtgtattttagctttttcgttagtgatttatcctttacattaaatcatatatgcatgggatttcgcaaaaaggaaacaaaaagaaatcatatgtaagggattattattatttaactgtaatttgattgatatatcaatcctttcgaagagaggatgttggaagcttgtaatatgataagcataagcctttcgtttttgtaagtgcgggccagtcagccaggcattctagcaccttataaccaatcatccatgaacacatttatt

SEQ ID NO: 8691 - DNA, 1012 bp, Glycine max
  Clone ID: 700788665_FLI
ggtagccgtatggttccaaaaccgtcgagccagatggaaaaccaaacaattggagagagattatggtgtactcaaagccaattatgatgctcttaagcttaactttgacaccctcgatcaggacaacgaagccttacgaaagcaggttaaggaattgaaatcgaggctgctgcaagaagagaacacaggaggaagcggtgtttcggtgaaggaagagataataacgaggcctgcagactcagaagacaaaacgatggaacaaagtaagagtgacccatcttctgaaacctcaaatattaatcctagttcggagtcggaggaggatcacttgaactacgagtgtttcaacaacaacgacgactgcgtcggaggaaccgccgcatcgcttttgcaagtggacttcaaagacggttcttccgacagcgacggatcaagcgcgattttgaacgaagacaacatgtactctcccttgaaattcaacaattgctccatatcaacctcgccgtcatcgtcttcgatgatgaactgttttcagttccagaaaccgtatcatcaccacgcgcagtacgtgaagatggaggagcacaatttcctcagcgcggatgaggcctgcaatttcttctcggatgaacaagcaccgacccttcaatggtactgtccagaacagtggagctgagaaaagaaacatggaaattaaaccgcttttagaaatttttgtttgaaggtagaaaatgaaatactgtgcaaaagaaaaagagagaacagagatcaatggctgcatggcgtggggtcggagatggaaggttgattattactactctcgaccgtgcggcagggggtaatattaataattattcaatcgtaaagcaaaccatgctgtaaaaacaaatttccattcaagtatggaataacggtgtagtacttttttaataaataaaaaaaacaacaacaacggtgtactacttttaggaaagagaaaacaaaaaaaaaataattaaatcggttaaacaat

SEQ ID NO: 8692 - DNA, 969 bp, Glycine max
  Clone ID: 700788721_FLI
cttccatggaagaaccctgggtgcacttgctttgactagtaaagtgcaatacagaatgccttttgaacctgttatgcctggagtgacctttttagagtatggaaatgctcaggctgcagttgaattaattaagcagggcaagattgctgcagtttttgttgagcccatccaaggagaaggtggaatttacagtgctacaaaagaatttctacagtctctacgtaatgcttgtgatgaaactggggcacttcttgtgtttgatgaggttcaatgtggtttaggtagatcagggtttctctgggcccatgaggcatatggtgtcttcccggatatgatgacccttgcgaagcctcttgctggaggcctacctattggagcactcttagtgactgagagagttgcttctgctataaattatggtgatcatggaagcacttttgctggaagccctctagtttgtagtgctgctcttgctgttttggataaaatatcaaaacctgatttcctgtcatctgtatctaagaaaggcctctacttcaaagaactacttagggaaaagttaggagaaaaccggcatgtgaaagaaattcgtggtgttgggctaatcataggaatagatttagatgtacctgcatcacccctcgtagatgcatgccggagttctggcctcctagtgttaactgctggaaaaggaaatgttgtcaggctagtcccgccattgatcataacagagaaggagctagagcaagcggctggcattttgtgccaaactttaccagttcttgataactaggagtgtaggagaaagagtattggccttactttgctagcgaaatagaacatatttggtggtgtattgttgagtagctgagtcacagatggtgttgcctaacttaccagattctgtggataaaataaggcttctaataatatagcagctaaggaatcatcaatatcatcacctaagtc

SEQ ID NO: 8693 - DNA, 1074 bp, Glycine max
  Clone ID: 700788722_FLI
ctctctaccaatccacaactgatggcaggaagattgtcgacgtgctcctcgagcaaaacattgttcccggtattaaagtcgacaagggtttggtaccccttgctggttccaacgacgagtcatggtgccaaggtcttgatggtcttgcctctcgctcggctgcatactaccagcaaggtgcccgtttcgccaaatggcgtactgttgtgagcatccccaacggtccctctgctctggcagttaaggaagctgcctggggtctggctcgctatgcagcaattgctcaggacaatggattggtcccaattgtggaaccagagatcttgcttgatggggagcatggtattgacagaacttttgaagtagcaaaaaaggtctgggcagaggttttcttctaccttgctgagaacaatgtcctttttgagggtattcttcttaagcctagcatggttacacctggagctgagtccaaggacaaggccagtcctcagacagttgctgattacaccctcaagctccttcacaggagaattccccctgctgtccctggaattatgtttttgtctggtggacagtctgaggttgaagctaccctcaacttgaatgccatgaaccaatctccaaacccgtggcacgtgtcgttctcgtatgccagagccctccaaaacactgccttgaagacatggggaggccgcccagagaacgtgaaggcggcacaagatgcactccttttccgtgccaagtccaactcgctcgcccagcttgggaagtacaccggtgagggtgaatccgaggaagccaagaaggagttgttcgtcaaaggctactcctactaagatgtatgtagtgaatatgatacatgttaggcagcagcaacaccagcagttatagtaggtgttgacggaggatgaagtggaagaagactaatttgtctaaaatgtaatgtttttatagtcttggagactatttttgtttatggttacatgtacctttacagcttataaaccttctgctgtgagtggtgtacttgattgattatgtctcaatatataacaaacatggttgaatctcggc

SEQ ID NO: 8694 - DNA, 563 bp, Glycine max
  Clone ID: 700788771_FLI
attaccgcttcgagctctgtcattgtctcaagttccaggtttcagcgatttcgatctcgcatagcattctacaatggccactattccagttaaccccaagcctttcttgaacaatttgactgggaagcccgtaattgtgaaactcaagtggggaatggagtacaagggctatctcgtttccgttgattcctacatgaacttgcagctggccaacactgaagagtacattgagggacagtttactggaaatttgggagagattttaatcagatgtaacaatgttctctaccttcgaggagtaccggaggatgaggaaatcgaagatgttgcagaagactagatagtgataaaagctgctaatggctatgacataaaatgaactcgaattttctactgtttttgtatcttaacttaaatgtaggtttttttgtagttgtgtagagatttgaaatgatgcactcgcttgtgtatagggtgcctatgttcaagttgtctgttattttattttcatgcttctgaatatgttatttctctgtttatgtaataatcaatatcatttgaac

SEQ ID NO: 8695 - DNA, 899 bp, Glycine max
  Clone ID: 700788792_FLI
atttgcggttggatggatcagttgagccagaaaagcgttttgaaattgtcaaagctttcaattcagaccctaccattgatgtcttgctgcttacaacacatgtcggtgggcttggtttgaacctgacatctgcagatacccttgtttttgtggagcatgactggaatccgatgcgagaccatcaggctatggatagagcacacaggttaggtcagaaaaaagttgttaatgtccatcggctaataatgcgtggtactctggaagagaaagttatgagtctacaaaggttcaaagtgtcagtggctaatgctgtcattaattctgaaaatgctagcatgaaaacaatgaatacagatcagttgcttgatttgtttgcgtcagcagaaacctccaagaagggcgcatctgttgtgaagagtccagagaacaactctgatggagacgctaaattagtaggcagtgggaagggattgaaatcaatactggggggattggaggagctatgggaccaatcacagtatacagaggagtacaatctgagtctctttttagcaaggcttaatggctaatgttccagattcatttcagagtcagagtgtacatatccatgagtacaaattttggcattgtaacatcttattttttttcccaccatgcccttcagtcatttttggtcgtcactttttttgtataccccaatgctggctggaatctgctcgtgtgcatgcagaccaggtaaatcagtgtctgtattttacagggcatttgagtgactggtggaagcccttggtggtgatatgtagagaaatgaatcggtgacggcttcaggagggatggagtaatattttttggattttgtacatatacagtcaatcctaattatagttataattgttgct

SEQ ID NO: 8696 - DNA, 1123 bp, Glycine max
  Clone ID: 700788813_FLI
ggtatttacaccgcacaatattatgagattgcagtagcagtgtttgctttgctcaagtctcagcgatatgatggcagacccagcaagtttcatagcaagctggttaactccttcttacctcttcatcttggtcaacctcgtcataggcaccatagccatcacttctcgcttcagttccacgcccaaaaaccaacaagcccaccacccccaaccactcagctccttcaatacccatcatcaccaacccaactgcactcagccccaactccttccaataccctcactgttgcagcgagtcacgtccttcaacctctccctccacaaacaccaacccacacctccagaaacacaacatctgcatcccgaaccccaaccccaacctgaaaagccgccggaactgcttcggactccctcactcttggagcgactcaggtccttccataatctttctctccacaaacatgtccaacccgagccagagccagagccagaacctgaacctgaaaagccggaactggttcggagtccctcgctcttgcagcggattcagtccataaacttctcccatctctacagatccgacttcagtcaccgagatgatgaggatcccgattcgggttcggatccgggtcgcggttcgggaaaggcggcggagatgaggaaatcggcgagcgtgagagggggtttgacggatagcgagtgggaggaggtcgagaagcggaggccgcagacggcgaggccggttgaaacgacgacgtcgtggagagaagacgaagaagtagacgccaaagctgacgatttcatcaacaggttcaagaaacagttgaggttgcagaggattgattcccttctccgttacagaggaggtaactcatcatgagtaaagaaaaacccgccctaatcttccttgcgcctgcgtcgttgcctcaagttgttctgacgttaaagtttgttggttttcaaatgtttgtatagtactgcgtgctactaggttggtgtggcaaagttcttgtcttagtaatcatgtcatgtttgtctaatattaataatagacttgtgtaggcatacacaaattgataataaatttgatattattatatgaattattaataaatttaatatt

SEQ ID NO: 8697 - DNA, 983 bp, Glycine max
  Clone ID: 700788839_FLI
atcgacctgttaacacattttgcccttgtcacttaattggttcaaataatgtccatatcactggattggcttactcaagctttagtgaactccttgtttcttataatgatgagctcatctatctgtttgaaaagaatgtgcactcagattcctcaccttcatctgctacatctgaggatccgaagaatattcatgaggcccaagtttactcaggccacagaaatgcacagacaattaaaggagtgaatttttttggcccaaatgatgaatacatcatgagcggttctgattgtggccatatattcatctggaagaagaaggaagctaagctggtgagattaatggtaggtgatcaacatgttgtaaatcaacttgaggcccatccacatatacctattctcgctacttgtggtatagaaaaaaatgtgaaaatctgggctcctctagggaatgatatacctccacttcctgcgaatgtgaaagagataatggagacaaacagacagggcagagaagaccgatcacgggtaacccttactcctgatgttataatgcatgttcttcgcctgcagaggcggcagacattggcgtatattgaaagaagacataatagggcagatattgtaagtgatgaagaagatgcagagggctaccttttaggattctcagatggtgatgcctcttctgaagaggattctcctggaaattccagagattgcaacattagctagagcttaaagaagtgggtttggttgctttggctgactaattccattgaaacactaaatgatgttagcttcactgttttctactaagcagtaccatatacatgtttgaaacgtgtgctagtaaacaccattaggaaaacagtgtgcagagctgtaaaatctgggattgttctagttgatattcagatattatgacgtgtacaggtataaaatatgtataaatcttatttttaatcaattatgagcttcacttat

SEQ ID NO: 8698 - DNA, 815 bp, Glycine max
  Clone ID: 700788846_FLI
ctcagatgcaatattgtgctgcactctaaaggcattgccagtgttcactttctcgaaccaggctgggcttgacatgctggagaccacccttgttgcattacaagatacacctttagagaaaatatttttcgtccatgatcatcaaatatttttttcagagtttccccagattattcaacaggtctacaattttgttgtaataaaagcattgattccacttccatatggcttgctattggatgtttttcccccctatatgtatggctacatatttcttgtatgtgttgtatagttattttgcattaccagattatgcttcacttgataaattatttttgcagaaagtgaacttgcttttttttccctctctttctttccccctctgaattggggtatgctgtcaacagaactgatgctttttattaatttctcctttttttgggtagggttttgtatgtcttcaaggtggtatttgtctttcaagcatggggcgacctgtctcgtacgaaagagttgttgcttggaaggtgctgaatgaagaagagaatgctcattgtatgtgctttatgtttatgaactggtcttttgtttgacattttgttctgagtacagtagtgcttattgtaatctaaagtgttagataaagatttactcgacacttgagctttgttggttggacttcactgtatttgcgctaaatacttggattgcacattttatgactatttatgtgttattagcttagtatgtaacttgtttccttattcaacctccagctaatatttaatgcaatcttaagaagtgttgcacctttg

SEQ ID NO: 8699 - DNA, 1535 bp, Glycine max
  Clone ID: 700788916_FLI
ctgcgattcatcgacgaccacaactccgcggaggaccgaacctacaagctcggactgaaccggttcgctgatctcaccaacgaggaatacagggccaagtacttgggaaccaagatcgatcccaaccggaggctcggaaagaccccgagcaaccgctacgcgccacgtgtcggcgacaaattgcctgattccgttgattggaggaaggaaggtgctgttcctcctgtcaaagaccaaggaggctgtgggagctgttgggcattctcagcaatcggtgcagtagaaggaataaataagatagtaacaggcgaactgatttcgttatcagaacaagaattggtggattgtgatactggatataaccaaggatgcaatggaggacttatggactatgcatttgagttcataatcaacaatggcggcattgattctgatgaggattacccataccgtggtgttgatggtagatgcgacacatataggaaaaatgctaaagtcgtttctattgatgactacgaagatgttcctgcctatgatgagttagccttgaaaaaggccgttgcaaatcagcccgtgagcgttgctattgaaggagggggcagggaatttcaattatatgtatctggtgtattcacggggagatgtggcacagcactagatcatggtgtcgtggctgttgggtatggaacagctaaaggtcatgattattggatcgtaaggaattcatggggttctagctggggagaggatggctacatcagattagaaagaaatcttgctaacagcagatcaggcaagtgtggaattgcaattgagccatcttatccccttaagaatggtccaaatccccctaatcctggaccatcacccccttcacctgtgaagccgccaaatgtctgtgacaactactacagctgtgctgatagtgctacttgttgctgtatttttgagttcggaaatgcttgcttcgagtggggttgctgtcctcttgagggtgcttcctgctgtgatgaccactacagttgctgccctgcagactatcccatctgcaacacttacgctggaacttgtctcaggagcaagaacaacccctttggagtgaaggcattaaggcgtactccagcgaaaccccattggaccttcggacgtaagaacaaggtcagcagtgcttaagcagtttaaggaaatgtgaacgtgcagaaggagccaatgatgaagtaaaagggaagacgaaggactaaagcaccagctggatgcacttcccccttcttcacataatgctgcacgtaacataaagatctttaccattttattatgatacaaaatagataatgttctgtatcaaatttcagtcagacattggctctgtacatagggttatattatcgatgcactgtatttgtattcaaattccaaatggcgaacatatttgattgctgttagttttcaaggttctgtagattatgtgacaatgcagcagcaatatttggatttgtcccatattcacatgctattttaatttgcttacaatgtgg

SEQ ID NO: 8700 - DNA, 461 bp, Glycine max
  Clone ID: 700788924_FLI
cttggtggtctacacagaagtgtcatactgaagggagtgggaagcagtgcaatcagtcaactccataataacagaagctaccctctttcagatgtcatgccattagacagccccaacatcatcgaagcaactgaggggactaggggtgctgatatccaggctttgatcgaaaaagtgggatatctcactggatgatagaaattgaaaatcattttagtaatatgcctcttcgtgtttgcctgctatgaaaccctacttctgagcaagcatataatctgaaatttatccacaatgttcgtaaagcttttttcctcctctctcctctgtaacttctatatcattctcttcgtcacaaacttccacatgaaacatatttcctctggtttcccccccttatctccttgttggttctgtatcttacatattacatttttaataaaggccacttctcatttcccgtg

SEQ ID NO: 8701 - DNA, 1132 bp, Glycine max
  Clone ID: 700788990_FLI
gtatttccctacctctcccttcaagatgcagatcttcgtcaagaccctcaccggcaagaccatcacccttgaggtggaaagctctgacaccatcgacaacgtcaaggccaagatccaggacaaggaaggaatccccccggaccagcaacgtctcattttcgccggaaagcaacttgaggacggccgtacccttgctgactacaacattcagaaggagagtactcttcacctcgtcctccgtctccgtggtggcatgcagatcttcgttaagacactcaccggcaagaccataaccctagaggttgaaagctccgacaccatcgataacgtcaaggccaagatccaggacaaggagggtatccccccggaccagcaacgtctcatcttcgccggaaagcagctcgaggacggccgcaccctcgccgactacaacatccagaaggaatcaacccttcacctcgtcctccgtctccgtggtggcatgcagatcttcgttaagaccctcaccggcaagactattaccctagaagtcgaaagctccgacaccatcgacaacgtcaaggctaagattcaggacaaggagggaatccccccagaccagcagaggctgatcttcgccgggaagcagctcgaggacggacgcacccttgctgactacaacatccagaaggagtcaactctccacttggtgttgcgtcttcgtggtggtatgcagattttcgtgaagactcttacgggtaagactattaccctcgaggtggagagctctgacaccattgacaatgtgaaggccaagattcaggacaaggaaggcatcccaccggaccagcagaggctgatttttgctggcaagcagctcgaggatggaaggaccctcgctgactacaacatccagaaggaatcaacccttcaccttgtcctccgtctccgtggggggttttaagctcgttgtgtaatgttggatgtgttcccaaaacatttgaagaactttgatgtttaatgggtctgtaataatgtcccttgaaaataagttcggtttgtgttgaactcaattgtgtcccattaataatagtactctaatatcccacctacgtttgttatgaatgtgtgaaatatgaaatgattaattgtc

SEQ ID NO: 8702 - DNA, 430 bp, Glycine max
  Clone ID: 700789129_FLI
aaattgggaagttttatcctggtttaacccaagaacagatagtgggcattgtgaatgggtttggtgagctcaaaggtgctaagtgtgaagacattgatgtggcaaaggctgcattgtacttagcatcagatgaagcaaagtttatttcaggtcaaaatctcattgtggatggagggttcaccagctttaaaaatcttacattcccttctccagatcaaactgcttaacctcaactgtttattgagtataatttctatgcattattgtcggtgtaaatcaaccaacgaggaatcatgttaggtatatgacaattataattggatgagtttaaaatttctttatattgtcagtatatagactattttctcttgttgatttatgtaatgtattatggttggtttaagagtatgttgaagtattttttttcttt

SEQ ID NO: 8703 - DNA, 805 bp, Glycine max
  Clone ID: 700789174_FLI
aaccgtgatttgcaggaagacaaagaaccagtgtttgacagcgttaaaacaattttggggatgcttgaagtatcagcagaatttgctctaaaaattactttcaatcgggaaagaatacaaaaggcattacctgctggtcatcttgatgcaaccacactagctgattatcttgttaacaagggtgtgccatttagaacgtctcacgatatcgctggaaaatctgttgctttatgtacgttgaagaactgccaactgctggacttaagccttgatgagctgagaagtataaatccagtctttgaggaggatgtgtatgaatttcttggagtagaaaatgcgattaagaaatttgtctcttatggctccaccgggtcagcatgtgttgccagccaacttgattattggttgaaaaaacttgaaatgaagtgaagattaccctaatgtcatgaaattctcatcgtgctagggaagccaattcctaaaacatggaataatagctcactgccttgccaaagttgctggaacacgtaattctggaatcaaccaagatgatacctttgagtatttgaagcgtgcgagagcattagttgttatatgcaaattagtcagggttatgtactttcagaatcaaatgtgccatgccgtaagttatgagttttttgcattttacattacctcctgttcgactgtaattttagcatgtcgaatgaattttgtgtagcttttaatgaaataaactcatctttagcacccatacggctagagttgtgatgtgttgattggaaaaaaagaaaggttaaatttt

SEQ ID NO: 8704 - DNA, 941 bp, Glycine max
  Clone ID: 700789208_FLI
aaaaaaaaacgaacatattcatataaatacttctactgcagattcaacctttcgttctctgacagttctttctccaaacctacctttctatcttttctttttcatcggagcattatttgataccctcttgagtcctctctgcagcaacgcatttttcctcattctcttaaacaatttaacttctcctcgtttgatctgcataaaattgcattaatataaaaaatgaagaagtttgtactcaagttagatttgcatgatgacaaggataagcagaaggccttgaaaacagtttcaactctttcaggaattgatgccatagccatggatatgaaagagaagaaattaacagtgataggaacagttgatccggtaactgtggtgagcaaattgcgcaaatactggaaggcagacatagtagcagttggaccagtgaaggaacctgagaagaaggaggatcccaagaaagcagaagcaaagaaggagggagaaaagaaagaggagggaaagaaggaagaaggaaagaaagaagagaagaaggaggatgataagaagaaagagccagccccagatcctgttttggaatgggtcaaggcttatagggcatataacccctacatgaccacaaactactatgctccaagcatggaagagaatcccaatgcttgtgtcatttgttgaaggataaaacttagatgtaattttataagtatatttggtttttattttcgaccaaaattgaagtttatctcgataatctacatgtaaacttctattatgtagattattgaaataaaactttaattttgatcaaataacaaggttataaggagcctaaagatttgtatgtaagttttgttcgttgctaaatagtaagttgtccaaacacaagggaaggacataccttttcaatatggtaatatattctattctctttcactccc

SEQ ID NO: 8705 - DNA, 519 bp, Glycine max
  Clone ID: 700789220_FLI
tagagatcctacgtttatatgcttgtccttatctgaaaacacttcctaatagcatctgtgacatgatgagattgaagtatattgacatttctcaatgtgttaacttgacatgcttccctgaaaagattggtagattggtaagcttggagaagattgacatgagggaatgctccatgattagaaatgtgccaaagtctgcagtgtcattgcaatctctgaggcttgtaatttgtgatgaggaggtatctgggatttggaaagaggttgccaagcctgataatgtgcatattcaagtatcagagcaatactttgatttggactggctcaaagagtgacatatatgtgtctatgtttttgtgatattttactttctaatttgatgtttttttttcttctagatcacacggatcctccattagaggtaatactgtatgactattatgaacagaactttccaatttgatgtgaatacttgtacataacttctatttgaagtggaaattatctttttccaaaatc

SEQ ID NO: 8706 - DNA, 818 bp, Glycine max
  Clone ID: 700789246_FLI
aagccatagagtctcttggtagaatgctaacagaaggcattcacacagacatcaccatcaatgcttctgatggaagtataggagctcatagagctgttcttgctgccagatcacctgtcttccgcagcatgttctcacataatcttcaggagaaagagttatcaaccataaacatctcagacatgtcacttgaatcatgccaggcttttctctattatctttatgggataatcaaacatgaagagtttctgactcataggctggcccttctgcaggcggctgacaagtatgacatatctgacttgagagatgtatgccacgaaagtcttctagaagatattgacacaaagaatgtacttgagaggctccaaaatgcatctctatatcagttgatgaaactgaagatgagttgcatccgatatcttgtgaagtttggtaaaatatatgaaattcgcgatgatttcaataccttcctgcgaaatgcagatagggatctgatttctgaagtcttccatgaagttcttgatgcttggaaaggattctgaagatcttgcagcttcaatgaaagataggaaagcttgttgttattcaacatacccaagaaataggttgtttcaatttgttgtgcaggatttgttttgatgaacctaattctttctctcagatgattttttattattattatgattttatgtacatacttatgttgtgctcttcaaatgtaaaccataaggtattattgtttacaaaaaatgtatatcatatgaaaagaaaagtaacatattcatgaatgcaaaaggtcctcctgaattctgatg

SEQ ID NO: 8707 - DNA, 2118 bp, Glycine max
  Clone ID: 700789268_FLI
gtgttgaatgaatcccacatgccacagcgatgtctcattccaaaacccccgctgccggcgaaactctattttccggcacggcgttcctgattctcctccacctctttctcttccttactcccgcactttcccttgacttcctattcaactccttcgccggcgtcaccaacctcactctcatcaaagacgctcgcgtcgacgcctccgtcatccgaatgaacaacgactccaatcagtactcctacggccgcgccttctaccccgtcaaaattcccatgctcaaaacaaacacctccaataactcctcttccatttcttccttctccacttcctttgtcttctccatcttgccgcagatctctaccagccccggcttcggcctcgccttcgtcctctccaacaccaccgaccctcccggcgccatcgccagccagtacttcggcctattcaccaacgcaacctccccttccgttttccccctcgtcgccgtcgaattcgataccggccgcaaccccgagttcaacgacatcgacgacaaccacatcggaatcgacctcaacaacatcgagtccataaacgccaccactgccggctacttcaactcctccggcgccttcgtgccggtgcgcatgcgcaccggccagaacatccacgcctggatcgacttcgacggcgagaatctcgagttcaacgtaaccgtcgcgccaatcggcgtttcgcgccctacgaaacctactcttcggtatcagaatcccgccatagctgactacgtgtccagtaacatgtacgtagggttttccgcttcgaaaacgaactggatcgaggcgcagagagttctcgcatggagcttcagcgattcaggacctgcaagggagctcaacacaacgaatttaccagtttttgaactagaatcgtcttcttcctcgctttctaacggcgcaatagcgggcatcgtcatcggttcttttatttttgttcttatatgcgcttctggtttttacttatggtggcgaatgaacaaagcgaacgaggaagaagacgagatcgaagactgggagctagagtactggccgcacagattttcctacgaggaactaagttacgcgacaggggaatttcggaaggagatgctgttaggttcgggagggttcgggagagtgtacaaaggaacattgcctaacaacacggaaattgcggtgaagtgcgtgaaccacgattcaaagcaagggttgcgtgaattcatggcggagatttcaagcatggggaggcttcagcacaagaacttggttcaaatgagaggatggtgcagaaaggggaacgagcttttgctggtttatgattacatgccaaacgggagtctcaacaagtgggttttcgataagtccgacaaggttttagggtgggagcaacgccgtcgtatacttgtcgacgtggcagaggggcttaactaccttcaccacggttgggaccaggttgttattcatagagatattaaatcgagcaacattctgttggacgccgacatgagagggagattaggggactttggtctggccaagctttacacgcacggggaggttcccaacaccacgcgtgtggtggggacgttgggctacttggcgccggagctggccacggtggcggcccccacttcggcgaccgacgtctacagcttcggggtggtgctgctggaggtggcgtgcggtaggcggccgatagagacgtcggtggcagaggaggaggtggtgctcattgattgggtcagggagctgtacgcgaaggggtgcgcgcgtgaggctgcggatttgaggattagaggggagtacgatgagggagatgtggagatggtgttgaagctagggttggcttgttgccaccctgatcctcagaggagacccaccatgaaggaggtcgttgcgcttctcttgggagaggacccgccggaggcacccggaaaagtcttgtccgatttggttcgcggtggcgaggattccgacgaggccgcgcctttgcaaccctcccctcctccggtttgaatatttttgtgttgattaagtaattcttcattttaaataatcttgtttcaattagacaaaattattataaaatttttccacc

SEQ ID NO: 8708 - DNA, 879 bp, Glycine max
  Clone ID: 700789335_FLI
cttttgtctgtatggtacaaggtatcatacctgaaaagaaaaagtcaatgaaaagggggcgtgttcattcggtcttcaaagctaaggaatataatgctaccatagagttctattgggccccatttctagtggagtccaacactgacattcgtatcataggagacccaaagaagagaataataaaagtggatcaaatcacggagcgtgccaaaaactggaccggagtggatatactagttttcaacacctatgtatggtggatgagtggtcttagattaaaagcactatggggttcatttgccaatggagaagaagggtttgaagaattggatacaccagttgcttacaaactaggtttgaggacgtgggccaattgggttgactcaactattgatccaaacaaaacccgggtcttcttcacaaccatgtcccctgcacacacaaagagcgcagactggggccacaaggatggtatcaaatgtttcaatgagacaaggcctgtaaagaagaagaatcactggggaagtggctctaacaaggacatgatgagtgtggtggctaaagtggtgaagagaatgaaagttcctgtgaatgtcatcaacataacgcaaatctcagagtacaggattgatgctcattcctcagtttacactgaaactgggggcaaaattttgagtgaggaggaaagggctaacccactaaatgcagattgcatacattggtgtttgcctggagttccagatacttggaatcaaatatttttggcaatgttgtaacaaggacctgtgcttttgttttttaagggacatgaagatgtcaattatgtaaaatcatgtgtccaccacatttagcatttatatcatcttttggttcattttc

SEQ ID NO: 8709 - DNA, 1009 bp, Glycine max
  Clone ID: 700789356_FLI
tgggaagatccccttgttgcgagaaagaacacaccaacaaaggagcttggaccaaagaagaagacgaacgcctcatcaactacatcaagctccatggtgaaggctgttggagatccctccccaaagctgctggcttgctcagatgtggcaagagttgcagactcagatggataaattacctcagacctgatctcaagagaggcaacttcactgaagaggaagatgaactcatcataaacctccatagcttacttggaaacaaatggtctttgatagctgcaaggttacctggaagaaccgataacgaaataaaaaactattggaacactcacatcaagagaaaactctacagccgcggaatcgaccctcaaactcatcgtccactcaacgctgcctccgccactccggcaaccaccgtcacagccaccgcagttccatcttctaacagcaagaagaagataaagaacaataacaacaacaacaacggttttcagttggtgaataatagtgcttatgccaacacaaagattgggaccgacatgattgctgctgaagattctaacagcagcagtggcgttacaacagaagaatccttccctcatcatcaactcaacttggacctttccataggtcttccttctcaaccccaagtttcttcttcgttgaacccagaaaagttgaaaccagaaccgcaagagcatgatgatcagaagccacaggttttgtaccagttgtatgggaagaacatcactggccaacaaggtgtgtgcctatgttacaatctagggcttcaaagtaaccaagcttgttattgcaaaaccatgggtacttctactactacggttactaccacaactgcgaccgataggaatctatatagattttacagacccatgaacatttagaccttaaaatgtcatgttaattaattattgtgacctctttgttaacatggaaatagttgtagaatcccaaaattttgagaaaatttagatcattttttgtgtcc

SEQ ID NO: 8710 - DNA, 1194 bp, Glycine max
  Clone ID: 700789371_FLI
tgacactaataatatccgatcatctagaacgcaggcgttgagttgagaatggaaggagggaaacgaggcacgattctggtcaccaacgacgacggtatcgatgctcctggcttaagagcattggttcactccctcgtcaacgccaaccttttcaacgttctagtgtgcgctcctgatagcgagaaatcagctgttagccacagcatcacttggctccatccagtagctgttaagcaagtacagatcgagggaaccaccgcatttgctgtttctgggactcccgctgattgtgcttctctagggatttccaaagctctctttcccacagtacctgatctggtggtcagtggcataaacaagggtagcaactgcggttatcacattgtttactcaggcactgtagctggagctcgagaggccttcttcaatgatatactttctatctccatttcatatgactgggttaaaggaaagagtaagctacaagacttcacccttgctgcacaagtatgcttacctatcataagcgctctactggttgagacaaagaatcaaagctaccctagaaaatgttttttgaatatagacgtgccaaacaatgttcctaaccataagggttacaagctaactaagcagggtaaaagtatcatcaagactgggtggaggcaagtcacatctgagacagaaggaccaaaaatgtcatctgatatgaccaatacagatacagaaacatcaaagaattttgactcatcatctgcatcaccagaacatcttttgtttgcgagagaggtaataggttctgtacttgatgaagatgatacggactacaaatgtttgcgggaaggatatattactgttactcctcttgctgctctcactcatgtggaggtagattgtcaggcctattttaagaattggctacaaagtgtccccgaactcccctcgtcatcatctttataatgctattcctccggttcactggaagtgatgccaactcaatctgttgctaaatcaattattttgatcctgagcaatttggttgctccggtatgcatgccatttctccattattatcatcgggcaataaagacatctcaacagtgttatataattgaatgagagcttaatttctggaatctaacaagtaataacatgctactcatttttagattaatatagtagcaattcttagtc

SEQ ID NO: 8711 - DNA, 1031 bp, Glycine max
  Clone ID: 700789403_FLI
gattttggcatccgttatggcttccagtggccagctcttatttatcgtctatcaaaacaacccggtgggcctcccaagctgcgcattacagggatagagctcccacaacctggtttcaggccagcagagagagtccaggagacggggcttcgacttacaaggtattgtgatcgctttaatgttccatttgagttcaatgccattgcacagaaatgggaaactatcaaaattgaggacttgaagataaaggaaaatgaacttcttgttgcgaatgctatgtttcgatttcaaaatctacttgatgagacagttgtggtgaatagtccccgggatgctgttttaaagttaataaggaaggcaaatcctgctatctttttacatgctaatgtcaatgggagctataatgctccattctttgtgacacggttccgggaggcccttttccattattctactttgtttgatgtgcttgataccaatgttgcttgtgaagatccaatgaggttgatgtttgagagagagttctttgggcggcaggtaatgaatattgtagcttgtgagggttgtgagagggttgagaggcctgagacatacaagcaatggcaggttaggaacatgagagctggatttaaacaattgcccttggataaacatctcattaacaaattaagatgcaagttgaaagatgcgtaccacagtgatttcatgcttcttgaagatgacaactacatgctgcaaggttggaagggccgagtagtttatgcttcctcctgttgggtgcctgcataggccttgacaatgttcttcccaaggtagttaattaggagaagcgtttcatgagttgtaggggagacatggacttccaaaattcttgtggttgacatattctagaagctgatccctgctaatgtaatgacatagcatagttcaatttcagttctcagaatatttttaaattggtcaagtcataagtgtgtgtataatataactgataactggtgctatgtgaatgacatatttcaatgttgaac

SEQ ID NO: 8712 - DNA, 944 bp, Glycine max
  Clone ID: 700789480_FLI
gtgggaagttgactgagaaagcagatgtttacagttttggagttcttgttattgaaatagtttctggcaagaaaatcagttcctatattatgaattcatcctctctcctacaaacggtttggagcctctatggatcaaataggctatatgaagtcgttgatccgaccctagagggtgcttttcctgcagaggaagcatgccaactgcttcagatagggttgctttgtgcacaagcatctgcagagttgagaccatcaatgtcagtagtagttaaaatggttaataacaatcacgaaattcctcagccagcacaaccgcctttcatcaattccagtagttcagaattcagcaaatctggtttacctggatataattttcagcctggatccaacactcagtcttcagggaacaccataagtgaaagtcagattgagcctagataagttacactgcacaacctttctcctggaccatttttatgtgctcacaatccccaattacccttgtaaaagctgttggcattcttgctttcttgtaaaagtgtggtttcagttatcagcatggcattgcccttgtacatctctgaattgaaaggggagtggcataaccccatatgaacctctgccaacagctaccacccattgctttgtgtatagattacagtttcacaaaaagctgcaaggtaaaaaagttaaattttgccgaaaacttgtacattacattatcacacaggtcacctagaaaagaatcaataagcggattatactatatgctttttaacagtttgagttctctactaacacctgattgagttttctaccaggcacctagaacgaaaggtgcaaggattccaagaattttacttgtaaccaccagtgattattcatttacattttattcttttatgtaacattaatttattttaagttccttattttattgtt

SEQ ID NO: 8713 - DNA, 807 bp, Glycine max
  Clone ID: 700789481_FLI
gttcatataccacaaggccttccccatgccagcattgtcattcaagtttcagaacacagaccctctttctggcaacgaagtggacgatgctgtgcagttcgtgtcctcagtctgttggcgcggccagtcatcgtccaccttgctcgctgcaaattccacagggaatgtcaaaattctggagatggtttaagttgttggcctctacacagcaatctactacaaaatgatacattgtttgctgagcatgaggtgacagaacctatgcttaagattagcttctgttgccactgaatgctttacaaaggggtatatagattccttgattattatttgtaagttgtaacataacaaatttttgcattagtagttcatagcggaagcagttaaagagaagagtgagattgatcacgtggaaaaccaaaaaaggtcctgtagatagtgtcacatggaaaaaagtgaaggtcacaacaatctatatcagattattatcacggttatgatccatattcaatttgatagttacattcacctagtggaagctactatttttgtgtagaattcaataatatctacagataaaaatctattgcattttctaaagtatctattgtttttaatgtgctaagtcggtgcaagctttgatgaattgaatgtcctgtatcatgtggattgtggaacgtgacacattaaatgccttttattatgctcgattgtggcatatcaaatatgactatgtaaatcttggccaaagattatggatggctaaattttttagtttaaatattattgaataaattgttagtgttt

SEQ ID NO: 8714 - DNA, 1975 bp, Glycine max
  Clone ID: 700789528_FLI
caatgaagctccatcaccactagcgaacacttccattgtttttatctcacaggatcgatttatccccaccaccaccaccatggcagaggtggcggcgccgaagaaggaaaacccgaatcttctccttgggcggttcgagctcggaaagctcctcgggcacggaaccttcgcgaaggtccaccacgcgcgcaacatcaaaaccggagaaggagtcgccatcaagatcatcaacaaggagaaaatcctaaagggtggtttggtctcccacatcaagcgcgagatctccatcctccgccgcgtgcgccaccccaacatcgtgcaactcttcgaagtcatggccacaaagaccaagatctacttcgtcatggaattcgtccgtggcggcgaactcttcaacaaggtcgcaaagggaaggttaaaagaagaagtcgccagaaagtacttccaacagttggtttccgcggtggagttttgccacgcgcgcggcgtgttccacagggatttaaagcccgagaatttgttgctggacgaggatgggaaccttaaagtctccgactttggactcagtgccgtgtcggaccagataaggcatgacgggctgttccacacgttttgcggaacacccgcgtatgttgctcctgaggttttggcgcggaaagggtacgatggtgcaaaggttgatatttggtcttgtggggttgttttgtttgttttgatggcgggttatttgcccttccatgaccgtaacgttatggctatgtataagaagatttacaagggtgagtttcggtgtcccaggtggttttcttctgaacttacaagacttttctctaggcttctcgatactaaccctcagacaaggatttctattcccgaaatcatggagaatcgctggttcaagaagggtttcaagcagattaagttttatgtggaggatgatagagtttgtagttttgatgagaaacagctgcagcatcatgatggcgatgattatttggcaacatcggattctgaggttgagattagaaggaagaatagtaattgcaatagtactagtaatggtaattcgttgccgaggcctgcgagtttgaatgcgtttgacataatatcgttttctcaaggctttgatctatcagggttgtttgaggagaagggtgatgaggcgaggtttgtgtcttctgctccggtgtcgaagattatatcgaaattggaggaggttgctcagttggttagcttcactgtgaggaagaaagattgcagggtgagcttggaggggtgtagagaaggtgtgaaagggcctttgactattgctgctgagatttttgagttgacaccttccttggtggtggtggaggtgaagaaaaaaggaggggataaggcagagtatgagaagttttgtaactctgagctgaaacccgcgttggagaatttggggatggaggattctgcttcttcttcttcttcttgtcatcaatctacacacactcaatctgaattccaacaacaacatcgaacattttctgactctgcccttaacagacattcagataataatgaatgcttatatgatcaagagttgggtctagcagaagagactagtatcccacaacttggtgaaccaaagttcgaatttcaacaggaaaatgtgcccatgtttactatttgactgtgtctacaacactattgttttcaaagaatgaaacatgtggaaaaccaaaaaaagataatgaatgtttgcattaattaaggtaccaggagaatgacagaagatgacaacatactatttctctcttgttatttttaggctgtgtgtaagttaaattttactttctttttccctcaagaattttccggcatttttaggtttgctccttgactggagcattagatgctactgtatttctttgtccaaatgttgtattattgtaaggctaatttaattttaaatatagtgaatgaagaagtttatatgtgt

SEQ ID NO: 8715 - DNA, 1019 bp, Glycine max
  Clone ID: 700789554_FLI
tggaccttttcccactgctgttaccagcttgttggatcttacacggcttgatcttcacaataacaagctgacagggcctattcctcctcaaattggacggttgaagcgccttaaaatattaaatttgaggtggaacaaactacaggatgcaattcctccagaaattggcgagcttaaaagtttaacacatctgtacctaagcttcaacaatttcaagggagaaattccgaaggagctagcaaatcttcaagaccttcgctatctttatctccatgaaaaccgtttaactggaagaataccaccagaattgggcacactgcaaaatcttcggcacttggatgctggtaacaatcatttagtaggtaccataagggaactcattcgtattgaaggttgctttcctgcactacgcaatctgtatctaaacaataattattttactggaggaatgcctgcacagcttgctaacttaaccagtcttgagatcttgtacctatcctacaacaaaatgtcaggagttataccatcttccgttgctcgtattcctaaattgacatacttgtacttggatcacaatcagttttcggggagaattcctgaacccttttacaagcatccatttttgaaagaaatgtacattgagggaaatgcattccggcccggtgtcaatcccattggtttccataaagtgcttgaagtttctgatggagacttccttgtttaatgaaagctctaaatatttataattttttctcttcaggaagtgcacttgtataattattgaaacaattgttcctctaattatctcaatgaaatagccaaataggtaatccaattttgtcaaaatctatcttgttatagtaaaacagtcgttttaagtgtactgtttaagagctttccacgctccaaaaagttgtattatagataagatagtcttggactcttgatatcaacttcaaaaattgaagaatgatattacatatttttcagtaaaaagtaatattactgtgcaaaaaatg

SEQ ID NO: 8716 - DNA, 684 bp, Glycine max
  Clone ID: 700789612_FLI
atttgttttctctttatttcagatttctgagattatatctcgttttgagcggaaagggtacaagcttgtgggaattaaagtagtgattcctaaaaaggaatttgcccaaaggcactatcacgacctgaaagaaagacccttcttcgatgggctgtgtgattttctaagctctggccctgttattgcaatggtgtgggaaggacagggagttatttcctatggccgaaagctaattggagccacagatccacagaaatcagaacctggaaccattaggggtgatcttgctgttgttgttggaagaaacatcatccatgggagtgatggtccagaaactgccaaggatgagattaagttgtggtttaagccagaggagttggttagtttcactagcaatgcagagaagtggatttatggtgccaactgattctttccctcatgccttgggttttctataacaactgctcagtgagtttttggaataaattatttgtcagaatgaactctagaagccataaataagcgcgattgagaatttgagattggtacggttaatatattttaataggaattgcattgtttttatcttttatcagtcgggtgaagacaatgtgtgacaattgccaatacttcaaaatgggtcaattggctttttgaaaagagttgaggatcatttgttcatcc

SEQ ID NO: 8717 - DNA, 1663 bp, Glycine max
  Clone ID: 700789616_FLI
gagcaaccaccacaccacacagcacttcccttctcctcctccaccatgtcattgccaccgccgtcgctggtaacggcggcgactccgacggagcttccgatccggcagattccgggaagctacgggttcccgttgctgggccccatctcggatcggcttgactacttctggttccagaagccagagagcttcttcagaaagcgagtggagaaatacaagagcaccgtgttccgcaccaatgttcctccctccttccccttcttcgttaacgttaatcccaacgtaatcgcggttctcgacgtgaaatcattctcccacctcttcgacatggacctcgtcgacaagaaggatgttctcgtcggagactttgtccccagcgtcgccttcaccggaaacatgagagtcggcgtttaccaggacactaccgaacctcaacattccaaggtgaagaactacatcatggatattctgaaaagaagctcaggcatatgggtatcagaactagaatcaaacctagacacactgtgggacaacatcgaagcatcactctcgaaatcctcatcagtttcgtaccttttcccgttacaacagtttctcttcacgttcctctgcaaagtccttgccggtgcagaccctgcacgtgaccctaaaatcgcagagtcaggctattccatgcttaatagttggctcgctcttcagctgctccccacagtcagcgtgggcatccttcaacccctggaagaaatcttcctccactcctttgcctaccctttcttcctcgtcggtggaaactacaacaacctctacaacttcatcaagcaacaaggcaaggacactataaaccggggcgcaatcgggttcgggttaaccgaagaagaagccatccacaatttgctcttcgtgctgggcttcaactcctacggcggattctccatttttctcccctctctgatcgatgccatagccagcaactccgcattgcaggagaagcttaaaaaagaagcgagagaaaagggcgggtcaacgctgaccttcgactcggtcaaagagatggacctgatccaatccgtggtctacgaaacgctgcgcatgaaccctccggttccactccagtacggtcgagcccgaaaggacttccggttgagttcgcacgactcggtcttccacgtcaagaagggcgagttgctgtgcggctttcagaagctcgtcatgagggactccgttatattcgacgaaccggaccggttcaagccggaccggttcacccaagagaaaggggcccagttgttgaactacttgtattggtccaatgggcctcagaccgggtcgcccagtgtgtccaataaacagtgcgcgggtaaggacgttgtcacactcaccgcggctttgattgtggcgtacctttttcgcaggtatgattccatccaaggggatggcagttccatcactgcccttcaaaagaccaagtgaaagaagggtaaatgtgtattttcattgtggagcttgtattttatctaaggtatattatttacttgagaatgatgatctatttatatagaagaggcaggtttatgcaactctttcataaactacaatcttcaattgtaactaacagatgactgatacattttgtaatcgtatgcgcacttcttttttttttttc

SEQ ID NO: 8718 - DNA, 1107 bp, Glycine max
  Clone ID: 700789640_FLI
ttgtagacttgcctgtttccacgggcttcacttatgccacaacagagtttgctactcaacgaagcgactggatacaagttcaccaagtccatcaatttcttaggaagtggttgattgaacatccaaattttttgtcaactgatgtttacattggtggcgattcatactctggcattactattccagcaattgttcaagaaatttctctaggaaatgaaaaagggctccaaccatggataaatctccagggatacctgctggggaatccagcaacaactcgaaggcatgaaaactatcgaatatcctttgctcatggaatgggacttatttctgatgaactatacaggtcactgcaaaaaaattgtaaaggagagtacataaatgtagacaccaaaaatgtattatgttctagaaatatcgagacattcaatgaggttacatcaggacttagtatggtcaatattttggacccgtcatgtgattggcttgatactgaaacatcttggaggagatctctacttaagaaatatccgagaaagaatttccttaatactcatctcaaattgccatccttaaactgtcggagttatgcatacttcctctgcggttattgggccaatgatgatagtgttcgcagtgcactgcatatccgtaagggaactataggaaaatggcgtcgctgtaccttcaatatacctaacaaggaggacatctcaagcagctatgagtatcatgtaaatctcagtagaaaaggctatcgttcactgatatacagcggggatcatgacatgaaaattcctttcttggaaactcaagcatggataagctctttgaactattccattgtggatgattggaggcaatggcatacagatggccaagttgcaggatacacaaggacttactccaatcgtatgacatttgccaccgtgaagggaggaggccacacagctccggagtacaagcctgaagaatgcttggccatgttcaggagatggatatctaacaaggctttgtaggaataactaataaaactcatgttctctcttggcaagaactaaacttggcatactttgcataataaagccacagggtagattattcact

SEQ ID NO: 8719 - DNA, 1405 bp, Glycine max
  Clone ID: 700789643_FLI
tgaaaatgcaaacaccacacttgagcaaatttccatgcttgcttcccctgatggggacactatgcagcgaatcgcaacatattttatggagtcgcttgctgatcggattcttaaaacatggcctgggatccacagagccctcaactcaaccagaatgactttgatatccgacgaaattctggttcagaagcttttctttgagcttttccctttcttgaaggtagcatttgttctcacaaatcaggccatcattgaagcaatggaaggggagaaagtgattcacataattgatctcaatgctgctgaagctgctcagtggattgctctccttcgagtattaagtgcgcatcccgaaggccctcctcatttgagaatcaccggggttcatcagaaaaaggagattctggatgaggtggctcatagactaactgaagaagcagaaaagttggatataccgttccaattcaaccctgtggcaagcaaattagaaaatcttgattttgacaaacttcgggtgaaaactggggaggcactagcaataagttccattctccaattgcatacccttttggcctgggatgatgaagccatgcagagaaagtctcctcttctgttaaaaagctcaaatggaattcacctgcaaagagttctgccaatgggccaaagcacattgggtgatttgcttgagaaagatatggttaatgggtacactccaagtcctgactcaacctcatcatctccatcatctttaactacttccaattcaatgaatatggagagctttcttaatgccttgtggggattatcaccaaaggtcatggttgtgacagaacaagactgtaatcacaatggtccaactctgatggataggcttcttgaagctctatactcttatgcagcattgtttgattgtttggaatccactgtctcaagaacatcattggagagattaagggtggagaagatgctttttggggaggaaataaagaacatcattgcatgtgagggatctaaacgaaaggaaagacatgaaaagctggaaaagtggttccagagatttgatctagctgggtttggcaacgtgcctttgagctactttggtatggtgcaagcaaggaggttcctgcagagctatggttgtgaaggatacagaatgagggatgaaaatggttgtgtgttaatttgctgggaggatcgaccaatgtattcaatatcagcttggagatctaggaagtaagagaattagagggatatattgatgttttttcttttcttttctttctttctttttatttgtatgagtgttttattcttatggtaatgactgttcttcaagatagttttttagagatactctttattcattgcctggtaaaactccatcaagtaagaaatttgggaagac

SEQ ID NO: 8720 - DNA, 1302 bp, Glycine max
  Clone ID: 700789655_FLI
cgttctctctctatctctattaagttgtaactctatttatcactcagatatttgagaaggctttgaaagatggtgcttttgggacttctcatggtgggatttctttctctgggttcatttgtctcagcttctggttatggttggatggatgctcatgcaaccttctatggagggggtgatgcctcaggcaccatgggtggagcatgtggatatgggaacttgtacagccagggctatggaacaaacactgctgctttgagcacagctttgttcaacaatggtttaagctgtggggcatgttttgagataaagtgtgttaacgaccaaaggtggtgccttccacgctcagttattgtcactgcaaccaatttctgtcccccaaacaatgcactccctaataatgcaggtggatggtgtaaccctccccttcaccacttcgacctttcccaacctattttccaacaaattgctcaatacaaagctggaatagtacccgtggcttaccgaagggtcccttgccgaaagagagagggcatcagattcaccatcaacggtcactcatacttcaacctagtcctaatttccaacgttggaggtgcaggtgatgttcacgcagtttccatcaaaggatcaagaacaaattggcaaccaatgaccagaaactggggtcagaactggcaaagcaacgcctatctcaacggacaaagcctctccttcaaggtcaccactagcgacggacacaccgtggtctctaataatgttgcaccctcaagctggtcctttggccaaaccttcaatggccaccaattcatttaagaaaacaacatagacccttttacatttagtagctaaaaattgttgtatttgtgattatacttagtggtacaatagatgtgttggtatatagaagaaaaaattaagtaatatgatataggagttgagtcatggatggggcttattttaggatggtcctttttccttgtaatttgaattgtgttttgtgaggaattttgttctgcctagcatttgaaaaaggcagagatggtttaattagggggcaggggtggatgtttaaggtttaccacccgccaatttcgtttgttgtgtggttcgtgttatgttatccacaattggaaaatgaaaaaaaaaagtgatattttctagcttagcgaatgagaatagaataggaaagagacaagcgtttttgcttctataggaagtcattaatgtcttgaacttcatgtagtttagtgagtgtaaaagtgaattgtatgacatgtaaggaataaaattactctcctc

SEQ ID NO: 8721 - DNA, 1654 bp, Glycine max
  Clone ID: 700789722_FLI
tagaattgtacccagtgttggagtccatacaaaaatatctctggccccggctctgcaagctagaccaaagaacattgtatgagctgcattaccagctgattacatttggaaaggtcttctgtactaaaagcaagccaaattgcaatgcttgcccaatgagaggggaatgcagacactttgcaagtgcttttgcaagtgcaaggctcgccctgccaggatcagagcagaagagtatagttatcacaactggaaacaatgcaactgagcagaacccatcactagtcatcaatcagctgcccttgcttctccctgaaaatataaaccaagcagaacttcaacaaacagaagtgatcaggcaactagaagcaaaatctgaaatcaacatcagccaacctattattgaagagccagcaactccagagccagaatgctcccaagtatccgaaaatgatatagaggataccttcaatgaggaatcatgtgaaattcccaccatcaaactagacatagaagagttcactttgaacttacaaaactatatgcaagaaaacatggaacttcaagaaggtgaaatgtcaaaggccttggttgctctacatccaggtgctgcatgcattcctacacccaagctgaagaatgtgagccggttgcgaacagagcattatgtttatgaactccctgattcacatccccttctgaatgggtggaacaagcgagaacctgatgatccaggcaaataccttctagctatatggactccaggggagacagcagattctatacagccaccagaaagcaaatgcagctctcaggaatgtggccggctctgtaatgagaatgaatgtttttcatgcaacagtttccgtgaagcaagttcacagatagttcgagggacactcctgataccatgtcgaacagctatgagagggagctttccgctaaatggcacctattttcaagtcaacgaggtctttgcagacaatgactcaagtcttaacccaattagtgttccccgaagttggatctggaaccttgataggcgaacagtgtattttggaacctccataccatctatattcaaaggtttatcaacacgagaaattcaacaatgcttttggagaggatatgtctgcgtgcgtggatttgaccgggaaaagcgagcaccccgacctctgttggctagactacacttcccggttagcaggttgcctaagaatagggataagacccaacaagagtccgcatcggcaaactcacaaggattgaattttaaacaaaatccagaacagccagaattgctttccaacattcggcagaccggaggatcctgaaggcaaataattgtcatttaatattcatcctgtactctgtgtataataacgacaaagtcattgtcatgctcagatactgagcagttttcccagactaggactaggaccaagacagtaaaatggtaacaaagtagctttttagctccatgaagattgaagaggaatgtgagctaggtgagatatgaggctatttgcgcaggagctcagtatagatacacatacactcatcagtattcttctagatttttatgtctttcaaaagactagttccgcttgtagaaattatcagattttcaactcgcgattcagtttcttagttgcag

SEQ ID NO: 8722 - DNA, 2746 bp, Glycine max
  Clone ID: 700789744_FLI
atgcccaacggaaacttcttatctctgcctccattcattacccacgcagcgttcccgcgatgtggcctggtcttgttcaaacagccaaggaaggaggagtagatgtgattgaaacctatgttttctggaatggccatgagctttctccaggcaattattactttggaggaaggtttgatctggtcaagtttgcccagactgttcagcaggctgggatgtacttgattcttcgaataggcccatttgttgctgcagaatggaattttggtggtgtaccggtatggctgcattatgttccaggcacggtattccggacttacaatcagccttttatgtatcatatgcagaagtttacaacttacatagtgaaccttatgaaacaagagaagctttttgcttcacaagggggtcccataatcttagcccagatagaaaatgaatatgggtactatgaaaatttttataaggaggatggtaagaaatatgccttgtgggctgcaaagatggctgtttctcaaaatacaggtgtcccttggataatgtgccaacaatgggatgctccagatcctgtgattgatacatgcaattcattctactgtgaccaatttacacccacttctccaaacaggcccaaaatttggactgagaactggcctggatggtttaaaacttttgggggcagagatcctcacaggccagcagaagatgttgcattttctgttgctcgtttcttccagaaaggtggaagtgtacataattactacatgtatcatggaggaacaaattttgggcgtacagcaggtggtccattcattactacaagttatgactatgatgccccagtggatgagtatgggttacctagacttcctaaatggggacatcttaaggaacttcacagagctatcaagttatgtgagcacgtattgcttaatggtaaatcagttaatatctcccttggtccttctgtggaggctgatgtctatactgactcatcaggagcatgtgctgcctttatttctaacgttgatgataaaaatgataagactgtggaatttcgaaatgcatcatttcacttgccagcttggtcggttagcattcttcctgattgcaagaatgtagtattcaacacagctaaggttacttcccagacaagtgtagttgcaatggttcccgagagtttgcagcaatcagataaagttgtaaattcttttaaatgggacatagtgaaggagaagccaggaatctgggggaaggcagactttgtcaaaaatggttttgttgatctcatcaatactaccaaagataccactgactacctgtggcatacaacaagtatatttgtaagtgaaaatgaagagttcttaaagaagggaaacaaaccagttcttctaattgaatccacgggtcatgctctccatgcttttgtgaatcaggaatatgaaggtactggttctggaaatggtacacatgcaccattcacttttaagaatcccatctccctcagggcagggaaaaatgaaattgctttgctatgcttgaccgttggcttacagacagctggaccattttatgacttcgtaggggcaggactaactagtgtgaagatcaagggactgaacaatgggacaatagacttgtcttcttatgcctggacttacaagattggagtccaaggagaatatctaaggttataccagggaaatgggttgaataatgtgaactggacatctacttcagaaccaccaaaaatgcagccattgacatggtacaaggctattgtagatgctccacctggggatgagccagttggattggatatgttgcatatgggaaagggtctagcctggttaaatggagaagaaataggaagatattggcctaggaaaagtgaattcaagagtgaagattgtgtgaaagaatgtgattacagaggcaaattcaatcctgacaaatgtgacactggttgtggagaacctacacagagatggtaccatgttccacgatcttggttcaagccatctggaaatattcttgttctttttgaggagaaaggtggagatccagaaaagatcaagtttgtgagacgtaaagtatctggagcttgtgcccttgttgctgaggattacccctctgttgcactcgtttctcagggtgaagataaaatacagagtaacaaaaacattccttttgcccgtttggcatgccccggtaacactcgtatatctgctgtgaagtttgctagctttggaagcccatctgggacatgtggatcttacctcaagggagattgccatgatcccaattctagcacaattgttgagaaggcgtgcctaaacaaaaacgactgtgtcataaaattaactgaagagaatttcaaaagcaacttgtgtcctggtttatcaaggaaacttgcagtggaagcagtctgtagttgaataataaactaacgaactccggtgcaagagactcgtcactttgtgactgctgttgattaatattattgtcgattccggaggaacattgcatctcaccatttattttaccagcttggctacatcaaaaaagcagaagaaaattttgcatatattaatattaatattatcagcaaggtctctaatgtacaaatataatttatggcagagaaatctgctgtaaatacgatatctattaatcaatttggctttcacatgggtgtgttagccactgagaatcaatgcattttattcacacgacgctctgaaac

SEQ ID NO: 8723 - DNA, 2311 bp, Glycine max
  Clone ID: 700789791_FLI
gaggcctttgtaaagggtgttccaataggacaagctcttgatatagacatcccccctccacggccaaaaagaaaaccaaacaatccttatccccggaagaccaatgttggtggtgccccaacattacatagcggagcaaggcatggaaagcctctcatttcaattgtatcttcacttggtaaacaagcattgggcttggagaaagaaccccttccagagaagcatgatgtcgacctaaggccatcaaccgtaaaagaaaataaggaccaaagctgctcaaaagtatttaccattctccaagaggcaccctgttcatctgtatcttccgccaacaagaattcaacatcaatattagtgccgctgagaaattcatgtgccctaaggaagtttataccttcggtgaaagatgtgataactcaagatgaaaccaacgactcttttgttactgatgatcttgaaaatcagaagttggagatagatgatggcaagcacactcaaaagtctaatggcacttgtaaagtctctaagtcggagaattctggtgcttcagaattggttcaaactgagaaaacagatggtcttaattgtgcattaacaattgaaggggtgcaaggcaatcagaattacccaagacatgtccctgtgcacgttgttgatgggaaccttggaactagtactcaaaatccatccccagatatggtgtttcaagactccatatttcagccgaaaggaggggttaatgggcaacctaaccttgtcaccatttctgctacatcaaacataagtgaaagtcaaaacaacactgcacggtcctctattcatcaatcatttcctccttgtcctaccttcacacaggatgattatcattcatttcttcaggtgtcctccacattttcaagtcttattgtctctaccttgctacaaaaccctgcagcccatgctgcagcaagttttgctgctacattttggccctatgcaaatgcagaaacttccgcagattctcccatgtgcactccagattttccatcaagacaaattggctcgcctccaagtgtgacagctattgcagctgctacagtagctgccgcaaccgcatggtgggctgcccatggactgcttcctttgtgtgctccgctccatacagcttttgcctgtcctcctgcatcagcgattgcagttccattaatgaatattgatgaatcaccacaaaaaacagaacaagaagagattaaaccacaaaattcttctctgcaagatcagatactggatccagaacactcagaagctcaacattcagctcctaagtccccagctgttttttcatccaaatctgaggagaggggagatgccaatttaaatacttcaccaaaggctactaatcatgagacgaatcaggtcatttctgagaaccccgattccaacaaaatgaagggcagaaaacctgtagaccgttcctcatgtggttccaacacaacctctagcagtgaagagaccgagttactactgaaggatgagaaagaaaaggaagagcccaaaacacctgatgcaaacattttagataccgagcttagtaatcgtcgtagtagaagcattaacaaccttactgattcttggaaggaggtctctgaagaggggcgtcttgcctttcaggctctattctccagagaggtgttgccacaaagcttttcacctactcatgatttgataaatgaggataatcagatagacagcatcaaggataacgaccaaaacacagactacaaagatgaagaccttgaaagcaagaaatgcagttctaatagtgatggggtgcagaaaaatctgctatttgtcaaagataacaatgaggaggagggactgctaatcataggtcttggaccaggaaagctaaagactcgtccaacagggtttaaaccttacaaaagatgttcggtagaggccaatgaaaacaggatcggaacagcctgcaaccaaggtgaagaaaaaggtcctaagagaatacgcttgaatggggaggcttcaacttgatgcttgatatatccatgcaaccacacaaagaaaatctctagttttgcatatattatttcttagtttccttgttcattgtctgtattgcttattttctaattctgcagctcacgaaacttgtcgtgtaggtgtgtgtaccatattaaattattacattacactctttttactttcttggactgatgctactgcatttgaaaactctgctaaaatggacctagacaagaaacattaagtactgttttagcattgatcatttaagtaatttaatgatccttcattc

SEQ ID NO: 8724 - DNA, 1631 bp, Glycine max
  Clone ID: 700789817_FLI
gttcaggagaaacttaatgagttgctggatggagatggtggaataagcaaaagaaaagatgccaccaaagggtacttgaagcttttgtttctcactgtggcatcaggtgatagaattaatggtgaagctattcaaagcaatcgagatctttccatgatccttgatgcccttctgaaaacaaaatctagagcagtgctgaatgatataattaacaaaaatggtttacagatgttacataacattatgaagcagtacaggcatgacttcaaaaaaattccaatactacgaaagcttcttaaggtcttggagttcctagaagcaagcaagattttgacatctgaacatattaatggtggtcctccttgtcatggaatggagagctttagagagtcaatgctttctctgacagagcatgaagacaaacaggtccatcaaattgctcgaaacttccgagacagatggtttcccagacacgccagaaaacatggctatatggacagggatgataacagagtggaatctcacagaagtttcaagtgcaacagattttcagcatcacacagtcagaggcatgaacaggatttaaggactacagaagcaattgattgtagtcagcaggcgatgcttgtgacaactccagtagatgctgaaacctgggaaggctgtcctgtgcagtctctagatggggttgaaatcaaaagagctaaaaaacgcaagcgcaaaagccgatgggatcaaccagccgatacaaactcgcattctgatgccgttatgagctctatcggtgaaagccagaacattcccgaggatggtccaccagggttttcatgtccagtaggttcattaaatgcttccctaaactctggtaatcttgccttgcaaaatgcaagccgttctggatgcccctctgatatagttattggtcatccaaaagagaaatttaactctcacttgcctgtctcatatggaatgccatggtctgcccagcaatatggaacacctcatgctgaatttcctgagtgttgggtcactgcacctggcatgcctttcaacccatttcctccactacccccgtatccacgggacaacaaagactgtcaaccttctaatactactaatgctatgataattgatcagcctgctgaagttaagcagggggataccagtggtatggttaattgttgctcagatgatatgattcccagcacaactggtgttaactctgaagactccaacctactgtttgaggacgataaacacataagtaaacgattgaagggtgattccaatgatttgggaacgaggtactttagacagcagaaaatacaccgaccatggttcaagaggaatgcatggaaatgtgatgagaacaactcttgtggtgatatgtgcagtatagatgtaggagatgtaccaaaagagtcaaaagttacttgtgacgcggaggatgcaatctgtagagaggagtaaggtggcgatattatttattagcatgcacagcagcaatatcaatattgttcacaggaaaaagaaatatttttgttttcttttttcttccttatacattaatgtactgtcaattcatttgttcctgaatctattattcaatgaaaatatcattcaatttcagc

SEQ ID NO: 8725 - DNA, 651 bp, Glycine max
  Clone ID: 700790029_FLI
gatcgccatttggaaagccggcaacatgcccgtgcagtatcgcaggataaagtgtaggaaggaaggagggatgcgatttacggttactggttctggaatcttcatctccgtgctgatcagcaatgttgctggccatggagacgtagtggaggtgaaggttaaaggctcgagaactggttggctttcaatgggtcggaattggggacaaaactggcatgtaaatgcgttgctgcaaaatcaacccctttcgtttgaggttaaagccagtgatggaaaaacggttacgtcttacaatgttgctcccaaggattggacctttggacaaaccttcgaaggcaagcaatttgagacttgaaagctcaatgaattgaagagaccattctccttccccaaagtttttaccccgatagttataaaagggtctacttgccggtggttttcttttctacattttgattctttttggttttgtagaagactgtgtagatagcaaatgatttggtgatttgtatgaaaatgttgtcaatgtgatggtgtaccttaccatttattatgttaggaagttttgtatgaaaatatatactatatgtatacctttttggtcaaccagccccaaaaaaaacttgcaatgtaaatgttgtgaggctctcc

SEQ ID NO: 8726 - DNA, 1362 bp, Glycine max
  Clone ID: 700790031_FLI
caattggggcaccaatacacgggataagggcgtttttgtccacaaatcagcttaatacttatgataaggctagaaatgctgtggctcttgcactcagtccagttgtcaaagctcttgttgatccagatggtgcactgagggacataaggaatttggatagtattagcttttcagactggtttttatccaaaggtggcacacgcatgagtattacaaaaatgtgggatccagttgcctatgcccttgggtttattgactgtgataatatcagtgcccgctgcatgctcaccatatttgcattgtttgccacaaagaccgaggcttcccttttgcgaatgctgaagggttcaccagatgtttatctgagtggccccatccgaaagtacatcacagacagagggggcaggttccatcttaggtggggatgtagagaagtacttcatgacaaatctgctgatgggagtatttatgttacaggactttccatgtcaaaggctactgccaagaaaattgtgaaagctgatgcttatgtagctgcttgtgatgtccctggaattaagagattacttccatcaaagtggagggaacaggagtttttcaataacatatatgaactagttggagttcctgtagtcacagtgcaacttagatacaatggttgggttacagagttgcaggatctagaaaagtcaaggcgactggggaaagctgttgggttggataaccttctctatacacccgatgcagatttttcttgctttgcagaccttgcactttcatctccagaagattattacattgagggacaaggatcattgctccaatgtgttctgacgccaggagatccatacatgcccttaccaaatgacgaaattattgcaagggtagcaaaacaggttttagcgctgttcccatcatctcaaggtttggaagtcacttggtcttctgttgttaaaattggtcaatctttgtaccgtgagggacctggtaaagatccatatagacctgatcaaaagacgccagtgaagaatttctttcttgctggatcttacacaaagcaggactacatagacagcatggaaggtgcaaccttgtctggcagacaagcttcggcctatatctgtgatgcaggggaaggattagtggcattgcggaagaagctcgatgatgagtttaaagacgacttaacaatatcaaatactaaagatgaattgagcctagtatgataaatttccacgaggtggtcacgttgacatgaagctagctcgttctttttccatgcaacattttacaatgtatattcaatccaaaaataatttcagaactgattgtttcgaagcaagtagtgttgtttatagttgt

SEQ ID NO: 8727 - DNA, 853 bp, Glycine max
  Clone ID: 700790034_FLI
agcaatgtgtgaacccttaagtgttggtgttcatgcttgtaggagagctaatattggaccagaaacatatgtgttaatcatgggagcaggacctataggacttgttacaatgcttgcagctcgtgcttttggggcacccaggactgtcattgtggatgtagatgactatcgtttatctgttgcaaaatcacttggtgccgatgacattgttaaagtctcaacaaacattcaggatgtggctgaagaagttgtgcagatacagaaggttatgggagctgatatagatgttacctttgattgtgctggttttgacaaaaccatgtctacagcactgagtgctactcagccaggtggcaaagtttgtctagtgggaatgggacattctgaaatgactgtcccactcaccccagctgcagcaagggaagttgatgtgcttggagtttttcgctatatgaacacatggcctctttgccttgagtttctaaggagtggaaaaatcgatgtaaaaccccttataactcataggtttgggttttctcaaaaggaagtggaagaagcctttgaaacaagtgctcgtggtggtaacgccatcaaggttatgttcaatctttagatactggactgccactttacaaactgtcttattttgaacagagtatgtaatttacatgttcctgctcatgttaaataccaatgtattgataataaggtggcttcaagaaggacttgtaaaacatgtgagtggtaactgcagcatctacagattcagttatgcggtgaaaccttttcttaatatgtaaatgagaaaaccctcaatttttttctgtagtcattgagaatttcaatgcacaat

SEQ ID NO: 8728 - DNA, 1740 bp, Glycine max
  Clone ID: 700790064_FLI
aatgggggctgatgattttgagcccctgactatgatagggaagggtgcatttggagaggtcagagtctgccgagagaaagcaaccggtcatgtatatgctatgaagaaacttaagaaatcagagatgcttcgcagaggccaggttgaacatgtaaaagctgagaggaatctacttgcagaagttgatagcaattgcattgtaaagctttattattcctttcaagatgaagagtacttatatctcataatggagtatctacctggtggtgatatgatgacgttgctcatgcggaaggatatactgacagaaaatgaggccaggttctatgttggggagactgtcctagctatagagtcaattcataaacataattatattcatagagatatcaagcctgacaacttgctgctagatagaaatggtcacatgaaattatcagactttggattatgtaaaccactagactgcagtaatcttcaggaaaaggacttctctattggaagcaacagaagtggagcccttcagagcgatgggcgtcctgtggctcctaaaagaagccaacaggagcaactgcagcattggcagaaaaataggcgaatgctagcctattctacagtcggaacacctgactatattgcccccgaagttcttctgaagaaaggatatggcatggaatgtgattggtggtccctgggagcgataatgtatgaaatgttagtggggtatccgcccttttattcagatgaaccaatgttgacttgtagaaagatagtaaattggagaaattatttaaaatttccagaagaagttaaaatttcggcagaagcaaaggatcttattagtagactcctatgtaatgtggatcagaggcttggaaccaaaggggctgatgaaataaaggcgcacccatggtttaaaggtattgaatgggacaaattgtaccaaattaaagctgcttttattcctgaggttaatgatgaattagatactcaaaattttgagaagtttgaagaggctgacaaccaaactcaaccttcctcaaaatcaggcccatggagaaagatgctgtcatctaaagatgtcaactttgttggttacacatataagaactatgaaatcgtgaatgatgatcaactacctgaaattgctgaattgaagaagaagagcacaaaacctaagcgaccatctattaagaccctatttgatgatgaatcagctacagctgccaatcaacctacccaagggagcttcttaaaactgttacctactcaaccagaagttcctgagaagagtgaatctcaatgatcccaactagtaatattttacaggactcttacatggccatggaggtatgaccaaatgctgagttgaatactgattgttttagtctttcccacattcttttgttagtttggcgtggatagttgtgggagcaaaggctctgaaactttgtggttttggatagtgggttttggcttgactgggatatttgtctgtagaaaaatctttgaaggtatatattctttacatttttggttggtggtgtattcttttgttcaccatttatcaagctgcaatgtgttgagaatccaagttatttcttgtaattaagttactgctgaagtgctgacaaggatgtacaattctcacatgtagagattcattagtttgtaaggtaacattttcgttcttatcttacttcaaaaagtataatttttacaaattaaatccttatgctc

SEQ ID NO: 8729 - DNA, 971 bp, Glycine max
  Clone ID: 700790067_FLI
gcagaggcatggccaagaagagaaaatccatatccacaagcctcgacgaggtggatcgaaccatctactcttccttctccagtgccaccaattccctctctcacctctacactctctccatgaaccaccagaaactctccttccaagccggtgaacgccactcccttgaaaaactctatcagtgggtctggaggcaacaagagagtggatcaagagttgcaactgttgatatactcagctacattcagaatgagctggattactgtggagaggagccatgcatgtcccctagagctccactgcatcaacaacagtcacaaccggtaatgcaagtcactactggtgcaggttttccagtaactacaggattttctggccaaactattgtggggcaggagctcagacctgagcactgtgataatcaatcaaagaattctatgttttcaaatgctttgtcaaaccctgttcgtcaaattggtgagggagggaaccacccaagtggtctttccatggggaatggaaaccagagcaccgactctgctgctttcagttccaatgattctgccatggacatgcatgcagactagtcctgtccaaggttttatctacttaatatttgtttgatcacccctctacattacctgcaaaagaagtgaataaccaatggaagggcatatctggttttgctcgttgcatcctacaacaaatagagcagtgtggaaccagttttattatcttattaaattagttaaaatgcgtatgtcatccaagtgatcgcttggatgttaaatgttctttgtaaagttttttcaaatagtttaaaggcatttaaatttgtaccttgattgtctcctcactcctctttctcaaagacaaccttttcaatgtagggattgcttctatctgaagtttcctcatgtaaatctgtccttttcgcaaaattctatatgcagcaatttacaacttcaggc

SEQ ID NO: 8730 - DNA, 1258 bp, Glycine max
  Clone ID: 700790071_FLI
cacagctttagagtcttcactttgcaggaactgagagatgccaccaacggcttcaataggatgctcaagcttggagaagggggtttcgggagtgtctataaaggatccattacgcaacctgatggacaaggtggtgatccaattccagttgcaatcaaaaggctcaacactcgtggcttccagggtcataaagaatggcttgctgaagttcaatttctcggcattgttaatcacccaaatttggttaaacttttgggatactgctccgtggatgcagaaagaggaatccaacggttgttagtgtatgagttcatgcccaacaggagcttggaggatcaccttttcaacaaaaacttaccaaccctgccttggaaaacaagattggagatcatgcttggtgctgctcaaggactagcttatctacatgaaggactggaaattcaggtgatctaccgagattttaaatcttcaaatgttctattagatgcggacttccacccaaagctctcagattttggtctggctagagaaggaccacaaggtgatcagactcatgtatccactgcggtagttggaacacagggttatgctgcaccggagtacattgaaacgggtcacctgaaagttcagagtgacatgtggagttttggtgttgtattgtatgagatcctcacaggaagaaggtcattggaaagaaaccgtcccacagcagaacaaaagcttctagattgggtcaaacaataccctgccgacaccagcagattcgtcatcataatggacgctcgtctcagaaaccagtattctcttcctgcagctcgcaaaatagctaagttggctgatagctgcttgaagaagaatccagaagatagaccctccatgagtcagatagtggaaagcttgaagcaagcattgcaatattcagacactacttctcaggacattgctgaatcctcctcctcatctcgttctaaattggtccgaaaaaagtaaatatggagcttttttttttgaaggacttgtgggaaatttagcattttaaggtaagttgattagatcatctatgtagtaagtatttaccaccattgaggtagttttctggtcaatcttggaagtcagttttgaggatttttcttacttgtgtgtttggcctagttcaaacaaaaccaagtccttctttactttgtcagctgttggcttttaatacagtttagatgtcattgtagaaaattttcaattaacaaaattattctttacttct

SEQ ID NO: 8731 - DNA, 1397 bp, Glycine max
  Clone ID: 700790189_FLI
agaatatcatcagtttgatttacatcaggactatgatcatggcttgtatactggttttaatggtacaggttattgtgaggaggatgcgattcctcatatatctagctacctaccaagtatctgccctcctccttctgctttcttaggcccaaaatgtgcactttgggactgtccaaggcctgcgcaagggttggactggtgccaagactattgcagtagctttcatgctgccctagctttgaatgaagggccaccaggcatggcccctgttctacgacctgggggcattggtttgaaggataatttactttttgctgctcttagtgcaaaggcacaaggaaaggatgttggcatcccagaatgtgagggagctgcaactgcaaagtctccatggaacgcacctgagctctttgatctgtctgttcttgagggcgagactattagggagtggctcttcttcgataagcctcgaagagcatttgagagtggaaacagaaagcaaaggtcattgccagattatagtggacgtggttggcatgaatccagaaagcaagtgatgaatgaatttggagggctgaagaggtcctattatatggatccacagccactgaaccattttgagtggcacctttatgagtatgagattagcaagtgtgatgcatgtgccttgtaccgattggaactgaagctagttgatggtaagaagaactccaagacaaaggcagcaaatgattcagttgctgatctgcagaagcagatgggaaggctctctgctgagtttccacatgacaacaaaagggctgccaaaggcagagccaaaattaatgccaaagttggcataggtggtgtctatccagcttcacacagagtgactccactgaatggaacatatgagtatgggttagctgcaccatatgactatcttgtcgacaacatgggtgactactatgggacatgatctgcaagatgctctgcattcaacttggctatacactattttgtgctggttttctattttgcccgtctcaatgctcttttttttcccctccttttttcaagttacaagaaatcaaggtcattttttgccttgtcaagatattttgtgaatagctcattctcactggagtgcagcattaagaagctgctggatgctgaattctaactgcaaaatttggtgtatagtatatgatgagcaatttggtgaatgctagaatctcattagcatcacctgaattgacctatcgtttaggctaaaaagttgctgtgattcagctgactctaatttccaaatcatgctaatgtaagttgattacagtattttatggtattagctgctggacataccttcgaaggtacattatattggctcagtaataaaattggtttagttcccgttt

SEQ ID NO: 8732 - DNA, 613 bp, Glycine max
  Clone ID: 700790260_FLI
ggaactgtgaaggatagagaagctctttgcttatatgctgcatcatatggaaatgctgctagatttattaatcacagatgtttggatgcaaacttggttgagatcccagttgaagttgagggcccaactcatcactactatcattttgccttcttcacatccagaaaagtagcagcacaggaagagctcacttgggattatggcatcaactttgatgaacatgatgatcagccaattgagctgttccagtgcagatgtagcagtaaattctgtaggaatattaagcgattaaatagatccatgagatcgtcaagttcatgatggccattctctggtaaacagattttttggtctgatgcatgccatcgatcagtagtaacaagtttcaacctactgaattggtctctttttgtattttagttttcattattttgcttggaggttggatacaagttactattgacagccttctaaaaactacaaggcagtcatgggacagaataagaaaataacctctaggtgttaataaccccgaatagttctgtcaaatgccaatgtatgattctgcctctgggttttatgttgtgctgaatgcatgccagattaatggttt

SEQ ID NO: 8733 - DNA, 979 bp, Glycine max
  Clone ID: 700790333_FLI
cacactctcacataactctctctctctctctctctctgagtccttcttcttcttcgtccagccaacatgagctcaatcgttcagggtttctccaagtcactggccatgaccattctctctgagatcggtgacaaaacgttttttgcagctgcgatactggctatgcgacaccctagacgcctagtcttatcaggttgcttatcggctttgattgtgatgaccattctctctgctcttgttggctgggcagctccaaatctgatctctcgcacatggactcatcacattacaacatttttattcttgggatttggactttggtccttgaaagatgctatatttgaacaaggggatgcggaagaattggctgaagttgaagctaaattggataaagattggaaggctagcaatggagctacaaaaaatagcaataaggatgatgatgccacaaaaaagcataaacggtcatttttatctcagttttttttctcctatctttttacaggcattttcaatcaccttttttggtgaatggggtgacaagagccagctggctaccataggtttggctgcagatgagaacccatttggtgtggttcttggagggattctgggacaagcattgtgcacttctgctgctgttgttggagggaagagtttagcttctcagatatctgaaaaaattgttgcactctcaggtggaattcttttcattgtttttggaattcagtcattcctctctccagttgaatcatgaaggctgtgctattggttagtgattattcattgtgttttttacaagacatgtttagcaaatatgtttgttattatggttggggttggttgctaaaaatgctcagcttcgtgcctaatcctccccaggtcatagatttcattatttcgacccttttgtagtttaaaataaatttaccattgtaggatgacagccaaattcaatataaacagtcaacgtgagtgg

SEQ ID NO: 8734 - DNA, 2000 bp, Glycine max
  Clone ID: 700790355_FLI
acaatagttacaaccttaaggacattggttgatgctttctatcttctacacatggctctccaatttcgtactgcttatattgctccatcttctcgtgtctttgggcgtggtgagcttgtgatagattcagcacagatagccaagcgatacttgcagcggtatttcatcattgatttcctatccgtgttgccgataccacagattgtggtttggagatttcttcagaggtcaaaaggttcagatgtactagcaacaaagcaggccttgttgttcattatcttgcttcagtatgttccaagatttctccgaatggtaccattgacttcagagcttaagagaacagccggtgtctttgctgaaactgcatgggcaggggctgcatattatttgctgctatacatgcttgccagtcatatagttggtgccttttggtacttgttagctattgaacgcaatgactcatgctggcagaaggcttgcagtgacattaggtgcaataaaaatttcctatattgtgggaaccagcacatggaaggttatagtgcttggaataaaacaagtgaagatattcagtcaaggtgctctgcagatggtgatcctgcgcattttgattatggaatttttgggcaagtcttgtcttctggcatcatttcatctaagaagttcatctccaaatactgttactgtttatggtgggggctccagaatttgagtacacttggccagggacttcaaactagcacctatcctggggaggttatcttttcaatagcactagctataagtggcctcatcctttttgcccttctgattggcaacatgcagacatatcttcagtctctcaccattaggcttgaggaaatgagagtcaaaaggcgtgattcagaacagtggatgcaccatcgcttactcccacaagatcttagagagcgtgtgagacggtatgaccaatataagtggctggcaacgcgtggtgtagatgaagaaaatttagttcagagtctaccaaaggatcttcggagagatattaagcgtcatctctgtttggccttagtgaggagggttccactatttgagagtatggatgagagattgcttgatgctatatgtgagagattgaaaccgtgtttatttacggagaatacttacattgttcgggaaggagatcctgttgatgagatgctgttcatcatacgtggtcgccttgagagtgttaccacagatggtgggaggagtggatttttcaaccgcggttttctaaaagaggctgacttctgtggggaggagcttttaacctgggccctggatcccaaatctggttctaatctcccatcttctactagaacagttaaggcattaatggaggttgaggcttttgccttaactgctgatgagttaaaatttgttgctagtcagtttaggcgccttcacagtagacaggttcaacacactttccgtttttactcccaacaatggaggacctgggctgcatgctttattcaagcagcatggcgtcggtattccaaaaagaaaattatgaagcttcgtcaaaaggaagatgagtcagacggagctcatgaaaatgttggtggcagttcctacagctttggtgctgccttgttagcctcaaagtttgctgcgcacaccctacgtggtgtacatcgcaatcgacttgccaagactgccagggagttagtgaaactacagaaaccccctgagcctgacttctctgcagatgatgctaactaaaaattttcatgtataactactctcttaaaatacttgttttcgttgactattatgattgaatttgtgaagaaaggtcgaaagcaaagtattacacaattatcctggttacagttgtgagggtttcaagacttgtaatgactcttgatctgtttccttgtaaataatagtaatcagccattttggctgtctgctaccgagcatgtaaacttatgtactattctcaattaatgaagttatagttactggttggc

SEQ ID NO: 8735 - DNA, 1086 bp, Glycine max
  Clone ID: 700790363_FLI
atatagtgtctgcagtgctgttggagtattgcctttatccctacaatatggtttctcagtaattgagaagtttttaaagggagcttccagcattgatcaacatatgtattcagaaccatttgaaagaaatctacctgtgcttttgggaatgttgagtgtatggaatgtctcatttcttggatatcctgcccgggctatcttaccctattctcaagccctggagaaatttgccccacacattcaacaggttagcatggaaagtaatggcaagggtgtttcaattgatggtgttccactaccatttgaggctggtgaaattgatttcggtgaaccaggaacaaatgggcagcacagtttttatcaacttatacaccagggacgcgttattccttgtgattttattggagttgtgaaaagtcagcaacctgtttatttgagtggtgaggttgtgagcaaccatgatgagctaatgtcaaacttttttgcacaaccagatgcccttgcctatgggaagaccgctgaacaattgcaaaaggagaatgttcctccacatcttgtgccacacaagacattctcaggcaaccgaccttctctcagccttctgcttccatcattgaatgcttataatattggacagttgttggcaatctatgaacacagagttgctgtagaaggttttatttggggcatcaattcttttgaccagtggggagtggagcttgggaagtcattagcctctcaagtgagaaagcaacttaatgcatctcgcacaaaaggagaaccggttcaaggctttaacttcagtactactgctatgttgacaagataccttcaggcaagtgcagacgtcccggctgatcttccaactcgcttacctcagatttaactgtcttttttgaggaatgttattttttttatattttaattggatcaaagtcatcttacaaatctcactcatataagctgttaaacagcatccttcaaacttttgtttctgggctacttattgagtaacttctagtacatcatccttcaattttgttttgaaatgatgtcctaaaaaaccattgctcaatattttgttgg

SEQ ID NO: 8736 - DNA, 1498 bp, Glycine max
  Clone ID: 700790383_FLI
ctcctgtccgatttatgtttctgatcttgatgacagtgtgctcagtttggacctaacatcctgtaccaaaatgttcgatatcgttacgccagtttcggcatacgggatgcagcgaaattcgttggatttaagatggtccgaagcaaattgtagtcagtgcaaagcaaaaggcaagaaatgtaaatggaagaacaacagaggtgacatcgaatgtttcgactgcaaggacaagcgaaaaactattcatgttcccaaatcttttatttactctgcaccaggttcgattcttttggggttcgtggttattgtcgtttttaagatcatataccattttagacagaaacaagaggaccaagcaagggtggagaagttcttagaggaatacagggcagaaaagcctgcaagatttacttatgctgatgtgaaaagaatcactggtggttttaaagagaagctaggggaaggagctcatggggctgtattcagaggaaaactttcaaatgagattctggtggctgtgaaaatcctcaataatacagagggagaagggaaagagttcatcaatgaagtggaaattatgggcaaaatccaccacatcaatgtggttcgtttgcttggctattgtgctgaaggaatccatcgtgctctggtctacaatttctttccaaatggttcacttcaaagcttcatatttccaccagatgacaagcagaatttccttggctgggagaagctgcagaacattgctcttggtatagctaaagggattgggtatcttcaccaaggttgtaaccatcccattattcactttgacatcaatcctcacaatgtgttacttgatgacaacttcactccaaaaatttctgattttggcttagcaaaattgtgttccaagaatcctagtttggtgtccatgacagctgctaggggaaccttgggatacattgcacctgaagttttctccagaaactttgggaatgtgtcttataagtctgatatttatagttacggaatgttgttgttagaaatggttggaggaaggaagaatgtagacacgtcttctccagaagatttccatgtgttgtacccagattggatgcatgacctagttcatggagatgtacatatccatgttgaggatgaaggtgatgttaaaattgcaagaaaactagcaattgttggactttggtgcattcagtggcagccattgaaccggccatccataaaatctgtcatacaaatgttggaaagtaaagaggaagacctattaactgttcctcctaatccatttcactcatccacttccactattcctagtggattcacttcggcaagactacctttggaattggaagtaattcaagaatgagaaattagcttattgatttatttacaacgggagatgatcagtgtttacacatattttgttttctcctcaaggaaatattgttgtgtttgaatcaaatgtatgaaaataaagtaaattattattataatt

SEQ ID NO: 8737 - DNA, 1333 bp, Glycine max
  Clone ID: 700790392_FLI
ccgtaggaggaaatccgcaacgctcagcgttcccatggacccgccaccatcttggccttcggcaccgccacgccgtccaactgcgtctcccaagccgattaccctgactactacttccgcattaccaacagcgaacacatgactgatctcaaagaaaagttcaagcgcatgtgtgaaaagtccatgataaagaagcgatacatgcacctgacggaggagtttctgaaagagaacccgaacatgtgcgagtacatggcgccatcgctggacgtgagacaagacgtagtggtgatggaggtgccgaagctgggaaaacaagccgcaacgaaagcgattaaggagtggggtcaaccaaagtcaaagatcacacaccttgtgttctgcaccacttcaggcgtggacatgcccggagcagattaccagctcacgaagcttctcggcctgaggccctccgtgaagcgcctcatgatgtatcagcagggctgcttcgccggcggcaccgtactccgcctcgcgaaggacctcgccgagaacaacaagggtgcgagggtgctcgttgtctgctccgagataaccgccgtgacgttccgcggcccctcggacacgcacctcgactcgctcgtgggacaggcactgttcggagacggcgccgcagcgttgatcatcggatcagaccccgacccagcagtggagcggccgatattcgagatgatatcggccgcccagacaatcctgcccgactctgacggtgctatagatgggcaccttcgggaggtgggactcacgttccacctcttgaaagatgtgcccgggatcatctcgaagaacattgagaagagtcttgttgaagcttttgagcccatcgggatcagcgactggaactctatcttctggatcgcacatcccggtggtcccgcgatcctcgatcaagtcgaggagaagctccggctcaagccggagaaactccagtccacccggcatgtgctgagtgagtacggaaacatgtcaagcgcgtgtgttttgttcattctggatgaaatgaggaagaagtctaaggaggaagggaagagtaccactggagaagggttagagtggggggtgctattcggattcgggccgggtctaaccgttgagaccgttgttcttcacagtgttcccttggagggataaatcttgctgatgcggtgactagtgatttaagagtgatcaataaggaaccctcggaaataccagggaaagtttgttattattactagtttcacttgtggatttatcgtagcataatgttgtacaagaataatttaatatgaacaagatggtgtgtttgttattg

SEQ ID NO: 8738 - DNA, 1229 bp, Glycine max
  Clone ID: 700790448_FLI
tgctgcatcaatggcttttcgttcatcggatccttcttattcagagactttgctacgaaatgctgctaaggcctttcaatttgcagatacctataggggtgcctacagtgacaatgctaatgttaggagtggtgtttgcccatattattgtgacttcgatggttatcaggacgaattgttatggggagccgcatggctaaggagggctactcaggatgaaaatttcctcaactacattcaaagcaatggcaaaacccttggtgctgaagacaatataaatgagttcggttgggacaacaagcatgctggccttaatgttcttgtctccaaggaagttctagatggaaacgtaatgtctcttgaatcctacaagacttcagcagagagctttctgtgcacgctcatacccgaaacatcaagttcacatatagagtacactcccggtggactaatatacaggcctgggggcagcaacttgcaacatgcaacttcaattgcattccttgaattggtttacgccaattacctatctcgcacttcacaaaccatcaattgtgggaacgtctatgttaacgcacaaacacttcgccagcatgctaagaagcaagttgattacattttgggagataacccaatgggtatgtcgtacatggttggttacagcaacaagtatccgcagcatattcaccaccgtggctcctctttaccctctatcaaggaccatcctcaattcattgcctgcaaagaaggttcaatctacttcaactcaagcaatcctaatcctaatgttctcgtgggagctattgtgggaggaccaggtgaagatgatgtgtatgaggatgatagggctgattttaggaagtccgaaccaaccacatacattaatgcaccatttgttgggattttagcatactttgttgctaatcccaacccttgattaattactataatttccgtacagatctttttgtaaataaaaaacatatgctgcagaaaagatgtctctcatcttgagaaaaaagcaagagcgaagaggcttgctatgtgttggatacatatataggaggaatgttacagatcattttcaaatcccagatgttgttcgtgtctttttcactgggaaggctgaagagcaaaaaactcgattactgcaaggttttttttttttttttttacttgctttatccaagaaatatgagtgagattgccatacagtggttttttcttct

SEQ ID NO: 8739 - DNA, 1875 bp, Glycine max
  Clone ID: 700790454_FLI
tgcatagaccttttacaagttcatccaacgcagtcaacaatttcttaggaatatcacaagcttcctccgtgctcggtggttttctagccgatgcatatcttggacgctactggaccatagccatcttcactacaatctatcttgcgggtttaacaggaataacactatgtgcaacaataagcaagtttgtaccgaaccaagaagagtgtgaccaattttctctactattgggaaactgtgaggcagcaaaaccgtggcagatgacatacctctacacggctctatacatcacagcgtttggagctgcagggataaggccatgcgtgtcttcttttggagcagaccagtttgatgagagaagcaaaaactacaaggcacaccttgacagattcttcaacatcttctatctgtcagtgaccataggtgcaattgtggccttcacagtggtggtgtacgtgcagatgaaatttggatggggatctgcatttgggtcactggcaattgcaatgggaatatctaacatggtcttcttcataggcactccattgtacaggcacaggttgccaggaggtagccctcttactcgtgttgctcaagtcttggttgctgcatttagaaagagaaatgcctcttttggtagcagtgagttcataggcttgtatgaggttcctggcagacagtctgctatcaagggaagtagaaagatttctcatactgatgatttcaggtttcttgacaaggcagctctgcaattgaaagaagatggtgctaatccgagtccttggagactgtgtactgtgactcaagtagaagaagtgaagatccttatgaaacttatccccataccagcttgcacaatcatgctgaacgtggtcttaacagagtttctcactctctcagtccagcaggcttacactctcaacacccacttgggtcgcttgaaactcccagttacatgcatgcctgtattcccaggcctcagtgttttcctcatactttctctctactactccatttttgtccccgtctttcgacgcatcacgggccatccccacggtgcatctcagcttcagagggtaggaattgggttggcagtgtctattctatcagtggcatgggctgcaatatttgaaaggtacagaagaaactatgcaataaaacatgggtatttggctagtttcctcacagcaatgcccaacctaagtgcatattggttgttgatccaatactgcctcataggtgtggctgaagtattttgcattgtggggttattggaattcctatatgaggaagcccctgatgccatgaagagcatagggtctgcttatgctgcactagctggtggcttgggttgttttgtggccaccatcataaacaacatcatcaaatctgccactggcaacttagacaaaggccaaccatcttggctgtctcaaaacatcaacactggcaggtttgattacttctactggcttctcacagctttgagcatcatcaacttcgccatcttcgtatattcggcgcatagatacaagtacagggaacaccaagttcatgagatggagaaacatgaaatgacatatgttgggagctcctagctagctacataggaactcaactcataccaacacaaagtgctgtctttgttccattgaataacttgtaatagtcttcttgaatggtaaaaaattaccgtcaagattttcaatattaagtcgtcatagggattgaaaacgcaaactagctagggagtattctgcataagacaatggatttggtggtgatggacgattaaacacttacatgtaagcaaagatgaaaacaagataattgcataaatgtttttcttttatgaagatttatgcaagttagttg

SEQ ID NO: 8740 - DNA, 1003 bp, Glycine max
  Clone ID: 700790469_FLI
gcactcaacattttacactcttttcttcttctcgttgttgcttcgctgttgaatcatggatcagaaggtcgatttcagcgctccccattccatgggaaccactatcatcggcgttacttacaacggcggtgtcgttctcggagccgactctcgaaccagcaccggagtgtatgttgccaaccgagcatcggacaaaatcactcagctcactgataatgtatacgtgtgtcgctctggatcggctgctgattctcagattgtctctgattatgtgcgttacttcctccatcaacacacaatacaacttggacaacctgcaacagttaaagttgctgcaaaccttgtccgacttctctcatataacaataagaatttcttagagaccgggttaattgttggtggatgggataaatatgaaggtggacaaatttatggagttcctctgggtggaacaatagtacaacaaccttttgctatcggaggatctggctccagttacttgtatggtttctttgaccaagcctggaaagagggaatgaccaaggatgaagctgaggatttagtaaaaaaggctgtttcactggctattgctcgtgatggtgcaagtggtggggttgtccgaacagtcataataaactcagagggagtgaccaggaatttctaccctggcgaccaacttccattatggcacgaggaaatggagccccacaactccttgctagacattcttggtgccccagagccgatgagcatgtgatgtgaagaagttgccgtgtttcagaaatgtttcctgatagattatatcttgtcttctctcttttatgaactagctaacgatttgtgtagtcaattactttgtttggttggatatttttgatggttgagttatatccttttgttacgtaccatgattaacctttgtttccttcatcatatagctccaaagtaacgtgtactttggtgaattggtcttgcatagaaagcaattatcacaattcttttt

SEQ ID NO: 8741 - DNA, 596 bp, Glycine max
  Clone ID: 700790474_FLI
aaaaaaagtgtgaagtgcagagggatcattgacctgctgcgacgaacacgacgtcgtttttgtttccctctgtgagtgatgggattcttcaaaagggtagctggatttcttgggtttggaaaccacaaacacgattccaaggatgagaccgacgacggtcaacctcgagtgagagaaaccgtcgtcgatcgcccccacctcgctcccgttctcactccctctacttccggcgacggcggaattcagggtctggattggtatgtaaatcatcttaggatggatgaagatggtgatttagcagatcagttccttgatgaggtttcatcagagaagccagaaggagttgcagtagatcatcataaaacacaagcaaggtttaaactgaagaatgggaccaagtcagtcagagtgaagaaaccgatcctattaggtgggaaaattattccacagattgtggaatcccaccagggcagattgtagaaaaatttgatctggctattgattatggtggtctcatgtaagtattgaactgttgggcgtatgattctgctaattatttgtgacagtttgtacttccttatcctttctaactagct

SEQ ID NO: 8742 - DNA, 698 bp, Glycine max
  Clone ID: 700790495_FLI
cctcttctcgcaatccgcactaaaattctagggttccgaaatggacgctgacggaaagatcaagaagggcgccggcggaagaaagggcggcggcccaaagaagaagccggtttcaaggtccgtcaaagccggtctccaattccccgtcggaagaattggccgttatttgaagaaaggaaggtacgctcagcgtgtcggtaccggtgctcccgtatacttggctgcagttctcgaatacctagctgccgaggtgcttgagttggctgggaatgcagcacgtgacaacaagaagaacaggattattccaagacacgtgcttttggcagtgaggaacgatgaggagttggggaaattgcttgctggagtgacaattgcacatggtggcgtgcttccaaacattaaccctgttttgttgcctaagaagtctgagagggcttccaaggaacctaaatctccatccaaggctactaaatctcctaagaaggcttaattgacttattagtttattgttctctatttagtgtgcacaatgtaaatctgtgtttaggttcttttttctatcaccataattgtagttctcaaatcgttgtttattttttgcattttcactcaattagtcgaaacagcaagttctcagtaagggattaatttaattttcttatattcgtataattgtatcctttctcattctctctctc

SEQ ID NO: 8743 - DNA, 541 bp, Glycine max
  Clone ID: 700790517_FLI
ggaaattgccaggtgacacaacttctgtgttgaagaactggtggcagcaacatgcaaagtggccttacccaactgaagatgacaaggcaaaacttgtggaggagacagggttgcagctgaagcaaattaataattggttcatcaaccaaaggaaacgtaactggcacagcaactctcaatcggttacttctttaaagtccaaacgcaagaggtagacattatattattttgtccctaactatgtggaacagctagcaagcaacacaactatatataaggacatgcttattgctgataaagtgtagtcccactaaggattcagaagatagtagatgggttactgtaatattgtaagatagctgaaacaaattcgaggctggctgtaaatttgtggaacttaacgtatgcaaacttttcttttaggtgtggttaagttgcctctctttttaactgtctttgtaaattgttttgctacttttctgaccggcggaagaattattgttactactacacagatgattgaaagattcgctgttctatt

SEQ ID NO: 8744 - DNA, 704 bp, Glycine max
  Clone ID: 700790546_FLI
gagagagtgaggttggtgcatgcctaagggtgaatttctatccaaagtgccctcaacctgacctcacttttggactctcccctcactcagatcctggtggcatgaccattcttctccctgatgattttgtgtctggccttcaagtaagaagaggagatgaatggattacagttaagcctgtcccaaatgccttcatcatcaacattggtgaccaaattcaggtgctgagcaatgcaatatacaagagtgtagaacacagggtgattgtgaactcaaacaaagatcgtgtgtccttggccttgttctacaacccgaggagtgatttactcattcaacctgccaaggagcttgtgacagaggagaagccagccttgtactcaccaatgacctatgatgaatacagactttacattaggctaaatggaccttgtggaaggcccaagttgaatcattggcctcccaaacatgagttaatagtgtgaattaatagcaagtttggtttctcaatgtgattttctatgtttcagatgtcattttaagaagttaataaaaagttaattgttataacttctatattctcaacatgattttgtacttcgcaggtagtttccatgctattatctttcttctaaaactattgatgctttttttttgtgatatctcaagaaataagtatttaataatatccacaaattagtatattt

SEQ ID NO: 8745 - DNA, 967 bp, Glycine max
  Clone ID: 700790552_FLI
cgtaactgcgtgcactctctctctctctacaacaagaattcatctattcatttcagcccatcagcatggcgaaggagaagaaaaacttgtccaacaagaacaagaagccaagcaatgcagacgaggttcacttccgcggagtccggaagcgcccctggggccgctatgccgccgagatccgcgaccctggaaagaagacccgcgtctggctcggcaccttcgacaccgccgaggatgccgcccgcgcctacgacgtcgccgcccgaaacttccgtggccccaaagccaaaaccaacttccccttcctccccgacaacaacaccaacgttaacctcaacaagaagaacaacaacgttaacgttaaatctgacagtcccagccagagcagcaccgtggagtcctccaccccggagcgtgaattcacgcgccgcgccgcccccgccgcaatggatcgctttccgttcctacccatccagcagcaaatcctcgtgacccaccccgtcgcacccatgcgcccggtttactttctcgaccgggcccacttcatgacccagcccttcccactccgattcgaaccgggtccggtccagagcgactccgactcgtcctccgtcgtcgtcgattgccagcccaaaagagagctcaatctcgatcttaacttggctccacctaatgaatattaacctttttttttaatcttttaatttttcataaaaaagacagcagaaagaaaggaaaggactaaggagatttttttttctcttttttttttttttggaagattaatcttccattaaattgtcgtgtagattagataagatgttgttaattacatcctttgatgtaaataggttaatttttctgtttttttaggtccttgatagtattaacaaaggacatgatctgaaattgtctagatctggtataattttcatgtaacatcggaatatctgatgtaattctggct

SEQ ID NO: 8746 - DNA, 1562 bp, Glycine max
  Clone ID: 700790603_FLI
attatcattcacttcatcattcatctcctgtaccagagtctttcaccgctggaaatgcaacactcttggagcatcttattatgacagtaatcattggaacccctatccttggggcatctttgatgggatatggatcagcaagcttgatatatggctatgttttgatttttgatttcctgagatgcttgggccactgtaacgttgaagttgttcctcatcaattgttcgagaaactcccatttcttagatatgtgatatacacaccaacatatcaccacctacaccactctgataaggacactaacttctgcctcttcatgcctctctttgatgctcttggcaataccctcaacaaaaaatcatggcaatcacccaaactaccaagttcaggttcaggaaacggtgacacggtaccccattttgttttcctggcacatatggttgatgtgtcatccagtatgcatgtccaattcgtctttcgatcctttgcttcattgccatacacaacaaggttcttcttgctcccaggcttgcccgttacttttctagttttgctagcaatgtgggcttggtccaagacctttttagttagtttctactatctcagaggaagacttcaccatacgtgggttgtacctagatgtggctttcagtatttcttgccatttgctactgagggaatcaataatcagattgaacaagctatcctcagggctgataaaattggggttaaagtcatcagccttgctgcattgaataagaatgaatcactaaatgggggtggaaaactttttgtggacaagcaccctaaccttagggtccgtgtcgttcatgggaacacgttaactgctgctgtcatactcaatgagatccctcaagatgtgaaagaggtgttcctaacaggagctacatccaagcttggaagagcaattgctctctacctttgccaaaagaaagtcaaagttctgatgttaactctctcaacagatagatttcagaggattcaaaaggaagcccctcctgaatatcagagctatcttgtccaagtgacaaaataccaagctgcacaaaactgtaagacctggatcgttggtaagtggatcacgccaagagagcaatactgggcaccacgtggaacccattttcatcaatttgttgtcccgccaattttaccatttagaaaagattgcacttatggtgacctggcagcgatgagattaccagaagacgtggaaggactagggtgttgtgagtacacgatggataggggagtggttcacgcgtgccatgcaggaggagtggtacatagccttgaaggttggcctcatcacgaagttggggccatagatgttaacagaatcgatcttgtgtgggaagcagcactcaaacatggcctaagaccagtgtcaagtttcacacagtaaaattaagaaaattgaaatcagcttcagtcaaagtatttttcctcaagttgttaatttcttctttgttttgatgtattgcatgcacatcatagtggccatctaagtgcgattatattctttcaagtttgtgtattacat

SEQ ID NO: 8747 - DNA, 953 bp, Glycine max
  Clone ID: 700790651_FLI
aagcttcaacatagaaatttagtcaggcttcttgggttttgcttgcaaggagaagagaagatacttgtttatgaatatgtgcccaacaaaagtctcgactatattctctttgatcctgaaaagcaaagggagttggattgggggagacgttacaagattattggagggattgctcgaggcattcaataccttcatgaagattctaggcttagaattatacatcgtgatcttaaagctagtaacatattgttggatggagatatgaatccgaaaatctcagattttggcatggcaagaatatttggagtcgatcaaactcaaggaaacaccagcagaatagtagggacttatggttacatggctccagagtatgccatgcatggagagttctctgttaagtctgacgtgtacagttttggagtcctgctcatggagattttaagtggcaagaagaatagctctttctatcaaacggatggtgctgaggatctattgagctatgcttggcaactttggaaggatggaacacctttggaactgatggaccccatattaagagaatcctataatcagaatgaagtcatcagaagcatccatattggtttgttgtgtgtccaagaagatccagctgacagacccacaatggcaacaatagttcttatgctagacagtaacactgttactctaccaactcctacgcagcctgcatttttcgtccacagtggaactgatccaaacatgccaaaggagctgccattcgatcaatcaataccaatgtctgtgaatgacatgtcgattagcgaaatggatcctcgataagcttgatcgcttggaggttctaatatgtattattatccatgtacttatttctcctagttttaaatgacgaaaccttggaacactttgtattatagttgcttatttttcaactaaataaaatatatgtattatgc

SEQ ID NO: 8748 - DNA, 930 bp, Glycine max
  Clone ID: 700790657_FLI
gagaatttaccgaaaggctttcagagctgaatatgaattcccagaatggatttctccgcaggccaagaatcttatttcgaatctcctcgttgctgatcctggcaagaggtattccattcctgatataatgagggatccttggtttcaagttgggttcatgaggccaatcgcgttttctattaaggagtcttacgttgaagacaacattgatttcgacgatgtggagaacaaccaggaggaggaggttacaatgaggaaacctgccaggccgttttacaacgcgttcgagataatatcgtccttgtcgcacggctttgatcttaggagtttgtttgagacgaggaagcggtcgccgtcgatgttcatatgcaagttttcggcttcggcggtgttggcgaaggtggaggcggtggcgaagaagctgaactttagggtgacggggaagaaggagtttgtggtgaggatgcaggggacggaggaggggaggaaggggaagctggcgatgacggtggaggttttcgaggtggcgccggaggtggcggtggcggagtttactaagtctgccggagatacgttggagtatgttaagttctgtgaggagcaagtgaggccttccctcaaagacattgtttggagctggcagggtgattgatactaataataactccaacagtagttactaagtcatttctcatttctgtgtctttttttttttatagtactagtactttctatgatccatcatggtcgtggtttaatttagtttgtctttgatttgcttaatttgatttcatacatactatgtaaatttggactgtggagtttgtgacggtgtttgatttgaatatactacactacagtagtatatatatatactagcaaaaataatcccgcaaatcatggaaaagtgaaaacattgttgttcccttt

SEQ ID NO: 8749 - DNA, 624 bp, Glycine max
  Clone ID: 700790774_FLI
tctaagtaactaactaacttcatttcatttctcagttctcacccatggcgaggcctcttctcacctcttccatgcacaatcttctattctcctccatgcccatccccacacttttcttagctatactctcagtcttgtgtttattttccatcatcacttttctctgtggttctgacaaactgaagaagctccacttagaagcagagaaagaagcagcaataaaaacgaattccaaggagcacaagctgatttcgaagctgaacagcaatattggcaacagggcactctccatggtgaagatgttgtcttggaggaaagtgcaagagggagaagtggagggagaatatagtgatcaagatgaagaagccctttggaggaagaacatcttgatgggagaaaagtgtcgtcctcttagcttttctgggaagattgagaatgattctgaagagaaaaattaacacttctttttcgtttgtgttgtggagatgagtatggttagaaattgtatttgtgtggcttcaattagaacttgctaactaatttgctcagattttggacagtatctagagtttgctactatattgtaacataggaaataaacttggcaacttttttttttgtggg

SEQ ID NO: 8750 - DNA, 1961 bp, Glycine max
  Clone ID: 700790823_FLI
aataaatcaagtgtataagatgcaaaccatgttatttccatatgtgcatctatttgatggcaatttctgttgtcgctttaacaatttagattgagagttactactagttaaggattttataggttagatggtttaaattttacattgagcagtttggaacatgttattatgatcacctttgattgccccacagtgtggaactttattgcagattcagtgtatgcataaatctatttgtgcagatgttttgaattgtttaaagcaggtgcctactcgtgaagattcttaccaggttaagttttggggatttccagtggtgtaaaagaaaagaacttatggaccgactcaatggttctgccaatctaatgatagtgtccgatcttgatttcacaatggtagaccatgatgatccggaaaatcttgctcttctcaggttcaatgcgctatgggaagcttattatcgtcataattctcttctagttttctccactgggagatcgcctactatatatggagagttaagaaaacagaaacctttgttgactcctgatataacaataatgtctgcgggaactgagattacatatggtgaatccatggtacctgatgatggttggaaacagtatctagatcataagtggaatagggacatagttatggaggaaacagccaagtttcctgaactaactttgcagtcagaaacagaacaacggcctcacaaggttagcttttatttggaaaaagggaaagccccgaatgtcacgcaaactctctcaaaacgtttggaaaaccgtgggttagatgtgaaaataatttatagcaatggtatagctttagatgtattaccccaagctgctggaaaaggacaggccctagcttttctacttgaaaaattgaaggctgatgaacaaggaccaatcaacactcttgtttgtggtgattcagggaatgatgctgaactgttcactgtacctgaagttaatggggtcttggtcagtaatgcacaggaagaattgcttcaatggtatgcagaaaatgcaaggggaaatccccgaataattcatgcaactgaaagatgtgcagctgccattgtgcaagccattggtaacttctctctaggtccaaatgtgtccccaagagatattggagatttaatgtccaacaggaaagttcatagtcctagccatgaagtggtgatgttctacatattttatgagagatggaggcgtggtgaagttgagaatcctgagcagtatatacaaaaattaaaatcagtctttcattctacaggaaattttgtccatccttcaggaattgatcaacctatgcaccaaactatagataccttagcaaaggcttttggtgacaagacgggcaaagactttcgagtgtgggttgattgtatatctttagcagaggttagtttgggttcgtggctggtcaaatttgacaagtgggagttatctggtaatgagtcacggggttgttcaacaaaggctctgatgaatgcaaaggttgatgtaccagatgagtatacctggatgcacttacatcatacttggttggacgacgtaggaggacaggatgatgtgtcttggttgttatagtttcgaatcacttctgttaaaaagtactctttgctgtcaaactattcagccaaggcatgaggcacggcaatatgcactcaaaccttacatagcaataaggatttttcattttataacagttttcactttaatgaagagagaagccatgaaccgaaacactttgcaaggaaagtaaacctagatgtgcaaatgtggcaatggagagaagaaatagctgctcaaaggttgtgtttggtttctagatagaaaaaatacgtttgtcattcgaaggcagcatgaacccataatacaaagataatttatatcattcattattctagctagatattatattaaataaaaataatttaaacc

SEQ ID NO: 8751 - DNA, 726 bp, Glycine max
  Clone ID: 700790931_FLI
gttagtttcagtgtgaggaagaaagattgcagggtgagcttggaggggtgtagagaaggtgtgaaggggcctttgactattgctgctgaggtttttgagttgacaccttccttggtggtggtggaggtcaagaaaaagggaggggataaggccgagtatgagaagttttgtaactctgagttgagacccgcgttggagaatttagggatggaggaatctgcttcttcttcttcttcttgtcatcaatctacacacactcaatctgaattccaacaacatcgaacactttctgactctgcccttaacagacattcagataatgaatgtttgttcgaacgagagttaggtctagcagatgagactagtatctcacaacatggtgaatcaaagttcgaatgtcaacaggaaaatatggccatgtttactatctgaccatgtcttgagcactatgattgtttccaaagaatgaaaacaaaaaagataatgaatgcttgcattaattaaggtagcaggagaatgacagaagatgatagcatactatttctctcttgttgttttaggctgtgtgtaagttaaattttactttctttttccctcgagaattttccggcatttttaggtttgctccttgactggagcattagattctactgtatttgtatgtccaaatgttgtgtttctgtaaggctaatttaatttaaatatagtgaatgaagtgtacatgtc

SEQ ID NO: 8752 - DNA, 1503 bp, Glycine max
  Clone ID: 700791036_FLI
gtttcgttttatttggctttgattttcttctgcaaccttatctcctgcaaagctttgattactgagtctaacttcccctgccacagtttgccttgtttacctggtattctggtctctccatgtgttctgttctattgcaagggatagaagatcttaactctgtttcaatttccctgtttttcttcacaagcagagctctgtttttaactggtctttgatcaaggatggccataaaggcaattgagttgttgaaaggaagcggaaaccatgaagagatatttgaagttcttgcagcagtggctgcatctttgggggatgtaatagatgatgtgaacactttgcaggtaacacctttaaagggggcaatgaccaatgaggtttttgaggtaaattggccaaccaaaagtgatggtcatcaaagaagggttcttgttcgattatatggtgaaggtgttgaggttttcttcaacagggtggatgaaatccaaacctttgagtgcatgtcaaagcatggacagggtccacgccttcttgggaggttcaccactggcagagttgaggagttcattcatgccaaaacactctcagctgcggacctccgtgaccctgaaatatctgctttgatagcatctaagatgagggagtttcacaatcttcatatgcctggtgcaaagaaggctcagctttggcagagaatgaggaagtggcttagtcatgccaaaagtttgtgctcccctaaagaaaccaagaattttggcctggacaatctagatgctgaaataaatatgcttgtggagttgttatctcaaggaaatcaacagattggtttttgtcacaatgatctacaatatggtaacataatgatggatgaagatacaagagcaatcactttaattgactatgaatatgccagttacaatcctattggatatgatctggcaaatcatttctgtgaaatggtggcaaattaccatagtgacgaacctcatgttcttgactacagtaaatatcctggtctggaggagcgtcaaaggtttgtttataattatttgagttctgaaggtaagaaaccaagcaatagtgaagtggatcagctagtgaatcttgcagaaaaatacactcttgcaaaccatctattttggggcttgtggggacttatttcgagtcatgtcaatacaattgactttgactacaaggagtatgcgaggcagagatttcagcaatactggttgaagaagcctactttattggactcaccaagtatcgtttcccaagatgggattgccaatggtgtgaaccattgacatggatgcttcttatgtatttagcatgttcagcttggtatgtgttgactaatatatagaaaggcatgatgtgatgcataaaatttgtaaataatatataactaaaaatgtgtgatttgagaatttttacaacagttatgttagtaatccctccttttgtgataagttgaggaatggaagtgagaattcctagtttgtt

SEQ ID NO: 8753 - DNA, 1631 bp, Glycine max
  Clone ID: 700791043_FLI
gttaaaagccttagccttccctacaactccaaacacaaagacatcatcatccatggctgcctccgtctccactgtcggagctgtcaacagagctcttttgaacctgaatggttctggagctggagcttcagctcccagttcagccttctttgggaccagcttgaagaaggttattgcctcaagggtccccaacagcaaggtttccggtggaagcttcaagattgttgctgtagaagagaagaaagagattgaagagacccagcagaccgacaaggacagatggaagggtcttgcctatgatatctcagacgaccaacaagacatcacaagaggaaagggtttggttgactcccttttccaagctccacaggatgctggaactcactatgcagtcatgagctcctacgagtacctcagcactggacttcgccagtacttggacaacaaaatggatggattctacattgctccagcttttatggacaagcttgttgttcacatctccaagaacttcatgaccctgcccaacatcaaggttcctctcattcttggtatctggggaggcaagggacaaggaaaatctttccaatgtgagcttgtctttgccaagatgggaatcaaccccatcatgatgagtgctggagagttggaaagtggaaatgcaggagagccagcaaaactgatcaggcagagataccgtgaagctgcagacatgatcaagaagggaaagatgtgcgctctcttcatcaacgatcttgatgcaggagctggtcgtcttggtggaaccacacaatacactgtgaacaaccagatggtgaatgccactctcatgaacattgctgataaccccaccaatgtgcagcttccaggtatgtacaacaaggaagagaacccccgtgttcccatcattgtcaccggtaacgatttctcaacactctatgcacctctcatccgtgatgggcgtatggagaagttctactgggcaccaacaagggaagaccgcattggtgtttgcaccggaattttccgcactgatggtattcctgaacaggacattgtcaagcttgttgacaccttccctggccaatccattgatttctttggtgcactgagggccagagtatatgatgatgaagtgaggaagtggatttctggtgttggtgttgacagtgttgggaagaagcttgtgaactcaaaagatggacctccaacctttgagcagcccaagatgactctggagaagctcttgctgtatggtaacatgcttgtccaagaacaagagaatgtcaagagagtccaattggctgacaagtacttgaacgaggctgctcttggaaatgctaacgaggatgctattcagaggggaactttcttccagtcttgaattggaggcaaagcaaacttggcaagtaaatatttctgttcgtgaaggttgttgtactaatccaagtgctagaagttgtgatggaacttgcgtgtaacattcttagcattctcaatgtcttaggtgcaaagagaagatgctaagtttgagatgatcttactatatttttcatattggaccgtcttcctctataattttgagttacagtgtccacttaaattgaatttggtgccttttccttttgtcc

SEQ ID NO: 8754 - DNA, 1235 bp, Glycine max
  Clone ID: 700791071_FLI
tgtcgaatcaatactgtataaactacttgtggcagcagatttcaatgttgcagcagctcaacaaggaataatttacattgatgaagttgacaaaataactaagaaggccgagagcttaaatatcagtcgggatgtttctggtgagggtgttcagcaggcattattgaaaatgctggaaggaactatagtaaatgttcctgagaaaggagctaggaagaatccacggggggataacattcagatggacacaaaaaatattctttttatatgtggtggagcatttattgatcttgaaaaaaccatttcggagagacgacaagattcttctattggttttggagccccagttcgtgcaaatatgagagctgttggaataacagattctgcagtaacatcatctttacttgagtcagtggaaagcgctgatcttattgcatatggcctcataccagagtttattggacgattccccattttagtcagcttgtcagctttaactgaagaccaacttacgatggtcctcactgaaccaaaaaatgctcttggcaagcagtacaagaaattatttagcatgaacaatgttaagttacacttcacagagaatgctctaaggctgatagcaaaaaaagcgatggccaaaaatactggtgccaggggtttaagagccctactggaaagcattttaaccgaagccatgtttgagattcctgatattaagacaggaagtgaccgagttgatgcagttgtaatcgatgaagagtcagtaggatcactaactgcccctggatgtggagggaaaattcttcatggagatggtgctttaaagcagtacctcgctaagatgaaggattcagcggtgaatgtagacgtaggtgaatcagatttacaagagggggatttggagctttcatcaagagccattagcttgtgatattactacatctaccatattcggggtataatttatcattgtcattgttatttgtaaaaatcacataaaaattgctgtaattatccctttgtataacagcatagctactggtctaagttcactggataggaaagaaataatagaagataaagaaaggagtagtgtagcattgctaatttaggcagcacatcatacaaaatttcaattattttttaggaagtctcactgaagacattttttcctttgtactagatattactagatttccactgagcaatttacatattatggatttattgtaagc

SEQ ID NO: 8755 - DNA, 977 bp, Glycine max
  Clone ID: 700791189_FLI
ctctctttccctctctatctctatctctctttctctgtctcttttctggttgaagtttgaaagacaaatacaccatggcagatatcctgagtgaagaacagattgttgattttaaagaggcctttggcttgtttgacaaagatggagatggttgcattactgtggaagaacttgccactgtcattcggtcattggatcagaaccccactgaagaagagctccaagatatgataagcgaagtcgatgcagatggcaatggaaccattgaatttgacgagttcttgagcttgatggccaagaaagtcaaagacactgatgcagaggaggagctcaaagaagctttcaaggtttttgacaaagatcaaaatggctacatatcagctagtgagttgagacacgtaatgatcaatctaggggaaaaactaaccgatgaagaggtggagcagatgattaaagaagcagatttggacggtgatggccaagttaactatgaggaattcgtcaagatgatgatgaccgttcgatgaaacactctcacctaattaattggattggacacagatttgttattcaaaattcattggcttccaacctcccaagaaataagtgttctttctttattattgtttgttgtattgtactattattctacttgtacttagtaatgaccaagcagtagattggcacccccattccatttgatccattccaaaattaaattactattcttgtaattttagttcagtacattttctatcctccgagagtaagaaacccaaggagcatatctaccattaattatgcatgacttttaccaagtgccatagttctcatactttaatcaaatggtggctggtgggtgtgttccatggattaagaaaatttctgaatcacggacttggaaaatggacctgcacataaatttaatgctacattaaatttataataaaaagattgattcttgttttccatgatct

SEQ ID NO: 8756 - DNA, 2204 bp, Glycine max
  Clone ID: 700791194_FLI
cttcaccccaagctgctgaactgttcctcaagacccatgaccttgtctttgctagtaggccacctcttgaggctgaaaaacacatctcttgggggcagaggggaacttaggctttgctgaatatggttcttattggagcaacatgcggaagatcgatccaaaattagtttgcatgtttattgtaagtggccagactcagggctttttagtaatcgatttgggctgaggccgtatgcgtaaattcaatctgtgctatctctctcactgttggttcccatgtctagtctatcttcttgctcttcttctccttcatttgcagcaagttacggcactattacccatccacgcgcggccccactgagtcgaatttcatgcggtggtccgagaccccctaagagcaagaaaagcaacctcaattcagaagcgcaagagcttgttcgcttactcacgagcaagataagaagcaacgacaaagaggttctgctgaagaccttgaacaagtatgtgaagcaggtccgaacccaacattgcttcttgctcttcgaagaactcggcaagcacgacaactggctccaatgccttgaggttttcagatggatgcaaaaacaacgatggtatattgctgataatgggatttactcaaaactgatatccgttatgggaaagaaagggcaaaccagaatggctatgtggcttttctcggagatgcgtaatactggttgtcgtcctgatacttctgtctacaatgcgctaattacagctcaccttcgttcacgggacaaaataaaggctttggctaaagccattggctactttcaaaagatgaaaggaatggagcgctgtaagcccaacattgttacttacaacattcttttgagagcttttgctcaagctcggaacgtggagcaggtcaattctttgtttaaggatcttgatgagagcattgtttcgcccgatatttacacttttaatggtgtgatggatgcatatggtaaaaatgggatgatccgtgaaatggaagcagtgcttgctcggatgaaaagcaaccagtgtaagcctgacctgattacctttaacttgctgattgattcctatgggaagaagcaggcgtttggtaagatggaacaggtgttcaagagtttgttgcactccaaggagagaccatcactgcccacgtttaattcaatgattttaaactatgggaaggcacggcttaaggataaagcagaagatgttttcaagaagatgactgacatgggttacacgctgagctttgttacacacgagagtatgatctatatgtatggcttctgtgattgtgtctccagggctgcacaattgtttgatgagctggttgagtctaaagttcatataaaagtttcaaccctaaatgccatgcttgatgtttactgcttaaatggtttaccgcaggaagcagattcactgtttgaaagagcaattagtataaaaatacatcctgattcatcaacatttaaacttctttataaggcttacactaaagccaaccagaaggagcttcttgataaattgctgaagcatatggataaagatggtattatcccaaataagaggttcttcttggatgctttgggtgctgttgcgtctttaccagcaaattcagaatctgctaatgctgcaactgattcaaacacagcaaattcagaatctgctaatgctgcaactgattcaaacgcatcaaattcagaatctgctaatgctgcaactgattcaaacgcatcaaattcagaatctgcttatgccgctactgactcaaacaacccccaagattttgcaaagttggcaactggtgtgaagaatattttggctcatcgatgacttgcatacaaacagctcagttctcgtgagatggtatggatgtatttccattttccagctcattgccccttgtcttggcactatggtctatgaaatgaagaacgcttcagacctgacagctgccaaagctaattagttgatgacaaccaatccaaaaagagcagacttgctgctggaaagcaatgtgtaaatctgtaactaacaaaattgagttattatcaatgatgttattgataattcatgtacaattatccttctgatgtaatttgaaatcattactaaaaagattgacttgtcatgttttctgcacagtactgaaaataaccgagtaatgaaagaatttgttg

SEQ ID NO: 8757 - DNA, 1670 bp, Glycine max
  Clone ID: 700791212_FLI
ccaaagtgcttctctcctctgtctttttctctctcttgctatccttttggctagtggcactgctgcaagtgcaactccaagaagcgcagtgccaagccaccatgtttcaacattcaacagaagcctttttccttccacttttctctttggaattggttcttctgcttaccaggcagaaggagcagcaagtgtagatgggagaggaccaagcatatgggacacctacactagacagcatactgaaaagatttgggatcatagcaccggtgacatgggagctgatttttatcatcgatacaagggtgacataaaaatagcgaaagaaattgggctggactctttcagattctctatctcatggtcaagaatattcccaaagggcaagggagcagttaacccccttggggttaaattctacaacaatgtcatcgatgagatcctagcaaatggtttaaaaccttttgtcactctttttcattgggactttccacaagctcttgaagatgagtatggaggattccgtagtcctaaagtagtggcggattttcgtggctacgcaaacttctgcttcaagacctttggagacagagtcaaatattgggtcactttgaatgaacccttatcatttagtctcaatggctacaatggtggcacctttgcaccaggtagatgttctaaatacgttgccaattgtagtgctggcgattcatccactgaaccctatatcgttggacactacttattacttgctcatgaatctgctgccacattatacaagacaaaatatcaggctcgtcaaaaaggacaaattgggatcactaatccaacacactactttttgccaaaatctcaaagtgctgcagattacaaggcagcaagtagagctctggacttcttctttggttggtattctgatccggttttctatggtgactatccggagagtatgaaatcttcagtaggttctaggctcccaaaattcacaaaagctgaatctgaaggtctaaaaaattccatagattttcttggtgtgaattactacaccacttattatgcggaacatgctgaacctgtcagtgccaaccgaaccttctacacagacatactagccagtctcagtacggaaaggaatggtctacatgttggaaccccgactgatttgaattggctctttatctttccaaagggaattcatcttcttatggcacacataaaggataaatacaagaatcttcctatttacatcactgaaaatggcatggctgaatcaaggaatgactcaataccagtcaatgaagcccgcaaggatagtataaggattagataccatgatggccatcttaaattccttcttcaagcgatcaaggaaggtgttaatttgaagggctattatgcatggtcattttcggacagttttgaatgggatgctggttacacagttcgattcgggctcatatatgtggattacaagaacaacttgaaaagataccccaagttctctgctttttggttgcaaaagttccttctcaagtgatctgaatttagtgttcctttgacatgtctagtgtttttcttgtttatttccctagatttcatcgtatatcacttgtgttggatgtaatcaagagatcattttatcaaataaataatgccaaatggcatgtcgaagt

SEQ ID NO: 8758 - DNA, 789 bp, Glycine max
  Clone ID: 700791340_FLI
cagtaaacaacgaccatgaaactaatgacagcaacaacaacgtttgatgtctctgccacatgcttccgtgcccctcctccttcgtgctcaatgaatccatgccacaccagtttttcagttataaactccctgaatcctcacaagggacgacggataagcgttgctgttccacccaagtttccaaacttccggagggaagcatctctgcaggggaatttggaggctattagagtcccaacttcggtgcctgtgcgtgtagcatacgagcttcttctagctggtcatcgatatttggatgtaaggaccccggaagagttcgatgctggacacgctcctggcgcaattaacattccttatatgttcagagttggatcagggatgacaaagaacagcaactttattagagaggtgtcttcacagtttaggaaagatgatgaaattattgtcgggtgtgagcttggtaaaagatctatgatggccgcaagtgacttgctagctgctgggttcactggactcacagacatggctggtggttatgctgcatggacacaaaatggacttccaacagagctatgaagtgtttctgttggaactgtagctgtaaatagaataagttttgggaggagtccaatgcatggaaatgcagaaacacttcaccaagacagtgacaatctgacactgggaaaacaaaaatctataaatggaaaattaaatgtatttgtcgatatcaacaataaataaaatgttaatatttatccaactttgcaaagaaactctatttcctggctg

SEQ ID NO: 8759 - DNA, 730 bp, Glycine max
  Clone ID: 700791347_FLI
tattgatgtgcagcatcagtgagaaagccaaaaggaagcgccaatctgcattccgcggagtgcgcaaacgcagctggggacgctacgtctctgagataaggctcccgggccagaaaacacgcatatggctcggctccttcggctcgcctgagatggcggctcgcgcttatgactccgctgctttcttcctcaaaggaacatctgccactcttaatttccccgacctcgtacactccctgcctcgacctctctcatcttcccggagggacatacagtccgccgcagctgaagccgctctccactctccgcctcccaaagaagaacaagaatctattttcacttccaccaccacctcgtcctttcacgatgtcatggaagctcctcttatgagtccccttagggtggactccactttcggagatttctcatgggaccaactcttcgatttcaacgatgacattctcatcgtgggatcaacttctgccactcttgtcccttaacgctgcttttgcaattcgccacccactgcttctagaaactagctggattttctttcactttctgttaataactcttctctgcttttctaagacttgcttctgaactcttgtacaaaggagctctccaagacaaatatatatatatatatatatatatatatatatatatatatatatatatatatatatatatgtttactgagagactgatttcactaagcaccttaatt

SEQ ID NO: 8760 - DNA, 1315 bp, Glycine max
  Clone ID: 700791514_FLI
cgttcttttccaatgcaagtagtaagcgacgaagccatcatgacgacgagggtgcaatccctcgcccaatcgggtctctcccgggtcccaccccaatacatccaaccccctcaaacccgacccatccgtcacgccccacccgaatccgactccgaatccattccggtcatcgacctctgctccttcgaccccacccaacgcgcctccacccgcgactccatcgcacgcgcctgccgccactggggcgccttccacgtcaccaaccacggcgtccccccttccctcctcgcctccctccgccgcgccggcctgtccttcttctccgacacccccatgccggacaagctccgctactcctgctccgccgccgccgcctccgagggctacggcagcaaaatgctcgcaacaacaacaacaacaacaacctccgatcaaaacggcgccgttcaggtcctcgattggagggattacttcgaccaccacacgctccccctctctcgccggaaccctacccggtggccggagtctccctccgattaccgtgagctggtggcgaggtacagcgacgagatgaatgttctggcgcaaaagttgctggctttgatttcggagagtcttgggttgcgagcttcgtgcattgaagatgctgttggggagttttatcagaacattacgattagttattaccctccgtgccccgaaccggatcttactctcgggttgcaatcgcattctgatatgggagcaatcacgcttctgattcaggatgatgtggggggtcttcaggttctcaagggtagtgacaagtgggtcactgttcagcctttgtcagatgctgttcttgttctattggctgaccaaactgagattataaccaatggaaagtacaggagctgtgagcatagggcaattactaatcctgatagagcaaggctctctgtggcaacatttcatgaccctgctaagacagccaagatctcccctgcttctgaactgataaacgactcatcgccggctaaataccgtgatgttgtttatggagactatgtttcatcatggtataccaaaggccctggaggaaaacgaaatattgatgcacttgtactggattcttaggttaatgctttcttctctccatgtcttcatgtcttgtatcttgtgggtgaaaggaagtaaaattaccgtcttctgccaaaaagttctgataccaactttcatatgaatctcggaatccaactcaaactgagaatggcaccaatttgtcaatttgaacaataagttattcaaagtataatagaaattgatatttgattgt

SEQ ID NO: 8761 - DNA, 704 bp, Glycine max
  Clone ID: 700791540_FLI
ctatggacaacattactctcttctctataataactgtaatgtccttcttcttgttagcacctgtggctatcttcatggagggtgtcaaatttacccctgcttacttgcaatctgctggggtgaatgttagacaactttacatcagatctcttcttgctgctctctgtttccatgcgtatcaacaagtttcgtatatgatattgcaaagggtatcacctgttacccactctgtgggtaattgtgtgaagcgggttgtggtcattgtgagctctgtcatcttcttccaaacacctgtctcacctgtgaatgcttttgggactgctatagctcttgctggagttttcctctattcaagggtgaagcgtattaaggcaaagccaaaaacagcttaattttcaatggtaaaattttgttagttccattgaggaagccaaatagttgcaatctgcaattctgaatttctttgtaggtgagatagggaatgaggattatctttattgatcctcagtcctcacatttcccttttatttcttctccttaagttaccttgtggatttcattatttatgtttgagtaagtgcctaatggttctgctccatgaaaaaattatcctcttctgaattttgcttaaataggtgtgtttttaattatcattttcgtacaagcatatatgtaatcagccatagattttttaaatgatgtgc

SEQ ID NO: 8762 - DNA, 290 bp, Glycine max
  Clone ID: 700791582_FLI
caaccatagatgtggccgcatcagcaggggcaaactgcattgttgctggaagttcagtgtttggtgcccctgagccagttcaagtaatatccttactaaggaattctgttgagaaagcccagcaaaccttgatacagtaaaaaaaaaatgtcgttttaagttgcagtacacttcacaactttgcataaacaatatgcttaatgtttaacattttccataagttgaataaaagatcatgtgacttgataatgtttattcatatttctatatcaagtgtgcagttcataaat

SEQ ID NO: 8763 - DNA, 809 bp, Glycine max
  Clone ID: 700791661_FLI
caaaaacttccggggcaaggttgctgattttggtttgaccaaactgacagaagttggaagctcatcgcttcccactggtcgtcttgttggaacatttggatacatgccaccggagtatgctcaatatggagatgtttctcccaaagtagacgtgtatgcttttggagttgttctttatgaacttatttcggctaaggaagcaattgtcaagacgaacgattctgttgccgactcaaagggcctcgtagctttgtttgatggagttcttagtcagccagatcctacggaagagctctgcaaactagttgatccaaggcttggggataactacccaattgattcagttcgcaagatggcacaactagccaaagcatgtacacaagacaatccccaactccgtccaagtatgagatctattgtggttgctcttatgacactttcttcaactaccgacgattgggatgttggttccttctacgaaaatcaaaatcttgtgaatcttatgtccggaagataggatgataccagattaattgttttgcatttacaattatatgttttggaccaattttgggcaacacaaaaaattgttgaagcgaatgatgtgtgtaaaatggacataggaataaggaatttgtagatttttactagtcaggactcagtagaaagagtgtctagtttaacaattttatgataattcataaccaatgcacaaagtatgaatagtgttttgttttgagagatgcatgtttttctacccagttacatttatccttgtaaatttgtataataaattctatttgagacct

SEQ ID NO: 8764 - DNA, 680 bp, Glycine max
  Clone ID: 700791740_FLI
agcggctctatatggtagagcagtgccaggaactgttctggtgaggcagttaaaaaagttgccgagaaacaaatgctggcttgttggatattcaaaggcagaggcggatgctatggaaatagcaagggaattcaacaaagaatgggaaacaaatttgaggattggccttcatgattgtcgcgattataccaatagtaagaatttatttcagaccttatgttgcctaagcccttttatggaaagaactatatgttagtgtatgttattactttagtacttgatcaatctgctctaatgccatttcactgaaattgtgttaatcgcataggggaaacttagatggtcgatttagaaattctatcatatagtattctttactatattggttttgttttattctaccacgaagtattgaatttttctggtcaattaaaaggtttggttaggcaactcactggcgaaaaagatgtgctgaaacgtttgagaaacgttggtagttagagggaatccgttgtctggttagaagatcactttattgaattactttatcttgtatcatgccttcaacatttttgagcacattcatcgcttcacttggatgggaactggctaaacatcgctttactttacccttctgtaacgttcttttcttatgcgaaaaatcttatgctatttacttt

SEQ ID NO: 8765 - DNA, 903 bp, Glycine max
  Clone ID: 700791911_FLI
gaattagctctttcttcattgaaccaatgtgtaaatggatgggtgcaaaattagtatgggcactgagcaattttatcgtctttgtttgcatggctagcactgctatcattagtcttatttccataagagattattctggagggatagaacacgtaattggagcaaatgaagcaatcaagattgcttccttggttgtgtttgttcttcttggttttcctcttgcgattacctatagtgttcccttcgctgttacagcagagttgactgctgattcaggaggtggccaaggattggctataggagttcttaatcttgcaattgttattcctcagatgattatatcccttggttctggtccttgggatgctctctttggcggtggcaatattcctgcatttgttttggcttctttgtgcgcccttgctggtggtgtcattgcaactctcaaactgcctgatctctctagtagttcattccagtcaacaggatttcatattggctagccattggaagatctaacctgataatattttaacctgtacatggtcctttgaaatcgggagtacacccaaaatatggagagccggcacggtgattgcgtgttgtgttgcttttcaaccctcagaaggcgcatgccatattcaaattcattcatttttccccccacgttgtgggtgtctgtattttatataatgtaactgactgcacacagtagaagaaaaagcttaggtgcatatagtaacacggctttgtaatctgctattccctcatgcgttgtttggacgacaagtgaaatatagagggaacaaaaaataagagatagaggggatggaaatgaaaaatagaaaaatatgttgtttagatgaatagcaataaaaggtttttttttggttcatttggatg

SEQ ID NO: 8766 - DNA, 1318 bp, Glycine max
  Clone ID: 700791918_FLI
cttggctcataacaacttgacaggccagattctgcaatgcctggcaacatttccttctcttttggcattggatttgcaaatgaacaacctttatggaaacataccttggaacttttctaagggaaatgcattggagactataaagttgaatggcaaccaattggatggaccattaccatggtctttggcccactgcacaaatctggaagttttggacctggcagacaataacataaaggatacatttccccattggctagaaagcctccaggagttacaggtactcagtttgcgatcaaataagtttcatggtgtcatcacttgtttcggtgccaaacatccatttctcaggctgagaatttttgatgtctcaaataacaattttagtgggtccttgccagcatcatacatcaagaactttcgaggaatgatgagtgtgaatgacaaccaaactggttcgaaatatatgggtaaccaatatttctataatgattcagtagtggttgtaatgaaaggtcaatacatggagctcgagaggatattaactatttttacaaccattgatttatcaaataatatgtttgaaggagaacttctgaaagtccttggcgaattgcattctctcaaagggcttaacctttcgcacaatgcaatcacgggtaccattccacgatcctttggtaatttaagaaatttggaatggttggacctctcgtggaaccagttgaaaggagagattcctgtgtctttgatcaatttgaattttctggctgtgttgaacctttcacaaaaccagtttgagggtatcatacctacaggtggacagtttaacacatttggaaatgattcctatgcgggaaatccaatgctatgtggattccctttgtcaaaatcctgcaataaggatgaagattggtcaccacattcaacatttcaccttgaagaatcaggatttggctggaaagctgtagcagtgggatatgcatgtgggtttctatttggaatgcttttgggatataatgctttcatgactgggaaaccacaatggctcgcgagacttgttgaaggtgtgcttaattaattaatgaagagtgaaaaggacaaatcatagggaaaggaaatagtttatccttagtttaatatggttctttggtgtgtgtctgtatgttttctgtaattttaacttatgtcctttgtgtaacaaatcacatctctcttgactcgagtgatgtatttcaagttgtttaaaaataagaaaaaaaaattgatgatagtagatatcaaaatgagtggtcatcccatgtgatgatattggctc

SEQ ID NO: 8767 - DNA, 2212 bp, Glycine max
  Clone ID: 700791930_FLI
tgcaatgattggtgaaatttcactcgaagaacagcatcttagaattgagaatgctagattgaaggacgaactagaccgtgtttgtgcactcgctggcaagtttttaggtcgacccatttcatctctaacaggctcaattgggcctccattgccaaactcaagcttggagcttggtgttgggagcaatggttttggaggattaagcactgtgccttcaacaatgcctgattttggggttggaatatcaagccctttagctatggtgtcaccttcaagtactagaccaaccacaacagtaacaacaacattggtgactcctccttctggctttgacaacagatcaattgagaggtctattgttcttgaacttgctttggctgcaatggatgagttggtgaagatggctcagactgatgagcctctttggatcagaagcttggaaggtggaagagaaattctcaaccatgacgagtacacaaggactatcactccttgcattggcttgagacccaatggctttgtcactgaggcctctagacaaactggcatggtcatcataaacagcttggcccttgttgaaacattaatggactcaaatcgttggtcagagatgttcccttgtatgattgctagaacctcaaccgctgaagttatatctaatggaataaatggaactagaaatggtgcccttcagctaatgcatgctgagcttcaagttctttctcccttggttcctgttcgtgaggtcaattttctacgcttttgcaagcagcacgcagaggggttatgggcagtggtagatgtgtccatagataccatccgagacacttctggtgcacccacttttgtgaactgtaggaggcttccttctggttgcgtggtgcaagatatgccaaatggttactctaaggtgacatgggtggaacatgcagaatacgacgaaagccaaattcaccagctctatagacccttattgagctcaggcacggggtttggtgcacaacgttgggttgccactcttcaacgccaatgcgagtgcctagctattctaatatcctcagcagttccctctagagaacattcagtaagttcaggtggaaggagaagcatgttgaagctggcacagcgcatgacgaacaacttctgtgctggtgtgtgcgcctcaacagtgcacaagtggaacaagctgaacgcgggaaacgtgggggaggacgtgagggtgatgacgaggaagagcgtggatgaccccggtgaaccgccggggatcgtcctcagcgccgccacctcggtgtggcttcccgtctcgccacagaggctcttcgacttcctccgtgacgagcggctccggagtgagtgggacatcctctccaacggtggaccaatgcaagagatggctcacattgccaagggacaagaccatgctaactgtgtctccctccttagagccagtgctataaatgcgaaccagagcagcatgttgattctgcaagagacgtgcacagacgcgtcggggtcgcttgtggtgtacgcgccggtggacattccggcaatgcacgtcgtgatgaacggcggcgactctgcttacgtggcgcttcttccgtcggggttcgccatcgtgcccgacgggtccgtcgaggagaacggtggcgcgtcgcagcagagggcggcgagtggcgggtgcctcctgacggtggcgtttcagattctggtgaacagcctccccacggcgaagctcacggtggagtcggtggagacggtgaacaacctcatctcctgcaccgtgcagaagatcaaatcagcgcttcactgcgaaagctgaaagtcacgtgactctggctttgtctattattattattattatttttgttttggagaatttaggttacattttgtagttaaaggtggcgcgtgtgaaggacgcgaggggtgggggtgttgagtcaagaacgaaccgcgcgtgggtgagagaactccttgcatggtgatatgaggatccgagaccttttccgggttgggttaggattttcaacacaaagcaagggtggtggttcgggtattgactcgggtcgacccctttgtttgctccatacagtagcagaagaaggggaaaaaaaaatgaatagaaatgtgagaaacaaaaaggaacaaaattgtgtttctggttaggaatatttattgtaagttatcatcattttgatttgtattgacttgg

SEQ ID NO: 8768 - DNA, 1206 bp, Glycine max
  Clone ID: 700791932_FLI
cggatgagaacaagattggccaaggtggatttggggtggtttataagggtgtcctccctagcggacaggagatagctgtgaagaggttgtcagtaacctccttgcagggtgctgtagagttcaggaatgaagctgctcttgtggccaagcttcaacatagaaatttagtgagactattgggattttgcttggagggacaagagaagatccttatctatgaatacataccaaacaaaagtcttgattactttttatttgaccctgcaaagcaaaaagagttagattggtcaagacgctacaaaattatagttggtattgctcgaggaattcagtatttacatgaagattcccaacttagaattatacaccgggatgtcaaagctagtaatgttctattagatgaaaatatgaacccaaagatttcagattttggtatggcaaaaattttccaggcagatcagactcaagtaaatacaggaaggatagttgggacttatggttacatgtctccagaatatgcaatgcgtggacagttctctgtgaaatcagatgtgttcagctttggtgtcttagttttggagattgtgagtggcaagaagaacactgacttttatcaatcgaatcatgctgatgaccttttaagccatgcgtggaagaattggacactgcagacacctctggagttgctggatccaacactgagaggttcttattcaagaaatgaagtcaacagatgcatccatattggtttattgtgtgttcaagaaaatccatctgataggccttcgatggccactattgcacttatgctgaacagttattcagttaccatgtcaatgccacaacaaccagcatcttttctgcgtggaagaggtcctaacaggttaaaccaagggatggactctgatcagtctaccaccgatcagtctacgacttgttcaattccatggtctgtgaatgaagtatccattactgatgtataccctcgctaaacgatggtttttcatgtttccttcaatcaatccagtgtatgtccaaatcttttcaaactttggggctactcttaaacagacctagcagatatatactgtaaatattaatggctaaaagaattatgtccctacttcatgctggatgccccaggagagaccagaataatttgcaatcttgaccaattttgtgtttgaaatgtagtgttgatttgtt

SEQ ID NO: 8769 - DNA, 594 bp, Glycine max
  Clone ID: 700791933_FLI
cagctggattaatctatgtccggcagtggaacaacatgcagtacgtttcaacagcagcatttttgctctcaatatactctgatttccttcaaagcacaaatcaaaagctcaattgccatgggggcacagtggaccatgaagaaattcttaattttgctaagtcacaggctgattacattttggggtccaacccaatgaacatgagctatttagttgggtatggccctaactaccctaaaagggtgcaccatagaggggcatccattgtgtcatacaaaaagaataaagggttcatagggtgcactcaagggtatgataattggtatggtagccaggcacctaatcctaatgttctggttggggctttggttggagggcctgatgggaaagacaattttgaggacagaaggaacaattttatgcagactgaggcgtgcacatataatactgccccattagttggtgtttttgcaaagttcttgcatatagaaaaccaaaaactggttcatgattgtaattcacatttggttgcctccttcaaatgatatagtccttcaaataatatagtgaattaatacagtatatgtttctcat

SEQ ID NO: 8770 - DNA, 1852 bp, Glycine max
  Clone ID: 700791963_FLI
aaaaattcgctaatctctgacctcttcttcacatcttcctccattaatacccttccctctctctcccatggagttgatctacctactctatctggttccaacgttgtacgcgtgtttcctcatatggaagatgttggacgagagaagggacagggagtgttacatcttaaactaccaatgctacaagccccccaacgacagaatgctcggcaccgagttctgtggcaagcttatcagacgcaccgaaaacctgggccccagcgagtaccgcttcctcctcaaagccatcgtcagctccggcatcggcgaacaaacgtacgccccaagaaacatcttcgagggccgcgaggccactcccacgttgcgcgacagcatcggagaaatggaggagttctttcacgacagcattggaaaactcctcgcgaaatctaacgtctccccctccgagatcgacgtcctcgtcgtcaacatctccatgctcgccaccgtcccttccctctcctctcgaatcatcaaccactacaaaatgcgccacgatgtcaaggtctacaacctcaccggcatgggctgcagcgccagtctcatctcaatggacatagtcaaatgcattttcaagacgcagcgcaacaagctcgcgctgctgatcacttcggagtctttaagtccaaattggtatacgggaagcgacagatccatgattctcgcgaactgtctcttccgttctggcggctgcgcgattcttttgacgaacaaaagatcgttaaaggacaaagccatgctgaggttgaagtgtttggtgagaacgcatcacggtgctagagaagaagcttatggctgctgtacccagcaggaagatgatcaaggaagactcggatttcatcttgggaagactcttcccaaggctgccacccgagccttcgttgataatcttcgagtcatagcacccaagatattacctatccgtgagttgctcaggtttttgttcgtgtccactattaaaaaaatcaacaagagtagtaacgctcccaagtccgttgcgagcaccggagcgacaaaatcaccattgaacttccgaaccggggttgatcatttttgccttcacaccggaggaaaggcggtgatcgacgggatcggaatgagcttggatctgagcgagtatgacctggaaccggcgaggatgacgctgcaccggttcgggaacacgtcggcgagtagcttgtggtacgtgctatcgtacatggaggcgaagaagaggctgaagaagggggacacggtgttcatgataagctttggtgcgggctttaaatgtaacagctgtttgtgggaggtgatgaaggacttgggggaggcgaatgtgtgggacgattgcattgatgagtacccaccagagtcattggccaaccccttcatggaggcctatggttggatcaatgaagttgatgatccgtacacttacgaacatcttccagaatttctcaagtgattattgttgatgttgtgtagtaggattatgcatgttggccagctacaaagaaaaaaaataaaaattaaaagggaagggaccctctgattctttagatctctctttacaggtgcatcgatgtaattgtgcattaaatttttctgtaagctatacacttatatattattattattgaacccgggcctctagggttcattacccaataaggtgtgtgctgcttcttgccacaccgtcaaaagggtacgtattatggtttttttttttttaactttggtttgcattatttgtttaaatgtgttataataacgagtttcttcttttttttctgacaaaaagaaaacgacaaaaatatctgtaattgttttggtt

SEQ ID NO: 8771 - DNA, 1937 bp, Glycine max
  Clone ID: 700791980_FLI
gtagctgctgggttgcaggtgcttcaagaaaagaacctcatccatagagatttaaaaccacagaatttactgttggcaactactgcagctacaccagttatgaaaataggggattttggttttgcaaggtctcttacaccccagggattggctgatacgctatgtggttcaccctattacatggctccagagataattgaaaatcagaagtatgatgccaaggctgatttatggagtgttggggcaatattgtatcaactagtgattgggaggccaccatttgacggaaatagtcaattgcagctttttcaaaatattttggcatctactgaactgcactttccaccagatgcattaaaagtgctacactctgattgcttggatctttgcagaaatcttttacgtcgaaacccagatgagagattaacattcaaggcattcttcaatcacaatttcctacgggaacccaggccaaccatgaatgttgagcagtttcaattacaccaatcagaaagattaacaaatcatcaattaggtggctctacctccgagaagatttctgaatcacattctaagtataatccaatggtagtcagttcagctgctgatgaaaccatgctgttgcaaagaaaggatggcaagattacagctggtactacgaatgctaaagtttcccatttaatggagtccatcgagaaagattatgtctttgtcaattcccatttcgcatcattggaggctttctctgactactttgaagcatctgtgcaagatagttcctcgcacaggatttctctgtttccttcaaagaggactaatatggaggttagagatgcaaaacaaacaaaggatctgccctcttcctccactgaaggattagaaaatttaaaaagcaataaacttgaggcatgtgcagcttcctgtgaatttgctgccttaaggaaagaacatcaaatttccccactgcacccttcaaacaggttacagttgttgcatcagtatgtgcagatcattgctgaactttcacaagaaaagtataacacaggactgtatctagagtctcttgcagttgagttggtggttttggctatatggaaacagactctagaaatttgtagctcttggatggcctcaattacaaagagtgagttgcctggaagcagttcagctaatgaatccatatctgccagagatattaacttgccacagtctacagaacagaaaataaattttagtgatccttcatctatctccctgtgggccaaacatgagtttattgatgcagttgatcgtgctgagaaactatcatgtcatgttcaaaatatggataaggcaactgagatgccagatgcaatggaaattatattccaaaaagctctcttaattgggacaagtggtgctgtagatgaatatatggagatcagagatagggctgctgcatcttactcaaaagcgatgcttctactttcatttattgtggcagaagcagagaaccttccactgaacccaccattttcacttgttgccactaataaggagcgaatctcacaatatattcacagcttgcagtctcgtaaagaatcttcatcagagtcctcttcaaagaaagtgcttatacttttatcaaagtaaattactggtttttatagtttgtcttttcatcaccacttttggaatcggtgaagcaatttgttgctgacatcaatgttgacttcctgtgatgagtgcagacgagagactacctttgacagataccatgttgtatatagatagatagatataacctatcatggccttgtaaggggactttgcctttactgcatgatttcatgtatagaatgttatttctttgacatggaatttgtaaatagtgtatagctcatagtcttttacaattttgaaaccactatgatcaatcaattgaaatttcttagggg

SEQ ID NO: 8772 - DNA, 773 bp, Glycine max
  Clone ID: 700792015_FLI
gaggtccgcgccgtcgccgccatgagctccgagctggatcgcgtgcgggcggacgtgcaggagctcgtggcggagcggaaggagctcgcggcgcaactgcatgccgtggagagcgagcttgcaaaggcgcgtgcggaggcgcagtttgtgccggcgattaaggccgatatagaggccatgcgccatgagattcaacgaggaaggaatgctattgaatttgagaagaagacacacgctagaaaccttgagcacagacgggctatggacaacaatatgattattatggaccgcgaggttgaaaagttacgtgctgacttggctaatgcagaaaaaagggcaagggctgtgatggctgcagatgcaaaaacaaatcctggatatcctgctaactatgacaatcctgagatgggatatggaggaattacatgtcctcctgattcttatagcatgcatcagctgcaagctgtggttgacactcattctccacatgaagctggagcatcattacattatccgaatgacctgcaacatacacaagtgcctagatagtctttgggatgctttagtttttaaagagaatgtagcattgccatctccttcccctcccccaaaatgattttaaattcttaagcttgtatatatgctttactatttattttcgattgtaacatattcaggtagtttgcgcaggttcaattttcctgtatctcctttaattctttcatgagacttgttcaaatttagaaagctagtttttgtttcgtaaaaagcat

SEQ ID NO: 8773 - DNA, 1450 bp, Glycine max
  Clone ID: 700792046_FLI
aacatctcttgctcttcccactttctctctctaaagaatataatactcaaaattcatccatttttattttatttttcttaaaaaacaaagcgcgtatagtctcacgcgcccgacgatgggttttcccgtagggtacccggagctgctggttccgaaaatgttcctccacgcgctctccctcctcgcgtggctgcgctccctcgtcttcgccctcttccgcctcctccgcatctccgacctcctcgacaccgattccgccgcctctgacctccctccgccgcctccgccacgcgagccgactctctccgccctcctcatccgcgagttcctccccgtggcggcgttccgcgacctggcagccgccgacggggatcctccgccgtcgggctgcgccgtgtgcctgagcgaattctcctcggaagaagaaatccggtgtatggcgaactgcaagcacattttccaccggtggtgcgtggaccgttgggtcgatcacgatcagaagacgtgtccgctctgcagaactccgtttgtgccgcatcacaagctcgaagaatacaatcagcgactgtgggcagcttctggagtttcacagttttactaccaagacgattacacggcttctctctgattttttttttctctttctttttccacttatatatttataattatatagcactatatctttttttcatattattattatggtgggggacttgacagctagtgtagcgaaatgtatatagctaattaaaacaaaaacattgtatcaataaaaaaaatcagaattttttggattggtatatacttttttccaacttttacttctatcattctgtgtactacgtacaaattttcattatgtttttaggtttcataaaatgaaattgtgtcagtttttaacgtggaagtaggttggagtcaatcgatccatacttgcaatgatggttttttataacaattatgtatataattgataattaataaataatataaatgtgatattttttttattaattatgtatctaattgatatgaaatatgatattttttatattgattattcatttaattaatataaaaaaacaatgcacataaattcatatgtcttgaatcctattttgaaaaaagaatatattttaattttatgagaataaaaaatatactaaaatttttacactaataaattttaaatatttttatatttaagaaaaggaaaaacaaattttagttatttaataataaggtggatttggattaagtgtttttaatttgtattgttatgatatgtgatggcaatattcttgttatgttgctagtgatattgggtcttcctaaaccggggcatagaaattagagttattcttttttactagtaatatttatagtgtgaaatagtagtattattttaacgatgcttgttaacttgaaaaattaatgtgtggttgtt

SEQ ID NO: 8774 - DNA, 1002 bp, Glycine max
  Clone ID: 700792139_FLI
acaaaacacaaaacataaacctttcttccaaccaacccttttttccaattctttgtttcttccaaaatcttcaatccaatttttcaccttttcacaaatggggatggctgcagcggagtcacagtttcatgtcttggctgttgatgacagcatcatagataggaaactcattgagaggctcctcagaacctcttcctatcaagttactacagttgattctggtagcaaggctttagagtttctggggttgcgtgagaatgatgagagcaatccaagtataccatctgtttgtcccaacaaccatcagcctcaggaggtggaggtgaatcttgttataacagattactgtatgcctggcatgacaggctatgacttgcttaagaaaatcaaggaatcttcatctttgagaaacataccagtggtgattatgtcatctgaaaatgtgccttcaaggattaacagatgtttggaggaaggagccgaagaatttttcttgaagcctgtgaggttgtcagatttgaacaagcttaaaccccacatgaagaaaaccaagttcaaagatcaaaagcaagaaacagtagaaaggtttgaagactcagaagttcaacagcaacagtcacaacaacaaatcatcatccaaaatgagcatcaccaagcaccaaaattacaagttcttcagccagagtcagaatcagagtcacatccacaaccaactattgaacaacagcaacaaattctacaacaagccaacaacaataacaagaggaagaccatggaacagggcctttcacctgagactgacagaacaagaccaagatacagtggcatagccactgtggtatgatcataaaaatcattggcaaaaattttcttgaatttcaaaaaatgtaattctcatataactttttttttctttcttttaaaaacaaattaactcaagtgttggttaatataggctctataggagtgtaatagagttgtttcctgtacacattttcctgg

SEQ ID NO: 8775 - DNA, 366 bp, Glycine max
  Clone ID: 700792233_FLI
attggtttcattgtttactccattggcaaacctctagattcatggctcaaggacatgcctgcagtggcttaaagggaaaaagcacaatctggagcttcctttagggatgttgaatttgttgttggtctttcagagagaatgcccccatcctcctcttatatatgatgattatcatgctattcttatagtttagttttctgttgctgtttttgtctttgatgttacttttatttgatcaggttttaccccaaggtagagagagcttaattgccaaagtatattattgtctttagctcgctaaaaatccttatttgttgacctggtttattgtaataaatgagtactgagggattttttatacaacgg

SEQ ID NO: 8776 - DNA, 924 bp, Glycine max
  Clone ID: 700792275_FLI
aaataaaaaaaattgttttcgtgtggaaacaaaaaaacaattcaaaaacaaacatatgatggtgaagccgagtagcgaaaagccagaggagcatagggattccaagtactacaaaggggtccgaaagagaaaatggggcaaatgggtatccgaaataagactacccaacagccgtcagaggatttggttgggatccttcgacacccccgagaaggccgcgcgtgccttcgacgccgcaatgttctgcttacgtggccgcaacgccaagttcaatttccccgacaacccacccgacatcgccggcggggaatccatgacgccgtcacagattcaggtcgccgccgcacaattcgccaacgctgggccccacgagggacattcgggtcgacccgaacattctcccatgcaatctctatcgccttctgtttcagaagggaccgttctaacggacagtgacgtcaccacacttaacggttcgctaacggatttgttcactcccgttgggtcgagtggttacgcatccgattacgggattttccccggtgttgatgatttcagtggcggtttttatgtgccggaaatgctgaactttaattatggagaagaaaacggggaagggttcatagttgatgagtctttcttgtggaatttttgaggggcaatcaaatccagtattaaccggcaaaaccggtcacggttgcggatagttttattgtttccggaaccgtggcaatgacccgggtttggattggttattttttagacgaccaaacctataaccaagaaactatgatatccatgcaactgtagcaccaaaagtaatgcaatttgtccagatagttgtgatttcttttttttaaacaagatatttgtaatttgtaaagctcttataacagatattgtgaaaaaaataatttctgattc

SEQ ID NO: 8777 - DNA, 386 bp, Glycine max
  Clone ID: 700792277_FLI
gagtggttcacgcgtgccatgcaggaggagtggtacatagccttgaaggttggtctcatcacgaagttggggccatagatgttaacagaatcgatcttgtgtgggaagcagcactcaaacatggcctaagaccagtgtcaagtttcacacagaaagaaaattaaaatcagcttcagtcaaagtatttttctcaagttgtttcttatttgttttggtgtattgcatgcacatcacagtgaccttataagtgtgattatattctttcaagtctgtgtattacatttctaatgtttcctcttgtatgttcatatgatcacattgacagtgattcattcatggtataaattaagccaaagcaagatagctttgcttcctcttgtatgttc

SEQ ID NO: 8778 - DNA, 777 bp, Glycine max
  Clone ID: 700792484_FLI
gttggatctgatctgctgaaacacgccacactcttcttaccatgggcctcctcgatcacttgtgggatgacaccgtcgccggtcctcgcccggagaacggccttggcaagctccgaaagcaccacaccttcgctttccgatctgcctccggcaaggaatcagacagcggaagcgtgaaatcgtacggtgaagatttgccggaggatgcggtgagagtgacgcgaagtatcatgatcgtgaaaccacctggtggtaaccagagtccgagcggatccgctccggcttcccccgccggttctactcctccggtgtctcctttttcgggagctagagagtccttccgttttcggagaaggtcgacatcagatgcgtacgagaagacaggccagaacagaccaagctcttcttctcctttcgatgtgtgacaaatgagcccgaccactatctcctccatatatggatgactgaaaatacaaatatatagtttgttttcctctggcctttgctgatgatgctgtgtccatttttgtttatcttttgtgcatatagtatatagtatatagtatatatatgaatatgtttacgagttcatcagttgagcggtttaagtcctgagacgatcgaggtagctgtgtgtgtggtttaacagctcagtcttgttttactgttgaacttggttatggttctcaagctgtaaataagtaataacgtagtgtacgtaggtgtgttttggttatgtgtactttgtatataaaagcctttccaaggtttgttctt

SEQ ID NO: 8779 - DNA, 1917 bp, Glycine max
  Clone ID: 700792492_FLI
aaaaaaacaggtattggcaaacagaaacaccctttctagcatagggatttgatctctccaccttggtgaaagccttgtgacccataaggcttttacagaaggtgggattttgactagctgggtgtttggctgttgagtttatggagggccaagttccttgttgaacagtgtttgtgttgcctttatctgcagcttttaattgaaccaatcctaccctctttgtttccatatgaaaagatcggttttttgtgattcctccgctcattgttgttgaagggtctcgtgaaatcaatctagttttgagacctgtttactggcagaggtgacggagtttcagttttgtaagtgcatgatcataataataaggtttttatagaaaagaaaagttgagaataagatgggggaagatggtaattcttggattaggaggacaaatttttcacacacagtgtgccatcgtttggatcctgctagattaggctctattcctatcagtgttcagtcagagcagaaatcaaggccttcctcaaaggctcagagacaccctatgacatacaagcagagatctttgtcaccattgcctgagacttatctttctgaggccttcagggaagctagacttgaacagaaaaggttctccacaccgaatccccggagggaaaagaggattatggggaagttgttgaacaaggattctcgggagactaaggaatcaagttcaaagtcaccttcgcgtagtccaaataggcaagtgaagtcaaagaaccgcaaggattcagcatggactaagcttttggacaatggtggaggaaagattactgctgtggaaacagctgaagagtggaatgttgacatgtctcagttgttttttggcctaaagtttgctcatggtgcacatagtcgactttaccatggtgtatataaggatgaggctgttgctgttaaaatcattatggtacccgaggatgatggaaatggagctttggcttctcgattagagaaacagttcattagagaagtcacccttttatctcgtcttcaccatcaaaatgttataaagttctcagcagcatgtagaaagccaccggtttattgtattatcacagaatatctggcggaaggatccttgagggcatatttgcataaattggaacaccaaactatttctctacaaaagctaatagcttttgctctggatattgctcgtggaatggaatatatacattctcaaggtgtcattcatcgagaccttaaaccagagaatatccttatcaacgaagacaatcaccttaaaattgccgattttggcattgcatgtgaggaagcatcttgtgacttattggctgatgaccctggcacctaccgttggatggcacctgagatgatcaaaaggaaatcctacgggaaaaaggttgatgtctacagttttgggcttatcttatgggagatgttgactggaacaataccatatgaggatatgaatccaatacaggctgcttttgcagtagtaaataagaattcaagaccgattattccatcaaactgccctcctgcaatgcgagctctaattgagcaatgttggagcttgcaaccagacaagaggcctgagttctggcaggttgttaagatattagagcaatttgaatcttcacttgccagtgatggaaccctgagcctggtgccaaatccttgttgggatcataagaaagggcttcttcattggattcaaaagcttggtcccttgcaccaaaatagtggccccgtgcctaaacccaaattcacatgaatctttcaagtgtcctggcttttattgtaacaccaggtccattgtaattaaaaatgaaaggtttgttttttcaggttctctggttgtagtcactttatgaaatttctatattgatttttaggcttgcaagt

SEQ ID NO: 8780 - DNA, 479 bp, Glycine max
  Clone ID: 700792528_FLI
ctcatttcaggttagtaatcaggaagcagtagatactgctcgttcttttctcgtaggcaacaacaaatcacaaccattgctgctggcttgtaaaaagcttgtagatttgtctgtttcacgaggctctttggatgacacaagtgttatgctaatcaaattggagcactatatttaaagttaccttagtacaacagaaggggaggtagtgcataaggttttagattattgcagttgagatcgcattgaggttaagattgcgttgcagtttgcgactttgaacagccttggtggtgcctgatggataagagtagctgattcttttctgtatatataaatctgactacattattggaatttttttgtacccgcataggggagagggggatattaacaataacatttagtaattatttttttcattgaataatttatgtaatgagcagcatacaattaattaatttatacattatttatttagt

SEQ ID NO: 8781 - DNA, 1373 bp, Glycine max
  Clone ID: 700792664_FLI
tcttaactatgcttgatgaggtttacaggaggtacaggcaatactatcagcagatgcaagcggtagtaacttcatttgagtatgtttctggcctgagcaatgcagctccctatgcaagtttggctataaaagctatgtccaaacattttagatgcttgaagaatgcaattactgatcagattcagtttgccaataaagctcattttcatatcagcaacaggaaagatgaatctccaaggtttggcaacagtgatagaggcccatatggccaaaggcctgggtttcttgagcaccaacctgtttggcggcctcaaagaggactccccgagcgcgctgtgactgtcctcagagcatggttgtttgagcactttctgcacccttatcccactgatactgacaagctaatgttggctaaacaaactggtctatctcgtagccaggtgtctaattggttcattaatgccagagtaaggctctggaagccaatggtggaagaaatacatatgctagaaacacggcaagctccaaagaatctgcagaaggaagaacattgcacgaacaagccaagtgatcatttgccttctgataactccattgtttctgagaatccatctacttccacagataaatttcaggaagctccttacaagcgtgccataaacgagcttcctaacataccagtcaggactcaggaacagctgaatcttccctgcacaagcaatcagccagggggtgttggagtgagcatgggtggcagtgcaagcaatagtgtgtcactcacactaggcctctatcaaaaccatggtattggtttggctgaacctttccccttgaatgcagcgcagcgatttggtgttgctcttgaaaccaacaatgaaggctacgttatgagtgattatgagtcacaaaataggcattttggaagagatgtcattggaggacaactgttgcatgactttgtaggctgaaggtcttcaatgtcaaataacaacaactttgcctggagttttaatttgattggggtgatataatactaaccatgtttctgttgtgcttccatgaattatctaaaagttagaagagggattggaatgttgcactttgtggtggtgatgctggcaatgatgaatgaaccttccagttatgggggattaactggtcttttcttattgagctcacttgtatggaggttgtaaaggggtgggattaatactgtgtcataataggatgtgatccaattcacccttgtgttgttgttgacctcaattgcttggagtaaatccaaatgttctggctatttaagctgtttgtaagtttttacattttataaaatattattgtcatccaaaccaggtaaatggatttcaatttgc

SEQ ID NO: 8782 - DNA, 1151 bp, Glycine max
  Clone ID: 700792673_FLI
ccttttttcaccttcccctttgtttctcaacatcattccccaatttccccttctgtattgtttttcttcatttctctttttcaatccccgatttcccccttcttcgttttgtgtcttcataattcagatcctctcttcaatctagggttcctggcttaacgaaatcaaatgtttaaggaagaatttctatgacgattcgcaaccccatgcgacgaatccgtctcctccactccttttccgtcgtcttcctctactggttctacgtcttctcatgaactaaccccctctcaatcccctaatttctccaacatttccccctttttctaattaatcagatctgcaaaaccctaatttccctaaccctaacgaaacccccaaatccaatggcttcgattcaacgcccggcgagttcgggatcgtcggagggaggagatccggtgatgtacgagaggaagaggaagcgtatggagtcgaaccgcgagtccgcccggcgatcgcgggatgaaggaagcagaagcagctcgaagacctaaccgacgaagtgagccgattggaaggcgagaacgcgcgtttggcgccgagcataaaagtgaaggaggaagcgtacgttgagatggaggccgccaacgacatcctcagagcacagaccatggaactcgccgaccggttaaggtttctgaactccattattgagatcgccgatgaggtcggcggcgaatccttcgagattccgcagattccggaccctctcttcatgccctggcagatcccccaccctatgatggcaacgccgcctgacatgttcttccatggaaatgaaggcctgtttgcttgatagtacttctaattaggtttattgttgatgttcgttccctagtgttgttggtgaataaagaaagggaatggtggtgtatggtgttaattaatgagtcatatcgcgtgttggtgtgctttttgtgtgtgtgtgttttagatccgtgactatgttttgtgtatgcagtatcgttacatggttgaacgtatctgctttgttacagtgactggtattgtggtgttgcaagttgcggttgtttgtatgaaagtctaaaattgattttgaagggaaagggattatgcttagatattttattataaaatcaaagaaacttttc

SEQ ID NO: 8783 - DNA, 885 bp, Glycine max
  Clone ID: 700792717_FLI
tgttgcttatgagtaagctaacagtaatatattgcgggatgattctgggcacctaaaagttgcagactttggggttagcaagttgctggcagttaaagaagacaagcctctaacttgccaagatacttcctgccgctatgtggctcctgaagttttcagacaagaagaatatgacactaaagtggatgtattttcatttgcactaattctgcaagagatgattgaaggctgccctcctttttctgcaaagcaagacgatgaagttcccaaggtatatgctgcaaaagagcgtccacctttccaagcaccagccaagcgttactcccatggaattcgagaattgattgaagagtgctggaatgagaatccagcaaagcggccaacatttaggcaaataataacaaagctggagtccatctacaacacaattggtcacaaaagacattggaaggttaggccattgaaatgcttccaaaatctggaggccttgttgaagagagatcattcaaatggaagtagtcgtggcggttcatctcgctccacatcaagcagaatatgaaggagaacattggtcttatcctgtaactaaaatattggtataaagataaaagatagcaaccaaatttgacttcttgagttggagctttgcaacgttttctcgtgtgtattcattcacaggttcatggttgttttcgtctttcaagattctttatactcgatgatttatttccaattacatttatgtctggtgacagaattagtatttgtatgtaacatatacacgtattctaaggaatttgctccctgtcatgtacattattatgtaacaagacatttttgttgggtatatatcatgcaatagatttttagctgaagaacttcacc

SEQ ID NO: 8784 - DNA, 636 bp, Glycine max
  Clone ID: 700792780_FLI
caaattataaaaacccccacatactaatgcatctatatcacgaacagaagatcgaattacattaagaaagccccaaaaaaagatgtcgtccgagtgcaaaggtaagagctcatggcctgagttggttggagtggaaggaacggtggcggtggctacaattgagagggagaatcctttggtggacgctaacactgtgctgaaaggaaccatagtcacccctgatttccgatgtgatagggtttgggtttgggtcaccaaagacggaattgtttatcaggttccaacaattggataagaagtgtttacactaaagcacacttcatatgatgatctaagaagtcatgaatataatatttaaataaggagttattcttccaactatgttacttgattgaaaataaaaacaagcttataagaaacttctttttcttatttttagttatgttctgcactgcaaataaatatacaaactgtgtgtttctttttctttttgtacgcaataaatcatttatctccatttgtatattgtttttcttcctttttttattgctggttaagcaacttaatctgatataataaaaattgtgttctgactaatgaataaaatttttaatattatttgatcaatctgtcatt

SEQ ID NO: 8785 - DNA, 1258 bp, Glycine max
  Clone ID: 700792796_FLI
agaaaaataaaaagtaggtaaagtgcatagtagcactagctaaacagtacgtagtgatcataagcaagcatactgatgattaatatggcaaccatggaagacatgagcaacatgagtggtgaaattacacttccagggttccgattccacccaactgaagaagagcttctggatttctatctcaaaaacatggttgttggcaagaaacttcgttacgatgttattggtttcctcaacatctatcagcatgatccatgggatttgcctggtttggcaaaggttggggaaagagagtggtacttcttcgtgccaagggacaaaaaacatggaagcggtggaaggccaaaccgcaccactgaaaaagggttctggaaagccaccggttcagaccggaaaatagttaccttatctgatccaaagcgcataattgggttaaggaagaccctggttttctatcagggaagagctcctaggggatgcaagaccgattgggtcatgaatgagtaccgtttacctgacaattgcaaactacccaaggaaatcgtgttatgcaagatatatcgaaaggcaacttcgttgaaagtgctggagcaaagggcagcactagaggaagagagagagaagaagcaaatggttgataattcccctgcttctcctccttcctccacggacaccatgtcctttagcagcccacaggaagagcaaaacgtgcccttgcccttgttgcagcatgttcttaagaaagagtctgaaacaactgaagacatggtagtgtcaaaacaagaaaaaacaacgaaccaattgaccttaaaagacaccaaaagcacttgtggcacatcacttcaaatgccctttgggaaagagaagctgccagaccttcagcttcctatgctctcggattggacccaagataccttttgggctcagttgaatagtccttggctccaaaactttactcccaccaatattctaaacttctactgactccactctatgtgcatcattactcaaatataatatatcaactgcaagttaattagtcaatattacctatttattttggaatgtatatgcagtgaattagtaattaataacgtttttattatattaactcaattaactagacatgttttcatgcacatatatgttttttcctatcaagttcagtctagctggaacttgttgtcaaccctttacccctgtcccttgaagatgtttcactctttcaatgaatgttcaagaagtaaaattcatcagc

SEQ ID NO: 8786 - DNA, 1792 bp, Glycine max
  Clone ID: 700792820_FLI
ggtgcattggctacaaaaggcagggccaacatagaagagtggcagatggtttgcagaagtttagggtctgaaattgaaggcaatgacaaactggaggatatgaagaaagtgctttccctcagtttcaatgagttgccttattatcttaagtcttgtttgttgtacctaagcatctttcccgagtttcatgctattgagcacatgcgattgattcgtttgtggatagctgaagggtttgtgaatggagaagaaggaaagacactggaggaagttgcagacagttacctcaaggagctcttggacagaagtctgctgcaagtggtagcaaaaaccagtgatggcaggatgaagacttgtcgaatgcatgatcttctaagggagattgtcaatttcaagtcaaaggatcagaactttgcaacaatagccaaagaccaagatataacctggccagacaaagttcgacgcctatcaatcataaacacattgaataatgtgcaacaaaataggactgcattccaacttcggtctctgctaatgtttgccttatcagataattcactcgagaatttttctatacgtgcattatgttccactggttataagttactcagggtgttagacttgcaagatgcgcctttggaggtttttcctgctgaaattgtcagtctataccttctcaagtatctgagtttgaagaatacaaaggtgaaaagcattccaggttccattaagaagctgcagcagttggagacattagatcttaaacacactcatgtcactgtattgccagttgaaattgtggagctccaacgattacgccatctcttggtgtatcgctatgagattgaatcctatgctaatttacattcaaggcatggcttcaaggtggctgcccctataggacttatgcaatctttgcaaaagctatgttttatagaggcagatcaggctttgatgattgagctaggaaaactcactcgactcaggaggcttggcatcagaaagatgaggaaacaagatggtgctgctttgtgttcatccattgagaagatgatcaatctccgctcattgtccataactgcaattgaagaagatgagataattgacattcacaacatcttcaggcctcctcagtatctccaccagttatacttgtctgggcgcctagacaattttcctcactggataagttctctaaagaatttggtccgagtgtttctaaaatggagccggttaaaagaggatcctctggttcatcttcaagatttgccaaatctaagacatgtcgagtttcttcaagtttatgttggcgagacattgcacttcaaggctaaggggtttcctagtcttaaggtgttaggacttgattatttagatggactgaaatctatgactgtggaggagggagcaatgcctggtcttaaaaagctcatcatccagcgctgtgattcattgaagcaggtaccattaggcattgagcacctaacaaaactaaaatcaatagagctttttgatatgcctgaagaatttattacagcactgcgtccaaatggaggtgaggattattggagagtgcaacaagttccagcagtttatatctcctattggagggataggggttgggatgtctactcattagagacattaggagagagagagagtgattccagtgggggtactgcaatcagaagtcttgaaatttgtacgctctggaaggtttaacttttattttctttcttttaacatactacatatgtgagtatgcaagtgaatgcagtattttgttctttgc

SEQ ID NO: 8787 - DNA, 999 bp, Glycine max
  Clone ID: 700793076_FLI
atcggaaagtctctgttcttctcggtatctcttttgcctttatgctgcatgtgataagcatttactggtggtatcgaaatgatgatcttttatacccactggccatgcttccaccaaaaacaccgccacctttctggcatacaatattcatcattttggtgaatgatacattggtgcggcaagcagcaatggctttcaaatgtttgttgcttatttactacaaaaatggaagaggccataacttccgtcggcagggtcaaatgttaactctggtcgagtatactctgctgctgtatcgtgccttgttgccaacaccagtttggtaccgatttttcttgaacaaggattatggaagtctcttttcctcactgaccacaggattgtatctaactttcaagctaacatcagtagttgagaaggtccagtgcttcgtttctgccttaaaagcattatcaaaaaaggaagttcattatggggttcatgccacaacggaacaggtgaatgctgctggtgacatgtgtgctatatgccaggagaagatgcaggctcccatattgttgagctgtaaacacatgttctgtgaggagtgtgtatctgaatggtttgagagagaacgaacttgtccattatgcagggcattggtaaaaccagctgatctgcggaccttcggagatggatcaacaagtctattttttcagttgttttaagttcattttctttgacttgttgggtcatgtttttgagccaaaatcttcctggaaaatgtcaccatctatggtttggtaaaattttccattaatgaaattgagattgaaaaaagaataaagagatatttatatgtatggttaaagtatataagttcattctagagtaatgaggtcagatgtacaaagggatatagatagctggcattatactgaaatccgcgtggatctcttaacctgatattcgtcacgtcacacaatggaaacttttgtttataatgttacatttcaaatt

SEQ ID NO: 8788 - DNA, 751 bp, Glycine max
  Clone ID: 700793081_FLI
tggaaattgtatgcggccaaagaaacagtaagattcgtggtaatgaggaaaatgcagaagatctattaagctttgcatggaaaaactggaggggagggacagtttcaaatattgtagataccacactgaaggattattcttgggatgaaataaagagatgcatccatattggattactatgcgttcaagaagatataaatggcagaccaactatgaattctgtttcaataatgcttaacagcagctctttctcccttgctgaaccttctgaacctgcatttttaatgcgtggtaaaagtcaattgcctatgattatgctgtctggtagtgagcaatattcagaggcaacaaagtcaagtgattcaggaagtcaatttgctcaaggatcatcaaataaggctccaatcaccgagccatatcctcgttagatattttttaagcgaattgggcaaaaaggaaatgattttgaaaacaagatatcaacttttgaaacttcatcctttggagttgacaagcccgtaccctccctggttattttgtaatataatgcttgttctagattccttgcactttgccacatccagtttctttttcattcttgtattttttgtggttttttcttttctttttggaaaccagtggtgtttgttttcagattccgcgcgtgcctccattgttgatcaactataaacatataagagacatgatatgtttggcaattaataaatttgagtaattaattattttccct

SEQ ID NO: 8789 - DNA, 877 bp, Glycine max
  Clone ID: 700793227_FLI
ggcattgtttggtttggtttggttacttgaaaatctcgaatcgcttaattttgatttagttttccaccgcaacgcggaacctctttctcgaactggctaactctcaggcaagtggctcggacgctgattccagcaacacgcggctggtggttgcactgtatgacgccctaaactccggcgactccaacgccgtcgtcaagatcgtcgccgccgatctcgagtggtggttccatggtccgccctctcaccagtttttgatgcgcatgctcaccggcgactccgccgccgacaactccttccgattcgttccgcagtccatcgccgccttcggctccaccgtcatcgtcgagggctgcgactccgcccgcaacattgcctgggtccacgcctggaccgtcactgatgggatgatcactcaaatcagagagtacttcaacaccgccctcaccgtcactcgcatccacgattccggcgagattgttccggccagatccggcgccggccgtttgccctgcgtctgggagagcagcgtctccggtcgggtcgggaaatccgtccccggtttggttctcgcaatataaaatataaaataagtaattagggaaggacgaggtcacgtgttgccgttgctataataattaaataagggacttgtgcacgtggcggtgactggatcgatcggtttcagggaacattgatactttgtgttagtattggaggttagggagatgtgagagctttgttgttattggtgtggtttgttttgtttgcttgtgtgtttttcaccactatgggcgtattcaggtggttgtatctttcttttgttatttggagtgttgatgatgatgcaataagaatatctatggactatgctttt

SEQ ID NO: 8790 - DNA, 612 bp, Glycine max
  Clone ID: 700793295_FLI
gagcctgcttggtgcagacaaatttgttgtttcatctaatcaagaggaaatgacggcattggctaaatcgttggactttataatcgacacagcatctggtgatcacccgtttgatccttacatgtcactgttgaagacatatggtgtttttgtcctagttggtttcccaagtcaagtcaaattcagccctgcaagccttaatataggatcaaagactgtagccggaagtgttacaggtggtacaaaagatatacaggagatgattgacttctgtgctgcaaacgagattcacccaaatatagaggtaattccaatcgagtatgccaatgaagctcttgagaggctcatcaatagggacgtcaagtaccggtttgtgatagatattgagaactccctgaaagaaaaataagttgtacttgttgcctcctaaattgggcatgattggacttcaccttgttcgataaacaagatgttcatagttcataattacttacatagaggtgatttcaatggagtatgcgatgtaaatgttgaattttccttaattattttgggaactaatattatttgactattataatattttggattatgaaataataataattatgg

SEQ ID NO: 8791 - DNA, 1593 bp, Glycine max
  Clone ID: 700793444_FLI
ctttctcctaccttcttcctctatcccctgacttaactttgctaccaaacaggcaacaaggctcaaggaactagtattgtttctatcatgggagtttgtttgagcacccaaattaaagctgggttaaattcaaagcatgttagtgccgatgcaaaagatcacagcagtccaattagcaataaaattacaaaagatgtcagcacaccaatcagtaaagtctcagaggtatcagtgcctcagactcctcggattgagggtgagatcttgcagtcatccaatctgaagaactttagtttgacagaactcacagctgccacaagaaatttccgtaaagacagtgttttaggaggagaaggtgattttggatcagttttcaagggctggattgataatcaatcactggctgctgccaaacctggcactggcgttgttgttgcagtgaaaagacttagtctggatagcttccaaggtcagaaggattggttggatgaagtaaactatctaggccagctttctcatcctcatctagtgaaattaattgggtattgctttgaagatgaagaccgacttctggtctatgaatttatgcctcgtggtagcttggagtatcacttgttcatgagaggctcgtattttcaacctctttcttggggtctccgtttgaaagttgctcttggcgctgccaaagggcttgcatttcttcacagtgctgaaacaaaagtgatataccgagatttcaagacctcaaatgtcttgctggattcaaattataatgcaaagcttgctgatttggggctggcaaaggacagaccaacacgtgagaaaagtcatgtctccaccagggtaatgggaacctatggatatgcagctcctgaatatcaaaccacaggaaatctgagtgccaagagtgatgtcttcagttttggagtagtcctgctggaaatgttatctggcaggagggctgtggacaagaatagaccatcaggacaacacaatttggtggaatgggccaaaccatacttagccaacaaacacaaacttttgcgtgtgttggataatcgccttgaaggccaatatgcattagatgaggcatgtaaggtggctaccctctctctgcgatgccttgcaacagaatccaagttgagaccaaccatggacgaggttgtcacggatttggagcagctgcaggttccccatgtgaatcaaaatcgttctgtgaatgcctctcgcggtcgtagaaaaagtgctgatgattttactcatggtagaatcgccacagcttctgtttccccgctctcacatgacattgcaaatacacgtccttgaaagctgatgcatgtttccacatgaactcaaacacgttcatatcatgcacacatgctatctaataggttttacgtatgtatatatttcaggttctgtttgtaatatgtagtcaaaatagctggaactactgcaggtactgtcttatttggctctggttagctcaattttgttgttttttatattggtataaagttttccaactttattttgttacacttgcaatgtgcagttttcacatatatagaacttgaagcaaaacttatagtt

SEQ ID NO: 8792 - DNA, 1032 bp, Glycine max
  Clone ID: 700793534_FLI
gtttgagggggttttcaccacttaaacgtgagttcagagcagcagctaaattggattgtgcaaatgcatcaactcaaaatcaagttttgttctacaagcaagtttgatttgaaggtgtattcactgggagatgtggcacagcactagatcatggtgtcgtggctgttgggtatggtacagctaatggtcatgattattggatcgtaaggaattcatggggtcctagctggggagaagatggctacatcaggttagaaagaaatcttgctaacagcagatcaggcaagtgtggaattgcaattgagccatcttatccccttaagaatggtccaaatccacctaatcctggaccatcacccccttcacctgtgaagccaccaaatgtctgtgacaactactacagctgtgctgatagtgctacttgttgctgtattttcgagttcggaaatgcttgctttgagtggggttgctgtcctcttgagggtgctacctgctgtgatgaccactacagttgctgccctaacgactatcccatctgcaacacttatgctggaacttgtctcaagagcaagaacaacccattcggagtgaaggcattgaggcgtactccggctaaaccccattggacctttgggcgtaagaacaaggtcagcagtgcttaagcagataaaggaaatgtgaacgtgcaggaaggagccaatgatgaagtaaatgaaagacgaagaattaaaacaccagctgatacacttcccctttaccttcacataaatttctctgtgccattttattatgatacaaattgatactattctgtatcaaatttcagtcagatattggctgtgtacatagggttatattattgatgcactgtatttgtattcaaattccaattccaaatggcgaacatatttgattgctgttagtttcccaggttatgtagactatgtgacaatgcagcattatttggatttgcccgatattctggctatttcatttgcttataatgtggaattcactggacccctcttcttt

SEQ ID NO: 8793 - DNA, 772 bp, Glycine max
  Clone ID: 700793664_FLI
atatttttcatacaacacattctttctagacacgcaacacctagaagatttccttattctttttggtgctaaaccgttgggatatagcaacaacatgttaggaatgaagagacatagagataatgaagggtcagagagcttagatttggcaaaatgtcttgtgctgttctcttgtccaatagaaagcaacaaggcacaacagaaaggttttggggctgtggaatttgagtgcaagacgtgcagccgcaagttctcttcttttcaagcactgggagggcacagggcaagccacaagaggcagaagctagagggggaagaactcaaagaacaagccaaaactcttagcttgtggaacaaaccaaaaatgcacgagtgctccatttgtggacttgaattctctctgggccaggctctgggtggccacatgagaaaacacagagctgctctcaacgaagggtttcctataattccttctatcgaccaagttattgcgaaaatcccggttctgaaaaggtcgaatagcaccagagttatgtgcttggacttggagttacacctgtagagaatgaatgactgaactaccaagtcacccaagctcctttttctttgttcttattaacttttctacattttttacctgtttctggacacatgtattctttcattttttgtgtgaaaattttattgacttttcccttatagatgattgattctttattctggacacatgtattattttgttaatacgattatcaaaagttcttagtgtttt

SEQ ID NO: 8794 - DNA, 774 bp, Glycine max
  Clone ID: 700793706_FLI
gcaaagctcaaagcaaggttggaagtcctacagaaaaatcaaaggaattttatgggacaagatttggagggcctaagtatcaaagagcttcaaaatttggaacatcaacttgatagtgctctaaaacacattagatcacggaagaaccaaatcatgcatgaatctatttcagagcttcataaaaaggataaggtcctacaggaacaaaataacactctcgcaaagaagataaaggagaaagagaaggcactagcccagcatgcacaaatggagcagcgtggtgatgaaatggatcttacttcctctgccctagtacctcatccattggagacatcaaacattagagagtcctcacaaataaggggtgaaggagataatgaaggaaccccaactccaacccgagcaaatgccattcttccatcttggatgcttcgtccttcaaatgaatagaagagtattaacgacctaaaattttaaattacatatgaatatggcgaatacaaagcttaccctataagatgtaaaatggtctatgtgttgaattgtgaacaccacccaatgagttcaattggaatatcatagatatgtaatgtgtctctgactactacatttcaaggatgctaagtaaattatatggtatggcctgtctagatatagacctgcaatacatatatagtgtcaattatgtatgcttggttcttatcaaaagtttaagttggactttacatgcctctcttcctagaaattcggaaggtaaacataatttcagtacac

SEQ ID NO: 8795 - DNA, 1545 bp, Glycine max
  Clone ID: 700793752_FLI
tttaatttctccgcccattgcattttgcatttccctcctataaataaattcccattctttccgtctgtatcttcattttcatttccatctttcttgggtgatacgatccaatggctgcgacccttttccagggattgggagttgtgaccccatcattctcttcttcccactccaacaagttcatgctttcttccctctcagagaggaaagatggcatatttgtggtcagatctgatgctgatgcaaggattctgaagactggagctcgtaagcatgaattgttggttactaatgcagttgcaacaaagggagccagttctgcggcctctacatcaaaatctggatctgggcatgaacttctcctttttgaggccctacgcgaaggtttggaggaagaaatggagagggatccttgtgtatgtgtcatgggtgaagatgtaggtcattatggaggatcttataaggtgactaaaggccttgccccaaagtttggggaccttagagttttggacacccctattgctgagaacgcctttatggggatgggcattggagctgccatgactggtctgaggccagttgttgagggcatgaacatgggatttctacttctggcatttaaccagatctctaacaattgtggcatgctgcattacacatcaggagggcagttcaaaataccaattgtcattcgtggacctggtggagttgggcggcaacttggagcagagcactcgcagcgattggagtcttattttcagtcaatccccggaatccagatggtggcttgctcaaccccttacaacgccaagggcttgatgaaagctgcaatccgaagtgagaaccccgtgattctctttgagcatgttttgctttataacctcaaggagagaattccagatgaagagtatgtattgtcacttgaagaagccgagatggttaggcctggggaacatgtcacgatattaacctattccaggatgaggtatcatgtcatgcaagctgccaagacactggtgaacaaggggtacgaccccgaagtaatcgatatcaggtctttgaaaccgtttgatcttcacacaatcgggaattcggtgaagaagacacaccgtgtgctaattgtggaagagtgcatgcggacgggtggaattggtgctagtttgacggctgccattaccgaaaatttccatgaccatttggatgctcctatagtatgcttatcctctcaggatgtgccgactccttatgctggaacattggaggaatggacagtagttcaacctgctcagattgtgactgcagttgagcaactctgccagtaattgctacaaaacactaccaattgtgcttgttaaattaagctagaaatttttatcatggttttctctttaccttttatttgctgaagtctaaagcccataaatttcaattgttatttaacttctgttaaactttgcaaaaaaaaataaattattaaaagaagaatatagtagctatggaattgcactgctgctaaatattcacctgcacaagacaaaccagctg

SEQ ID NO: 8796 - DNA, 973 bp, Glycine max
  Clone ID: 700793870_FLI
gttatggaataaagccattgatagcagcaatgggttcctgttgtctggttggtgttgtctggaaagggacgctatatattgcgaatcttggagactctcgcgctgtaattggttctgtaggtagatctaacaagatcattgctgagcagttgaccaaagagcacaacgctagcaaagaggaggttagacgagaactcaggtctttgcatccagaagattcacaaattgtagttatgaagcaaggaacctggcgcattaaaggcatcatccaggtatccagatctataggagatgcatatttgaagcggccagagttctcatttgatccgtcattcccacggttccacctgcctgaacctatccgccgacctgtgctaaccgcagaaccttctatatgttcaagagtgttaaaacctaatgataagttcattatctttgcatctgatggactctgggaacacttgacaaaccaggaagctgctgagattgttcataacaatccacgaatcggtattgcaagaagacttcttaaagcagctttaaacgaggcagctaggaaaagggaaatgagatataaagaccttcagaagattggaaaggggattaggcgtttcttccatgatgatatcactgtggttgttgtcttcattgaccacgagtttgcggcaagaatgttacagttcctgatttgtccatcaaagggtttattgacacagttggaccatcaaattttagaaatttgcggggattggaatgatcacaaggttcatttgtagccaacaaacttgactggctgcttcattggtccaaaaggaagctaaaagaaattcaatacttcattagacatttttgcaacatctaattgttgtttatcttgaacatttcttctcacttttcaagggttttccttgcttaacttttttaagttttaaactataccttgtctactggaaacacgtttgctggtggtgat

SEQ ID NO: 8797 - DNA, 1383 bp, Glycine max
  Clone ID: 700793925_FLI
gcaaacacaaacacgtctctctccaaaagccttacgtttcagtaatttggttcatttcttacagcctctcacttaaactcccaccgcaatcacattcaaaagtcagattgatttgttttaaattgtgtacaagggcaggagggttgttaaaatgtctgcaactgaagtcacaagctctaggatatcatacgagtcctttgcaataaagcctcctgagcacccaacttatgatttgaagggcattatcaagctagctcttgaagaagatgctggggatcgaggtgatgtaacatgcttggccaccattccatttgacatggaagtggaagcttattttttggcaaaggaggatggcatcattgctggaatagctcttgcagagatgatatttcatgaggttgatccttctctgaaggtggagtggagtaaaaatgatggagattttgtccataaagggctacagtttggaagagttcatggacgggctcataacattgttgtagctgaaagagtagtgctaaactttatgcagaggatgagtggcactgcaactttaactaaggcaatggcaaatgcagcataccctgcatatatgttggagactagaaaaactgctccaggtcttcgttagtggataagtgggcggtattaattggtggaggtcggaaccataggatgggtttgtttgatatggtgatgataaaagataatcatatatcagcagctggaggtgttgctgatgctcttaaagctgttgacctgtatctggagcaaaacaatcttcaaatggaggttgaggtggagaccaggactcttgaggaagtggaagaagttttacattattcatctcaaacaaagacttctttgactcgaataatgttggacaatatggttgtacctctaccaaatggggatgtggacatatctatgctaaaagaagctgtgcagttgataaatgggagatatgagactgaggcatcaggcaatgtcacactagatactgtacataaaattgggcaaagcggagtgacctacatttctagtggttcgttgactcattctgtgaaagcactagacatctccctcaaaattgataccgaattagcactcaaagttggaaggcgcactggacgagcttgattggccttcttaagatattactattatctatcaatattttgtatcgggtttttttccccctattttgtcacttttgtgtgactttttttttttcataggcaaataaaacaaatatatattatggagcacaagaagtgccatgatacacaaacagagttacccctatgctgatcaagacaggaatcttgttattcgtgaaataatatattgctaccatataaaataatatataagtggttaccg

SEQ ID NO: 8798 - DNA, 792 bp, Glycine max
  Clone ID: 700793955_FLI
aaaaaagaggcgcaagatgagtggtagggtttctgggaaggtgaagtggttcaacgatcagaaggggtttggattcataacccctgacgatggcagcgaggaactcttcgttcaccaatctcagatcaaatctgacggtttccgaagcctagctgaaggagagtccgttgagttcgctattgaatctgaatctgacggacgcgccaaggctgttgatgtcactggccccgacggcgccagcgtccagggaaccagacgcggcggtgatggtggccgaagctatggcgggggacgaggaggtggctacggtggtggtgggcgaggcggtggtggcggggcttgctacaactgcggtgaatcgggacatctggctagggactgcagccaaggaggcggtggagacaggtacggcggaggcggtggtggtggtggcaggtatggaggcggcggtggcggcaggtacggtggtggtggaggaggtggtggcggcggaggaagctgctacagctgtggagagtctgggcatttcgccagagattgcccatcaagtgctcgttgaaattactgttatggtggtttatgttatgcggattgttttaagtttttactttaacatgttgtagggattttaatggtttctgtcaaagctgtggcttcttataagtagatgcgtgagatttttcttttttttggttatttaaatgaaagtttctgtgttatcgttacaatctgcaaacaaaatctgtttggacctacattttgctataatgaattggatgattgttatcggtt

SEQ ID NO: 8799 - DNA, 1384 bp, Glycine max
  Clone ID: 700793982_FLI
gggaggggcattatgggaagatgttctcaaacgctgcgtttcggagttccgcctcgcgccgcggtcttggaccgattacctcggcctgaccgtcggcgggacgctctccaatgccggcgtcagcggccaggccttccgctacggcccgcaaaccgccaacgtaacggaattggaggtggtgagcggcaaaggcgaaaccttagtctgttccgaatcacaaaattcggaactcttcttcgccaccctgggaggattaggccagttcggcatcataactcgcgctcgagtcccggttcaacaagccccggacatggtgagatggataagggtggtgtacacagaatttggcgacttcactcgagacgcagagtggctggtgactctccgagagggtgatggttttgattacgtggaaggtttcgtttttgtcaacagtgacgacccttgcaacggctggaccaccgtccccgtgggccccaaccaatacttcgacccggttcggattccttcaaccgccggcccggttctctattgcttagaacttgcccttcattatcgtaaccaagaccatccttccgcagttgatatggaggtggatagattacttggacggttaagattcgttgagggtctaaagttcagcgtggatgtgacgtacatggaattcttgctacgtgtgaagcgtgtggaggaggatgcaaaagccaatggaatctgggacgcaccccacccatggctgaatatgttcgtctccaagtccaacatcgctgaatttgatcgtgaagtgttcaagaaaatcctcaagcacggagttggtggccccattctagtgtaccctcttttgcgaagcaagtgggatagtcgacactcggtagtggtgccggacagcaacattttctacattatagccttgctccgatttattccaccacccccaaagggaccacctacagaactattggtggaacaaaaccatgagattattcagttgtgctacaacagaggcttcgatttcaagttgtatctccctcactaccagtcaaaggagaactggatgcgacactatggagataagtggtccagattcgtcgagagaaaggccaattttgatcccttggctattcttgcacctggacagaaaattttttcccgaatccctcaacccttgtctatcacttaaatattaattattttagattaatatattgcttttttttttctttttctttttctcaacccactgtgaccattttgtcttgatttcatttttttttctctctttctcttgactcccccctttccttttgtttctgtccccaatcgctccaaccatttaccacaccgttgtagccatattgtaaatgaatattttgggggtgaaatt

SEQ ID NO: 8800 - DNA, 754 bp, Glycine max
  Clone ID: 700794025_FLI
ggaaaatggtattacaagagcaaacgccaacccataatgcatgagggatacatgttccctttgcttgttaagaaggaattggataactggccagaaatgaacacaagaaaacgaagatggatgactgtggatgaggcaaaagtaatatgcccttatgcttggatgaaggaggctttggatgaattggtcagaagacaaactcaactgcactccaaaaaggatggggatatgagtaggttgtaaatttgtaatagcgtgtttggttccacatcacagatttgttttttcacgcttagtcagaaactaatgcttacagctttttcacatcccaaacgtgatttctcacttctcaaaaaaattccaaacatgcacttagtgtcttgcttttggaatctacaaagtggtagaacaaaagcactcataagctgttgttagggcaagagaaattaagtctagtcattaagaggagggaaagtgcagttcaaggtgtgcccacaatttgttcctcccttgagtttgtttgttcctctcttcaaattggctatagtctgaaagttctgcagcagattacggatttgtaggggcgtagttgagatctagccatagagatcagttgtagattgtacaaaatcaattcattctttcattcatttgattcttttgtaatgaaatgtatgtaggccatgtgtagaatacattattcttcctgtactcataaaattattaaaataaataaaatcttccattgagactg

SEQ ID NO: 8801 - DNA, 1267 bp, Glycine max
  Clone ID: 700794035_FLI
atgagatcttctcctaggcttagccctgtctttttgggaaatggcccttttccaggactgccacctaccactttggagggtttggctgaccgtgctcggagtagatggatagagaacaatgggagccaagttgatagcaagaaacaatttcagctcaacttggataagattaaaagtggtgaagatacaaggactacattaatgataaagaatatcccgaacaaatacacctctaaaatgttattagctgccattgatgaaaatcacaggggtacttatgattttctctacttgccaattgactttaagaataaatgcaatgtgggctatgcatttatcaacatgctgtctccctctcttattattccattcttcgagacattcaatgggaagaaatgggagaaatttaatagtgaaaaagttgcttctttggcatatgctagaattcaaggaaagtctgccctcgtgagccattttcaaaattcaagtctgatgaatgaagataagcgatgtcgtcctattctctttcactccgagggttctgaagtttgtgatctgattgtacaagaccaccaccttccctccaactccaacaatctaaacattcaggcaccaaggccaagtgagttctattcaagtgattttgctgggagtcctccaaaggcaggcccttctgcaagcttggatgcaaattaacatttatattagacgcagagttgcttagccaaaaccggtcactgttaatgttaacattttgcaaatatgtctctctctctggtggtgctgcatatatttaggaaggataacagaaggatgtagattttgtaccatagccattttcccaagtattttgccagcaagctttagaagcttggagcattttgattgaattgctgcacaggtaactgatctgattatgtacacaaggtggttgtggtggtgatggtgggagcaaaggctgaagagttgattgagcaaaggtgtttgtttctcttcaatttttgctcatttttgcattttggtgtcttgtcattgagcattttttttttcctttctgaaaaatgttaatatgggggtagagttcagtttggttggagggttggaagttggtaagttcatcacgtgggggtacaaattgtatagagagaaaataaagacttatttctttctatgttttcctctaatgtactagtactactctggaaaaccaaaagtgtaaaacgcttatttaaatatgatggtgtacaagttgctcactatcttaatc

SEQ ID NO: 8802 - DNA, 1717 bp, Glycine max
  Clone ID: 700794075_FLI
cgcgctccgagatcggaacccggtcgaatttcgggtcgtcggtgcgggcagagtcggtggttggcgttggcggtggcggtggcgcgaagcgattcgatgcggcgtcgtcggtggcggcggcggagatgaagatggtggtgagacatagggacttgagggaaatcgtggaggctattaaggagaatttcgataacgcggcttccgctggggatcaggtttctgagatgcttgagatcagtagggcgcagcttgatcggagcttcaagcaattgaggaaaactgtgtatcactcgagtagcatattgagcaacttaagctcgagttggacctcgaaaccgccgctggcggttaagtaccggctcgacaccggttcgctggatgaaccgggcggtccaaagagtctctgctccactttggaacgccttttggcgtgggagaagaagctctacgaggaggttaaggctagagaaggtgtgaagattgaacatgaaaagaaattatcagcgctgcagactcaggaatacaaaggagaggatgaagctaagatattcaaaaccaaggcttccataaataggctgcagtcactaatagctgttacatctcaggctgtgtctaccacctcaactgccactattggccttagggactctgatcttgtccctcagcttgttgatctcattcatggattcatgtacatgtggagatcaatgcaccactaccatgaaattcaaagcaatatagtgcagcaagtccgtggccttgtgaacagatcatcaagaggtgactccacttctgaactccacaggcaggcaactcgggaccttgaatcagctgtgtcagcttggcactccagtttttgtcgccttataaaatttcagcgtgatttcatcctgtccttgcatggctggttcaagctcagccttgttccagtccacaatgataacatcaacagtagggaaacctctgatacataccaatttttcgatgaatggaaacttgcacttgaccgtgtccctgacactgttgcatctgaagccatcaagagctttatcaatgttgtccacgtgatatcttccaagcaagtggaagagctgaagatcaaaaaacgaaccgagactgcatccaaggaacttgagaaaaaggcttcctctctgagaaaccttgagaggaagttctacagctcatattctatggtaggcattagccttcctgattctgcacctgacaatggacaagttttggatgcacgcgacccacttgctgagaaaaaactggaactggcaacctgccaaaggcgtgttgaagatgaaatgctgaggcattcaaaagctgtggaggtaacaagagccatgaccctcaacaatttgcaaacgggcttgcctggagtgtttcaggcactgaccagtttctcttccttgttcacagaggctcttgaatcagtgtgtacccgttcatatgccatcaagtaggtgaggtaattcatttgttctgcatgggatctaagttcttcataagggctgggggattttttggcggcaagctcttattgctctcactattttgagttatattttgaaatgtaaatatgaagaattttggggttccacctattttgatggaaaagggaattttcttattgtacagggaaatttcttggtttattgtatcagaggattgcaatttttagtatatcaataaattatacgcattgtgcttt

SEQ ID NO: 8803 - DNA, 2682 bp, Glycine max
  Clone ID: 700794082_FLI
atcgtgccgtgcggtgtacagaattagaattagaaagagaaagagaaagagggggggtcgtgtcggcttgaaaccaaacacgaccttatcggcgatccaatttcgatctgtgcaaatcgtaaaccctacctacttgcttctgcaattctggtggactggatccattttcatctcaattctcagtaagttggggcacatcacacaataactttgacatggcttccgctgcgccaggtgcaaccaatgatgctttatacaaggaattgtggcatgcctgtgctggaccccttgtcactcttccgcgtgaaggggagagagtttattacttccctcaaggtcatatggaacagcttgaggcatccatgaatcagggattggagcagcaaatgccttcctttaatctgccttctaaaattttatgtaaagtggtcaatgttcatcttcgagctgaacctgaaacagatgaagtatatgcacaaataactttgcttcctgaagcagatcaaagtgaggtgacaagccctgatgatcccctgcctgaatctccaaggtgtacagtccattcattttgcaagacactcactgcttctgacactagcactcatggaggtttgtctgttcttcgaagacatgcacgatagattgtttgccaccactggatatgactcagcagcccccatggcaagaattagttgcaactgatctgcatgggaatgaatggcattttagacatatttttcgagggcaacccaggcgccacttactgaccactgggtggagtgtctttgtcagttccaaaaaattagtggctggtgatgcatttatattcttaaggggtgaaaatggagagctgcgagttggagttaggaggctcatgagacagcaaagcaacatgccatcttctgttatatccagtcacagtatgcatctgggtgttctggctactgcatctcacgccattgccacaggaacattgttttctgtattttacaagcccagaactagccggtctgagtttattgtgagtgtcaacaaataccttgaagctcgaagtcataaactttctgttgggatgagattcaaaatgagatttgagggtgatgaagttcctgaaagaaggttcagtggaacgattgtgggtgttggagataacaaatcgtcagtctgggctgattctgagtggcgatcattaaaggttcaatgggatgaaccatcgtctattttgcgtcctgatagagtttctccatgggaattggagccacttgtgtctacccctcctacaaacccccagccatcccaaagaaacaagagatcgcggcctcccattctaccttcaacaatgcctgattcttctctgcaaggtgtatggaaatcaccagttgaatctgcaccattctcttattgtgaccatcaacatgggcgagatgtctatccatcaaccaatttcaattccactgcaactggttttcttggttttggtgggaactgctatgcttccaacaagtcaatatattggtccagtaggatggaaaactccacagaatctttttctcctgtagcacttaaagaatttggagagaagagacaagggactgcaaatggctgtagactctttaggattcagttacatgacaattctaattctaatgaagaaagtctaccaatggtcactttgtcaggaaggatgggtgatgatggcccccttccatctttggatgctgagtctgaccagcattctgaaccatcaaatgttaatcgatctgatatcccttcggtaagctgtgatgctgaaaaatcatgcctgcggtctccccaggagtcacagagcaggcaaataagaagttgcacaaaggtccacatgcaaggtatggctgttggaagggctgtggatttaacacggtttgatggatatgaggatctgctaaggaaattggaagagatgtttgacatcactggtgagctctgcggatcgacaaaaaaatggcaggttgtgtacactgataatgaagatgatatgatgatggttggggatgatccatggcttgaattttgtagcattgtgaggaaaattttcatctacactgcagaggaggtgaggaagctttcacccaaaataggacttccaatcagtgaagaagttaaacccagcaaaatggactctgaagcagtagccaatcctgaggatcagtcatctattgtggggcctggttgctaatgtcttaggtcttccaacatttcagttgttatatatatatacaatagatattggcatgaaaataggaagtagaacgtgagagaaacgagtatgtacctggcaagcccttcatcatggcctataaggagcatatggttagtgtattctgcatctatacaggagcagcataacagcaccaaagcagagggcttggggtattgtggcttttctctttctttcatagctctgtaatcaccgagtttcgatgccttgcttgttcagttttgtattggttgcgagcgtgcagaaatgtcttgttttttttttttggttgcgagcagcataacagcaccgaagtatcttactatgtatgcatttggattttttttttggttcttttgtaattcacttgttatgatgcatcatctcatttatgtatatataactttctattatatacatactatttaatgtatgtatatcgagcc

SEQ ID NO: 8804 - DNA, 1046 bp, Glycine max
  Clone ID: 700794341_FLI
ggttattcaacgagaacaacgagatgatcctcgtctacgacttcatggcgcgtggaacgctacgcgatcatctatacaacaccgacaacccccctttgacgtggaagcagcgcttgcagatctgcatcggcgccgcgcgtggactgcattacctccacaccggcgcgaagcacacgatcatccaccgcgacgtgaaaactaccaacattttgttggatgataagtgggtggccaaggtttcggacttcgggctttcgagaatcgggcccacgggcaacgccaaggcccacgtcagcaccgttgtgaaaggcagcattgggtatttggacccggagtattataaacgacagcgtttaactgagaaatctgacgtgtattcctttggagtggtgctgtttgagttactctgcgctcgtccgcctctgatcagaactgcggagaagaaacaggtgtcgcttgctgattgggcgaggcactgctgccaaaatgggaccataggccagattgtggaccccactttaaaggggaggatggcgccagagtgtttgaggaaattctgcgaggttgcggtgagttgtttgttggacgacggaacgctgaggccgtcgatgaacgacgtcgtttggatgctggagtttgcgttgcagttgcaggagagtgctgagcagcgtgaaaatactaatattgttgataatgaaattaatgagagaagagaggaggaggctagtgatgatttgtttagtactggaaccagtgtgggccaggtttcggattttaacaagagtagcggtgtggtgagtgtgagtactgatagcgaagagcttagtagtagctacaaagagagtgataagttgatgtctgggactgttttctctgagattgtggatccaaagccacgttgagagaatcaaattgatctcaagaatgaagacctaatactactagggctagcttgaggctcgcaagttatgtgtttagtttcataatatatagttgtaatattacaatgtctgtgtacagaaatcaagttgcttctatctcttggg

SEQ ID NO: 8805 - DNA, 551 bp, Glycine max
  Clone ID: 700794384_FLI
aaaacgttgagggaaatggtggcccaggaaccatcaagaagatcactttccttgaggatggagaaaccaagtttgtgctgcacaaaatagaaagcattgatgaggcgaacttgggatacagctacagcgtggttgggggtgctgcattgccagacacggcggagaagatcacattcgactccaaattggttgctggtcccaatggagggtctgctgggaagctcactgtcaaatacgaaacaaaaggagatgctgagcccaaccaagacgaactcaaaactggaaaagccaaggctgatgctctcttcaaggccattgaggcttaccttttggcccatcccgattacaactaatcctcttcaacttacttgtcatcactttcttgcttggagacttatccaatcactctgttctcaacttaagttgccttccaatgtatccagtctttcctttcttctttccttttcccatataattgtgagacttatgatatatctgtatctcacttcatcaataataaattataataaagatgagcaatcattacaact

SEQ ID NO: 8806 - DNA, 501 bp, Glycine max
  Clone ID: 700794411_FLI
aaaatatggataataatgtgtattttaaacaagattattacacatgaaacagtcactgcataagcctttcaagtttaccagaggacattggtgatctatgtaatctcaggaatctcaatatgacaagctgtgcaaggtgtgaattgccatactcagtaaccaatcttgagaatttgaaggtggtggtatgtgatgaagagacagctgcttcatgggaagcattcgaagctatgcttccaaatctgaagttagaggttcctcgagtcgaggttaacttaaactggcttcattctattagctcctaagacatgacctggttcatgggaagcatttgaaactatgattccaaatctaaagtttgaggttcctcgagttgatgttaactgaagctggtttcgttcaatttgctcctatgacctctttctataaatgttagaccaatggccgtgactgtttcatgtgtaataatcttgtttaaaatatggataataatgtgtattc

SEQ ID NO: 8807 - DNA, 603 bp, Glycine max
  Clone ID: 700794437_FLI
ctaattcaatcaaaatgcctcccaaatacaagctagtgctgttgatagcattggttttggttgcaacctcccttgctggtcgcacaaaggaacatcctaagcatcctccatcccttcaagaacaacaacacaccccacaccttgatagctacccgcataaacacataccacctcatcctgtacatggtgccggggaggaaccaacctccattccacgaaagaagggaccaagaaggcccccgaactgataagtgagtcaaaggtttccgattgtgcatgcgtcagatggtttaactttgactcgatctctaccaccacaacatcacgatatgttgttacaaccataatcgcaatttgaaaccttgggctagctaaaactattttaatataaagtattaatggtcactgctacatgagcgtctatgattaaataaaaagtagggagtttgaacccatgtaataccatgttgtgaggttctccctctttgtgtgtgctttaaattttcacatttagtttgatttgtgtccggtgtggtttctgtttcttgtatttatttgtacaagctagatgctaaaatggatgagttaaagcttgcacttgtt

SEQ ID NO: 8808 - DNA, 1209 bp, Glycine max
  Clone ID: 700794645_FLI
aaagaattaaagtagcaacaaatactcttccctacacttggcagaaaaaaaatggttcaacaagaaatccgaaggggtccctggacagaacaggaggactacaaattagtgtattttgttaacatgtttggagatcgtagatgggactttatagcaaaggtatcaggtttgaaggtggagggagactgtaaataggtttgaatagaacaggtaagagttgcaggttacggtgggttaattacctccaccccgatctcaaacgagggaagctcacaccccaagaagaacacctcgtcatggaccttcattccaaatggggaaatagatggtcaagaattgctcgcaggctaccagggcgaactgacaatgagattaagaattattggaggactcacatgaggaaaaagaaggctcaagagaaaaagcatgcatcagcagcatcgcctgtttcttctagttgtcaatcttcactgtcctcaaacaaccatgttgtggattcacatgcttccaaagaggttggagaagagagttgttatgacacaggtggatatgatgatggcatgatgatgggtttaattggtggtgaaaaggggtactccatggatgatatatggaaagatattatgtcagaagaagagaacaacatttataataataatcttcaacctgtctatgaagggcatagtgaagagggatgcaacttctcttgtccaccaccaccaatgattatgccttctccaccatcatgggatcagtacaacatttcttctcaacccttatgggtgatggatgaagaagaaagtaataagatgttattccctacactaagtgaccaatattttccttactatgaacaagggaacgcatttctaactggctaatcaggagattctttttttcttttgtccttaaaaaaattatcaatattttgttcttatgtgtgtgccatctgtcacaataagaaggcttaagtgttaacctgtacagcatagtatctttgagctttcggcatggtcctccatagtgtgacacagctgtaatcgatctcaaatgtaactgtagtctatgtcaaaatgtgtttgtggttttactttaaagaaacatccaatagggaaagtggttatgttctgaattatgtaaaatatacatcaagcacttatgcaaattcaagttttaatctaatttgaatggatgcctatcaattatagc

SEQ ID NO: 8809 - DNA, 479 bp, Glycine max
  Clone ID: 700794727_FLI
atttattccaccacccccaaagggaccacctacagaactgttggtggaacaaaaccatgagattattcagttatgctacaacagaggctttgatttcaagttatatctccctcactaccagtcacaggagaactggatgcgacactatggagataagtggaccagattcgtcgagagaaaggccaattttgatcccttggctattcttgcacctggacagaaaattttttcccgaatccctcaaaccttgtctatcacataaatattatttagattaatatattgttttttcttttttcttctcaacccactgtgatcattttgtcctgatttcatttttttttcttctttctcttgactcccccttccttttgtttctgtccccaatcgctccaaccatttaccacaccgttgtagccatattgtaaatgaatattttgggggtgaaattaatatgaatctctatcttttgcactgtc

SEQ ID NO: 8810 - DNA, 544 bp, Glycine max
  Clone ID: 700794770_FLI
ctatgcttgcaaaagttttaacggagaaaagattggctttaatcaaagcatgggaagaaagtgaaaagacaaaagcagagaacagggcatacaagaagcactctgctgttggattgtgggaggatagcaagaaagcatccgtagaggcacaactcaagaaaattgaggaaagcatggaaaaaaagaaggccgaatatgttgaaaaaatgaagaataaaattgctgaaatccaccggttagcagaagagaaaaaagcaattgttgaggctcagaaaagggaagaatttatcgacctagaggagactgcttcaaagtttcgtagccgtggagatgtgccaaggaaattttttgcatgctttggtggctaagcttttacatgaatatcggggaccaaattctcgctggatttgttatatgttgttacatatacatttaaattttgcttggtgtgttgttttttcctatatgctatttgaatcaaatctcaacagttgatttgaagtgcacaaatttctgtataaataagtgaagaaattttgtctac

SEQ ID NO: 8811 - DNA, 1311 bp, Glycine max
  Clone ID: 700794988_FLI
agccactgcatttctgcttgttttctctgaacatggtagtcacaaacacaaaccagttaggggaaaccattgattccacttatgataggaaagctgaaaagaaagcctttgatgattcaaaagctggtgttagaggtcttgtagagtccggagtgacgaagattcctcgcatgtttcatgctggcaagctggatgtcattgaaacctcacctagtcacaccaagttgagtatccccatcatagacctcaaggacatacactctaatccagctctgcatacacaagtaatgggcaaaattcgaagtgcatgccatgagtggggatttttccaggtgattaatcatggaattccaatcagtgtcttggatgagatgattggtggaattcgtagatttcatgaacaagatgctgaggtaaggaaagagttctatactcgagatttgaagaaaaaagttttgtattactccaacattagcttgtacagtgaccaacctgttaattggagagatacatttggttttggtgttgctcctgatccagccaagcctgaagaaataccatctgtatgcagggacattgtgattgaatattcaaagaaaataagggatttgggttttacaatgtttgagttattgtcagaggctttgggacttaatccttcttaccttaaagaattgaattgtgctgagggactctttattttgggtcactactatccagcatgccctgaacctgaattaactatgggcactaccaagcacacagatagtaacttcatgactttacttttacaagaccaacttggtggtcttcaagttcttcatcagaatcaatgggtcaatgttcctcctgtacatggagctctggttgtaaacataggagatcttctacagcttatcacaaatgacaagtttgttagtgtgtatcaccgtgtcttatcacaaaacacaggcccaagaatatctgtagcaagcttctttgtaaattcacatgacccagttgagggtacatcaaagatgtatggtccaattaaggaactgctttcagaagaaaacccaccaatctacagagacacaaccttgaaagagtttttggcatattattatgcaaagggccttgatggaaattcttctttggaccccttcagggtgtgaatcaaacatgggaaagcactcttaattctcttggatctggctgtaattcatctaaataagaagccactttctagttttccagaatgacctttgtataaacagcagcaacaagttctccagattgaaaataaatgaattatctatgttcacattttcc

SEQ ID NO: 8812 - DNA, 1992 bp, Glycine max
  Clone ID: 700795004_FLI
cttttaaaagagaaaaaattgatccaagttatgaggatgtcttgaatcgtgtagtaacttatgcttctggccttccattggctttggaagttataggttccaacttgtttgaaaaaactgtagcagaatgggaatctgctatggaacattataaaagaattcccagtgatgaaatccaagagattctaaaagtaagctttgatgctttgggggaagaacaaaagaatgtttttcttgacattgcttgttgcttcaaagggtatgaatggacagaggttgataatatactccgtgacctttatggtaactgcacgaagcatcatattggggtgttggttgaaaaatctctcgtaaaggttagctgctgtgatactgttgaaatgcacgacatgatccaggacatgggtagagaaattgagcggcagagatcaccagaagagccagggaagtgcaagagattattgttaccaaaagatatcattcaagttttaaaagacaacacggggactagtaaaattgaaatcatatgtctggatttctccatatctgacaaagaagaaacagtggaatggaatgaaaacgccttcatgaagatgaaaaaccttaaaatacttattattagaaattgcaaattttccaaaggtcccaattattttccagaaggtttaagagtactggaatggcacagatatccttcaaattgtttaccatctaactttgatcctatcaaccttgttatatgcaagttacctgacagctccattacgtcatttgagttccatggctcatccaagaagctcgggcatctaacagttttaaattttgaccggtgcgaatttttaacaaagatacctgatgtatctgatctcccaaatttgaaggaactttcatttaattggtgtgagagtttagttgcagttgatgactcaattggttttctgaataaacttaaaacattgagtgcttatggttgcaggaagcttacgagttttccgcctctcaacttgacctctcttgaaacacttaaccttggtgggtgttcgagtcttgagtattttccagaaatattaggagagatgaaaaacataacggtacttgctttgcatgaccttcccataaaagaattgccattttcatttcaaaatcttattggactcctgtttttatggctggatagttgtggaattgttcagttacgatgtagcttagccacgatgcccaaactgtgtgaattctgtataacggatagttgcaacaggtggcaatgggtagaatcggaagaaggtgaagaaaaagtagtgggctcaatactatcttttgaggccacggactgcaatctatgtgatgattttttttttataggttccaagaggtttgctcatgtaggatatttaaatctaccggggaataatttcacaatccttcctgaattcttcaaagaactgcaatttttaacaactcttgtggtgcatgattgcaagcatcttcaggaaattagagggcttccaccaaacttaaagcatttcgatgcaagaaactgtgcatccttgacttcctcgagtaaaagcatgcttttaaatcaggaactgcatgaggctggaggaatcgagtttgtatttccaggaacaagtataccagagtggttcgatcagcaaagcagtggacattcaatttctttctggtttcgtaataaatttccagccaaacttctttgtcttcatattgcaccgtctactgggtcttttatccggtatccagaggtgttcatcaatggaaaatttcaagaatttgagtcccatgagacggacgatacagaaagtatgttgggattggatcatacacatatctttgatctccaagcgtatgctttcaaaaataataatcagtttgaagaagtggcttgggaaaaggaatggaaccatgtggaggttacatatcaaagtgtgttagacgatgaagaagaagagagtgaagaaggtgtgttagacgatg

SEQ ID NO: 8813 - DNA, 1240 bp, Glycine max
  Clone ID: 700795154_FLI
acgcattcaagccctagatttcaatctagggtttctttgcacgctaattccatcttcaaattctgccttcattcgattcaggggggaattaaattgtttctattttttttcgaatttaccacaaattagaaatcgataaagaaaaatggtgagggtgttgagaagctgcattcaatcgattttgaagctggtgaactcggtgattgggatggcggggctagccatgattctgtactccgcatggatgattagggtttggcagaggaagatgggcgaacttccctttggtcacgattctgattacccacctccgtggttcatttacatgtttcttggccttggagttgctttctgtgtaatcacttgtttaggtcatgttgctgctgaaactgctaatggctgttgcctatatttgtatatggtatttgtggttttgcttatcatgctggaagctgcagtaactgttgatgtatttgtaaaccaggactgggagaaggacttcccaaaagacccctccgggagttttgatcagttcaagaattttatcaggtcaaattatgagatgtgcaaatgggtaggcctgtcacttgtttctgtacagggactctctttattattggcaatgatactcaaagcactagggccacatcaatattatgacagtgatgatgaatatgctcctgacagggtgccactcttgagaaatgctccacctcattatgttgttgttgatccaggatatgtgcatggaaatgatgcatggaggagacaagacaaataggtaagcccattttgctttgaattgaaccttgatgctagccatggaaggtgggcgtggcaatcattttttatgccagttgacttagaaggggacctgtatgcttgagatggattagctattggattaatggctatgggagaaacaagttcttatcgtgacccttgcatctgttacaccaatttcatacagttatgagcaaacgtatacgttgtatcatatatttttatatttcttttttgggtgaatggacgaacgtatgtatcatattgattcatgtctgtatatcataaataaaatgcagaatctcttgatgaatgatccccctgtatcttctgttaaatgtatcacagaagttggatcaatagatagataagaacaaattttcctttgtttatcctgattactgatcattcatccagttgatacaaaatggaattttggtgcccggtgcatttacac

SEQ ID NO: 8814 - DNA, 827 bp, Glycine max
  Clone ID: 700795232_FLI
tgagtttcgagcagtggcgtcagggacctcaaatgtcacacaatcaatgcttgactgtcgtccgggggaagcacttgtggtgaactttgcattccagcttcaccacatgcgcgatgaaactgtatcgacagtgaacgagcgagaccaacttcttcgcatggttaagagcttgaatccaaaacttgtgacagttgtggagcaggacatgaacaccaacacctccccttttctcccaagatttgttgaagcctacaattactactctgctgtgtttaacacacttgatgcaactctccctagggagagccaggacaggatgaatgtcgaaaggcaatgcctggcaaaggacatagtcaacattgttgcttgcgagggtgaggaaagaatagaacggtatgaagtcgccggaaaatggagggcaaggttgtcaatggctggcttcactccatccccaatgagcacaaatgtgagagaagcaattaggaaactcattattaagcaatactgtgacaaattcaagataaaggaggaaatggggggtcttcattttgggtgggaagacaaaaacttaattgttgcttcagcatggaagtgaccaatacaaattcttttgttgcatgagactcattgtagtgttgatgtagtatttgtttgcttgtttagtttgtatctgttatgtttatgcttggttcagactcagatgtatactaacgtgcaacttatgctaatacatactttcatgtgtatggcaacacaaaacagctatcaatgcttaggcttgtaatgacatcattttcttgttagttagcatataattttgcgtttcc

SEQ ID NO: 8815 - DNA, 1499 bp, Glycine max
  Clone ID: 700795271_FLI
cctgtttgctgtagaagaaactacgtcaattaagaaaagaaaagatgcagataacaaacatgatgacaaagaatttggagatcattttcccacaaagaaagctagagtagtttggtctgtggatcttcatcagaagtttgtcaaagcagtgaatcaaatcggatttgatattggtcccaagaaaattctagatctgatgaatgttccatggttgactagagaaaatgttgctagtcacttgcagaaatacaggctctacttgagtaggttgcaaaaggaaaatgatcagaaatcttcatcaagtggaataaagcactcggattcaccttcgaaagatctaggaagttttagttttctgaacactgcaaacaagcaacaaaatgatattgccactgacagcttcagttattcagatggaactttactaattcagatggatgctacaagttatgaaggtgatctcaagggaattgtgtcagagcctacaacagaaaaaagaagagcttccactagtgaaattccggatccaaaggtacaaaaaagttcgcagaagagcctcaacaaaccttttacatctgtagagtcatcagaagcaaaccatgcagtctttgattgcaccataccaacagaatactcttggagtgagtttccaaaaggtccactcaaagaagaacagaagacacctgttcaattagaggatagcctctgccagttgccattgcatggtacacagcatcacattcagattgatcaatcacaatcaattgcctcaattaattccaatccctctataacagaagaagaggttgctgccaaattagagaccaaacctttgtatgctggttacgagagtgattatgtgaatcctgtgagttcaataggatctgcagttgaagcctttcgtagtcagtccaaaagccttatggtgagtgatcaatcttcagagcccactttcacctcgaatttgagcttgaagactcagggattcaatctagattgcatttctgatctggatttttaccaaaggaacctattattgggtggtgaggtagcttctgcacctttggatgaggacctgaatttctttttgctacaaagtgaatgctacaacatgaattttggactgcagaatatagatatgtcagagtattatgatccaaggcttactgctgaagtccctagccacttttatgattcagcagattattcatcggtagatcaaagtctattcattgcatgatcggtcctgctcttcccttttctgcatcttcaacaaaaatccaactaaatgcacgaaaggacgatttactgtcacaacttgaactttctttttcctttccaagaatatcaactttagggggctggggtattcttttttccaattagaaaggattttgatattgaagcacagataaaagtggatgatgtgtgatgacaaacgttaagcttatcaataagcttgcttcctttaatactaataactgaatatttggagaagc

SEQ ID NO: 8816 - DNA, 668 bp, Glycine max
  Clone ID: 700795352_FLI
cttgattctgcaactacacatggttgtgttttggcaaaacatagaaaatcgtcaactttggagtccaatgatttattgctacaccttgagaaaattgggatttaaaaattcccggatactcaagtgaagagaagaagaatcagaacaaacctctattaaatgacctccacaagaggcgcctagatatggttcgcacattgatggaatctttgccctctgagtcgagtgttaacagttctaaagagatgagtatacagggcatttctaatcctccccctgtgggaacccaccatctagtaagacccttgagttcagagcagttgatttctcatgcagctggttctcaaatgctacagcagatgacaagattttaatgttcctctgattttggtcttcatgctgctaggtttgacttcctgtatgcagggtctggcaagagattgcttgctgaaactgattagcatacaaaggaactgtaattacttagtatttagacatgaaaaaaatagttgtttaaggatcccagctattgacactgtcttgttatttgccccaacccctcctctatagtcattttgtttcactgtttgagcctaattatggatttttaatgtacattggtgcctgtctcgggctcatttgtagtataaacatatgcttttttggat

SEQ ID NO: 8817 - DNA, 503 bp, Glycine max
  Clone ID: 700795559_FLI
gaaaccctagtggtagtggagttgggtgagaatgggaatagcaggtaaggttggggattatgctttcaaggcattcaccgccactcttggagtcgccactatttacctcactgcaaccttctctgtcaacgtttacagaggcctctcttggcacaatgctcaaaccaaacttgacaaacaagatgctgatgagcaagcaccgtgacttgatctcataagcccaccatcttaaatttcaaatcatgttgtgtagaaatataatgtgagtttctttcttacaatttttcacttaattagccaataattaaatggaaaatcacgagtaataacctagtaaattggcaaaagtagattgtggtttttgatagattgtacttatacattattatttgtttacgtgttatatggacttcctggaatcgacttctgatcatatacgacatacgatggtagacaatgaagttatattaagtagggggtgtcaatcaccctagttactggtg

SEQ ID NO: 8818 - DNA, 1038 bp, Glycine max
  Clone ID: 700795654_FLI
cttcataagtacctcaaggacaaaggtgcacttagtccttcaacagccatcaattttggcttggatattgctagagggatggcttatcttcacaatgaaccaaatgttatcattcatcgagacctaaagccaaggaatgttcttttagtcaactccagtgctgaccatttaaaagttggtgattttggacttagtaagctcattaaggtccaaagtgctcatgacgtatacaagatgacgggtgaaactggaagctaccgctacatggctcctgaagttctcaaacaccggagatatgataagaaggttgatgtgttctcctttgcaatgattctgtatgagatgcttgaaggtgaaccccctttttcaaattacgaaccttatgatggagccaaatatgtggcagaaggacacagaccttcttttaggggaaagggttatatccctgaactgcgagagttaactgagcagtgttgggatgctgacatgaagcaaagaccttcattcatagagatcattaaacaccttgaaaagatcaaggaaaatttgccttcagatcatcactggcacttgttcacttcatgatttttaggagcattggtgccgtgaaattcagatgattatctgctattaccattccagcgggttgccttatctactgtcgcgggtttttgaacagagccgacttggaaaacctagctaaggtcatgagcattgctttgaactgttagattcaaatgagcataacaggtttatgctgattgcctttatctggtgtttacattcaattactgttttttgtctcattaaaattcttggcgaattctattcagctatttaagtgagcagatactagttgttgcttgagtgtaatatgtagggtacaaaacccattgaggaaaaatataacacatcatgcaatctagtgtttaatattttatcttatgattaaaaattaatagcggttttcatttcttggatattgtttgaccaattcttctgttcaatgctaccaactactatgagattctctttctc

SEQ ID NO: 8819 - DNA, 842 bp, Glycine max
  Clone ID: 700795673_FLI
tagagaagaaagaaaggaaagggtagggtagatcaggcaggcttcagttcagccatgagaactcacactcacacttacacttatactattttctctctaattcttctctccttatttcttcgaacccattccgaggttataacgttaacctctgatacatttaatgataagatcaaggagaaagacactgcatggtttgtgaaattctgcgttccctggtgcaagcattgtaagaatcttggttcattgtgggatgatttggggaaagcaatggaaggagaagatgaaatagaggttggagaagtcgattgcggcatggacaaagcagtatgttccaaagttgatattcactcctatcctacctttaaggttttctatgatggtgaagaagtagccagataccaaggtacaagagatgttgaatcaatgaaaacctttgttttggaagaagctgaaaaggcagcagcaaaagcacttgaaagtaacaaagaattataacaacttttgaggtgcagtcattatctggattacaactagctctttactgtgggtggtgcacatcccagataagtaatcacctttgggttcaggctgagacattcattcttctctgttctgatcaacatttgtttgtttgacgtagcagttgtgagttaagaactaatttcgtacactaccacaatttctttctgctatactccacaattttcttttttaggtttatttatactctactaaactgatagtggcttgtcatgtttaaagtttcaatataatgatcagtgaattatgaatcgtacctcaggatttgtttatataatcatttggtcttttgaatgctc

SEQ ID NO: 8820 - DNA, 1861 bp, Glycine max
  Clone ID: 700795677_FLI
gttcttcttcttcctctcttcttcttcttcttcttcttcttgtcatggctgctgcgtctaatctctccactctctcctcctcttccctctccaaacccccgtcctctttccctttccgcaacacaccaacaaacaacaacgcttcttttctacacaacaaatcccttccaaaccaaaactctctctctcacaaactctcttcccctctgcctctcgcatgcaacccaaaaaaccaaaacacttgtgtcttcttcgacgacgaagaccaaaagccccgtgaagagtgcggcgtggtgggcatctacggcgacccggaagcctcccgtctctgctccctggccctccacgccctccagcaccgcggccaagaaggtgccggcatcgtagccgtccacgacaaccacctccaatccgtcaccggcgtcggcctcgtctccgacgtcttcgacgagtccaagctctcccgcctccccggcacctcggccattggccacgtccgctactccaccgccggccaatccatgctcaaaaacgtccaacccttcctggccgactaccgcttcggctccgtcgccgtcgctcacaacggcaacttcgtcaactaccgctccctccgagccagactcgaacacaacaacggctccatcttcaacaccacctccgacaccgaggttgtcctccacctcatcgccacttcaaaacacaggccattcctcctcagaatcgtggacgcctgcgagcatctccaaggcgcctactccctcgtattcgtcacggaggacaagctcgtcgccgtcagagaccccttcgggttccgacccttggtgatgggtaggagaaccaacggcgctgtagttttggcctccgagacatgcgcgcttgatttaatcgaagccacgtacgagagagaggtgtacccgggtgaagttatcgtggtggaccacactggaatccaatccctctgcctcgtgtctcatcctgagccaaaacaatgcatcttcgagcacatatacttcgcgcttcctaactctgttgttttcgggaggtccgtgtacgagtctagaaaaaaattcggagaaatactagcctctgagagtcccgttgagtgtgacgttgtgatcgcggttcctgattctggcgttgtggctgcgcttggttatgctgcaaaagctggggtaccctttcagcaggggttgattaggtcccactatgtagggaggactttcatcgagccttcgcagaaaattagggattttggagtgaagcttaaactgtctccggttcatgctgtgcttgaagggaagagggttgtggttgtggatgattccatcgtgagaggcaccacgtcgtccaagattgtgaggctcttgaaggaggccggtgccaaggaagttcacatgaggattgcatgtcctcctattgttgcttcgtgttattatggagttgacacacccagttcagaggagttgatatccaaccagatgagtgtggaggagataaggaagtttattgggtcggattcgctggcttttcttcccttggataagttgaagacattgttaggggatgatgctcttaactactgctatgcttgcttctctgggaagtaccctgttgagcctgaggaacttcaaatgaagaggcttggtgttgctcacttcaattgggacgacgacttcaatgggaatttcgaatctattgatgtggggggttgggttacaaatcaagatgggtttaagattggtagtgtctaagaatgcttttgtacttagataactggccaatcaaaatattgggtaaataaatgtcaaactatccatacaactaattatacaataaaatagttcgcattctatttcgg

SEQ ID NO: 8821 - DNA, 1920 bp, Glycine max
  Clone ID: 700795853_FLI
attcatttgattgtatcagacaatcggtgatcaaaactttcctaaaaaattcctcatggtgttcacatttccaactcttctgtccatgaagctccaaccactttcgctgcttcttgtgatgtacttctgtgcatttgctacttcttctgagattgcttcagaagcaaatgctttgttgaaatggaaagccagccttgacaaccacagtcaagcttctctctcttcatggattggcaataatccttgcaattggcttggaattgcatgcgatgtgtccagttctgtttccaacataaatctcacacgtgttggattaagaggtacgcttcaaagtcttaacttctcattacttccaaacatcctcattctgaatatgagttacaactccctgtctggaagtattcctcctcaaattgatgccttgtccaatctcaacactcttgatttgtccactaataaactctttggtagcattcccaataccattggtaatttgtccaaactacaatatcttaatcttagtgccaatggtctctctggtcctattcctaatgaagtgggaaatctcaagtctcttctcacattcgatatatttaccaacaacctctctggaccaattccaccttccttgggtaacttaccccatttgcaatccattcacatttttgaaaatcaactctctggatccattccttccactctaggaaatttgtccaagctcactatgttatctttatcatcaaataaactcaccgggaccattcctccctctattgggaatttaacaaatgccaaagtgatatgttttattggaaatgatcttagtggtgagattccaatagaattggagaagcttactggcttggaatgtttgcagctagctgataacaattttataggccaaatacctcagaatgtttgtcttggtggaaacttgaaattcttcactgctggtaataacaatttcactggccaaattccagagagtttgaggaagtgctacagccttaaaagactcaggcttcagcaaaatcttctatctggggatataacagatttttttgatgtacttccaaacttgaactacatcgatttgagtgataatagttttcatggtcaagtttcacctaagtggggaaagttccatagcctcacaagcctcatgatctccaacaataatttgtcaggtgttatcccaccagaactaggtggagcgttcaacttacgcgtacttcacctatcctcaaaccatcttacaggaaccattcctctcgaattatgtaacttgacctacttgtttgatctcttaatcagcaacaacagtctttcaggaaatattcccatcaaaatatcttccctgcaggaacttaaatacttggagcttgggtcgaatgatttcactggcttaatcccaggacaacttggagatttgctcaatttattgtccatggatctgagccagaatagattagagggaaatattcctttagagattggcagtttggattatcttacaagtcttgatctgagtggaaatttgttgagtggaacaataccaccaacgcttggaggaatacaacacttagaaagattgaatctctcacacaatagtctttcaggtggtctctctagcttggaaggtatgataagtttgacatcttttgatgtatcatacaaccagtttgagggtccacttcctaacattctagccttccaaaatactacaattgatacattgagaaataataaaggcttgtgtggcaatgtcagtggcttgacgccttgcacattattaagtgggaagaaatctcacaatcatgtgactaagaaagtcttgatatcagttttaccccttagtttggccattctgatgcttgcattatttgttttcggagtctggtatcatttacgccaaaattc

SEQ ID NO: 8822 - DNA, 1713 bp, Glycine max
  Clone ID: 700795892_FLI
gcaagatgttacaagttgttgctccctctttgtcccttgtctcctcccaaccttctacttccaaagatgctgaatccgcctccgctgctaacatggattttaatgttgatctaacaaccggggcacgcaatctttcctctacgcttcagaagctccttctttgggagaagaaactctttaatgaagttaaggcggaggaaaagatgcgggtcatgcacgataggaagtgtcacaggttgaagcgtttggatgataggggttctgattttcataaagtcgattcgactcgaactttgattaggaatctgtccacaaaaattagaatggcaattcaggtggttgataagatttctatgactataaataagataagggatgaagaactgtggccacagctgaaggaattaatccaggggttgaccagaatgtggaaatccatgcttgaatgtcatcatgatcagtgtgaagcaattagagaagccagaatactgggttccattggatccaggaagaagagcggtgatagtcatctccaggcaaccaagcagctcgaacaagagcttatcaattggacattccaattctctggctggataagtgctcaaaaaggttatgttagagcattgaataattggctgttgaaatgtctcctgtatgaacctgaagaaacaccagatggcatagtccccttttcccctggtaggattggggccccgcaaatatttgtaatatgtaatcagtggtcccaagctttggatagaatatctgaaaaggaagttgttgattccatgcatgtatttaccatgagtgtgcttcagatatgggaacaagataagctagaaatgcataggcaggtgatgaagaacaaggatcttgagagaaaagtgagaaatatggatagagatgaccagaagctgcagaagcaaattcaagcattagagcgaaaggtggttctggtatctggagaaggcaaaggtctctcagtttctgagaatatcatatatcagagtgacaaaagcagtagtctacaggctagcttgcagcgcatttttgaggccatggagagatttactgatgaatctgtgagagcttatgaggagttgctacaacggagcgaagaagaaagtgctgcccgaaatcatgagagagtttcataggggtggtgtagctgatggaagttggaatgatattatctttgccatttgccgagaatagaaactagctgatctccctctactaactattctttacaacagagtcttgggaggaggggttgggtttgatttctcactacgctaagctaactgcattggagctgaagatactactgagatgggacagtggagtttattgtcaaacgaaaagagaagtgtgaggtattaggcgcacagttgctttttgggtatgcagcgctataaggccacaagtgaagttgtgctgctaaaagacaggggaaggggagcccacaaattgtaacatctaaatggttcttctttctgcatttgaaaatagaaatgaaggagaaggacggactttcgggtatagaacccctgcaactggcaagtcatgtgatagaaggctcaaattgaatcagtaaaattggagtaacgcacgccactgaatgcatgggtgttattggttcctgtataaaaacattcgtttttaagttaaattattgtacagattacctattaacactgagcaggcttgatg

SEQ ID NO: 8823 - DNA, 1042 bp, Glycine max
  Clone ID: 700795921_FLI
gaaaattaaacatgggaagaggaagggttgttctggaaagaatagagaacaagatcaaccgtcaagtaacattctcaaaacgcagaagtgggttgctgaagaaggcctttgagctttctgtgctatgtgatgctgaagttggccttatcatcttttctagccgtggcaagctttttcagtacagcagcactgatattaccaaaatcattgagaggtatcgccaatgtcgttacagcaagtcacacactggtgattcattggaacacgattcacagagcgcataccatgaattcttgaaattaagagcgaaatatgaatctcttgagcggacacaaaggcattttcaaggagaagaccttgagccacttagctttaaagatttgcagagcctggagaagcaactagacataacgctcgcactaactcgacagcaccaaacgaagaaactcatggcacgagcggatgaattacgcgaaaaggtgcataagttggaggatcttaacaaacaattggagtccaaggttttctctttaaataaccatgaaaaagatgaattctcgagtctcatccttgacaataacaattacattcaaatgcatgctacacaagttgatcaatttgagtctgagacagcactaaacacatggtttcaacatcaagaagttgtttctaaggaaaaagcaattgataccaggacagagcatagtcaaagcagtcacaacaaaaacaatggatggctgtaatgaatattcatttaatttacatgctaaaaaaatacctatcacaataactaatgggataatgcccattattggtattcacacaaatagtttatataaagtaaatgttatttctactaaacacacattattcctaataagaaattatgtattttatgcatcagaaaaggggatgaattgtgtatttcatctatcattgtataagttgtcattttaaaaaaatttcttaaatattgatattttacctattggcgtcatcattgtaatcagtttctagtagtagagagaaataattttatcct

SEQ ID NO: 8824 - DNA, 1697 bp, Glycine max
  Clone ID: 700796005_FLI
gtaagaatagggaattagggagagaaggataagagagagaaaacaggaggagcaggaatcaggcatggaagggctggccatgctgaagcagctcattgctcagcttcaacacctctttgacacttaccactctcaatcttctctcatctttcaacaacaacaccccagatggacgacctcccttgacattgaagataactctgtagatgacttctgtggccttgtaatgacagctggaaagtctggcagtttcaggatgtcggagcctggaaagcctccacctactaagaagtctcgaagagatagaagcaggggcaaatcatctggaagatcttgtacaactgaagttatggaacaagaaatttggaaagattttcctgaagatttatttgaggctgtgattgcacgtcttcccatttccacatttttccgcttccgttctgtctgccggcagtggaattccatgctgaattctcaaagtttttctcagcattgtactcaagtcacacaagaaaatccatggttttacaccattacccatgaaaatgtgaattcgggagccatgtacgacccttctttgaaaaaatggcatcatccaactatatcaacaccgcccacaaaattgattgttttacctgtggcttcttctggcggcttagtttgctttcttgacattggtcatcgaaacttctttgtttgtaacccactgactcaatccttcaaggagttgccagctcgatcagtcaaggtctggtctcgtgttgctgtagggatgatggcaaatggaaactttgctggttcaggctacaagatcgtatgggtaggttgtgatggagaatatgaagtatacgactcagtcagaaattcttggagtcgtccaggaaacatgcctgtgggcatgaagctgccattgtcgctcaactttaggtctcaagctgtctctattggcagcacactttatttcatgcgttcagacccagacgggattgtttcctatgatatggcaactggggtttggaaacaatatataatcccagcgccactgcatctgactgatcacactctggctgagtgtgatggccaggtcatgcttgtgggtttgctcacgaagaatgcagccacttgtgtatgcatatgggagttgcagaaaatgactctcttgtggaaggaggttgacagaatgccaaacatatggtgcttggacttttatgggaagcacgttagaatgacttgcctggggaacaaaggcttgctcatgttgtccttgagatcaaaacaaatgaaccgattggttacttacaacatagcaaagaaagaatggctgaaggttcctgggtgtgtcgtgccacgtgggagaaaacgacagtggatagcatgtggtactgcatttcatccatgcctgactgcggtggtgtgatttctcatctatctctaacagcaatggcctagcaacggcctgccatttcccccctccagtcttgtagttcttttgcaatttgcaggcctttggtgttgctgtaggtaatcctaatgttcattgctggtgtaacaaagtagatgaaaaataatatgggtttgtagtgattcacgttttttcatgctctcagacatgtaaacattactttggttttgttatgaatgcctcatcctgggaacaccttggtaaaaggtgatataaaactgccgttcttttctgt

SEQ ID NO: 8825 - DNA, 564 bp, Glycine max
  Clone ID: 700796106_FLI
tgggtgctctggatcacatatcggaactctttgactgctccagtggcagttccaagcacaagaagcgcaagcaattgcagacggtggaggtgaaagtgaagatggactgcgaaggatgcgagaggaaagtgaggaaggcggtggaggggatgaaaggcgtgaaccaggtggatgtggagcgtaaggccaacaaagtcactgtggtcggctacgtcgaggcctctaaggtggtcgcccgcatcgctcaccgcaccggcaagaaagcagagctctggccctacgtcccctacgacgtcgttgctcacccctacgcacccggagtctacgacaagaaagccccctccggttatgtccgcaacaccgatgatcctcactattcccatctcgcacgtgccagctccactgaggtccgctacaccactgctttcagcgacgaaaacccctccgcctgtgtcgttatgtgaaactattctctttatttgttatcttcgctttcattctatcttgtttttcagatcatgttgtattttttctctgttgaatgatactccttcgcctttacct

SEQ ID NO: 8826 - DNA, 988 bp, Glycine max
  Clone ID: 700796263_FLI
atttaatttgtagataggagctccacccgaagtggtggcgcgtatggctgcggctaagcaagagtttgaggcacggcaaagatcttcagttggttcaagggaaacttcaaaagaccctgaacttgaccaattcatggaagcatactatgacatgcttgtgaagtatagagaggaattaacaaggcctattcaagaggctatggatttcatgcgaaggatagaaactcagctaaatatgctttgcaatggacccgtgcggatcttctctgatgataaatgtgaaggtgccggttcatcagaagaggatcaagacaacagtggaggagaaacagaacttcccgagattgatccccgagcagaagaccgtgaactcaaaaaccacttgctgaagaagtacagtggttacttaagtagccttaagcaagaactctccaagaagaaaaagaaagggaaacttcccaaagatgctaggcaaaagctacttaactggtgggaattacattacaaatggccatatccttcggaatcagagaaggtggcattggctgaatcaactggtttggaccaaaagcaaataaataactggttcataaaccagaggaagaggcattggaaaccatctgaagacatgcaatttatggtgatggatggcctgcatccgcagagtgcaactctctatatggatggtcactacatggcagatggtcactaccgtctaggaccatgacaaaagacaaggccaccttataaattattattatatatatttttaattgtaatttaaatgcaaggtatgtgtttcttattaacaaagagattgtgcccaaactggataacagtcaacgctctagctactagtttcaatattatcaagcatataccgtgaacattaattggttgtgcttgtgcagtgtgagtacttgagtagtttgccacagtgatgttgtacgttttattaaacaatgacggttgcttattatattttcat

SEQ ID NO: 8827 - DNA, 667 bp, Glycine max
  Clone ID: 700796339_FLI
ttgataacttgatcttgttttgtgaagactgaattcaaatgggtgccaattaattcagtcttcacaaaacaagatcaagttatcaaatttttctaatgtatctcatcaccgaatgatcatttgggtgcaaaggagtttagaggaccctacaatacttgttacaacgtatgaaggagagcataaccatggtcatcaaagagctgaaatatcacttgtctcaaaccaaagtgaagcccttcctcctcttaaagggtcaagtcctgtttcctcacctaatacagcgacaattcgaagtgctgtttgccccaccgtaacgcttgatttggtcaagtcaggattggttgaatttgaaagtgcccaaaagtcctctatccagcaatttttggttcaacaaatggctacttctttgacaagggatcccaatttcacaacagaacttgccactgccatttcaggaaaaattctagaggcccaatggtgaattattaacctaggtgtaacttaattcataatatatactgaatttgtgggagatatccccaaaatacaattttagagaaatgtgataaattttaaatgtaattaaatctcggactaagagattatagttgttgttaataaaaaacacacatcattattatgaacaaattatcaattttaaaaaata

SEQ ID NO: 8828 - DNA, 1326 bp, Glycine max
  Clone ID: 700796373_FLI
caaatcctccttggagatgttcgtaattttgcaatagattttcgaaattgatgttaagtctgcagacaggatctcagatgctgctctagaatctgcggttctgcaatttatcccatgcatccgttctggtagttttgctgacattgggccacggagatacatggaagatgaacatataaggatagatgatttgtcgtctcatctgggatctctatacaactttccaaaaccaagtgccttctatggggtgtttgatggtcatggaggacctgaagctgcggcttatataagaaaacacgtgataaaattcttcttcgaagatgtcagtttcccacagacatccgaagtcgataatgtatttttggaagaggtagaggattccctcagaaaggcatttcttttggctgattcagctttggccgatgattgcagcgtgaatagttcatcaggcactacggcccttactgctttgatatttggaaggcttctaatggtggccaatgctggcgactgccgagcagttctctgtcgcaaaggagaggccattgacatgtctgaagatcacaggcctatttatctatcagagcggaggcgagttgaagaattgggtggctacatagaagatggttatctgaatggggttttatcagttactcgagcactaggggactgggacatgaagttacctaagggtgctccctcacctttgattgcagagcctgagtttcggcaagtggttctaacagatgatgatgaattcctcatcattggatgcgacggcatctgggatgtgatgtcaagtcagcatgctgttagccttgttcggaaaggcctgaggcggcacgatgacccagagaaatgcgccagggacctggttatggaggcattacgtctcaacacattcgacaatctcactgtgatcattgtatgtttctcttcccttgaccacgcggagccagagccatcccctcctcgccaacggaaattgagatgctgtagcctctctgcagaggctctttgtagcttgaggagcttgttggaaggcagtgcaagcaactgaatgtatgtacatacacagttcatctaataatgtgttgttgggattatacacactgttttcggttgcttcagtttagacattggaaaaagctgccatcatttttttacgtggtcggttgatgtacgtagcctgggttggaggatggtggtgtaaatatgtattgtcgttacattattattttgtactatagtcaatttttactatgactgccacattcatgtcagattcttgtgcgtcaataaatggaatctcttagcttctattcc

SEQ ID NO: 8829 - DNA, 673 bp, Glycine max
  Clone ID: 700796424_FLI
agaagatattacaattgaaggattcaatatcccacgagacacaattgtgatcattaatggttggggcatgcagagagatcctcagttgtggaatgatgccacatgctttaaacctgagaggtttgatgtggaaggagaggagaaaaagttggtagcatttggcatgggaagaagggcttgcccaggagaacccatggctatgcaaagtgtcagctttactttgggattgttgattcaatgttttgactggaaacgagtaagtgaggaaaagcttgatatgacagagaacaattggatcaccttgtcaaggttaattccattggaggccatgtgcaaggctcgcccacttgccactaaaattggaatttaattattaatagtatttttatttggtaaacttgggtgattctagaatctaatacttataattttagtgtgtaagagtggtgatcatatatacatttcaaaattaataatctttgtccaaaaatcatccatggacaactatatgtcaattgacatctagagagaaatatagatataagaatatttatattttattactcttctttatcttatgtgtcaaggcccattgtagaattgggtgagcattaacatatatcaatattgtataccgcccagttttctcaaataaatttctttactttcaatt

SEQ ID NO: 8830 - DNA, 815 bp, Glycine max
  Clone ID: 700796591_FLI
cattactcaaatcttttcagaatgaaagcagatgctgcaaaggctgatgtcctctatttactctctggtgtgtggaaagcatcagtggagcgcattttcctttggattggaggctcccgtccatcacagcttctaaacatcatcgtgccacaacttgagcctttgactgatcaacaaattgttagtattagcaacctccgtctatcgtctcaacaagctgaagatgctctttcactaggattggaaaaacttcagcagagtttggtccacgacatggcagttgattcactgggtgtaggaaacttcggacttcagatggttcttgcgatggaaaaatttgaggcactagaaggttttgtaatccaggcagatcaccttaggcaacaaactctgcttcacatgtcacgcatcctttcaactcaccaagctgctcgcggcttactggctctcggggaatactttcatcgtcttcgcactctttgctctctttggtatgctcgtccatatgaccttgcctagcctctctaacttaggctcctcaggactccacaaatcacctaagattgctccttagaggaagaaacctacctgcttctgcttgaacttcttcaactgaatgatctgttccgtgctttacaaaacagttactcgattttggatatgaatatgagttaatgccgtgtactagcatcagcatgaagcaaaattatgtgatttgctgctcttgagagtgtgcttgtacataatcagtgtatcatctttagtaattagtactatattatatattatgaaaaactttctagaatctttcgggg

SEQ ID NO: 8831 - DNA, 1011 bp, Glycine max
  Clone ID: 700796646_FLI
caatttggaaccattctagaaagcaaccttagttaaaagaattgatggaagcttcgggtatgcgtgtcttatggtttgtttttcatatttgatgactctcacacacaaaaacaaacattaataatttagtagttcgtagtgaaggctaagaatatacaaacacaacagatggcatgttctgtgccttttaacaacaagaatttggatataagtttctttgttttcaagccaactattgtaatcatagatgaccttgttcatggactcaaacacttctccttaaccactgagagccttggttgtgttcaaagctctatatttaggagcatccatggaaatatgatcatatggtatggagcatggcagaggcggtcgagtaaggaaaaagaggagctgacctcaacccttaaatcaatgttaagcaacatatcaagcatggctgtgttaattgaacacagtttccttgaagcatacggtggagaatcaagagatggctcttcaactgcaaaattctccactggggacataatatccttgaactcagcagtcaccactactaatgacctcaatgacctttgctacgcggtcctagccattttaaggtcacgctttgcaaaaatggaaggcataaccgctggcctttgcttcaagggacaaagcaaacccagagtggtgtgcattcatgtctggaagtctctccatttttgttactcttggattctcaactctgaccacagaaattggatgatgccatatcttgaacgcttctctatcaacatgaagtatgatattttccgagtagtctatgttaggggtgacaatgtggttgatcttaactgcatttctactcatcagatgttagaaaatgggaaagaaagtagtaggcaagggcaggttatgcagaactgagactgctgcaaagggtttcaaatttagaaccatcaaatttgccaagttatcttgtaaatattgcatattacttttttaagttcaatttacggattagaactc

SEQ ID NO: 8832 - DNA, 894 bp, Glycine max
  Clone ID: 700796759_FLI
gttccattggcctccgctgctgctcttgccagaaggctagaagggaaggtggcactgataactggtggagcaagtggtataggtgagtgcacagcaagacttttctccaagcatggagccaaagtggtgattgctgatatccaagacgagttaggccactcaatttgcaaagacttggattcatcttcagctacttacattcattgtgatgtcacaaaagaagaaaacatcgaacacgccgtgaacacgaccgtttccaagtacggtaaactagacatcatgcacagcagcgcaggtatagttggcgcatggaaccccagcatattgcacaacaagaagtctcactttgagcaagttatcagtgtcaacctggtgggcacattcctgggaatcaagcacgccgcgagggtgatgatcccttctgggcgtggcagcatagttgcaatggctagcatttgtggaagaattggtggcgtggcttcgcatgcctatacgagctcgaagcacggcatcgtgggactggtgcgaaacactgccgtggagcttggaaccttagggatcagagtgaatagtgtgtctccttatgcggtccctacgcccatgagtaaaactttcctcaacactgatgatgaggggattgctgcactgtattccaatcttaaagggactgttcttaagccccaggatgtggctgaagctgttctttacttgggaagtgacgagtccaagtatgttagtggccatgaccttgttgtagatgggggtttcactgtcgtaaaccctggtttgtgtgtgtttgggcaatccgtgtaggtttttaatttgtactttaagtcgtttcaagtgttttgaattacatcagccaaataatgaccaaataataaaacttttgat

SEQ ID NO: 8833 - DNA, 2125 bp, Glycine max
  Clone ID: 700796826_FLI
gtggtcttgttagtttagaacctacaaagattgcagagatccttaaagatcgtccatcttggttccgtgactgtcggagcctagaagtttttactatgtttcctgctggaaatggaggaaccattgaacttgtttacacacagacatatgctccaacaacactggctcctgctcgggatttctggactctgagatataccacaagtttggaaaatggcagtcttgtggtttgtgagaggtccctgtctggttctggaactggccctaatccagctgctgctgctcagtttgtaagggctgaaacactccctagtggctacttgatccgaccatgtgaaggtggagggtcaatcattcacatagtagaccacctaaatctcgaggcatggagtgtgccagaagtgttgcggccactttatgaatcatccaaggtggttgctcagaaaatgacaattgcagcgcttcgctatatcaggcaaatagctcaggaaacaagtggtgaggttgtttatggattgggtaggcagcctgctgttctgcggactttcagccagagattgagcagaggcttcaatgacgctgtaaatggattcaatgatgatgggtggactgtattgaactgtgatggtgctgaggatgtaattattgctgttaattcaaccaagaatttgagtggcacttctaacccagcaagttcccttacattccttggaggaattctctgtgcaaaagcttctatgttgcttcaaaatgtccctcctgcagttttggttcgttttctgagggagcaccgctcagagtgggctgatttcaatgttgatgcttattctgcttcatcactgaaagctggcacctatgcctatccagggatgaggcctacaagattcactggcagtcaaataattatgcctcttggtcatacaattgaacatgaagagatgcttgaagttattaggttggaaggtcactctcttgctcaagaagacgcttttgtttctagggacattcatctcttacagatatgtagtgggattgatgagaatgctgtgggggcttgttcagagctcgtatttgctccaattgatgaaatgttccctgatgatgctccattggttccttctggtttccgcattatcccattagattcaaaaccaggtgacaaaaaggatgctgttgctacaaatcggaccctggatttgacatctggttttgaagttggtcctgcaacaactgctggtgcagatgcatcatcaagtcaaaacactcgatcggtgttgactattgccttccagttcccttttgacagcagtctgcaagacaacgtcgcggtcatggcacgccaatatgtccgcagtgtgatttcctccgtgcagagggttgccatggctatatctccatctggtataaacccatcaattggagctaaactttctcctggttctccagaggctgttacactagctcactggatctgccaaagttatagttactatttagggtccgacttactgagatcagattctcttgttggtgacatgatgctgaaacaactgtggcatcaccaggatgccattctatgctgttcactgaagtcattgccagtgttcatatttgcaaatcaagctggccttgacatgttggaaacaaccctagttgccttacaagatatcacattggataaaatatttgatgaggctggacgcaaggcattgtgtacagactttgccaagttaatggagcagggttttgcttatctgccagctggaatctgcatgtcgacgatggggcgccatgtgtcatatgaccaagccattgcatggaaagttcttactggggaagacaacactgttcactgcttggctttctctttcataaattggtcatttgtatgaaaaatccaattcgtgtgccctgctttttcccacttgaacataaaaatgaaagggttaaaagggagacaagacaagtttggggggaaaaagaagtcgtaaatttttgtataacacatcaggatcaggtttgcatttaattcgatttaatttatttcttatttagtgcagagaccaaattgaattaatcttgtaaattatttagtgctagagtgaagttgagacttttgaatgac

SEQ ID NO: 8834 - DNA, 613 bp, Glycine max
  Clone ID: 700796835_FLI
ggttagtgaattaatggaggttcgtggagattcggacacttcaatggtgtctttctctgagtttttagttatgtttgacgatccagattggggttttggcatcatgcctactctggtgaagcttgaaaccggggatagaaacaggcatggtgacacggtatgctcggtttgccgctacccaattattggttctcggtttaaggagataaaatctcattttagtttgtgtaaccaatgctacagtgagggaaaggtgccttcttcatttaagcaggatgagtacagatttaaagagtatggaagtgagggtgaagccatgaaagataagtgtatgtgcttcagtttgcaattccataatgaaaagtagatagtggcattcgattttttgtcttttgatttttttgttctactatcttgtattatcccatcttgtttatcctagcttttcaggtgtgaatgtgattatctctagctcatgatttcaccaggcattttggccccttgtttaataattgtttcaggtggtgcttcactgctctttagtaactgtttatagacattgtaaaacctttaacctccgtgacaaacatttgtgtttatcatgcttcttttt

SEQ ID NO: 8835 - DNA, 1641 bp, Glycine max
  Clone ID: 700796917_FLI
cgaggaacatggagaagactttgtggacatgctggatggtatcttctcatttgttctactggacacccgtgacaacagttttatagtggctcgggatgctattggggtcacttccttgtacattggatgggggttagatggctctgtttggatttcatcagaaatgaaaggcctgaatgatgattgtgaacactttgagtgttttccacctggtcacttgtactctagcaaagaaagagggttccgcagatggtacaatcctccttggttctctgaggctattccatctgccccttatgatcctcttgttttaagacacgcctttgagcaggcagtcataaaaaggttgatgactgatgtgccttttggtgttctactctctggaggtttggactcttctttggttgcatccatcacttctcgttacttggccaacacaaaggctgctgagcagtggggatcaaagttacattcattctgtgtaggccttgagggctcaccagatttgaaggctgcaaaagaggttgctgactatctaggcactgtccaccatgagtttaccttcactgttcaggatggaatagatgccattgaagatgttatctaccatattgaaacatatgatgtgactacaattagagcaagcacacctatgtttctcatgtctcggaagattaaatcacttggtgtcaaatgggttatctcaggagaaggatctgatgagatctttggagggtatttgtacttccacaaggcacccaacaaggaggagttccacagagaaacatgccgcaagatcaaagcacttcaccaatatgattgcttgcgagccaataaatcaacatttgcttggggtctagaagcccgtgtaccatttttggacaaggcgtttatcaatgctgcaatgagtattgaccctgagtggaagatgataaaaagagatgaaggacgaattgagaagtggattctgaggagagcctttgatgatgaagagcatccttatctgccaaagcacattttatacaggcagaaagaacaattcagtgatggagttggctatagttggattgatggccttaaggcccatgctgcaaaacatgtgactgaaaaaatgatgcttaatgctggtaacatttacccccacaacaccccaaaaaccaaggaagcatattactacagaatgatctttgagaggttcttccctcagaactcagctaggctcactgttcctggaggagcaagtgttgcatgtagcacagccaaagctgttgagtgggatgctgcttggtctaacaaccttgatccctctggtagagcagcacttggagtgcacatttcagcctatgaaaaccagaacaacaagggtgtagaaattgagaagataataaacctatggatgctgctccccttggtgttgccatccagggctaatacaaagatgtgacaaagaataatttgggcgacaatgaagataactaagctaaaggtgaatgaaaaatttgcctgcagtgtaatttcatctgggcaaagcttttatagtttatagttataaggctttctaaaaagtgttgcgtattgtattatcttgaatgctgtgatttgaagtcttaataaaagtgtttcctttatcagttcataatg

SEQ ID NO: 8836 - DNA, 1305 bp, Glycine max
  Clone ID: 700796938_FLI
gtgagatgtacgtagcttccatgcgcaagtctttcaaggactccttgaaagtccttgaagctgatatccagcacgccaataccctggcttcagattttccaagggagtatgatggtgcatgccttcagatgagaatgtcatacagtccagctgcacacctgtttcttttcttggtgcaatggacagattgtcatcttgctggagcccttggactgttaagaatcctaatttacaaggtctatgtggatgggacaaccaccatgtctacacatgaaagaaaagcaagtattagagaattctatgctgtcatatatccctctttattgcaacttgaaaaaggtgtcactgataccgaggataagaagcaaaaggttgtgtgcatggagaggtaccgtagaagagatgatgaggagtataggcagtcttctgacatagacattgaaagagaagatgaatgtggaatatgcatggacatgaatagtaagattgtgcttcccaactgcaatcatgccatgtgcttgaaatgttacagagaatggtgtgcttgcagcatcggcaccatgcatatgaaggcgaacgatatcacaatcatgcccattttgccgtgacagtctcaagagagtaaactcaggcgatctctgggtattcactgatagaagggatgtggtagacatggcaacagtgactagggagaatctcagaaggcttttcatgtacatagataagttgcctctgattgttcctgactccctttttgacacatacgactctcacataaggtaagtgattgcaacagaacagattttaatgtatgctgttgtcttggatggatagagctatattcctctccacttccaagttagtcacataaaagcccaagcccaaacccaatcagaggctaattgagttcgaattatatatagagtcgcagtacttgcttcccacttttgctgccagaagtatccagccctgtgttaattgtgggttggtggtgaagttgagatggtaaattgtatctatctagttagctcttttgtatatccctgtacagatcgaattaatcacttcttattaacaagagatttgcacatttggttcttgtcatttaagtgtgaatctcttgaggaaaaaaaaatcttttacttttcatcatcaatgaatgtatttaacggaatgtaatagcctcataggtgctttttctatgtagtatctatctgtattcgctatatttcctcaaggtcctcttaatagtaactactattatgttttatattatttaagcactatagtctataatgctgtttc

SEQ ID NO: 8837 - DNA, 1987 bp, Glycine max
  Clone ID: 700796979_FLI
ttttaattctcaggctgtgtacttaaggcgaagaggggccttccatgggcccccaacaaactcctctaaaacattggatggtgctgggagactgagttcagtggagtctactgaagacaaaagtgagctgtatgttgtgagtactgaagatccagaaaatgatgacgataggaatgatggctctgatccagctgagggaatgcctggatttcagaatgtcttgaaagatatgattccgggggtaaaggtgaaggttttcaaggtgataactccagacaaagtagacaaggatatatctaatgtgattgagcagataattgaggatgaagacgaagacgaagatggcaacgaagacgaagacgaagacgaagacgaagacgaagacgaagatgaagaggaagacgaagatgaagatgaagacgaagatgaagggaaggaaaatgatacagaaagtctagaactggaagacattaagtctgagactgaccaggagggagatgatgagattgaagtaaatgctggtctgggaacttttgaaagtgaagaccagaatgagtttgccgtcaagattgccattggtggtcttgttcagaaactttccggtaatctatcctctagagatttgcttcgagttcctgctaagctggagatgaaggggcgtggttcattttcctttactgttgaaaaagaagtcaatcagcaggttggtcttgacaaaggaaactcttcatctgataaatcaactaagtttcaaggtcgacgcagagttgatcatgttatttttgaccttgcaaaattcattggcaggggaaagataccctcaaaggttctgaaagaagtgggagaattgataaatctcactctaagccaggctcagagccatcaccagttatctggctcaacaatttttaatcgcatcgaaataccaacttcatttgatcctttaaatggtctatacattggtgcgcatgggctttactcctctgaagttattcatctaagacgtagatttggtcagtggcaagaggacaatggggccaaggagccttcaaatcttgagttttatgagtatgtagaggctttgaagctaacaggggatccttatgtaccagctggtcaggtggcatttcgtgcaaaaattggaaagaggtatcaattgcctcataaagggataatacctgaagagtttggcgtgattgctcgctataaaggtgaagggaggttggctgagccagggtttcagaatccccgatgggttgatggtgaacttgtgattcttgatgggaagcatctaaaagcagggccggttgttggatttgtgtattgggcccctgagtatcattttttggtcttcttcaatcggcttaggcttcaacagtagggttttgttcataatatcagagacttgtaaatgctttcttcagattctcagcgttctaggttttgttgaatgctaaattgtgcttcaatggaagatatcaccaagatatcacgtgtcactacagggtttccatttaagctttaaaagatcttcaccactagctttctgccgagtagcatagattgagcatttggctgcttgtctagaactcaaatgactgaggtatcttaagcttggtagctgtagcttgactaactatagattgaagagggattcatgatatcagcactaaagcacaacgtactagtctcttcattccgcattttatggaggtgtagtgttcagggtatcttcaacaactttgtacattgttcctaattataagaaaaattcccatgtatcataaaattcatgatatcattgttctttctgtaatgatgaaattttcatcacaattttttcttctttggatagtatttagaggtctttagtattagcttcctcattaattctatatccagtcaacaattgaatctcccccgaaagtgtcaagccaaaattttgaatacagatttgatttcatgacacccgtagttgccttttttc

SEQ ID NO: 8838 - DNA, 1859 bp, Glycine max
  Clone ID: 700797085_FLI
caaccatgtcctccacacaaacaacaaccctaacaccttcacctacgaacccacctcggtcctcgacctatgccggagcccaagccccgaaaagaagctcactgttcccaagccagaaccacaacacaacaaccagctagacctggatgatcatgttttgcctaattctgattggtgggagtccatcatgaaggacttaaccctacccgaagactctcccactccccttttgaaaaccaatccatcatgcatccctgatttcccaccttcttctcaagacccatcctttgatcaccccactcctgacttcacctctctctccgaaatctacaaccaaaacatccccttcaattacccctccaacactttagaaccttcctttcatgaccttaaccatagcctccacccccacaacaacaactgggacttcatcgaagagtttatccgcgccgccgattgctacgacagcagccacttccagctggctcaagccatacttgagcggctcaacaaccggcttcttcgctcgcccatgggtaagccgctccaccgagccgcgtttcacttcaaagacgcccttcagtccattctatccggttcgaaccggaacggaaacggttcgaacctcctttcctccatggcggagattgttcagacaattaaaacgtacaaggccttttcgggaatttcacccatcccaatgttctccatcttcaccaccaatcaagccctacttgaaaccctaaatggatcttcatttgtccacgttatcgatttcgagattgggcttggaattcaatacgcttctcttatgaaagagattgctgagaaggccggtcccggaaccgcgccgctccttcgcatcaccgccgtcgtgccggaggagtacgccgtcgagagccgcctggtccgccagaatctcaaccagttcgcgcaggatctagggatcagcgcgcaggtggacttcgtgccgcttcggacctttgagacggtgtcgttcaaggccgtgaggttcatcgacggcgagaagatcgccgtgttgttgtcgccaacgattttcagccgcctcggaggcaacggaggcagtgtcggcgcgttcctcgccgacgtgaggaggatggctccaggagtggtggtgttcgtggacggtgaggggtggacggaggcggcggcggcggcttcgttccggcgtggcgtggtgagcagtctggagttttattccatgatgctggagtcgctggacgcgtcagtggcttctgggggaggcggcgagtgggtgagtaggatcgagatgctgctgctgcggccgaagatcttcgccgcggtggaaggcgcacggcggaggactccgccgtggagggaggcgttttacggcgccggaatgaggccggtgcagttgagccagttcgcggattatcaggcagagtgtttgcttgccaaggtgcaaatcagaggcttccacgtggacaaacgacatgctgagctggtgctctgctggcacgaacgagccatggtttccacgtcagcatggcggtgttagcatattatatagaagagaagacaagagaagtgatgtattaatctaatgacaccttaaacctgcttatgtgaactttattatcaagttcacttttgacaaagaatgtagtttaactttaatttagttttttttttaattattatggaaaattacaaaaagaaaaaaactggaaagtacataaaaacttgtattttttccagacttttttgttttatgtaatgtagataaattgtgggggtgtctgtatttaatttgtttgagaagagttaccatgtaatgctggatatatacatctggcttttcaatcaaagtatttggg

SEQ ID NO: 8839 - DNA, 901 bp, Glycine max
  Clone ID: 700797187_FLI
aagaaacctaacagcgccatagcgttctctaagctatcgtgcgaggtccctcgacctccgcacaaccccagcaccaaggggctgtgcctgtcgtcgtcttccacgcccatgtcggaacccgacacccaggcgccgccgccgcctccgttcctgctccagcgcccgccgcttctgcagtcggcgtcgccgctcttcaagcagcggtcgtggtcgccggacgccttccgcgacgaggcgtggctccgccgcaaggggaactggaagaaccgccgcagtaagagcgtcaccgatgaggacgtggacgagctcaaggcctgcatcgagttaggctttggattcgattcctcccccgaggtcgagctcgatcaacgcctctccgatactctacccgctctcggcctctactacgccgtcaacaaacgctacaacgactcccttgtcaccaaaaccacgccgtcctcctcctcctcctccgccgcctccgattgcgacagcactccttgcccccacggcagtccccactccgccatcttcaccaccggtgataaccctcagacggtgaagacgaggctgaggcagtgggctcaggtagttgcttgtgcggtgcgacaaagttcagatgtgtgatgataataattaccgaatggagaagcagggttgtaaaacctaaaccatacagtagaagcaatgtgtgatgattgatattataaatgacaacgatttcccaccgaaccagaccaaaccaaaccgagagtgaaccctagttaaccacccaatcgtggcggaaccaaagtagttagttagctatattacattacaattacatgtggggctgtcggcagcgccttgttttgtactgtacttgtccaatatgtgatgactaagccaaggtagatctatt

SEQ ID NO: 8840 - DNA, 825 bp, Glycine max
  Clone ID: 700797368_FLI
ggcagtattaacaagcattgttttgaaacgtaatgtgaccatgttggatatagcaagcactcgcatgcttggtcagtatggtttccttgctaaggtgttttcaatctttgaagagttaggcatatcagttgatgttgtagctacaagtgaagtcagtgtttccttgacactggatccatcaaagctatggagcagagagctaattcagcaggcaagtgaacttgaccatgttgtagaagaactcgagaaaatcgctgtggtgaatctcctacagaatagatccatcatctctctcattggaaatgttcagagatcatcactaatattggagaaggctttccgtgttcttcgaacccttggcgtcactgtgcaaatgatctcccagggtgcatctaaggtgaacatctcattggttgtaaatgacagtgaagcagagcagtgtgtgagggctctccactcagccttctttgagagtgagctctcagagttagagatggattacaaaaatggcaatggttctgttgatgagttatcttaggggacacttgagtgtgtcaattctttgtcctaaagagtatgtgtcccaattttatatgctaatgtcaagcaagcatttttgaatttctcctagccttgtcactgtgatgtaccagaacaatgtattttacttgaagaaatatgctgggttgggaggaatggcaaagcattggtgtatcactagtcttggtagttggtattactagtgagtagtgagtaaacctttgtattcttttgtagctgctttcaaaaggttaataaccagctgcaaatcaattattattgact

SEQ ID NO: 8841 - DNA, 1175 bp, Glycine max
  Clone ID: 700797474_FLI
caggaaagcaattttccaacccttcttgtcaaaggcaaactattcctgaacaaacaatggatcccaaggtaagaagaattgtggacaagcaatcacatgaagaaggtgaattctctccggagaatggtgcatttgtgaataacaggcatgatactcaagctgaatttagtaaacctgctaagcaacatgctaattcagatgattcaaatcacaatagaggtgcaagtcctggaagaagtcctaccagggattctggggagctaaaccaaggacgtgctttgttgttggctagtcctggcaaaaaaagtcctggccaaaaagcatctgaacctcctgcccccaaacatggtcagggattttcaaaaagcccttcaccaaatagcatgcctaagcgtattaaaaaagggcgtggctttactgagcgttatgcctttgcacgaagatatcgcactccatctccagagcggtctcctcctcattcatatcgttatggtgatagaaatataagaaggaactttgatagaaacacaagctacagaagttattctgggcgctctccaccacgacgttttcgaagcccgccagggggcaggaatcgtccaagataccaaagcagaagaagtaggagtaggagcatctctggcagtccagtgcgtgggcgttttagagagcgtgaccgcagcaggagtccaagacgtagtcctagtccagaagacaggctgcctctgataagtgacagattaaaatccagacttggtccaagaagtgacgaaggactgcgagacagggggaggtcgaggtcgaggtcgaaatctaggagcaaaggctcttctcactccagatcccctgatgccacaccaccaaaacgatatgataaaaggacttctgtacctcgtagcaggtctagatccagctctgcatccggccaaaagggtttagtttcttatggagatgccagtcctgattctggctcaaggtagctaggtattatgctctcaagtcccagctggacctgaaattgctatacattatattacaagtctcaagaagagttaagtgttgcattagcttaaaaacgaccgttctatcatgttacttttagtaagagccaaaacttgaatgatgcgtcgtaaattggatctgccgtttgtgtttaataaatatttgttaacagt

SEQ ID NO: 8842 - DNA, 1012 bp, Glycine max
  Clone ID: 700797487_FLI
tagatattttggcttcctaatttcacggaaaaagtatgttgtctgcattgatgatgattgtgttcctgcaaaagataattcagggattttggtggatgctgtggctcagcatattgtgaacctgcagactcctgccacccccttcttctttaatacactgtatgatccattctgtaagggtgcagattttgttcgtgggtacccattcagcctgcgaagtggggttgattgtgctctgtcatgtgggttatggctcaatctggctgaccttgatgctccaacacaagctctcaagccagggcagaggaatttgcgatatgtagatgcagttctgactgttccttcgagagccatggtgcccgtgagtggaatcaacattgcctttaaccgtgaagctgttggtccagcattggtcccggctttgaggctggcaggggaagggaaattgaggtgggaaactatggaagatatatggtgtggaatgtgtgtgaaagttatatgtgatcacctaggccttggtgtgaaaagtgggttaccttatgtttggagaacagaaaggggtgatgcaatacagagcttgaagaaagagtgggaaggggtgaaattgatggaggatgttgttcctttctttcagtcattaaggttgccacaatcagcaactacagcagaggcttgcgtggtcgaggtggccaaaacagtgaaggagcacctggggaaggttgatcctatgttttcagaggctgctcaagccatggaagagtgggtcaagctctggaagtcagttagatctggttaaagctcctgaacttgaggactcttgtaggagtgaaggttattgccttattggcttctatatttctttatgttatttaactaatttatagctgccttttttttccagtttgtagtgaactaagcttacattttacctgacacagactaaaggctgaataaaatgatgataatacttattggttttgtgacaattgaataaattctgtcttgctttgtc

SEQ ID NO: 8843 - DNA, 1134 bp, Glycine max
  Clone ID: 700797590_FLI
gccatgactggttcagaaacagagaaggctttattaagtacgacgcccaaattaacaaaagccatgactggttcagaaacagagaaggttccttttggtttctttgctcggaatggcaagtatgtagaatgcctgctttctgtgagtaagaaattggacgtagagggcctagttactggggtcttctgcttcttacagctagctagcccagagctccaacaagcattacatattcagcgtctatctgagcaaactgcttcgaagagattgaatgcattaagttacatgaaaaggcagatcaggaatcctttgtgtggaattgtattttcccggaaaatgttggagggtactgacttgggaacagaacagaaacaacttctgcgcactagtgctcagtgccagcagcagcttagtaaaattcttgatgactcagatcttgacaccatcatagatggttacttggatcttgagatggctgagttcaccctgcatgaagttctggttacctcccttagtcaagtcatgacaaaaagtaatggaaagagtatccgaatagtcaatgatgttgcagggcatattatgatggaaactttatatggtgatagtcttaggcttcagcaggtcttggctgactttttacttatttccatcaatttcactccaaatggaggtcaggttgttgtagcaggctctctaaccaaagaacagttaggcaaatctgtccatcttgttaagttagagctcagcataacacatggtgggagtggggtaccagaagtgttactgaatcagatgttcggaaacaatgggctagaatccgaggagggtattagcctactgataagcagaaagctgctgaagctgatgaatggagatgttcgctatctaagggaagcaggcaaatcagcttttatcctctctgctgaacttgctgcagcccataatttgaaagcttaaaagttttggaaaaaagaataaaagatgatgcaacagcaacacaatctgttttctacatcataaagagaacggagctagaaattaatttgcatccaatgtaactctaatttgttcccacgtttctttaactgcttcttgtaacgtacgttgtagatatgtatgattaatcttcttccc

SEQ ID NO: 8844 - DNA, 2832 bp, Glycine max
  Clone ID: 700797735_FLI
ggggattctgagagagggaagagtaaggggaagtcggattcgggggatgttggtcgtgaggagagggttgagaagcccaggcaccatagggcggctgctggttatgatgtggctgaaacctgggataggtcgttgaatgcagaggaggatggacatgtgcgggttagggataagagtaccagggaaagtgggaactcaaacaggtcgaggacgccggagaagagtggaaaacgccatcaagatttggagaactctgaggtggattatgaaagaagtagtagctttaaaaggaaggagcatgaaggtgatggctataaggatgatagatccaaagggaaagatgatacttggaatgataggaggaaggatcgggaaagttctaaagaaagttggaagaggaggcagccgagcaacactgacaaagattcaaaaaatgaagagagtgcttttgatgacaacagagattgggagttgcctagacatggttatgagaggatggataatgaaaggcctcatggacggtttggtggtagaaaagatgtgagcaggggggaagctgttaaaacatccactaagtttgggatttcgaatgacaactatgatgtgatagagatccagaccaagttttatgactatgggaaatcagaatctatgtccaaccataccaagagaactgaaactcatcagcagtacattgctaaatcaggtgctaatgatgaagaatgggcataccatcaagatgaaagaggaaggaagagtgatttatctggttctgggacacctggtgaagacctgaaggagagatatgctgatgatgactatgatttttatgggggaagaggaagaggtcagaaaggtggtgtatctgcccgtggtactggtggccaaagttctagtactggtggctcacagcctcaatatggaaatccagagtctggatcctttaaccgagctggtgcacaaggaataaaagggaacagggttggaagaggaggaaggattaggcctactgggagagacaatcagcaagttggaataccactgccaatgatgggatcaccctatggacctcttggtatgcctccgcctggggcaatgcagcctctttcacatggtatatcacctgctcctggtccaccaatttcccctggagtcttcatgtcaccatttactcctggtgtttggcctggagcacgaggtgtcgatatgaatattataggtgtaccacctgcagtgtctcctgtacccccaggtccacgatttaatgctgctaatatagggaacccaccaaatcctgtaatgtattataaccaatcaggccctggaagggtaatgcccccaagcatttgtactcctggttttaatcctacaggatcaattggtcgaggagccccacctgataaagctccagggggatgggctcctcctaaaagtagtggaactcttggtaaagctccttccagaggtgaacagaatgattattctcaaaactttgttgacactggtctgcggccacagaatttcattagggagcttgagctcacaaatgttgtggaggactatcctaagcttagagagcttatacagaaaaaggatgagattgtggaaaaatctgcatctgctcctatgtattataagtgtgatttgaaagagtttgaactatctccggagttctttggaacaaagtttgatgtcattcttgtagatcccccatgggaggagtatgtgcaccgcgctcctggtgttgctgatcacatggagtactggacatttgaagaaataatgaatctcaagattgaggctatagcagatacgccttctttcatcttcctttgggtgggtgatggtgtaggccttgaacaaggtcgtcaatgtctaaaaaagtggggttttcggaggtgtgaagatatatgttgggtaaagacaaacaaaagtaatgcaactccaggactgcggcatgattcacatactttatttcaacattcaaaggaacactgcttgatgggcataaaaggaacagttcgtcgaagtactgatggacatataattcatgccaatattgacacggatgtcattatcgctgaagaacctccttatggttcaactcaaaagcctgaagatatgtacaggatcattgagcactttgcccttggaaggaggagactagaactatttggtgaagaccacaatatccgagccggttggctgactgttggtaaagaattgtcatcttcaaattttaataaagaggcatatgtgaaaagttttgctgacaaagatgggaaagtttggcaaggaggtgggggaagaaatccacctccagaggcacctcatctggtggtgactactcctgatatagaggctcttaggccaaagtctccaatgaagaaccaacaacaactgcagcagcagaattcagtatccatttcgttgacgtcagctagtgcatcaaacagaaggcctgctgggaattcgccgcagaacacaactgcactaggcgtcaaccaagacgcttctagctcaaacccttctactccagctccttggggttcacctctggagggcttcaagggacgtgaaggctctgtattgccttcagatgataaagtaatggatatgtacgggtttcatggaccagcatcagcaaactatctagattttgaatcatacagacaaatgaatctgttgtagcataactcttaaggataatgttccatgattacgtatcgtgtaatttttttccccaccaatataaatgggaagaaaattattcatattttgtatgttcattttttattagcattggtgaatgcattgtttaaccagcggaat

SEQ ID NO: 8845 - DNA, 685 bp, Glycine max
  Clone ID: 700797953_FLI
caatagcatatctatggcttctacttgttcttcctctttttccgttaccaaaaaatatgatgttttcatcagctttagaggagaggatactcgcgctgacttcactagccatcttcatgctgctctgcgcagaaacaacatcgatacatacatagactacaggatccacaaaggagacgagatctgggtagaaatcatgaaagcaatcaaagagtccactctcttcttggttattttctcagagaactatgcgtcttctagttggtgcttgaatgaactcatccaactaatggaatacaagaaacatgaagatgttgatgttattccggtgttctacaaaatagatccatctgaggtacgcaaacaaagtgggagttatcacatggcattcgcaaaacacgagaaggatagaaaggtgacggaggacaagatgcaaaagtggaagaacgctctctatgaagcagccaatttatcaggcttcctttctgatgcgtacaggtgcatgttgtgtccatatattatagtgtttcagcttttgtttatataaattctaatgtttaaggattattttcacatactacacataactcatgtctataagcaaacctcaaaccaattaaatgtaactaattttacaagacaaagtgatgtagtgaaacgtaagggaaaaggaaatgacggattc

SEQ ID NO: 8846 - DNA, 916 bp, Glycine max
  Clone ID: 700798021_FLI
gatgaactttttggattacaggctatgctctttggcggaacagactcgtcaactggaactttagagtgggcattatctaatttagtgaatgacccagaggtgctgcagaaggcaagagatgagttggacgctcaagtaggaccagatcggctgttaaatgagtcagaccttccaaaacttccttatctcaggaagatagtccttgaaacacttaggttgtaccctccggctccaattctaataccacacgtggcttcagaagacatcaatatcgaaggattcaatgttccacgagacacaattgtgattattaatggttgggccatgcaaagagatcctaagatatggaaagatgcgacaagctttaaacctgagaggtttgatgaagaaggagaggagaagaagttggtagcatttggtatgggaagaagggcttgcccaggagaacccatggctatgcaaagtgttagctatactttgggattaatgattcaatgttttgactggaaacgagtaagtgagaagaagcttgatatgacagagaataattggatcaccttgtcaaggttaattccattggaggctatgtgtaaagcccgcccactcgccagcaaagttggaagttattaacaatattttatttggtatatttgggtgaggatctaatactcataatttcggtgtgtaagtctatgcatgttaaaattaataatatttgtcgtatgtccacaaggccaaatgtagtactgggtgtggacttgcatatacaatatcaatattgtataaatcccagtttccttgaataaatttctttactttctattgttatgaatcccagtactttttaaaaagagatgttacctttaatttcttgcattattaatgtcgtttagatgaataaaacaaaccattatct

SEQ ID NO: 8847 - DNA, 1271 bp, Zea mays
  Clone ID: 700798807_FLI
ctgatcctgaaagccgccaattgcgtgctgcccttgctgaagattctagacttgaatctgattacatacttgctggatgtggcgcagatgaactaattgatttaattatgagatgtgtgcttgaaccaggcgacaaaattgttgattgccctccaacattcacaatgtatgagttcgacgcttcagtcaatggtgcacttgttatcaaggttccaagactgcccgatttttccctagatgttgatctcattgtcgaagtggttgaacaggaaaggccaaaatgcatatttctgacatccccaaataatccagatggcagtgtaatcaatgatgaggatcttttaaagatacttgatctcccaatacttgtagtgctggatgaagcttatattgagttttcaagccttcagtcaagaatggcatgggttaagaagcatgataatttgattgttctccgaacatttagcaaacgggcaggtttagctggtcttcgtgtgggttatggtgcatttcctctgagcattatcgagtatttgtggcgggccaagcagccctataatgtttctgtggccgcagaagtttcagcatgtgcagctttacagaatccaacttatctggagaatgtgaaaaatttactggtaaaagaaagggagaggttgtttaatcttctcaagggaataccattcctgaagccatttcccagtcattctaacttcattctctgcgaggtcacgtcaggaaaggatgcaaagaaaataaaggaagaccttgcgaagatgggagtgatgatccgccactatgacaagaaggaactgaaaggctatattcgtatctcggttgggaaacccgagcacactgatgcactaatgaagggcctgaatgcacttcgattgtgagagcttttgcacacgatcaagcttttgcacactatcaagcttttgcacaccatcacatcaatgtaaacagtgtattcctttgcggatatatatccgtcaggctggatgcagtctataagaggagattgcatcactccaacgcatgtgaagcccaaacagacaagggtcgtgtgggtttcactatccttttgtttaccatgttgaagtctgtttttgttattcagcgacataacagctattcacaagattatcttgttcagaacaagtgtagcagttgaattcctggtaggtggtttctgatgttgggttgagacttgagagaactgaacattgtgtaggtataaataaaggccaacagagcaatgctgttgtctt

SEQ ID NO: 8848 - DNA, 1382 bp, Zea mays
  Clone ID: 700799054_FLI
agctgaacctccctctacatcccattctacctctcccggagacctcctcctggcagatcttttgggtcctcttgcgatagaaggccctcctgctgtagagcaaaatcctgcccaaggattgaatgctaatcaaagtccagctggtgacttggcacttgctacccttgatgatcagtccaactcagttcagccaattgtcaacgtcgaggagaagtttcatattttgtgcacaaaagatagtggggtgctgtacgaggatccttacatccagattggcttgaaagcggagtggcgtgcccatcatggccgtcttgttcttttcctgggtaacaaaaatacttcagcccttacgtcagtgcgggcgctgattttgcctcctagtcatttgaaaatggaactttcgtcagttcctgatactattcctccaagagcgcaggtgcaagttccccttgaggttgcgaatctccttgcaagtagagatgttgcggttctagatttctcgtatgcttttgggacttcactggtggatgccaaacttcgactccctgttgtattgaataaatttttgcagactataactcttacccctgaagaatttttctcccagtggaaagcgcttactgttcattcgctgaaggttcaagaagtggttaaaggtgtgaaacccatgcctctttctgagatggctaatcttttcatgagccttcacttggcggtcgctcctggacttgataacaacccgaacaatctggttgcatgcacgacattcttttctgaagcaacacgtgccatgctttgtctgatacgagttgaaacagatccacaagacaggacccaactgcggctaacagttgcctcgggcgaccaatatttgacattcgagttgaaagagttcatcaaagaacatctggttgatatcccaaggactcaggtcgccccacctcgcgcagcagtccagccacagttgcctactacagcacctgccacatacaatgaccctggtaccatgcttgctggattgctatgagaagtaacccgaaggaatagtgttttgatgtacatgacagttatttaatacgaggatctaacatctccacaagcatcttgctgccaagacgtacacgtggagcaaccaagaaagagctggcggagtgtagtctccatgaggattctaaaccgagaaagagcttagattctttttgtgcggtttgaaggccccctccctctccatgtagcagttgccgtattgtgtaagcgtaacttgttgtttctcattattatcatccccttttggtccatttgtataacctgtatcgcccatgtctggtggtggacaatcggtagtttttgtgtgttaatataaggtgctaggttttcccacc

SEQ ID NO: 8849 - DNA, 1753 bp, Zea mays
  Clone ID: 700799057_FLI
ctccgccgaagccaagcaaaccaccgacctcgacggagtcttctagccgtcaccctcgttgtcgccctgctcctcctctcagccggtccggccggcggcgtggcgtgaagatcaatccggacccggaacgagttccctcttttgctggttacataaactttggaataggaggatatcccatattgatctttgtgattgagattgattttttttctggaaaatggagatacaaacttcagggaagcccattgatgtgctgatggagaaggttcttagcatgaacattctgtcttctgattactttaaggagctctataggttgaaaacctatcatgaggtcatcgatgagatctacaacactgtcaaacatgtggagccttggatgactggcaattgcagaggcccctccactgcattctgtcttctatacaagttctttaccatgaagcttactgtcaaacagatgcacggtttgttgaagcatcctgactccccacacattagagctattggtttcttgtatcttcggtatgttgcagacccaaaggttctttggatgtggtatgagccctatttgagggatgatgaggagttctcccccggatctaatggccgcaagacaaccatgggtgtttatgtgcgtgatcttatacttggacagtactactttgatagtcttctaccaagaattcctctcccagtaactcgtcagattacagccaatcttgaaaagatgaaattgcccactaagctttctggggcaactggagactccagtcgtcagggatcagaagatactgcacgccgtcctccttcagtgaaagcttctctgtcagtttcctttggacagcgtgctccacatcgggcttccaccagggattcatctccagttcgtcgaacagtcacccgtgatggtcatcgaagttcatactcaccatctcgtcgtagtggtagccgtgagggtcctgatcatgaccgttctgaccgggaactggatcattctagtcgtgaccgtgaaagagcccgggatcgttcaaaccgggatcggtatcattcaagccgagaccttgaccgtgacaaggatgccagagattatcatcggcatgagcgtgatagcagggatcgtgagtactacaggtccaggcattcagaagaaagacgggacgacagaagagatcatgaaagtagcaggcacaggcgctctagctctcgccacaggagcaggagtaggagccgaagcaggagcaggagtaggagcaggagaagccgcagccgaagcacgagcaggaggagcctgaatgagcagcgatccagcccattcagggatgcaaataaagagaaggcagccaccgtgtcgagcaacctagcaaagctgaaggacttgtacggtgacataactgcaaagaaggaagacagtgatgctgaaaagcttcaccgtgattcatgcgctgaggaggtcatcaggctgggaggccctcgatggaggtaactttgagacctgtagaactctggtttccgctttgttctgccagcctctctgtaggccttcttgaaaatgctctttatgttcccaaacttgatagagtcgactggtacttcggtatcttgacttgttgtcgcctgacatttgccattaatgtatgttgtttggtatgttattcctaagaattcctatgacattggaacgtactgtataaaccgtggtatccgagcttcatgtttgcttgatgcttatgcaaattgaaggttgaat

SEQ ID NO: 8850 - DNA, 1060 bp, Zea mays
  Clone ID: 700799059_FLI
aatgaaacatggctcctctgtctcctagactggtagtgcccgtagacgtgaagaagctgccgcgggagcaaaaggtccctctccacaaccgctggcacccggatatccctcctgtcgctgatgtaaccgaaggggaattgttccgcgttgagatggtcgattggagtggagggcgggttagggatgataactctgcagatgatctgaaattcatggatttcacaattgctcattatcttagtgggcccctaagaatagttgattctgaaggggttccagcttcaccaggtgatcttctcgcggtagaaatctgcaaccttggcccacttcctggcgacgagtggggttacaccgcaatacttgaaagggagaatggaggtggattcttaactgaccacttccctagcgcaagaaaagccatctggtatttcgaaggaatctacgcatgctccccgcagataccaggtgttcgttttccaggattgactcatcctggtgttgtgggaactgcaccgtcacttgagctcctaaatatatggaatgaaagagagaaaagtttgtctgagacaagcccggagactattaaactgtgtgaagttctacaccagaggccccttgctcatttaccgacccctgaaaattgcttacttgggaaggtccaagaagggactgctgaatggcacataattgcaaacgaagcggccagaactattgctggaagggaaaatggcgggaattgcgacataaagaacctaagcagaggctccagaatttatctaccagtgtttgtcgaaggagcaaacctcagcactggtgacatgcacttctcccagggggacggcgagatttcgctgtgtggagcaattgaaatgagcgggttccttgagctcaagtaattctgttcttatttacacttcagcactacatgatagtatgacatctcgcattcatcgagcagacctaagtgcttggttcgaggaatgagctagtccatcatcttatcacatctcacttttttgtttcgtttgtggagtgaaatgagatcataaccttatttctc

SEQ ID NO: 8851 - DNA, 579 bp, Zea mays
  Clone ID: 700799131_FLI
attgaagattacaagtgctcatggctagttgtgcaagcccttgagcgtgctgatgagagccaaaagcgcattctatttgtaagtcggctgcagacctctttgaaacgattagaagtttgttgtctaaaggtttatacaattgatggctctgcaggaaaattatggcaagaaagatccagcctgtgtggcaaaagtgaagaacctctacaaagaacttgacctagaggcggtatttcaggagtacgagaatgagagctacaagaagctgattgcagacattgaagcccagccaagcattgcggttcagaaagtgctgaaatccttcttgcacaagatctacaagaggcagaagtagggtgctcttggataaacgagctcaggagtcgttactccttcgcatgcttgacataaccggacttcctcacctggttgctctagtatgatgtggagcgtctagttaaaaaaaatcgatgtagtatgaagcaccttgctgctctgaatattaacaggcaattaaggcaaggtgctgtttcggtttggtggaccgcatgttgcagataataaattagttgttttgtc

SEQ ID NO: 8852 - DNA, 1078 bp, Zea mays
  Clone ID: 700799143_FLI
taaagattctgcgaaatgagattgatggaaaagctgctttgctaggatttgtgggggccccatggacaattgcaacttacattgttgaaggggggatgaccaacacatacacaaatataaagaacatgtgccatacagctcccgatgtcttgaggtgtcttctatctcatcttgcagaagcgatatctgactatatcatttaccaagttaactccggggcccagtgtatacagatatttgattcatggggtggacaacttccacctcatgtgtgggagcagtggtcaaaaccatatatcaaaaagattgtgaataggattaagaaagagtgccctcatgtaccccttgtgttgtatataaatggaaatggaggtttacttgagcgcatgaaggacacaagagttgatgttattgggcttgactggacagtggacatggctgatggaaggaagcgccttggtaatggaattagtgtacaagggaatgtggatccagcatttctgttctcaccattaccagtactgactgatgaaattcgtagggttgtgaaagcagctggtacaaaaggtcatatacttaacttgggccacggtgtacttcagaaaacacccgaagaagctgtagcacatttctttgatgtcacaaggagcttgagatatgacacccatttccaaggttctgttgctgaaggattgcagcctgttgcttgattcgtagtgttgtctgcattctacctttttaagacatactcattattgaagcctggatatgtcctgtggagatatcggcagcaaattaaatgtaattttattcattgtttatctgttagttttattcattgtttatctgttccattattcatgtgactgaagaagggatgcatgatgcatgcaacctggtttcgtaggagagccgggctacaggcacagtccgcttcagcggcgcctgtggctgttcaaatcagagctgctataattcctgtgaaaccgtccagtctcggtgccttctccgaggggagttcttctaggtgtttagttggttttactaactaaagttttgtatcgaatggttgaataat

SEQ ID NO: 8853 - DNA, 1690 bp, Zea mays
  Clone ID: 700799210_FLI
gaccctcttggaggtctgataatcaggtagacaatgaggctggagagtctggtggatataggggaaggggaagaggaggaagggggcaatatggaggacgaggtaaagacaatggttggagaaatgatgatagaagcaattctgggtttggaagggaaaataacagtggcgatggaccaaaatggggtggtggaggtaattggaacgctacaaatccaccaagtagcagtgtaggcaccaagtcatatggtcaaaatcagcctttcacttggaataattctgaggataacaaaccatctgtaggtgaacaaggtgatccttgggcaagcaaggtgtcttctactgaagatacagaacaacagaatgattcttggtcaagcaagatgatttctggtggtgctgaggataccagtggtggctgggacaccaaggtgaaagactcttcctgcaatgatgggggtgaaggactacaaaatgatccatgggcaaacaagattggttctaatgaaggtaaagaacaagaaactgatccttgggccagcaagatgtcttctactgtgtgtgctgatgacaagaaaggtagctggaacactacagcaaagggcattccatctaaggaaaaggctgatgatccatggaatagtaaggggggtaatgatgacagcaagaaaactgacacctggggtgctggctagtcaggtggggatcaggaactttcttggagcaaacctaatttctctttgggggaccaggaatctacttggaacaacccaaggttcagtgacgatgacaatgcgaataatagaggtggatttggacgtggaaatcgaggcagagggagaggaaggaattttggggatggtggtgggtcatcatggaatggaggcaatagaaacgatgaatcaggtggcggaaggtctggagagccatggaacagaagggactttgatggtggcggaggaagaggcagaggtcgttttgggcgaggtgaccgtaaccagggcaacaacttcgggtcaggagatggtggcagctggggctctggcaggggaaatggtggccgcggtggttacaggaactggaacgataacaatgagcgatccttcggtgaaggtggtggctggtcccagtcccagtcttccgattggaatgccaacaaaggaaatggcgaaggaaatcaagctttctcgaaaagcaagcccagctgggaagcacaaaacacctctggtagagatggtcaggcaggaaagggtgatgcaaacaactcctggagtaagaacagatcatctccatctagcgcttggggcgctcccagtggaggagctggcggccgaggttcttggggaaagagcaacgaggatggctggaactcagcgggaggatcagccaaagagaagcctgcatggggtggtgggtcagaagcgtctaccaagaaagaggacaaaggtggtgaggggaacgggagccaaggaggaggtggtgtcagttcctgggataaaggggcagatgatgcatggaacggcaacacgggtagtgatattgggagtggtggatggtaagatttccgccaaaataatatgaactctgtcggtgcgtgtgtctagttcgtatccgttacttcgccatgtgtactctacactaaaaagaacatggcttgtgaccatttaaacattaccttagtggtggcagt

SEQ ID NO: 8854 - DNA, 726 bp, Zea mays
  Clone ID: 700799219_FLI
ctcgagagagggatatctgtttccgcatcggcagcgttctctgcagcggcgatgccgctcctcgagattcttgagcttgggattgtatcgcactcagtgatcatcgggctatctttgggcgtctcacagaatccttgcaccatcaaacctctaggtgctgctctctccttccaccagttttttgagggctttgcattgggcggctgcatttccgaggctcagttcaagagtttctctgcactccttatggctttcttcttcgctatcacaacacctgctgggattaccgtggggtctggtatcgcgtcgttctacaatcccaacagccctagggcacttgtggtagagggaattctggattccatttcggctggtattctgatctacatggccttggtggacctcatcgcagctgattttctcagcaagaggatgagctgtaacttgaggcttcaagtcggctcatacattgccttgttccttggtgccatggccatggcatctctagccatctgggcttagcaagtagaatggaagtaaggcaaagatttgagagtgctgcctaattgcctttgatagcaggaggttctctccagcagctagttggttgcaattcttgatgagaatgggaggcattttttattttcttatattcttctgtttgtctattggttctcttcatgttggtggtggacagtaagatttagttcttgtgccctgtttggt

SEQ ID NO: 8855 - DNA, 2592 bp, Zea mays
  Clone ID: 700799256_FLI
tcgacgtgcaccaccgtcttgccgtcgctcatttcctcctcgctcggctgcttgcctagggtttcacctgctaccgccccacctccagccgtcgcttcagatcccgccgctgccggcgctcgatcctacttcgttgctcctagctgatcccgctgagctcggatttgggcccttcctccccgccggaacagcgtccggacgcgcgggggcagatctgggttttggtggcccgcttggtgtatgagaaggcctccagagcttggaagtaatggaggtggagccggcgaggagggacgcggcagcgctggacccggagctgctgcagctggcggagctcgcgccgggcgcgcttcgtgagaactccatagctgatgcgctgtattcgcagtggctcgtgctacccgagacgaccaagctggtgaagtctttgattgatgatgcaaagactggtgctgtgcttaatgttgctggaagctctgctagcacaaatgctgcttcaagtagttctctaccttcgatgtttcctgctggtagtgctccaccactttctcctaggagcacgtctggttcccctcgtgttatgagacgaggatctggagctggaccatcatccttgggctctccattaaaattagttagtgaaccagtaagagaagttatacctcagttttacttcaagaatgggcgtcctcccacaaaagatttgaaggagcagtgcttatcaagaacagatcacctattttttggtggtgggggacttcaagttcaagaattcagatcggtcacgaaggacatatgtaaacttccttcattcttgtctagtgtccttttcaagaaaatcgatgttgaatgcactagaactgtctcaagggatgcatttgttgagtactggattaacgacaataaggttacaatggatatggctagtcaaatatttgaaatattaagaaagccaggttacacatatctcacccaggatgacttcaagcctgtcctgaaagaactactggcaacacaccctggcttagagtttttacaagggacccccgagtttcaggagagatatgcggagactgtaatatacagaatcttttactccataaatagatctgggaatggtcatctgactctgagagagctcaaacgtggaaatttaattgctgcacttcagcagttagatgaggaagaagatatcaacaaagtgttgagatatttctcatatgaacacttttatgtgatctactgcaaattctgggagctggatgcagaccacgattttttgattgataaggaaaatctcatcaaatatgggaaccattcgttgacctatagaatagttgatagaattttcgcacagatcccaaggaaattcacaagcatgacagaaggaaagatgggttatgaagactttgtttactttatattatcagaggaagacaaatcatctgagcctagtcttgaatattggtttaagtgcatcgatcttgatggtaatggtattttaactttcaatgaaatgcaatttttctacgaggagcaattgcaccgaatggagtgcatggcacaagagcctgtgctttttctggacatattatgccagatgattgatatgattggaccagagaatgagagctatttaactctacgggacttaaaacggtgtaaactctcaggaaacatattcaatattcttttcaatctcaacaagttcatggcatttgaaactcgtgatccattcctcattcgccaggaacgtgaaaatccaactctaactgagtgggaccggtttgcacatagagaatatattagattgtccatggaagaagatggtgaggatgcttcaaatggaagtggtgatgtgtgggacgaatcacttgaggctccattctgaatggcgtcttgctgcatgaatttggttggacatggatgattatggttgtgaagcggaaggattgtaaatttggtggctaccctgttgaggccattgtaggctcacagcagattcagtaacatcaaaggctacttaaaagttttactgtgcagatctgattcaatatttgtcagttatcttgttgggcaaacatttttgctttgctggaaaattggggagggaggttggtgggggcgccctgcagtttcaaggcaacaacctcagcagtcatcaacggtcgactccatttgtgttctgattgatccttaggtggatatctgttattcaattgtgcgcaaattttggggctgaactgttaatgtttggctgctatttctttgttaaatcttggaagcgcaggctaccaattccatcacacaactaagatcatggcatgtagctttcaggttctgctttctcatcagcatggtgttctgtagttgtgttgccattcttggtgcatcttgggaggaatgatccgtgaccttgaagaatggatacttagtcattttgtaacattaccgagaagcagtggattgggtgcatagtaacacaggttgtaacgttaccgagaagctgtggattgggtccaatttttgttaaggtgtaaatttggagaatattttaggttatcttacttgaaagtgctttgcgctttgcgt

SEQ ID NO: 8856 - DNA, 1731 bp, Zea mays
  Clone ID: 700799261_FLI
gtgattgggctgtaaaactgggcattaatctgtactatagtgctaatcttgctaagtctcctttatacagtaagcaagttccatacaatagagttatctatgaggcatttggctgcggttctcccaatgactcaccagtgaagctgaagacttattccagaaggcaatgcagggcgaagaaaatagtcttggctggcaggtggtgtggaaaagtatggatgtcaaaccaggttcatccatacctggctgacagaatcaaaaatcatgagccgaaagaaatcgatgaaacatttccttctgatcagaaatcccatgctgaacctgttgaaaattcaagtagagaggcagcctccacaagaaagagtagcagcagaacaattgaaggaaaaacaagcaagagggagaaagaacagttggagaaagctaatgccaagaagccaaaatttactgaagaggacaactccaaatcattggagggtactgctgaagcctccacacagaagataaagggcagatcagttctagaaaaaacaagcaagaaggagaaagcgtataccaagaagctaaagcatactgaaaaggtctcggaagcactaaaaggtccttcagaagcctccttccctgcaccagctgggatggtagtccgcagcagctctaggatcgccaataggaaaatcatgttgaaatcaaagatggaagaagaggataatggctcagctgaccgtccaaagtcaaaggtcgaagacgacaaagataatcctgctggccgttcaagagcaaaaccactaaggcaaaagactaaagtagacgcgaagaagaaaacgaaggaaactagagtagaaaagcgaaaggctcccagtccagcttctcagaaggacgaagaggagcaatcagatgatgtcgagggacgttctaccactaaacaacggctgtctttacgtaagaagggggctaaaacagaaggaaaacagcgaatggagaaacccagattcgggggaagtgctcctcccccaagctctccgaagcgcaaggaagagtacgtgtgcgacatcgaaggctgctccatgagtttcggcacagagcaggcgctgtccctgcacaagaacgacatctgcccggagaagggctgctgcaggaagttcttctcgcacaagtacctgcagcagcaccgcaaggtccacgccgacgaccggccgctgaagtgcccgtgggagggctgcggcatggcgttcaagtggccgtgggccaggacggagcacgtgagggtccacacgggggacaggccctacgtctgcctcgagcccgggtgcggccagacgttcaggttcgtctccgatttcagccgccacaagcgcaggacgggccatggcgcgtccaagaaggcgaaagcgaagaagcaaggcaaagcagcagtaatttagtactagtagtttagcacccaaaaccaatggcgcccttctgaaatgagtagccttggaagggacaggaggaaaacttgtagattccattagcagtttagcacccaaaaccaatggtggtctctgctcacagttccattaattgctagttgaacgggttcgttggagcccacaattaggttggttccctgtgagtaatttgggtaatcattaagacattctcgtacagtttgccttttgcctatcgttcgtttatcttttgctggatgatgtcttgcttatggtaagcacctgtctagctccttttgccttc

SEQ ID NO: 8857 - DNA, 1533 bp, Zea mays
  Clone ID: 700799332_FLI
gcggggctagggtttggtcggtcgtctcgccggcgtcgaggccgccagcgctgctagctagctctctcgcgttagggttccccgtagccatggtgctgcagcgcttctcgtggccgtacggcggccggagcgccaccttctgcggtagcttcaccgggtggagagagtgtcccatggggctggttggggccgtgttccaggtcgtcttcgatctgccccccggagtttaccagtaccggtttttggttgatggtgtctggaggtgtgatgagacaaaaccctttgtacgtgatgaatatggactgatcagcaatgaagtgcttgtggaaaacaatgtacaacctgttgtgcagccagagccttctatcagaggaactaatatggataagggtaccattttgaaaacaatgcccccggagccatcatctcagaacccaagcatgcaaatagcagttatccgccatgtggtctctggaatattattacacaataccatatatgacgttgttcccctttctagcaagttaacagttttggacactcagcttcctgttaaacaagcatttaaaataatgcatgatgagggtcttgctctggttcctctttgggatgaccgtcagggaaccataacaggcatgctcactgcatcagattttgttttaatcttgagaaagttgcaaagaaacattcaagttattggcaacgaagagcccatttctgcttggaaagaagcaaagctacagttctatggtgggcctgatggtgctgccatgcagagaaggccattaatccatgttaaggattcagataatttagtggatgtggcactgactataatcagaaatgaaatatcttcagttcctatctttaagtgcatggcagattcatcaggggtgcctttccttaatcttgcaaccttacaggggattttgaaatttctttgctcgaagctacaagaagaggctgagggctgttcccttctgcacaatcagcttctcagtattcctattggtacatggtctccacatacggggaggtcaagtagcaggcaactcagaactttgctactgagttctcctctaaatacctgcctggatattctgcttcaagatagagtaagctcgattcctatagttgatgacaatggatccctccgtgatgtctactcactcagtgatatcatggctctggcgaagaatgatgtttatgctcgcatcgaacttgaacaagtgaccgtacaaaatgctttggatgtgcaataccaggtgcatggccgaagacagtgtcatacttgtttacagacgagtaccttgctggaagttttggagggattgtccattccaggagtgcgacggcttgttgttattgaacaaagtaccagatttgtggaaggaatcatctcattgagagacgtatttacatttctccttggatagcatgtgtagccattccatacatgaaaaagcttgctgtacttggttcaaacgaaataaaaagcttacaaatgtgatagtcatcttcttgtttccatct

SEQ ID NO: 8858 - DNA, 1193 bp, Zea mays
  Clone ID: 700799424_FLI
gcggaagcaatggcccgggaagccactgctgtatggaatcggcaccctgttggtcatgccactgaggacactgtatggagtgggtcgtgtttttggcgcaggacggtttctctgcaacatgaccaacgtctcttcgtcgctgcaaattgagcttgtaccatgccttcgagataactatgcgtatatcctgcatgatgttgatactggaacagttggagtagtggatccttctgaggctatgcctattataaatgcattggaaaagagaaaccagaacttgacttatatactgaacacccatcatcactatgatcatactggtggaaacttggaattgaaggcaaaatatggtgcaaaggtaattggttctgagaaggataaggacagaatacctggcattgacatcacgcttaaggagggtgacacatggatgttcgctggccatcaagttcttgtactggaaactcctgggcatacaacaggtcatgtgtgctattatttcgctggttctggagctatatttacaggtgacaccttgttcaatctatcatgcggaaagctttttgaagggactccacagcagatgtatgcctcactccagaaaattacagctctacccgatgatacaaaagtatactgtgggcatgaatataccttgagtaatgcaaagtttgccttgagtgtagaaccgggaaataaagcattgcaggaatatgctgcaaatgcagctgagctgcgtaataagaatatacccacggtgccaacaacaattggaagggagaaggaatgcaatcctttcttgcggacctccaatccagaaattaagagaacactgtccgttccagatcatttcgatgaagatcgggtgcttggagttgtccgtcgagcaaaagataacttctgactaacaaaaggaaatgctcgtgacgtatgacccatatcttgttaaagttcagacagagaacctaagtcacaataaacataggaggaaatgaaggtatatatgtttgagctagattttgaaatgcttcggcaaaattatgtcgagtgtatgtagcttgggcagtgcagtgcttgtctatagcaaccaatgattcttttgaccactacaaataagcgtgttctgctatcatctactctctgtaaaaaaaacgccacgtagccgtttcatagtcgatcttcagttcttattc

SEQ ID NO: 8859 - DNA, 1460 bp, Zea mays
  Clone ID: 700799475_FLI
ccctttcgtccgtacgccgccgcctcgcaccgccgacagtcctcagtccagaactccagatcgagcctccctctccccagatcgggtcctaggctacagcagccgccgcatccgtcaccttcacaccgcgtgcgtgctctctctcccccctccccctctccgtgcgacgactgggtgggctaccgccgccctacgcaaggtgccgagaacttcgccgatatctgcgccggagaagagcgcccaccagatcaggcgcttagaaggcgcgctggccggtggatgacgatggcgggtggcgggggactgaaccggtcttcatcgagggggcagctgccgccgcaagagctgcttgacgatctctgcagccggttccttctgaatgtgcccaaggaggagctggagtcgttcgagcggatcctgttcctgctggagcaggcgcactggttctatgaggacaactccgttgagcacaaccccaacctcaagtccctctccttcaaggacttcacttccctcatgttcaagagctgcactgctctccggccctacatcgcgcacctggatgatatctacaaggacttcaacaactacaagtttcgtgtgcctgtgtccggcgccatcatcctagacgacacttatgagaggtgcttgcttgttaaaggatggaaggctggggccagctggagctttcctcgtggaaagaggaataaagatgaggaagaccacacatgtgctgttagagaagttctagaggaaactgggtgtgatgtttctagactattaaatctggatgattacattgaagtttcaattggacaacaaagggttcggctctacatcataacaggggttaaaagagacactgtgtttgcacctcaaaccaagaaggaaattagtgaaatttcatggcacagaattgatgacctcttaccagctagtgatgatgcagtatctcgtgcagtgaatggaatgaagctgtacatggttgcgccatttttgacgggtcttaaggcttggattgccacacatcctccaccactgcatcagaaaccagagacatctgctagaggtactgtgtggagggcgaagggttcgtcgagcggcacaaccccagtggagaatcctgttgctaaagcaggatctgacgtgcagcacgctgccgaccgccctggttgcagcttcagaaacttcaggtttgacaccgcaagcatcctgcaggccatggaggcttccttcctacgcacctagaatcctgacgaagcatcaacacctgcacccttgatgtgtatagaccgcggaccagcgctatctgtgttgtcaatctgtctttgtttcgtctttctcgccttgtatctgtactcttcacagcaatcctgtcagacgcttgaacctgattttgctgctgccccgtttggtggtggttgtccataaagttctaacgatggtgctgcaaagtctgg

SEQ ID NO: 8860 - DNA, 1238 bp, Zea mays
  Clone ID: 700799476_FLI
gaaggtgagaagagagagagagagtgtgtgtgatcggtacaaggatcaccgctgtgcctgcgcgtgctgcttcaccgaatcgagtcagatcctgtccgaatccgagctaagggatggcaaccggtagtgaagcctcgaaggcagctgaggctgtggttgactggcataaacacgacagcaagaggatgctccatgcggtttaccgtgttggggatctggaccgcacaatcaagtactacacggaatgctttgggatgaaactgctgaggaaaagggatgttcctgatgagaagtacaccaatgccttccttggctttgggccagagaacaccaactttgcagttgaattgacatacaactatggcgttgacaagtatgacattggaacgggctttgggcatttcgcaattgctaatgatgatgtgtacaagttagctgagaatatcaaatccaagggtggtaagatcacccgcgaacctggtcctgtcaagggaggatccactgttattgccttcgcacaggatcctgatggctacatgtttgagcttatccagagggctgacacacctgagcctctttgccaggtcatgcttcgtgttggtgaccttgagcgttctatcaagttttatgagaaggccctagggatgaagctcctaaggaagaaggatgtacctgattacaagtataccattgccatgttgggctatgctgatgaggacaagacaactgttctggagctgacgtacaactatggagtcacagaatacagcaagggcaatgcatatgctcaggttgccattggcaccaatgatgtgtacaagagcgccgaggcggttgatctggcgaccaaagaactaggtggcaagattttgcggcagccagggcctctacctgggatcaacactaagatcgcctcttttgttgatccagatggctggaaagtggttctggttgacaacaccgacttcctcaaggaactccactgaaggctcgggatacccaggtgctgtgctaggatgtagtaatgcttgtctgtggtgtaataagatgtgggtggtttgtttctgccctgatgaacttataatactgaatgttgctacagaggttgtgcttctgccagtgaggtttgggatttgctatgtaactgtgcctgcgggctccgattctggcgctgttcgtacactgtagaagccagtgaatcccaataaacccagcttcacaggctcctcttatcccgt

SEQ ID NO: 8861 - DNA, 678 bp, Zea mays
  Clone ID: 700799536_FLI
cagccgcatccacaacctgcctctctcgtcccctggcggcgtccgcggcaggatggcggaatctacggcgaggacggtgaaggatgtcaacccgcacgagttcgtcaaggcctactccgcccacctcaagcgctccggcaagatggagctccctgagtgggttgacattgtgaagactgcgaggttcaaggagcttcctccttatgatcctgactggtactacatcagggctgcatccattgcaaggaagatctacctaaggcaaggcatcggtgtgggtggctttcagaagatctacggtggccgccagaggaatggctcccgcccaccacacttctgcaagagcagtggtgctgttgcacgcaacatcctgcagcagctgcagattatgggcatcatcgatgtcgatcccaagggtggacgcctcatcaccaaccagggaaggcgtgatctggaccaagtggctggaagggtcgctgttgaagcgtgagcagtgtcatctttggtttcaatggtgtcatgtttgatggttgagaagactgcgctctatttgctcttttgggttaggattttcgagttcagaggactttaaggtttattgcatctagctatggcgccacactatgttccccgagtacctaatgtgatatcaagactcaattctcgaatctaagatat

SEQ ID NO: 8862 - DNA, 530 bp, Zea mays
  Clone ID: 700799551_FLI
attgagacagttccctgctgtctccatgaagtctcctagatgctgtgcttaaccgtatggtaaagaaatatggtctgtatcagctcagaattaagcatctgccgaggaagcgcggtgcatccggactcgggtgtacaaggggcgacgtggcgttacgtgcagtccccaacgaagcaaagagacagaagtacagctgtacagaacggatatcttgtgaagcacacattgggatcaggacgtttggtgctgcagctactttcggtgcagaagcacatatatacgagacctgccagggcgagcaaatacccagttatacacgcgattgctcagctctatcaagctgtgaattgaaagatttctatagtgtattcacgcgacgttttcataaactagtgtgagttatgtactctgaccagtgaccagtgcgaagtctgtgttgtctcaacaatgttgcttggtataaaatgctaaaatgacgtttaagacgagaggggtttttagaaaagagagaaaataagagttttatgggt

SEQ ID NO: 8863 - DNA, 642 bp, Zea mays
  Clone ID: 700799777_FLI
ctcgagtccaagatcatcctcgatcgggagacgcagaggtcccgcggcttcggcttcgtcaccttctccacggaggaggcgatgcggaacgccatcgagggcatgaacggcaaggagctggacggccgcaacatcaccgtcaacgaggcccagtcccgcggcggccgtggaggcggcggcggcggctacggtggtggccgtggaggcggcggctacggcggtggcgggcgccgtgatggcggcggcggctacggcggtggcggcggcggctacggtggcggcggtggctacggtggtggtggtggcggctacggcggtggcaaccgtggcggcggctacggcaactccgacgggaactggaggaactgagcggtggggcccgcgcggccaagttatcctgttcgctaccgtgatgtttaccctagtccagagggtttatcttcgttcgtctcgtttgttgttgcccatctgtgtttttgattgcaaggtcgctctgtgtcagttgttagtgctgtgttcatcctcggctccagcagacccatgcatcaaccagcatggactgtggatcgatggatgctgttactcctgtcaggatttgttctaagttaatcctaaggaaaaaatggtgcttcttggtgctgc

SEQ ID NO: 8864 - DNA, 553 bp, Zea mays
  Clone ID: 700800059_FLI
cgcagctaagcccgtgccagcagttcggatcctgcggcgtcggcagcgtcggcagcccgttcctgggccagtgcgtcgagttcctgaggcaccagtgcagcccggcggcgacgccctacggctcgccacagtgccaggcgctgcagcagcagtgctgccaccagatcaggcaggtggagccgctgcaccggtaccaggcgacatacggtgtggtcctgcagtccttcctgcagcagcagccgcagggcgagctcgcggcgctgatggcggcccaggtagcgcagcagctgacggcgatgtgcggcctgcagctgcagcagccaggtccctgcccttgcaacgcagctgccggcggtgtctactactgaggaaactatgtactgtagtaataatgtaatggagccgctgactagctacctagctcgctagtttactcatttagcggcgatgagtaacgtagtgtcacccatcaccatgggtggcagtgtgagcaatgacctgaatgaaccattgaaatggaaaggaataatatataaggaaaaaagatgattgg

SEQ ID NO: 8865 - DNA, 874 bp, Zea mays
  Clone ID: 700800276_FLI
caacttcagaggctatccgtgactgggtcacaaatgtggagaccacacactatatcttgggctctgttgccggtccgcacccgtacccgatgatggtgagggagttccataaggttattggcaaggaaacccggaggcaggccatggacaagtggggtggcaagccggacgtattggttgcctgcgtcggcggtggatcgaacgccatgggcttattccatgagtttgttgaggaccaagatgtgaggctggttggagtggaggcagctggccatggcgtagacaccgacaagcatgcggcgactttgacaaagggccaagtcggagttctccatggatccatgagctatttgctgcaggatgatgacggacaagttatcgaaccccactccatcagtgctgggctggattaccctggcgttggacccgagcacagtttcttgaaggacattggacgtgccgaatacgatagtgtgactgaccaggaggcactggatgctttcaagcgcgtgtctcggttggagggcatcatccctgccctggagacctcccacgcgctggcctaccttgagaagctctgcccgacactggcggacggcgtgagggtggtggtgaactgcagcgggcgaggagacaaggacgtgcacaccgccagcaagtacctggacgtctaaaacaccagcgaggaggctggtttccatgtcaagttttggagggttcagcagtaattaatttagcgctgttctttttggataaaagcacaaataacctggaagctggtattgttgttgtagccggtagtgcccccctgtttttttattttacaagtaatctgaatagctttggagtgcataatcaataatcaaataaatac

SEQ ID NO: 8866 - DNA, 2040 bp, Zea mays
  Clone ID: 700800359_FLI
aatctgtcaagcattagggcccctaagttgggcaatgctcgtacagatgtgaagccttagggcccctaagttgggcaatgctcgtacagatgtgaagcctgaccattttgctcgtgaagctaaggagttcttgcgcatgaggttgattggcaagcaagtggctgttgaaatggaatattctcgaaggatcagcaccgtggatggacagagtgttgctccaacagcaaacattgctgatacaagagtattagattatggttcagtttttctgggttcaccatcacagactgatggagatgacatatcttctgctccgagctctgccagccagcctggagttaatgttgctgaacttttactctcacgaggctttgctaaaacatctaaacacagggattatgaggaaaggtcgcactattatgatgctctattagcagctgaatcacgggctgagaaagcaaagaaaggagtgcattctcaaaaagaatctcctgtgatgcatataacagatttaacaactgtatctgcaaagaaggccaaagatttccttcccttcttgcagaggaacagaaggcattctgccgttgttgaatatgtttttagtggccatcggttcaaactaacaattcctaaggagacttgcagtattgccttctcattatctggtgttcggtgtcctggtaaaggcgagccatactcagatgaagctattgctttgatgaggagaaggatactacagcgtgatgtggagatagaggttgaagcagttgacagaacaggaacattcataggttcgttgtgggagtccaagaccaacatgggctctgtacttctggaagctgggctggcgaagctgagttcttttggcttggataggatgtcagatgctcatgtcctaacaagagctgaacagtttgcgaagcaacaaaagattaagatatgggagaactatgtcgagggtgagaatgcttcaaatggatccgcacctgaatcgaaacaaaaggaaatcctcaaggttgtcgccacggaagttcttggtggtgggaagttttatgttcagacagtgggtgaccagagggtggcttcaattcaacagcagcttgcatctttgaaacttaaagatgcaccagtcattggtgcctttaatcctgtgaagggagagatagtcctctcacaatttagccttgacaactcctggaacagagctatgattgttaatggacctcgctctgtagaatctctaaacgacaagtttgaagtattctatatcgactatggcaaccaagaggtggttccctacagtcgtctacgacccgtggacccatctgtttcctcttctcctgctcttgctcagttatgcagccttgctttcataaaagtgcccagtcttgaggatgactttggtcaggaagcagcagagtatctaagtgaatgtttgctcagtagctcaaagcaatatcgggcaatgatcgaagaacgtgatgcttctgggggaaaatcaaagggacaaggaaccggaaatgttctcattgttactcttgttgatgcggagacagaaagtagcataaatgctaccatgcttgaggaaggccttgctcggcttgaaagaagcaagagatgggacactagggagaggaagacggctctccagaacctggaacagttccaggagaaggcaaagaaggaaaggctccggatctggcagtatggcgatgttgaatcggatgaggacgagcaggccccagctgcaaggaagcctggaggtcgtcggtagagctccccaaatgtgagactctgctgggagttatagatgcaacttagagggtaccttatttattcggttagaaaacagaacttagcgaggcgaaactttctcggtttgagcacttttgatattccgttttttacatcgtaagcttataaggttaaaggtacattgttttttctctgaacacaataaaggtcgtctatgcgctgcagttctttgtgtagtcagaatataatatttgttgatactaagaaatgcagtgaattaaagtt

SEQ ID NO: 8867 - DNA, 1325 bp, Zea mays
  Clone ID: 700800510_FLI
cagtcatgtggaaattcaatgttgccagaacaggacagttgacttagagcttcttgcaaagagctgcaagtcactgatttccttgaagattggcgattgtgatctttcagatttgatagggttcttccaatctgccacatcactggaagaatttgctggagggacatttaatgggcaaggggaactcaccaagtatggggatgttaaatttccatcaagaatatgctccttgggacttactttcatgggtgcaaatgaaatgcctattatatttcctttttctgcgatactaaagaagctggatttgcagtacactttcctcaccaccgaagaccattgccagctcattgcaaaatgcccgaacttactagttctcgcggtgaggaatgtgattggggatagaggattaggagttgttgcagatacgtgcaagaagctccaaaggctcagaattgagcgaggagacgatgaaggaggtgtgcaagaagagcagggaggggtctctcaagtgggcttgacagctatagcggtaggctgtcgtgaactggaatacatagctgcctatgtgtctgatataaccaatggggccttggaatctatcgggacattctgcaaaaaactctatgacttccggcttgttctgctcgatagagaagagaggataacagatttgccactggacaatggtgtccgggctttgttgaggggctgcaccatgcttcggaggtttgctctgtacttgagaccaggagggctctcagatgcaggtctcggctacattggacagtgcagtggaaacattcaatacatgcttctcggtaacgttggggaaaccgatgatggattgatcagtttcgctctgggatgtgtaaacctgcgaaagcttgagctcaggagctgttgcttcagcgagcgagctctggccctcgcaatactaagtatgccttccctgaggtacgtatgggttcagggctacaaagcgtctcaaacaggccgagacctgatgctcatggcgaggcccttctggaacatagagtttacacctcccagttcccagaatgctggtcggttgatagaagatggggaaccttgcgtagatagtcatgctcagatactggcatacggctctcttgctggtaagaggttggactgcccacaatccgtggtcactttgtatcctgcgtgagtgtaaatagactgagggcccgtttggtgcccatggaaccgttgtctggaacaatttctggtaggattgcttgctgatttgtataggctttgatcagctggaaacaaatgaacaaggcctaagctcgtgtctttctctc

SEQ ID NO: 8868 - DNA, 1084 bp, Zea mays
  Clone ID: 700800587_FLI
gaaagggatctccggtccccaggccccggctcctccccttccgattccaatctggtctcgccgggcctggcggcgagggagagatggggaagaaccaggcgtacaaggcgatgcagcgggcgcggttggggtcctcgtccggcgcgccgggcgccgccgacgcccccgaagacggcatggcttccagccgctgaggaattttggctaccatcccactttcgctttgggtgaaagataaagaaaaagaactttggctaacgagggccgtcgcagacggacggttcattccattctccagagtggcatgcggcgcgcctggccagccttaacaagacgcacaccctcacctgggaggagttcaagaagaagcagaaggaagaggaactgaaaaggggcgagctggaggctgacaaagacaaaatgatgagagagtatagagctcaactggatgctgaaagagctcaaaagctagcaaacggaagaaatcactcaaggtcaaactcaaaatcatcatcttccaagaaagagaggaaggataaggacgcaaagaaaagaagtaaaaagaggagaaagcacaaaagttcatcagagtcaagttccagctcatcttcagaatcttcaagcagcgacgatgaggataggggttcaaggaagtccagatcacggtcgagatcaaagagaacaaggaaggaaaagaagagccggtcaaggtccaagcgcagaggcagtgaaagcgaggaggaaggcccggtacgcctctctaaattcttcgggaagtaaggagtagacgctgctgtacccaagacgcctttttcattttgaaacgtagattggtgggtttggatgtatcattcaacacaaattacttctgaaggttgagcgagccgtttaccatggtgttctcaatataatgctcagctgttaagagggtctggtcaagttgtgtggcttccaaaaactttgtaagcaactggtaagtcattgttaaatcgctgtaccttggaggatttgatgccatatatttgagacattgaactgctatatttatgttaagactttacatatgcagtcagttgtttcagtt

SEQ ID NO: 8869 - DNA, 1327 bp, Zea mays
  Clone ID: 700800659_FLI
ggacaccgtggggcagtacgagtcccacatcgcgttcactcttcctgggctctaccgtgtccttgcttcccgcgatttcttggaatgtgctggtgatgatgaaatcggtgtggttcatggcaataaggtcagctgtgaactggcaagagaagtggtactggctgtacgagtcccacatcgcgttcactcttcctgggctctaccgtgtcgtccatggcatcgatgttttcgatcccaagttcaacattgtctcccctggagcagacatgagtgtttactacccgtatacggaaaccgacaagagactcactgccttccatcctgaaatcgaggagctcatctacagcgacgtcgagaactccgagcacaagttcgtgctgaaggacaagaagaagccgatcatcttctcgatggcgcgtctcgaccgcgtgaagaacatgacaggcctggtcgagatgtacggcaagaacgcgcgcctgagggagctggcgaacctcgtgatcgttgccggtgaccacggcaaggagtccaaggacagggaggagcaggcggagttcaagaagatgtacagcctcatcgacgagtacaagttgaagggccatatccggtggatctcggcgcagatgaaccgcgtccgcaacggggagctgtaccgctacatttgcgatacgaagggcgcattcgtgcagcctgcgttctacgaagcgttcggcctgactgtgatcgagtccatgacgtgcggtctgccaacgatcgcgacctgccatggtggccctgctgagatcatcgtggacggggtatctggcctgcacattgacccttaccacagcgacaaggccgcggatatcctggtcaacttctttgacaaatgcaaggcagatccgagctactgggacaagatctcacagggcggcctgcagagaatctatgagaagtacacctggaagctctactccgagaggctgatgaccctgaccggcgtgtacgggttctggaagtacgtgagcaacctggagaggcgcgagacccgccgctacatcgagatgttctacgccctgaagtaccgtagcctggcaagccaggttccgctgtccttcgattagtacggggaaagaagaagaagaagaagcccaggccggagaaccatcgcctgcatttcgatctgtttcaccgcaattcgcattgttagtcgtgtattggagttatgtgtacttggtttccaagaactttggttccttctcgttttttttccttgtttgagcgtttttgggcagcgctggcctggttcctagtatggtgggaattggctgcaccttttgcttcgaat

SEQ ID NO: 8870 - DNA, 172 bp, Zea mays
  Clone ID: 700800789_FLI
atatgatacttcacttgaatacaaatatcatatggaaacccgcatcgtccattttggatgcaaacgctgagtaaagtgagaaagggctcattagagaccgactccttttgtctaacgggtcatctttttttaactgaatcatctcatcaaaacgcctttcttttctggtttt

SEQ ID NO: 8871 - DNA, 902 bp, Zea mays
  Clone ID: 700800828_FLI
gaatatgtctatccaaacaaccctatctataggcaatgcgtatccttgaggcatctattccacagcatttttggcgggtatactgcaacattccagaggcttgagtctaggccaaacaacccagctcaaggggttgctccactgggatccactaatccaagtgtcaacataaatgacaattcactcaatcttgtttctagaccacctccatatgataccgatcctagatatgcccgtgttcaaagagagggattagtctccaggcgtgagaaatccataaatcttgcacaagaagagtcactggcccttagacgaaatgccagcagctctggtattgaacatttagctgctcagaagaaacgcaacagcactgaaaatgagggtgaatataaggtccatcgttctgaatcaactaagagtttgtctgcaaaagcttatagtagcagctatgctgttgtcgcttcagaagatgaggatgtctgccctacttgcctggaagaatacacgccagacaatccaaaaataataaccaagtgctgtcaccattttcatcttggttgtatttatgaatggatggagagaagtgatacatgcccaatttgtggtaaggaaatggagttttgcgagagcccatgatagcctttcggtttacatgatctcacatgaagtctgagctgcaggaaatggggttctgtgagaaccaatgatagcctttcgatttacatgatctcagatgggagcaagggaaacattctacagagtacaacagaatgctggagaattgtaaataatagttccttatgcatgcgatgtccaaatagatctctttctcgagatcagtttcttacatgtactgagatggttatctgtcttactaaattcatgctagaatttgcttggcc

SEQ ID NO: 8872 - DNA, 1231 bp, Zea mays
  Clone ID: 700800972_FLI
caagcttcctcctccatttttttatctgctttttccccctcggcggttcctactcaggctggcagcagagctagctagcagaggtccctggtgcttcaggcgaccgaccatggtggagctggagcctagtgtgaagtcggagcatggtggaggagtcggcctggtcctgcctcctggcttcaggttccatcccacagacgaagaggtcatcaccagctacctcctgcacaagttcctgaaccctagcttcgcgccgcacgccgtcggggaggtggacctcaacaagtgcgagccatgggatctcccaagcaaggcgaagatgggggagaattccaaggagtggtacttcttctgccacaaggacatgaaataccccacgggcacgcgcgcgaaccgcgccaccaaggagggctactggaaggccacaggcaaggacagggagatcttcaagccagctgggcgtgcccgtgaccgcgagctagtggggatgaggaagacgctggtgttctacatgggcagggctccgcgcggcaccaagaccaactgggtgatgcacgagttccgcctcgagggcaagtccaggcacacctgcaacgacctacgcttcaatcccaaggatgaatgggtcgtgtgcaaggtgcaccacaaaggggccgaagaggccagcgccgccaagaaggccgccggcgggggcggcgaggagcagtactactccaccgcaacgcccaacgtcagctccgtcgaaggcggcgacgagttcctcgtcgactccctgctggattactccagctacttcaactgcttcgcacccggtggcttgcctctgcccagcacgacggccaactcagccgcagcacctgcaacgaacgacgacgacagctcctcctggagcatgcttcgtcacgcgccggcagaccagcaagcaatggtggggagctacagcttgcaccaccaggcaatggaggcgaaagctgtaggcggcgtcacctccccgagtttctccgctggtttgccgagctcgccggtggcggactacgtgggaaacgatgcttctggctaccatacaaacaactattaattaatgatggatgatgagccgctgccgaaaatatagtgatccaataggtggtgttaggctattcacacttactgtacagttttaaaacaatgtcacatcaaattttgtttatggaaccgtgtacactgagtttcaactagatgcaactctctc

SEQ ID NO: 8873 - DNA, 1096 bp, Zea mays
  Clone ID: 700800973_FLI
tctcgcgcagcatcgcctcccaagtccacaaaccacaacttacgccgccgctcgctccaccgcgcaagagtctgctgctgccgctcacccacccccgctcgcgcagaaggccgccgcagctctcactactggtgccctaaacgccgatatccctcttcgcctccctttccccacccaaaaccccggccttcagggttccggcaccatgccgcagggagatcacatcgagctgcaccagaagcgccatggcaagcgcctggaccacgaagagcgcaagcgcaagcgcgaggcccgcgaggtgcacaggcgctcgaaggatgcccgcaatttgattggtgctaagggcaagaggttcgccaagaaacgctatgctgagaaggcacagatgaagaagaccctgaaaatgcacgacgaatcaaataaacgacagaaggttgatgatgatgtccaagagggtgctcttcctccgtatctgctggatcgtgatcagacacagcgcgctaaggttctcagcaacacaataaagcaaaagaggaaggaaaaggctggcaaatgggatgttcctctgccaaaggtcaggcctgtagctgaagaagaaatgttcaaggttctacgaactggcaagcgaaaaaccaagcagtggaagagaatggttactaaagccacctttgttggagctggatttacaaggaaaccaccaaagtatgaacggttcattcggccaactggtctgcgtttcaccaaagctcatgtgactcacccagagctgaagtgcactttcaaccttgacataatttctgtgaagaaaaacccaaatggtccaatgtacacttctcttggtgttatgacaaggggaacgatcattgaggtaaatgtcagtgagcttggtctggtaactcccgctggaaaagttgtttgggggaaatatgctcaagttacaaacaacccggagaacgatggctgtatcaatgcagttttgctagtgtagagccatagtgagattttgttgatggtggtgaatcgtcccatttgtatctgctccgatatgctattttttgaccatgtcatggctaatcccagtagtttgttgtgcacc

SEQ ID NO: 8874 - DNA, 2343 bp, Zea mays
  Clone ID: 700800974_FLI
ctgcagtgagggactgaggggatcccaagttccaaacaaaactcaccgaggaaaatcattttccgacatggtgaggacgagaaggaggttggtgctgctgctgctcctcctcggcctcacggtgctttccccgctcgcgctctacactagccgcctctccgtggcgcttaactctatacaagcgcgggttttccctggagagatcacgaatcagggccgtggcgtcaaggcagataagctgaatgcgcttcctctgcaaacagtgagctccttgaaagaacctgtcgacattgtcttctcagaggagctgactgaatctaagagccaagaattgcgattgccaaaggtaggtgcgcacaagagccgcgtgctctctgaagtcacggttgctgatgatgatacatcatcgaaagataatgaagtgattgagcaagtaattacgctggaagcacaggatggtggcttggtgaagggagcaggtgtttcagatgagcaggagaaaaacattggatcactgcagcaatcttcttctgaggaaagttcacaggacactatgcctaaacagacacctgcaaaggttgttgcggagaactcccaatcagctagaacagacggtaaaactaaaaccactgttctacctgatatgcggatccgaaatatcaaggatcagttaatcaaggcgaaggtataccttggtcttggatccattagagcgagttctcaatatcttaaagacctacggcagaggatacgggaagttcaaaaagtgcttggtgatgcatccaaggactctgatctaccaaagaatgcacatgaaaaggttaaagcactggagcagatgctgattaagggaaaacagatgcaggatgattgttctattattgtaaaaaagcttcgagctatgcttcattcagcagaggagcagctgcatgcacacaaaaaacagactgtttttctgacacaacttgcagctaaaacccttcctaaaggtcttcactgcctccccctgagactagctaatgaatacttttcattggatcctgttcggcagcagttcccaaaccaacaaaatctcattaacccaaaactgtatcattatgcgttgttctcggataacatactagcaacagcggttgttgttaactcaacagtgttaaatgctaagcatccttctgatcatgttatccacatagtaactgacaaactgaattatgctccaatgagaatgtggttcctctctaatcctccggggaaagcaacaattgaagtacagaatattgaggagtttacatggctaaatgacagctacagtccagtactcaaacatcttgggtcccaatccatgattgattactactttggaacgaatcgtgcaaactcagattcaaacctaaaatatcgaaacccaaagtacctgtcaatcctcaatcatctccgcttttacctacctgagatttatccaaagcttgacaagatggtctttcttgatgatgacatcgtagtaaagaaggatctggctggcctttggtcaatcaacatgaaggggaaggtaaacggtgccgttgagacttgtggagagagtttccatcgctatgatcgatacctgaatttttcaaatcccattatcaccaagagttttgacccacatgcttgtgtttgggcttttggaatgaatgtgtttgacctggctgaatggaggcggcagaacataactgaaatttatcactcgtggcagaagcttaatgaagatagatcactctggaaacttggtactctccctccgggtttggtcacattctggaacaagacatttcccctcagccggtcatggcatgttcttggtctaggttacaatccccatgttaacagcagagacattgagcatgctgcagtcatacattacaatggcaacatgaagccctggttggagattggtctacccaagttccggagctactggtccaagtatctggattatgaccaatctttccttcgggaatgcaacatcaatccatgaaggaacctggtgcttttagtcccttctgacataaccaatagcctgttttctgtcgatgtgcgctttagtgtagtcagcatagtactctcttgctttagatatcagttgttaacaagatttcttattgcctgtgcttcttgtcagaccctttgcataattgcaggaatatctgttatgtttttagagtacatgctttggagcagggcaaactttagatagtgcaatgctcttatgcgatatcgcctttatgtactgaacgtttgctgcaatcctgtaatttggaagcaaactttcccaacaatttaataggtattcaattgggtatc

SEQ ID NO: 8875 - DNA, 2295 bp, Zea mays
  Clone ID: 700801033_FLI
cacgtgagatcccttcactagcatctctcttcctcaagcgccatccctggcttctcccatgccgagcgtctccaatgcccaaacctccatggccgacgtcgccctgctcaggtccaaccagctccccttcctgttgttgtgtccagccgatgcccctccctccatcttcctctctgcagcaaccctaccatggttgtgcccctgcttccatggtgacctcgccccagccccaacgtcggacgtgccgtcgccctcacgtccagctcctccatccccctggttccctcccagctctgaccaggtttgccaggtccgaccgttctgctcgccgcgccctccccatgccagcacgcgagcgccccctcccgtccctgctcctctccatcgacgcccaggccgatgccgagctcccagcccctcccgatggcgtggtcaagcatctaggtatcagaattcctggattccaaatctgagatggatgttgatgttgactataacagcttgtactcaaagcaggactttctacagggtgaggtgctcgtttcgatgtggctagagtattgcaagtgacatcccatcacttctctggcaaggttcttttgtcacctgatgggactaacttggaatatgagcagctcctactcatcacatgcaaatgcatgtatttcactgtgaggtcatacatgccatctagggtgaaacaaattttgccttccttttgcaaagacatgttctgtatactagattctttgaactttaatagtcttattgaagatggatctaccatgaagctcaggattgcaaagagatgtctcattatattttgcgcacttgttacacgtcaccggaaacatacaaataaccagatgccacatattgtcaactgtgcaatcaaaatatcaaaacaaagcatccatttaagtaaactcgactctctccccaatcggattgtttcattggcatttgatgtgatttcttgagttttggaaacaggaccgggatggcgactagtttcaccacatttttcttcacttcttgattcagcaatttttctagcattagcattgaatgagaaggatatagaagaatgggaggaggatactgatgagtatatgcaaaagaatcttccttctgaacttgatgacatttctggatggactgaggatttgttcactgccagaaaaagtgcaatcaatttacttggtgttatagcgctatcaaagggtccaccagttgcatctgcagcatcaaagcgtaagaaaggtgataaaaataaagggaaatctgaaatgagctcaattggggagttattggtcatcccattcctgtcaaagtttcctataccttctcatggtgaggatgcatcatcagtagcagtgcagaattatttcggtgttttgatggcatatggaggcctccaagattttctgactgaaaagaaagatttgacaattacattgatcaggaaccggattctcccattatattctttggatccttgcagcccatatttgatttcaacggctaattgggttattggtcagcttgcgatatgcctaccagaggacatgagttctagtatttatcagtccttaatgaaggcgttgaccatggagtatgtggaggacataacttgttatccggtttgtgcctctgcttctggtgctattgcagaactcatcgagaatagttatgttccacctgactggctcattcttctacaagtggttctgaaaagaataagtactggagatgaaaatgagtctgctcttctgttcaagcttctgggcacaatagttgagggtggacaggaaaaagttctgtctcatattcctaaaattgtatccaacattgccagtactgtaatggagctcctgtcccctgtcccagatccttggcctcaggtagtagtgcatctttcttctgtgtggtcaatattttggtactttatcatgatgaccggcgggaggaacaccgggcgtgtaggagtgatcaagaacagggagaagtacaagcgcagagtgatcaagaacagggagaagcacaagggcagcttcgagaccatccacgtgctgcttagagctttttgttatgtctagttttctcctatttgttgtacaggaaaacatagaatggaattcaaatttggtggccacaaaatgtggagacttgaattcatataaagttaggcttaacattagtacaaacagttgtattttagtttagatttagagtacacttatgtatgtgttgtttgacaatgcttatttatgatatattgaatgatacttattt

SEQ ID NO: 8876 - DNA, 1658 bp, Zea mays
  Clone ID: 700801123_FLI
gggttaccagcagtattaaccgccacattcttggaagcaaaggtaggaagtttcccatagagattgttaaaatcacagttgcagggggaaatgctaatggtggtgctcgcgcaagtgagacatatagccaagcgagcagtggtccacgggacatccatgttgttgaaagtggaaatatggtcatttcaatccaagttctccgcaatgtgaccaacaacttcagcgaggacaacatccttggtcgaggagggtttggcactgtttacaagggtgaacttcatgatggcacgaaaattgctgtaaagcggatggaggctggtgtgatgggtaacaaggggctaaatgagtttaaatcagagattgctgttttgaccaaggttcgtcaccggaaccttgtttcgctgctgggctactgccttgatggcaatgagaggattcttgtgtatgagtacatgccacaggggacactgagccaacacctgtttgagtggtcagagaacaatttgcgaccattggaatggaaaaagcggcttagtattgcacttgatgttgcaaggggcgttgagtaccttcacagccttgcccagcagacctttatccacagagacttgaagccatcaaacatacttcttggtgatgacatgaaggccaaggtggcagactttggattggtcaggcttgcaccagatgatgggaagtgcgtctccatagagacaagacttgctggcacttttgggtaccttgcaccagagtatgcagttactggacgagtgaccacaaaagctgatgtcttcagctttggtgtcatcttgatggaactgattacagggcgcaaggcacttgatgagactcggccagaggatagcatgcatctagttacatggttccggagaatgcagctgaacaaggaaacattccgcaaagcaatcgaccctgttattgaccttgatgaggagacatatgctagcgttagtactgtctcagagcttgctggtcactgctgcgctagggaagcacaccagaggcctgacatgggccatgctgttaatgtgctctctaccctttcagaagtttggaaaccaactgatccagactcggacgacagctacggtattgacctcaacatgaccctccctcaggctctgaagagatggcaggcttttgaagatagcagccactttgacggcgcaacctcctcatttgttgcaagtttggataacactcagacgagcatccctacaaggcctcctggattcgcggagtcgttcacctctgctgacggaagatagacggttagctgctagggcgtgccaaaccttgtgtgcttccgttgaaatagaaggctcacgcgatccttgtgttcattcttttagtctcttcgctcctaatctttcatgtctcttcattcggctctgtactgccgtgtagctgctctttgatcctgtcccaaaaattgcctggaagttcgaaaaatttgctaaccggttatgtcatttgctaagattaaagtagaagtacgctagggttgttgggttgtatcggatgttgacaatttccaaatgaaggtgatcctgtattcgtcgaaaagtatggccctggcctgaagtttttccatgctcttctgaagcaacgcctcagccatgacatcatttcgcagg

SEQ ID NO: 8877 - DNA, 446 bp, Zea mays
  Clone ID: 700801174_FLI
gaggcatcagtgcagcccgacggcgacgccctactgctcgcctcagtgccagtcgttgcggcagcagtgttgccagcagctcaggcaggtggagccgcagcaccggtaccaggcgatcttcggcttggtcctccagtccatcctgcagcagcagccgcaaagcggccaggtcgcggggctgttggcggcgcagatagcgcagcaactgacggcgatgtgcggcctgcagcagccgactccatgcccctacgctgctgccggcggtgtcccccactgaagaaactatgtgctgtagtatagccgctggctagctagctagttgagtcatttagcggcgatgattgagtaataatgtgtcacgcatcaccatgggtggcagtgtcagtgtgagcaatgacctgaatgaacaattgaaatgaaaagaaaaaaagtactccatctgttcc

SEQ ID NO: 8878 - DNA, 1103 bp, Zea mays
  Clone ID: 700801246_FLI
gcccaacaaccccccgacccgtcacctgacccagccgatcgagaatacccggaaggccggaacccacctgctgcgcacctgcaagcctcgagtggagctcttccacggccgcggtggagatggcggcgaatctggaggacgtgccgtcactggatctgatgcacgagctgctccgccgcatgaagtgcagctccaagcccgacaagcgcctcatcctcatcggtccacctggctctggaaagggaactcagtctcctattatcaaggatgaatattgcttgtgccatttagccactggtgacatgctgagggctgctgtggcggccaagacacctctaggtatcaaagctaaagaagctatgaataagggagagcttgtttcagatgatttggttgtgggcattattgatgaagctatgaagaaaccctcatgccagaaaggtttcattcttgatggctttcctagaactgtgactcaagcacagaagcttgatgagatgttggcaaagcaaggtgccaatgttgacaaagtcctgaactttgcaattgatgatgctgtattggaagaacggattactggtcgttggatccactcagccagtggtaggacttaccactcaaaatttgcacctccaaagtctccaggagttgatgatgtaactggagagccattgattcaaaggagagatgacaccgctgaggtcttgaagtcaaggcttgaagctttccacagacaaaccgaacctgtgattgattattactccaagaagggcttagtggtgaacctgcctgcagagaaaccaccgaaggaagtgactgctgaggtgcagaaagccctctcgtgatgaaatgtccactcttgaggttaaacatgacatctaccaaaacccctttgtttgggtttcttcaaaatttgcactaggccaacatcatgaggttttttattttcagtatccttattgtgcggatgcaccattttttgttatcacacctttcacaagctcggcaattgtctgaataatttctgtgtctaatgatggaactgtttttcagtaacaaactgatatgattacaacaattcatctttgggaaaatttccctgc

SEQ ID NO: 8879 - DNA, 688 bp, Zea mays
  Clone ID: 700801284_FLI
ctcccgtccccccctccgtgatctgttgtgtgtcagtccatgtaccctcctcgatcgtagtgtctatatctcctgccttgcagctttctgcagggagctgcgccaacgatgggcgtcttccaggacaccggcgtcggtggcggcgccggcagccgcacgtccaggagggttttccagtaccagaggctggagtgctgctgggacgacggagccacttccaggtggcggtgtccgccagccgcgaatggtaagaaggctgaagccccctgtttgttcagtgtcaggcggctcaagtggagcaaggtcacctcggttctgataccgaggaaggtcgccgagttgtctgcaaagatctgccacgcccgcgccaggacggaggccgtcgtctgcccggccgtcgtcttcatgtcgccgtggggcctccctgtgctctcccgcccgctattggtcggccacaacacttgcaggtatcaccgtggaagagacaccttctggtgagcaggtagctgcacctcgatctgtattcctggcggtggtagtatcggtatatgcgtgtgtgatatatgtggccagcttagttgatcttgtaggatgtgtattattactcctccattttgatttctgcaatacttgtgttgtgttttgccggctgcatctgaacttagatgctgtttggttcatgatggtt

SEQ ID NO: 8880 - DNA, 1127 bp, Zea mays
  Clone ID: 700801321_FLI
gcagcagcagtatggatacggatatggatatggacaccatcaccatcagcatgaccaccacaagatccaccgattcgagcagggcgacgtggtggccatgccggccggcgcccagcactggctgtacaacgacggcgacgcgccgcttgtggcggtctacgtcttcgacgagaacaacaacatcaaccagctcgagccttccatgaggaaattcttgctggctgggggcttcagcaaggggcagccccacttcgccgagaacatcttcaaagggatcgacgcccggttcctgagcgaagccctgggcgtcagcatgcacgtcgccgagaagctgcagagccggcgtgaccagcgaggcgagatcgtccgcgtggagccggagcacggctttcaccagctgaatccgtcgccgtcgtcgtcgtcgttttcgttcccatcgtcacaagtccagtaccaaacgtgccagcgcgacgtcgacaggcacaacgtctgcgccatggaggtgaggcacagcgtcgaacggctggaccaggccgacgtctacagccctggggctgggaggatcacacgcctcaccagccacaagttccccgtcctcaacctcgtacagatgagcgcggtgcgggtagacctgtaccaggacgccatcatgtcgccgttctggaacttcaacgcccacagcgccatgtacggcatcaggggcagtgcaagggtccaggtcgccagcgacaacgggaccacggtgttcgacgacgtgctccgtgcggggcagctgctcatcgtaccccagggctacctcgtcgccaccaaggcgcagggagaaggcttccagtacatcgccttcgagacgaaccctgacaccatggtcagccacgtcgccgggaagaactccgtcctgagcgacttgccggccgccgtcatcgccagctcgtatgccatctccatggaggaagctgcagagctcaagaacggtaggaagcatgagctggctgtgcttactcctgctggcagtggcagctaccaacaaggtcaagctggcagcgcccaacagtaggcacaacctcagagtgatctgcctgaataagtactcgtagactgtaataattaaacaaagcttgctcatggtt

SEQ ID NO: 8881 - DNA, 480 bp, Zea mays
  Clone ID: 700801366_FLI
cgtctccggtcccgtccgtaatagcactgatccgatccacgccggccggcgatggagctcatcaagtccagggcgaccgtgtgcgcgctcctcctggcgctgctcctgctctcgcactacgacggcgggacgacgacgacgatggtggcggaggcccgggtgtgcatgggcaagagccagcaccactcgttcccctgcatctccgaccgcctctgcagcaacgagtgcgtcaaggaggacggcgggtggaccgccggctactgccacctccgctactgcaggtgccagaaggcgtgctaagcaaagctcttgaaacacccttggcttgccagaactgaactgtggtagtactaagtaacacccttggctagctgtgcacaacctacgtaccgtgcatgcatgtaatgtggtgtcatgtaacgtgacagcaataaatattaataacaataataacacggcatgtagcctttgcatgcttct

SEQ ID NO: 8882 - DNA, 951 bp, Zea mays
  Clone ID: 700801387_FLI
cgacgacgacgaggaacatggacatggagaggacccgccgcaggaagctcaacgagaggctctacgcgctccggagcgtcgtgcccaacatcaccaagatggacaaggcgtccatagtcagggacgccatcgcccacatcgagcatctgcaggagcaggagcgccgactgctcgccgagatatccgttctccagtcttctgacgacggcaccgccgccgccgccgccgtcaagacggaggacgctgccgccactgggggtgctgcgtacgacgtcgacagcgtcccctggaggaagaagccgagggcggtgccactgccgtccgtgtatttcaccgacaacccgacgagctccatctcgtcatctccgccagtccgaatcctggaggtgcaggtctcgcaggcaggggagagggtggcggtggtgagcctctggtgcagcaggggcagggacgccgtgggcaagatttgcctcgcactggagccgctgcgcctccgggtcgtcacggccaccatcaccgcgcgcggcgacactgtcttccacacactgttcgtggagacaggagaaacgggtggtgctcggctaaaggaggcgatactggctgctctcgctcggttcaacgtcctcgctaacgctgaccaagtcgtccatgagttactgggatgattgatgcggtggcatctcggacagcaacacctggtgttgttgtcgttgtcaccactctcgactgtccgattcaataatgatgtacctagggctgacaataggcctcaaattttacactataaaacttaaggattaaatcggattaggatcggctttgtttctattcatttttgaactacaaattatttagggccttaacaaatggtgaagaggcatttggatcgtgatccattaccacccctagatgtacctcaggaatgtttgaatatgatgtcattgccatttc

SEQ ID NO: 8883 - DNA, 753 bp, Zea mays
  Clone ID: 700801452_FLI
atcaaagttacacgttcggtacgtgttcccttttccttgggctcttattctgattatgctgattgcgatgttattcctatggaagcatgctctttgttacttggtagaccgtggaaatatgatactgatagtttacatcatggtcgttcgaatcattattctttcatgtttaagggtcagaaaataattatccatcccatgacccctgaccaaattataaaagatgatcttgctcgggctacaaaaactgcaaagcaacatgcacctaagccatccacccctgttaatgctgaaatcaagttgcatgctcctgttttacttgctacacgtgctgattttgatgacctacatgatactcacttgccctgcattgcacttgtatgttctagtatgctcgtttcatttgatgatgccccgcctttggatattccccttgctgtttctaaccttttgcaggagtacgctaatgttttccctatggactagccaccgggtcttcccccgcttcgtggcattgaacaccagatcgacctcatccccggtgcctagcttccaaaccgcgccccgtaccgtacgaatccggatgagacaaaggagatccggcgccaggtgcaggcgtttgcttgataaaggttacatttgtgaatctcttagtccttgctcagttcctgttttacttgttccaaagaaagatgggtcatggtgtatgtgtgtcgactgtcgcgctattaataacatcacaattcgttatcg

SEQ ID NO: 8884 - DNA, 242 bp, Zea mays
  Clone ID: 700801541_FLI
cgtaggggcatggagtcggctgctgcaggccgcacatcgccgtcagttgctgcgctgctgccggcggtgtcccccactgaagaaactatgtgctgtagtatagccgctggctagctagctagttgagtcatttagcggcgatgattgagtaataatgtgtcacgcatcaccatgggtggcagtgtcagtgtgagcaatgacctgaatgaacaattgaaatgaaaagaaaaaagtattgttcc

SEQ ID NO: 8885 - DNA, 976 bp, Zea mays
  Clone ID: 700801551_FLI
gcaaattcgcctcggtcgttcaaccaaacaagctcactcccggccatcaggcgcacaccgctctcccgccgccgtcctgcgtcggagcgatatccctacatccccacctcatttgcacccggattggcttcttcttctactactactgtacagaactttttatgtggctgcaaagttctgtaattctagaggagcaaaatggagattattatcattatctcacttgtcattcttttggcactaggagctctctttgcgatcccaaaatcgcaaaataaaggtaaatcaaaaggaaccgacttaggagctggaatgacatctaggagctttacgaaggaagagatctctaaacataacacaaggaaggactgttggatcgtcatcaaggacaaggtctatgatgtcactccttatgtagaggagcatccaggcggagatgccattctaaataatgctggtggtgattccacagagggcttttttgggccacagcacggcactagggtcttcgatatcatcgaggatttctgcatcggtcagttgaaggcatagggtagcttgtattgaattcgtggaattttccggaaatcaagttttgagaagctacatgttatccaacattttaagcattgcaaccttcaagcatttgagatgtcagtgtaattgttccacaattgtcatcggggctgctaggagctgtgatgtagcactgcgtttttattctgctgttgtgtgactgtgtctttacatttctgttgttggacaagactccaaaacgcttgtaattgttctggctaagggcccgttcggttattcaggaatctactccagaaaggatttcagctggaataattgtataatttgtataacaattagtaacctggaatagttcctagttttgttccagcctaaccgaacggggcttaaatcagaatctgtttcacacgatcatttctcgagtgatgttacattgaag

SEQ ID NO: 8886 - DNA, 1728 bp, Zea mays
  Clone ID: 700801716_FLI
gttttgatggattcttcggtgggaagtttgggctttgacgagacagaaagaagcactgtggatgtgctgcgttctgcatatccctgattcatctgagccgcggctttgattctcgtttgcttgagaaatttggggtgaaaagattatccttgattcgctgcagtggtcttgaaatgtgagtatgcagtccgtggcgagattgtcatccatgctcagcgcttgcagcaacaactacaaacacaaccagggtctcttccttttgatgagatcctgttctgcaacattgggaatcctcaatcccttggtcagcaacctgtgacgttcttcagggaggttcttgctctttgtgatcatccatgcctcttggaaaaagaggaaaccaaatcattgttcagtgctgatgctatttctcgagcaaagcagattcttgcaactattcctggacgggcaacaggtgcatatagtcacagtcagggtatcaaaggattgcgtgatgcaattgctgctgggatcacctcacgtgacggattccctgcaaatgcagatgacattttcattacagacggagcaagtcctggggtccacatgatgatgcaattactgattaggaatgagaaagatggcattctgtgcccaattcctcagtaccccttgtactcggcctccatagctcttcatggtggagctcttgtcccctattaccttgatgaaaaaactgggtggggtttggagatctctgatcttaagaaacaactcgaagatgctcggtcaaaaggcattgatgttagggccttggtggttatcaatccaggaaatccgactgggcaggttcttgctgaagacaaccaatatgatatagtgaaattctgtaaaaatgagggccttgttcttctagctgatgaggtatatcaagagaacatctatgttgacaacaagaaatttaactctttcaagaagattgcaagatccatgggatacggcgaggatgatctccctctagtatcatttcagtctgtctccaaaggatactatggagagtgtggtaaaagaggaggttacatggagattactggcttcagtgctccggtaagagagcagatctacaaggtagcttcagtgaacctgtgctccaatatcactggtcaaatccttgcgagcctcgtcatgaatccaccaaaggttggggacgaatcatatgcttcctacaaggcagagaaagatggaatccttcagtctttagctcgccgtgcaaaggcactggaagatgcattcaacacgcttgagggattttcatgtaacaaggctgaaggagcaatgtaccttttccctcagatccatctgccacataaggcaattgaggctgctaaagctgccaagaaagcacctgatgcattctatgcgctccgtctccttgaatcaactggaattgttgtggttcctggatctggatttggccaagttcctggaacatggcacgtcagatgcacgatcctgccgcaggaagataaaatccccgcggtgatcacccgcttcaaggctttccatgaggcgttcatggctgagtaccgtgactgaactgttacagtggctgagtaccaccgtgtagaccgaaacaaaataaagctcccccctctctctgtgtctgtgcgtgtgtgtgaactgatctctgaatggacgaacaatgtactctgttggcgcctttaatggcaattgaggaaaattttgatc

SEQ ID NO: 8887 - DNA, 1135 bp, Zea mays
  Clone ID: 700801749_FLI
ctgcgtacacggtctccctcttcctgtcagtagtagagtgagagtgaggcagcgagtgggagacaaggggaaatggggaagggagcgcaagggagcgatgcggcggcggcgggcggcgaggtggaggagaacatggcggcgtggctggttgccaagaacaccctcaagatcatgcccttcaagctcccgcccgtcggcccttatgatgtccgcgtgcgcatgaaggcagtggggatttgcggcagcgatgtgcactacctcagggagatgcgcatcgcgcacttcgtcgtgaaggagccgatggtgatcgggcacgagtgcgcgggcgtggtcgaggaggtgggcgccggcgtgacgcacctgtccgtgggcgaccgcgtggcgctggagccgggcgtcagctgctggcgctgccgccactgcaagggcgggcggtacaacctgtgcgaggacatgaagttcttcgccaccccgccggtgcacggctcgctggcgaaccaggtggtgcacccggccgacctgtgcttcaagctccccgacggggtgagcctggaggagggcgccatgtgcgagccgctgagcgtgggcgtgcacgcgtgccgccgcgcgggggtggggcccgagacgggcgtgctcgtggtgggcgccggccccatcggcctggtgtcgctgctagcggcgcgagccttcggcgcgccgcgcgtggtggtcgtggacgtggacgaccaccgcctggccgtggccaggtcgctgggcgcggacgcggcggtgcgggtgtcgccccgcgcggaggacctggcggacgaggtggagcgcatccgcgcggccatgggctcggacatcgacgtcagcctggactgcgccgggttcagcaagaccatgtcgacggcgctggaggcgacgcggcccggcgggaaggtgtgcctggtcgggatgggccacaacgagatgacgctgccgctgacggcggcggcggcgcgggaggtggacgtggtgggcgtgttccggtacaaggacacctggccgctgtgcatcgacttcctgcgcagcggcaaggtggacgtcaagccgctcatcacccaccgcttcggcttctcgcagcgggacgtggaggaggccttcgaggtcagcgccc

SEQ ID NO: 8888 - DNA, 1126 bp, Zea mays
  Clone ID: 700801921_FLI
cactagcccatttttagaagctcggctagtgaagattgatcatactggacgtgtacttcaattctttgaaaaaccaaagggtgctgatttgaattctatgagagttgagaccaacttcctgagctatgctatagatgatgcacagaaatatccataccttgcatcaatgggcatctttcttgaagacataaatgcccattgatgcacttttagaccttctcaagtcaaaatatattcaattacatgactttggatctgaaatcctcccaagagctgtactagatcatagtgtgcaggcatgcatttttacgggctattgggaggatgttggaacaatcaaatcattctttgatgcaaacttggccctcactgagcagccttccaagtttgatttttatgatccaaaaacacctttcttcactgcaccccgatgcttgcctccgacgcaattggacaagtgcaagatgaaagatgcatttatctcagatggttgcttactgagagaatgcaacatcgagcattctgtgattggagtctgctcacgtgtcagctctggatgtgaactcaaggactccgtgatgatgggagcggacacctatgaaactgaagaagaagcttcaaagctactgttagctgggaaggtcccagttggaataggaaggaacacaaagataaggaactgtatcattgacatgaatgctaggattgggaagaacgtggtgatcacaaacagtaagggcatccaagaggctgatcacccggaagaagggtactacataaggtctggaatcgtggtgatcttgaagaatgcaaccatcaacgatgggtctgtcatatagatcggctgcgtttgcgtctacaaaacaagaacctacaatggtattgcatcgatggatcgtgtaaccttggtatggtaagagccgcttgacaggaagtcgagcgttcgggcgcaagatgcgttgtctggcatgctgttccttgaccatttgtgctgctagtatgtactgttataagctgccctagaagttgcagcaaacctttttatgaacctttgtatttccattacctgctttggatcaactatatctgtcatcctatatattactaaatttttacgtgtttttct

SEQ ID NO: 8889 - DNA, 1371 bp, Zea mays
  Clone ID: 700802080_FLI
ccgaggctccgaccaaaacaccagggtcccagtgctcttggctctaagatggcggcgccggaaccggaggccaagctggaagccgtaaccccatctcggtcctacgagctgccaccggagtccgaatccgacgcccctgcctccaccggcacccaggagctaaagccgtgggagcagcacgccgcggtgatcaacctcccgcgctacgactaccgcgcatcagggtccctcctcctccgttcgcattccggcttcctcatcacgtgccccatcaagcgtgaaaaaagtgcaaccaaggaagccattcccatccttgaagagtaccatgcaaattgctgtgtttctgaacatgcagaaccatgtgatgtgaaaaatgcaattaagaaaagaaaactgtgctcggaggcatcaggaagtttagaagaggcagtaacgaatgggaatagtagcagtgtttcagaatcaattggaagcaccggaaacacaagctcaccccagtccaaggtgaatgacaatgttgacagggcttcaaatctctcactggttaagctatcaagaagtggcttgctcttctttaaatttcctagtggaggcgttcatgtagttgagatgcttactgaaatacttcattcactcagatccgggaaactcaaatctccacaatggtgccaccgcatattcccaattcaagaaacttgcattctatcagaagaagacctgcatgccactgtgtcaaagttattccttgacttctcgaggagcaagacaaacgaagacaagcctataaagtttgcggttgcctataatagaaggggcattgatgagacagagaagaacagtaatgaaggttcaaaccagcagactttgatggatagggagcaatgtttcaaagtggtagctgctgctgtcaaatccgttgctgagaactcagtggttgatcttagatcgcctgaggttgcggtactcgttgagatgctcccggtttccggggtacctcttggatcttcggtggctggggtgtctgttctcccagccgaactcatctcgaccaaacctcgcctttgtgtcaggtctttggtgcctgatgcaaaagcaggaaaaaagaagtgaaatacggtggcgcctcgtcaaccagagtatctgtaatgggaaactgccgatgcagtttttcacatgcctatttgtaccagagtaccatcgccttaattaagccttgtttttatgaggacatgaaaccatgatcagggcttgtccttttttacattaatcaaggcgagtttttaataatcatagaagacactggtatgccttcgacaatgtatcatcctttgcccccgcacaaatagtcgtctgtctgcctttggggatgtc

SEQ ID NO: 8890 - DNA, 1827 bp, Zea mays
  Clone ID: 700802115_FLI
tcgacattgagcatacggatggcaagcggtactttacatgggatcattctgctttccccaatccagaggagatgcagcgaaagatagcagataaggggaggaagatggtcaccattgtggatccccacatcaagcgtgacagttcattccacctccacaaggaggcaacagacaaggggtactatgtgaaagatgcgaatgggaatgactttgatgggtggtgctggcctggatcatcatcctatcctgacatgttgaatcctgagatacgtgagtggtgggctgacaagttctcctatgaaaattacaagggatcaactccaacactgtacatttggaatgatacgaatgagccatctgtcttcaatggccccgaggtcaccatgcccagggatgcaatgcattatggagatgttgaacaccgagaattgcataatgcatatgggtactactttcatatggctaccgcagatggacttctcaagcgaggcgaggggaaagatagaccctttgttttgtcaagggccttctttgctggaagtcaacggtatggtgcagtttggacaggcgacaactccgcagactgggatcacttgaaatcttctatcccaatggtcttaactcttggtcttactggcttgcctttctctggcgcggatattggtggattctttggaaacccagaaccagacctattggtgcgttggtaccaagtaggagcattttatcctttctttaggggtcatgctcatcatgacaccaagagacgtgagccatggttatttggagagcgaagaactgccatcataagggaggcgatacatatgcggtattcattgttgccctacttctacacgctgttcagagaggctagtgtaaatggcattcctgtcatgcgtcctttatggttagaatttcctgacgataaagaaacttataacaatggcgaggcatttatggtggggcccagccttttagctcaaggaatatacgaagagggccagaaatcagtgtcggtctaccttcctgggaaggagtcatggtatgacttgagaaatggatctccatacaagggaagcgcgacacacaagctacaggttttagaagatagcattcccagcttccaaagggctggtacaattgtgccaagaaaggacagattcagacgcagttctactcagatggtgaatgatccatacactctggtgatagcactcaatagctcaggtgctggagaaggcgaactttatgtggatgacgggaaaagttatgagtaccagcaaggggcattcatccatcgccgatttgtctttgcagacaataagctaacttcattcaatattgggcctgacgatttgggcaagaaatttagaagtgattgcgtgattgaaagaattataatcctcggtttacgatccggagtgaagaaggctattattgagcctggaaatcaagaactagaaattgaatcagggccaattagtttaaggagtggttccagcccagtcgcgccaacaatccggaggcccaatgtttgcattgcagacagttggactataaggatagcataaaaggtaggccattcacatctggatcctgatgtctgatgtcttcttttgtctgctgtcaggttgcaaaattaggccagcctttagaagtttagttgtggccttgaaatatttgcatgtaactggtacttaagctgttccaactgccaattttgacataaatacttatatacattgctgatgtatattgtagctttgatacatgagcattttatcttgcaaaaatgatatacagttagtcagttacaaattctctgag

SEQ ID NO: 8891 - DNA, 862 bp, Zea mays
  Clone ID: 700802144_FLI
cgcgcatcagcggctccgacttccgagcgggttcgcgcctggaaacgaagctatacgtcgcgaggaggggagggcccaccgccccgcgtgggcgtcgcagcttccactcttcccccgtgaaacttttctcacgcgcacccattccacccaccacccaccttcctttcctctctctctgtctgactgtctccctccgtccctcgaagcttctctggtttcagacgcaaccccgcgggtcgcgggatcaaggagccagagagcgggacgcagcgagcgttccgccagagatcgagaccgtagctagggtttgaggcgccgggctgcggtggacgagatgtcgacgccggcgaggaagcggctgatgcgggacttcaggcgcctgcagcaggacccgcccgccgggatcagcggcgcgccgcacgacaacaacatcatgctctggaacgccgtcatattcgggccggatgatacgccgtgggacggtgtccctgctgtgtgatccaaacccaaactcccctgcaaactcagaagcagcaagactgttcagcgagaacaagcgggagtacaaccgcaaagtccgtgagatcgtggagcagagctggacagccgactagtgcataaggatgctcgtcgtgcccgataggggcccaataagaaagcgtgaaaaaaaaaacacacccactccttgtgtttctggttcgccaggcttgtcgaaacattgaagaaccccagtgattggtttgtagtctgtcgtcgtcgttctgcccccatcaagagccccggttgctcatggtggtggctgtcgtaatgtagcggttgttgacctatcttctcatgaattgaaaggatcctgcccatgtac

SEQ ID NO: 8892 - DNA, 1392 bp, Zea mays
  Clone ID: 700802214_FLI
ggcccatctactggtagaactgttgaagagcaaatcactgggtgcttgaatcaagaagccaagtcaatacctatggccagagaaggtgaacttcccaaagagaagccttttcgatgttcttgccaggagaacatttccagagagtctcatcaaagtgttgttgccagaccaacgctgaattttactggaaagcaggttccgcaattgcacattggttcgagggcatcatcatctttcagcatgtaccaaagaaccagcgcaaagcccaacccttgcttagattcacatgaccatctttcagcggctaaggttgcagcggaatctgctgtcagcctctcttcttactcaacagattgcataagcccctcattacaaactcagcttccttcgccatcaaatcctatcttgaggctgatgggtaaggatttgatggtgatgaacaacgaagagagtgtgcatcctcaagcaccaagttcagactacatcttgagagggaattatgaggcacctgttggttttatgcctccaagctaccaacatctcggtaattctggatttatcagcatgccaccaaccgcagccagtcaccagattcctctaccaagtgttcaagctagcggccttgttggtcctccgttgcacagcgtttccatgatgcaacctgaccatcattcccagcagaagtcctacagaaatattatgcctgccatgcatcatccaacctacatgatgaaagaagtgattgtgatcaaggactctcctgagcgtagtagaactgagccacaagctagcatgcttttcccccctgctccacctcccacactctcgataccaaacaatacgccaccccgtccattttactgtcttccaccgcaaatcccaatcttgccaagggagagggctgctggatccatgcctgtgtacgcaaactttggcgcattggctggtgtcagtccatcaagtcaagaaagccaaacgggagtagccaatccttacatgccgaatccgttcttcgtccagtcccgaactggttacatgaaccacccgccagtgtactactcacagaatctggggtgatgatttctcagtagctcaaatgaccagaactccatttaacttgccggtcgtcgctgtcgaagtttgtgggggatgagagtttcgtgatgggtcaaaacatgctgagatcaatgaacctgcatgagatgtgtctgactttcatgaggattttcacataggttgctttagatttttttcccctttctttctcccttaaagctacagcatgtttgccgtcaaaaaagtatcttaattactctctgcaaagctgcagtagtaaattacagtgtgcaattcccaatagctctgcaaaggaatatatctcagtatttatcg

SEQ ID NO: 8893 - DNA, 947 bp, Zea mays
  Clone ID: 700802282_FLI
aatattttgagcattcaaaaacacacaaagggaagtgcactagcaacttcctaacaacaatggctaccaagatattagccctccttgcgctcctttccctttcagtgagcgcaacaactgcattcattattccacaatgctcacttgctcctaatgccattattccacagttcctcccatcagttacatcaatgggcatcgaacaccctattgtgcaagcctataggctacaacaagcgcttgcggcgagcgtcttacaacaaccgtttgcccaattacaacaacaatccttggcacatctaaccatacaaaccatcgcaacacaactagagcaacagtttgtgcccgcattgagccaactagccgcagtgaaccctgtctcctacttgcaacagcaactgcttgcatccaacccacttgctctggcgaacacagccgcataccagcaacaactacagttgcaacagtttctaccagctcttagtcaactagccatggtgaaccctgccacatacctgcaacagcaacaactgctttcatctagcccactcgctgtgggcaatgcggctacatacctgcaacagcagctgctacaacagatcgtaccggctcttagtcagctagttgtggcgaaccctactgcctacttacaacagcttcttccattcaaccaactagatgtggcaaactctgctgcgtacctacaacagcggcagcaactacttaatccacttgcagcggctaacccattggtcgccgccttcctgcaacagcaacaatttctgccatacaaccaaatctctttgatgaaccttgccttgtcaaggcagcaaccgatcgttggaggtgccatcttttagattacaaatgagatgtacttgataacattgccctcataccggcatgtgcaacttcctataaataatcaatatattgattgagatttt

SEQ ID NO: 8894 - DNA, 973 bp, Zea mays
  Clone ID: 700802379_FLI
gacagatcccgcaatactcacagggccctcttctctcatctctcactccctcgctccgtctaccagtaccaccacgtccctcctcgtcgacgatctcgtagcggcggcgcacatggcgagcgacggcgcggcggctacgccagcgaaggttaccccaaagaaggccaatctcctcgacccgcactccatcaagcaccttctcgacgagaccatctccgaggtcgtgaagagtaagggctacaccgaggacacgcggctgggcaactggaagctggggatcggagccgccgtgattgctgtcgccctcctcgctcagttttaccccaagaagttcccgcagaaccgcgatttcctccttggctgcatcgccctgtatgtggtgctgaatgtggtgctgctgatccttagctacaccaaggagaaggatgccatcctattcacgcaccctcctatgggttctttcagcagcactggcctcactatttcttctaaattaccaagattctcggacatgtacactctcacaatagcaagtgcggatccacagtctatctctgcaaacaagccagttcatttcactaagagcgtaacaaagtggtttacaaaggaaggagttcttgtggagggcctgttctggaaggatgtcgagaagctgattgatgactacaacagtgagcgcaagagtaaatgaattggtagctcgtgtctctggccatctggggagacatcgctgtctagagaaatccgtcaaagtttagcttaatctgaacaggcatttttgctatactgtaccggttgaccagtgaatgaatgatgttctagacattaactttggttccaagctttctgtcgtgtccatggataactatccgtccgaatcctagaaacgtggtccgtgcttgtaacctgtttgttctggtgcttccatacgccggagcagattttgaagagaaatgaaacaaatcgttaaatc

SEQ ID NO: 8895 - DNA, 1629 bp, Zea mays
  Clone ID: 700802639_FLI
ccactctccgtcctgctccggcaagaggcggcacaccgcgcaaggatgccacctagggctgctccggcgctgcgggtgctcccgctcgcgctcgcagcggccatcttctcggggctcaccgccatcctcttctacctctccggcgtctcctcctcacatagcggctctcggctctcggaggcggacctggcggcgctcgccgcgctgcggggtggcttcagcaagtgcgtggatgcaaatgggctaggactgaaagccgtgaccggggaggactactgtcgtgttgtgatacaatacccaagtgacacagtttctaagtggagagatccaatcacccataaggctgaaagtctgtcgtttgagttcaatctgtgtgaagctgtggcctcatgggagcacgtccggaacagtacaacagtactcacaaaggagtacattgatgctttgccaaatggctgggaggaatatgcatggagaagaatcaacaaaggaatccttctgaataagtgccagaacagaagcctctgcatggaaaagctctcactagttctacctgagacatcaccatacgttcctcgccactttggtcgatgtgctgttgttgggaactcaggtgatcttctcaaaactaaatttggggatgaaattgattcttatgatgctgtcttcagagaaaatggtgcacccacccagaattacactgaatatgttggtagaaagagtacatttcgccttctgaatagaggatccgcaaaggcactagataaagttgttgagttagatgaaacaaaaaaagaggcactgatcgttaagacgacaatacatgatatcatgaaccaaatgattcgggaacttccaataaccaatccagtatacctcatgctaggcacatcatttggttcctcagctaaaggaaccgggcttaaagctcttgaatttgccctctccatctgtgacagtgttgatatgtatggcttcaccgtagacccaggttacaaggaatggacaaggtacttctcagaggtaagaaagggacacactccactacatggtagagcatattatcagatgatggaatgtcttggtctggtgaaaatccattcaccgatgcgaggagatcctggcaggacagtgaggtggctgcctaccaaggctaccatcgaggctgctagagttgcttccgagaagttgttgaagagacctggtgctggaagtgatgatcctctggggacttgcaccatgataaagaagcgcaggaaagggaaggcgccaaacagatctggtctacgagatgctgccatgaagcacctcgaggacatgaaaggtgccgctaggtatcccttggagcggaatgcagggggtggttacctctgcatgatcaatgatagataggaccgcggctgattatggcatcagttgccccctcccccctcccctccacttgagtcgaagaaaggaatgcagtttgagggaacgaaaaggccgattctttgatttatgcagctggtgtacaacgtttgagtgtagagaaagttaggtgtaatgttttgagtgtagagaaagttatatgttgtggatggatacaaatggtcaaattgtagcacttttggtgcttataatactaattcc

SEQ ID NO: 8896 - DNA, 1517 bp, Zea mays
  Clone ID: 700802690_FLI
gcccgaggcttaactctccctgccgctaatccctcgcgccgccggagggaagcaagagatagatctgtccgcggccatggcggcggcggcggcggcggcggagcaaggcgtggacgccgcgaggaaagaggaggaggaggagcaggtagtgaatccgtgggaggtgtcggcggggaagggcggcatcgactacgacaagctcgtggaccagttcggctgccagcgcatcgacgacgcgctcgtggaccgcatcgcacgcctcaccgcccgaccaccgcactgcttcctccgccgaggcctcttcttcgcccaccgtgatttgaacgagatactggatttgtatgagaacgggcagaagttctacctctacacggggagggggccctcgtcggaggccctgcacctcggccacctcatccccttcatgttcacaaaatacttgcaggaggcttttaaggtgcccctagttatacaactgactgacgatgagaagtacttgtggaaaaacttgactattcaggaaagtaaaaggcttgcccgtgaaaatgctaaagatattatagcatgtggttttgacattgaaagaacattcattttctctgatttttcttttgttggaggtgctttttatgaaaacatgatgcaagttgccagatgtgtaactatgaataaggctattggaatatttgggttcaatcttgaggatcacataggaaaggttagctttcctccagtgcaggcagtcccatcattcccttcttcatttccccatctcttcgctggcaaggaccaactgcggtgtcttatcccatgtgcaatagatcaggatccatattttaggatgactcgtgatgttgctcctagaattggttatcagaaaccatcactgattgaatctagattttttcctgctcttcagggggagaacacaaaaatgtcagctagtgacgcaaattcggcgatatacgtgacagatagtgctaaagaaataaagacaaaggtgaataaatatgccttctcaggtggccaggactcaatagagctccatagaaaacttggcgctaaccttgatgtggatgtcccaatcaaatacctgaacttcttccttgaagatgatgacgagcttgcgcacataaaaaaggagtacaaggagggaaggatgttgactggtgaagtgaagcaacggcttattgcagttctatctgagattgttgctagacaccagagagctagagctcaagtgaccgaagagatggtcgatgcattcatggcagtgaggcctcttcccaatatgtttggctgagcatcacggcgacaacttgaacaaacatttttgttatcagggagaattttaagagtctttagaattgtcgtgccaccataagtatcccctgtgttttacttcttcgggatttaggcaaacctggccaaacatcccatgtggtggctgtggttgattttgtaaactcatacttgatatggtatcaatgattcaattcagacattttttttcaagc

SEQ ID NO: 8897 - DNA, 639 bp, Zea mays
  Clone ID: 700802705_FLI
acttagagatgcctttgcggagtttggtgaagttttgcatggtatggttctctccttcctttgctgttctttttgtgataaggattcgaagcttctcatttctcttacgactgcagctcgagttgtgaccgatcgtgtcagtgggttttctaagggatttggctttgtaaggtatgctacgaccgaagaggcagccaagggaatagaaggaaaggatggaaagttccttgatggatgggttatttttgcggaatacgctaaacccagaccaccgccggaggaaacagggatgaattcgcagccccagcagtcatggggagctccatcaggttcctggggtgcacagtagatgaagtgatattgtgagagcccctccctgtccccagccctggggctcgtagcggatcgtgagggatgaatttgtgtgtggtgtgtcacaggtgtgaatgcctttgttgtcccaatattcctaccgtgttgggagtggtcgtttgctcgcgtccacgtctttcacatgaattggttactgtggtagttgtagttctggatacgggaccaaaactaaagtattgctgtcaacaatctgcaacagtcgaaaacctttgcaaataatgcctgctggaaaatgtcgtcgctctt

SEQ ID NO: 8898 - DNA, 271 bp, Zea mays
  Clone ID: 700802718_FLI
atcaaagggaaaccagagtcatgtttagatttcactgcccgaaacaatactgtgatgactgtgcaacctagtcgaagaggctgaagcccatatcatcacagtattgtttcgggcagtgaaatcaaagggaaaccagagtcatgtttagattttaaccttattttatgttggaaagtactgcaaagactgctaattgtctctgtatttggtaattcagctgtagattgctatgatggttgggatttactcgtgaaccagagtttttctatct

SEQ ID NO: 8899 - DNA, 974 bp, Zea mays
  Clone ID: 700802734_FLI
ccgactccgagccccgccgcgccgcgctacctccgctcctctcttcgcccctgccggcgtcgaggccgaagcgaaggcgagcatgcatcacgaccccaaccccttcgacgagggcagcgccgaggacaaccccttctcagatatcaagaggagggaagaggcgctgaagaatgctggcgtgccaatggaggagaagaactggccaccattcttccccatcatccaccatgatattgccaatgagataccagcaaatgtgcagaagttgcagtatcttgcatttgcaagctggcttggaattgtgctttgtttgtcctggaacttcgttgctgtcatagtctgctggatcaaggagggagattcaaagttgtttttccttgcaacaatctatgctttgcttggaattcctctgtcatatttgatatggtacaggccactctaccgtgcaatgaggactaacagtgctttcagttttggatggtttttcctgtgttacctgatccacattggtttttgcataattgctgccattgctccaccaattgtatttcatgggaaatcattaactggtattctggctgcgattgacactttctctgaacatgtgataattgggatcttttactttgtggggtttgcactgttttgtctggagacactgctgagcattggggttcttcagaaagtgtacatgtacttcagagggaacaagtgaagccagtcatgatggagagttacgtttgttgagaaaatttggagttacttgtggctacttgtagcacatgttcattcgatggttttgtgcatacctgtcagtacaccttgaatctataatttcttatgtcagttattggtgccgagaattgtttttttaaggtggtatgggagtataggtttgcttacggatgggtgctgtggttcttcactagctattcttgaaacgcagaagatcatgcgcccaagtcatgtttcag

SEQ ID NO: 8900 - DNA, 3063 bp, Zea mays
  Clone ID: 700802816_FLI
ctctgccactcctgctcacctccgccgaccgccatatcctcctctacatccaccgccgctgccgtataggtcccgtcccctcgtcgccgcggctgcgctggtggggagcggagcggacggacggagatccgcccgcctcgggctccgctacgccggctgaagatgatagccatggtgtctgctgttgaagagcttagttggttaacctctaaagaacttggtgagatgctcagggagtcagacaactttgttttgcagtccaagatagaagacggaggtccaaagcaagtacttgtggacatggaaaaagttgtgccctcgcttcctcttcatctccttgctgtatgtttggagcttgggcaaggcccggacttgacctatgtgcttcgtggcatccgttttttgcatagtttgtctgatctagcatcccgccatactagactggagcaggttctccttgatgatgtcaaattatccgaacaagtcatggacctgatattctttctactttctattcttgctgaacagaaggagaataacaatgttggtgcttctccgcttgtgcatgcgtcacttgtagcaggtagtcttcatctgttgacaaattacttctcttcccagtggcatgaacttgtccatattctgcttgcacatccaaaggttgatatctttatggacgtggcctttgatagtttgcatgaagatgtgaggctgttaagtatcagattatcatcaatgggcttcggtttctttcctgttggttctttggaatctcgtcttgctcacttcatctgtcaacagtgtgaagcatcattgcaatttctcttgttgttgtgccagcaaaagctatttcgagatcggattttaaaaaataaggaactctctagaaacggaggcatactgtcactttctcacactatactgaagttagttgtccctgaatgtttgaagcaatcaaccgaccttgttgcttctatttccaggctcaaggcaaagatactttctattctgttgcaactttgtgaggctgaaagtgtctcttaccttgatgaagttgccactaatccaaataacatgcggctagggcaaaccttggctctagaggttctaaatttgctgaagatttcatttggaagaaaaataaacattacttctgattctcatgacaagggtaagatttaccccatgggatctgtgcttatcagtgcattgcgtcttgttgatgtcttctctgatgattcgaacttcagatcattctttttgaccaacactgttccatttttaatccagattctagctgctcctcacgatgaatttgtttcgagttggtgcgctgtcaacttaccaacaattgaggaagatgcaagtctagattatgatccttttggtgcatctgaggtggcactattagcttctgataatatgttgactgaagctaaagctaactattcttgcccttttcgccctagcgtgccttcaatggcatatgcacagacaagaacatcatgcgtagtgaaaataatagcaaatttgcatgtttttattccaaacatatgtgaagagcaagaaagggatctttttcttcagaactttcaaaagcacttggcgtctgggagtcctaaactatcagcagatctgccagcttctagtgattttaaggccactaaagtctgtagaaacttaggatttttgtctgattatgctaaaacattggttcctaatttgttaaatggggaagacttggtgttattaagtgattttgctgataagctacaatcttggtgtaaatcacaagttgcagtaaaggttgtacaaaatgatattccaccagaaagcatggatgccatgtgcccggtgcagcagctcttgccaacacggacaagcactccagcctccaaaatgaataaccttccaaaggatgcacagaacatggaagtgtctacaccagtacccccaataaatccggaaggaaatgatgaggacgagactccaaagaacactgtctctagaaatggtggtttcctgcagaatgcagttggccaagacctagtccatcttggcgttgcaagaacaacaagtggtggcccttcggctgtcgcttccggtgttagcactggacaccagcacaacagaatggatcttgatccagcatccagcagcgtggataatttcaaaacaccagaacttacaaaagaaaacggtctcgaggaggatgggaaaggagagagtagtatgtatgatgagaggcaacctaagagaaggaagcggacccttatgaataatgagcaaatagatgaattagagaaggctctagtagatgagcctgagatgcacaaaaatcctgttctattgcagagttggtcagagaagttaagtctgcagggcccagagatcacagcatcacaacttaaaaactggttgaacaaccggaaagctaagcttgctcgcattgcaaaagaaagggcggagaatgctgataaaccatctacttcccatcccggcgagtcttcagaaagtgccggggaggacaactatctaccccctgcaggtgtgatgactgttctatccaaaggtggtagcctgttgagcccggactgcactgagcaaacgtcgcaggcagagctatccccgaacacgacgatgatggtccgtccattcacgagatccttctcgttggaacccggccgcctcgtttcattagtcgacagcgatgggaaggaggttggcaggggcaagatcttccaagcgccagggaagagcacaacggagagccgcgtttgcgtggttgatgtcactgagctcaggaccgagaagtggagggagctcccccacccttcggaggcatttgggtggacgttccaggaggcggaggcgaggaatggtggcatcatcagggtctcttgggacgccgtcaggttgttccctgtagcgtagcaaggccgattgtataacaagatgagtagagggaaactgtggcctaagtaacattatgttaaaagctgtggttaactgtgttgtattcatgaactaattgttttgagcaattcaggtggttactgattt

SEQ ID NO: 8901 - DNA, 1588 bp, Zea mays
  Clone ID: 700802849_FLI
cgaagtcattccctcttcaagagggcatcatcagattgggcttattattccttattactccaggcaaggatcggagttgctctgaattgactgaaccatggcggcgacaatggcagtgacgacgatggtgaccaggagcaaggagagctggtcgtcattgcaggtcccggcggtggcattcccttggaagccacgaggcggtggcaagaccggcggcctcgagttccctcgccgggcgatgttcgccagcgtcggcctcaacgtgtgcccgggcgtcccggcggggcgcgacccgcgggagcccgatcccaaggtcgtacgggccgccgacaactgcgacatcgcgcgccagcttggcgccgccgttcccgggcagcaggccgcctgggaggcggaggaagaggcagcgaagaggaggaagcagaagggcggcggcagcaagaagcagcagcagctgggcgatctgagcctgaggaaggtcagggtcaagatcgccaacccgcacctgcggcgcctggttagcggcgccatcgccggcgccgtgtccaggacgttcgtggcgccgctggagacgatccggacgcacttgatggtcggcagcatcggcgtcgactccatggccggggtgttccagtggatcatgcagaacgaagggtggaccggcctgttccgcggcaacgccgtcaacgtcctgcgcgtcgctccgagcaaggctatcgagcatttcacctatgacacggccaagaagttcctaacccccaagggcgacgagccgcccaagatcccgatccccactccgctggttgccggagctctagccggattcgcctcaaccttgtgcacctaccccatggagctgatcaagaccagggtcaccatcgagaaggacgtatacgacaacgtcgcgcacgcgttcgtgaagatcctacgcgacgagggcccgtcggagctgtaccgtgggctgacacccagcctgatcggcgtggtgccgtacgcggcctgtaacttctacgcctacgagacgctgaagcggctctaccgtcgcgcgaccgggcggcgtcccggcgcggacgtgggccccgtggcgacgctgctcatcgggtcggcggcgggcgccatcgccagctcggccacgttcccgctggaggtggcccgcaagcagatgcaggtgggcgctgtgggcgggaggcaggtgtaccagaacgtcctccacgctatctactgcatcctcaagaaggagggcgccggcggcctgtaccgaggtctcggccctagctgcatcaagctcatgcccgccgccggcatcgccttcatgtgctacgaggcgtgcaagaagatcctcgtcgacaaggaggaggatgaggaggaggaggacggagccggcggcggagaggatgacaagaaaaaggttgaatgatcaaagttcttggccaagaaggtggcaatgtcgtgaagcgtacgtgaactggaaacggatggacaagtatatttggagtttgatgtggtgtttccggatcgtgtgtttgtctcagatgaaaaaaaatacaatattttgagtccaagttaatcaatgttccatttgcctatc

SEQ ID NO: 8902 - DNA, 2210 bp, Zea mays
  Clone ID: 700802941_FLI
catttccgatggacttcgacatggagtgcaattccttgtcctggaacaacttggacgaggagagtttgtaccccttgctgaacttcctcaaggctcataactacaagggcacgacgatgatgttgaatgacagaatccaaagccttcgtggtctccaatcatccctgagaaaggcagaggagtatctactgagtgttcctcaagacactccctactcggagttcaaccataggttccaagagcttggcttggagaagggttggggtgacactgcgaagcgtgtactcgacacactccacttgcttctcgaccttctggaggcccctgatcctgccaacttggagaagttccttggaactataccaatgatgttcaacgttgttatcctgtctcctcatggctacttcgcccagtccaatgtgcttggataccctgacactggcggtcaggttgtgtacattctggatcaggtccgtgctttggagaatgagatgcttctgaggattaagcagcaaggccttgatatcactccgaagatcctcattgttaccaggctgttgcctgatgctgctgggactacgtgcggtcagcggctggagaaggtcattggtactgagcacacagacatcattcgcgttcccttcagaaatgagaatggcatcctccgcaagtggatctctcgttttgatgtctggccatacctggagacatacactgaggatgtttccagtgaaataatgaaagaaatgcaggccaagcctgaccttatcattggcaactacagcgatggcaacctagtcgccactctgctcgcgcacaagttgggagtcactcagtgtaccatcgctcatgccttggagaaaaccaaataccccaactcggacatatacttggacaaattcgacagccagtaccacttctcttgccagttcacagctgaccttattgccatgaaccacaccgatttcatcatcaccagcacattccaagaaatcgcgggaagcaaggacaccgtggggcagtacgagtcccacatcgcgttcactcttcctgggctctaccgtgtcgtccatggcatcgatgttttcgatcccaagttcaacattgtctcccctggagcagacatgagtgtttactacccgtatacggaaaccgacaagagactcactgccttccatcctgaaatcgaggagctcatctacagcgacgtcgagaactccgagcacaagttcgtgctgaaggacaagaagaagccgatcatcttctcgatggcgcgtctcgaccgcgtgaagaacatgacaggcctggtcgagatgtacggcaagaacgcgcgcctgagggagctggcgaacctcgtgatcgttgccggtgaccacggcaaggagtccaaggacagggaggagcaggcggagttcaagaagatgtacagcctcatcgacgagtacaagttgaagggccatatccggtggatctcggcgcagatgaaccgcgtccgcaacggggagctgtaccgctacatttgcgatacgaagggcgcattcgtgcagcctgcgttctacgaagcgttcggcctgactgtgatcgagtccatgacgtgcggtctgccaacgatcgcgacctgccatggtggccctgctgagatcatcgtggacggggtatctggcctgcacattgacccttaccacagcgacaaggccgcggatatcctggtcaacttctttgacaaatgcaaggcagatccgagctactgggacaagatctcacagggcggcctgcagagaatctatgagaagtacacctggaagctctactccgagaggctgatgaccctgaccggcgtgtacgggttctggaagtacgtgagcaacctggagaggcgcgagacccgccgctacatcgagatgttctacgccctgaagtaccgtagcctggcaagccaggttccgctgtccttcgattagtacggggaaagaagaagaagaagaagcccaggccggagaaccatcgcctgcatttcgatctgtttcaccgcaattcgcattgttagtcgtgtattggagttatgtgtacttggtttccaagaactttggttccttctcgttttttttccttgtttgagcgtttttgggcagcgctggcctggttcctagtatggtgggaattggctgcaccttttgcttcgaataaaaatgcctgctcgttcacctgtc

SEQ ID NO: 8903 - DNA, 1380 bp, Zea mays
  Clone ID: 700803036_FLI
gtggactctcgactctcgagcagttcgatgtacgtaacccggcccacgaacccatctttaataacggccctccaaaatcccaattccccgtccagcgaggcagcggcgactgcaattctcatccgaacccgatcatctccggccgccgctccctccggaccctccgtcgacatgggcaccgtcactgccgcagatccgcacccgtccttcctcgccgacaaggacgccaaggtcttcgtcgccggccaccggggcctcgtcggctccgccatcgtgcgccgcctcctctcgctaggcttcacctccgtcgtcgtccgcacccacgccgagctcgacctgactcgccaggcggacgtcgaggccttcttcgccgcagaacgcccgcgctacgtggtcctcgccgccgccaaggtcggcggaatccacgccaactccaccttccccgccgacttcatcgccgccaacctccagatccagaccaacgtcgtcgacgccgcgctgcgctgcggctccgtccgcaagctcctcttcctcggctcctcctgcatctaccccaagttcgcgccgcagcccatcacggagggcgcgctcctctccggcccgctcgagcccaccaacgagtggtacgccgtcgccaagatcgccggcatcaagatgtgccaggcctaccgcatccagcacggcctcgacgccgtctctgccatgcccaccaacctgtatggcccgcacgacaacttccacccggagaactcgcacgtcctgcccgcgctcatccgtcgcttccacgaggccaaggctactaacgcccccgaggtcgtcgtctggggatcaggctcgcctctgcgcgagttcctgcacgtcgatgatctcgccgacgccgtcatcttcctgatggatcactactccggcatggagcatgtcaatgtggggagtgggagtgaggtcaccatcaaggagctcgccgaactagtcaaggaggtggtcggcttccaggggaacctggtgtgggactccagcaagccggacggcacacccaggaagctcatggatagctccaagatacaggggatggggtggaagcccaagatcgccctcaaggaaggcctcgtggaaacctacaaatggtacgtcgagaatgtcatctcgaacaagaagtagggccgtgacatgccagtggtgctgtcttgctctccgttgctgcttccacaaggtggttggatatctgatcatacggttatcagttttaagttaacccacatagaagaggcttgttatgttatgtgttgcctcacctgaataatctgtgggtcaagttagtatactgctacaagcataattgatctggaacactttttgttgaatagaggaagtttaatgacc

SEQ ID NO: 8904 - DNA, 1436 bp, Zea mays
  Clone ID: 700803054_FLI
tacacatccttcaagatgggataccattggcgtgttcttcaaaaaaaaacttgactcttcgactctgtgtaggttttattttgatttcagcccaacctatattggatgtggtcttatttgtccgcatattgttaattgttctacacttcttggtgccataatatcgtggggtattctttggccatatatctccacaaaagctggggactggtatccagctgaccttggaagcaatgacttcaaaggactctatggatacaaggtttttatatctgtatctgtgatacttggggatggtctttataacctcatcaagatcatttatgctactatcaaggaaataatgaatgcacgggctaagcaaggaagactgccactagcccaagttcaggatggcgatgaaggttcaaatttatcagctgaggaaaagcatctgaatgagacattcataaaggacagtatccctccctggttggcaggatctggttacattggccttgcagcaatatcgattgcaaccgtcccaatgatctttccgcagatcaagtggtaccttgtcctctcggcatacgttgttgctcccctcctcgctttctgcaactcatatggcactggactaacggactggaatcttgcgtctacatatggaaagatcggcctcttcatttttgcatcatgggttggtcagaatggcggtgtgattgctggcttagcagcctgcggtgttatgatgtccatcgtgtccactgcagccgatctcatgcaggacttcaagaccggttacctcacactctcttcccctaggtccatgttcgtgtcgcagttgatcgggaccgcccttggttgtgtcattgctccactcaccttttggctctactggtcggctttcgatattggtaaccctgacggcgcattcaaagctccatatgctgtaatcttccgtgagatgtcaattcttggcgtggaagggttttctgcactgcctcagcactgcctagcgatctgctcgtttttcttcattgcatctctagtgatcaacctcctcagggacgtcaccccaaagaatgtctccagattcatcccaatcccgatggctatggccattcccttctacatcggtgcgtacttcgccatcgacatgtttgttgggacagttatccttttcgtctgggagagggtgaaccgcaaggagtgtgatgacttcgcaggtgcggttgcctctggcttgatctgtggtgatgggatctggactgttccttctgcgatactgtcaatccttaggattgacccgccaatttgcatgtacttcaagccatcccttagcagctaaagttgggacaagtgttatccattttctgtatatcaaaataggacctaattgtgtatatctttaatttactacatgtaaactgttctaggaagaaaagctgtagcct

SEQ ID NO: 8905 - DNA, 1423 bp, Zea mays; identical to SEQ ID NO: 8476
  Clone ID: 700803194_FLI

SEQ ID NO: 8906 - DNA, 447 bp, Zea mays
  Clone ID: 700803335_FLI
cgtcaggtcagcgcgacgtctggcgaccgccacccccaccccgcgccacgtgccgagggcttcgccgggcccttcgccgctcgccggtgacgagcacacaccaggagcaagaagacgatgttgaaaacatttcatttccaaaaagtttggtggagagcaactagattatccttttcatggaatcatggatgaacatgaactgttatttgtatttatttatgttctatttctggtggacagcaacagcatggatgaactgttctgtaatctactttttagtttttggatgaagaactatgcaaatgcaactatgcaagtatctgttctgtttagactttagacaatatatgctatcatgttggcatgctggcatgctgcttattctggacttgagagtatctgttctggacaatatatgctatcatattgttttatcatggagatggg

SEQ ID NO: 8907 - DNA, 1601 bp, Zea mays
  Clone ID: 700803361_FLI
tgagaatctaattaggaccgagaatgaagccgatgtagctgcagcgcaagatgctggatatgagaaatttttggttgatagattgaccctaaagccaggaaagatatcagccctcgcgaaatccattcgcactcttgcacgtatggaagacccaatcaaccaaatactcaaaagaacagagattgctgaaaatttaattctcgagaaaacatcatgtcctttgggtgtcctattggttatttttgagtccaggcctgatgccttggtccagattgcatctttagcgattcgaagtggcaatggtcttctcttgaaaggtggaaaagaagccatgagatcaaacaaagtattgcataaggttataactggtgccattcctagcaacgtgggtgaaaaacttattggccttgttacaagtagagacgaaattgctgatttactaaagcttcatgatgtaattgatcttgtcattccaagaggcagcaataagctggtttcacaaatcaagacatcaactaagatccctgttcttggtcatgctgatggtatctgtcatgtatacatcgacaaatcagctaacatgaatatggcaaaacaaatagtgatggatgccaaaattgattacccagcagcctgcaatgctatggagacattgcttgttcataaagatcttataaaggctccaggtcttgatgacttactgctatcactcaaaacaaaaggagttgctatttttggggggcctgttgcacatgaagtattgtgcattccagaagcaaattcattccatcatgaatatagttctatggcctgcacaattgagtttgttgatgatgtacagtcagcgattgaccatatacattgttatggaagtgcacatacagattgcattgtcactacagatgataaagtagcagaaacttttctgcgtcaagttgatagtgctgctgtgtttcataatgcaagcacacgattctctgacggggctcgttttggattgggtgctgaggttggcataagcacagggcgtatacatgctcgtgggcccgtgggtgttgaaggtctcttaacaacgcgctggatcatgcgagggagcgggcaagtggtgaacggtgacaatgatatcgcatacacccataagaaccttccattgccatgaggcaagtaattatttatttttctataaagctgttgcaatttttttttgttataaagtactgtcaaatgatagtggtaagcgcaactatgcaggccgtttttgtgcttcatcaggattcgtgtctatccagtgatgtttgatagtgtcgtcagacaggagcagagagtggtgaatcttttcgatgagggacggtgaactgcaatgtccacttatccagtcatttttatctagaacattctggtgagacacccaccaccccgataaagcagtgctgggagtagtagagcactaatgtaccgaggctgtgtctagtctaggttaaacaagagaattcggttatattgttaattttttttgggtctgattgaacatatatgttgtcagtttttgtagtgatacatatatttctttaaatcctacttgatcgcaagagttatgagct

SEQ ID NO: 8908 - DNA, 443 bp, Zea mays
  Clone ID: 700803389_FLI
cggagtatcatttcagtaaaaatatacgtcctggcgcacaaaaacacaagtacagacgcagcaaagaagattacaattattctctagcgggctcacatgaccctcgcagcggaatcggaatgcacatgaaaattacaaaaatatagagctcagtaggagtgattaggctcggcagttcctgtgacatgtccttgggaaaaactggtgatgacaaacattgcttaaagatcctcagggccattgacatcctggagccatcacataccatgttagcgcacactaaagcacagcagctgagaatggcatatcgatgagatgttgcttaagagtgacggtacgctcatatttccaactggtaggtttataggtatctatttttctgaggagctaaagtatgctgtaagtatcggttacaaggtctacccaatctgcggctatctgtt

SEQ ID NO: 8909 - DNA, 2390 bp, Zea mays
  Clone ID: 700803470_FLI
aaagggcccccctcccccccacagcgcatcaaatttattgcactgctctgctgcctctcatgaatggcgtttatttaagtctccaccctccgccccggggaactcttttctgtgtatcgcggaattttttgggttctcgggctccgccgcgatcccatccccatccccgccttgccgttgccgttgccggcccccccggttctcccggagctttctttctggccggcgcagtagagaagcaagacagaattgcggcggcgcctgcccgcgcaaaggaaataatcagcactgtttgccaaaggcagctcctgacgcatggctagtacttaaggatactttatgtgcagtgcagaccatgaagatagatgacgaaaggccttaccaaactcatatttttcatgatcttgcatctaacggcagtcctaaattagactgtgaggctgaaagacaaagtaatcacaaggttgaggcagataaaatggttgagcaaaccaatcaatctgaagttagctttgtgaaggctgagcatctgaatggaggtaaaattcggaagacacgcattgaggattactcctatgacaaggatgttgtagagatcaaactgccagacacagatctttcttctgattacggtgtccattttgtcaaggatgtctgcattgatgaaggagttcttccagatcaaaagatttcatcagaaaagcaagtagaccaaaaggtgtctataaactttgattcctcggaatatacaaacggggacctaagggaagatataagtgctgactctacaaaaactgcacatgaattaaaaacagaaatagttgtcctacctgtcctgtgtgatactcataacaataatactgtggaacagaactcctcatgcaaaaagcaggatcttgaagataacaatactacagatgtatctaccgattctcacgatgagggattaaatcccaaacaattaccatttcatgaagttgcacaagattaccaggaggttgacagtgtcattccggagagcaatgaaaatcaggaccggcttttcactggagatgcaacccatcaggtttcatcgaatgattgttatgaagctggaattggtatcgcgtcagaggccagtaacatcattcacaatgatttaccagaagaatcagccgctgctgatttcccggtggtgatacctgaggaagttgctgtcactgctgcattgggtatggaagtatccaaccaagttaatcactataacccttttattgcctatggatcgctagacgagacatgggaacccaatctctctctccctactactgtggatgccgcttctatagcacccatatgtcctgtcgaaaagacagatagttttagtgatcttgtcaacaggccactggaaggatttgatcctattgaactagacgaagctataattgaagagaacaggtcagattcagttgaagaaagctcaagcacattggacgtgcaagcatctgaacaacgcgatgatcagagagagagtctcactaataatgacgtgaaaactgatgcagcacatgaaacgggcaccgctatatctctatccaccagcaatggagagcacagtggcgtcaagggtgagaaatgtcagaaacatgagactgatggtcgagatacagatgatttcaacccaagagatgtggagcctggcacaaaagtaagcgaggacacaacggatgttaagagctcagctcatgtgcagacagaatctgtggttcaacaaaacggacctgatagcgcgaaagtgactactgcacagactgttattcgcaaccccttcgagtccagcttctctggacctagcattacgtcaggtcctctaacgccctctggtcacataccatattctggcaacatttctcttcgatcagagagcagcacaacgagtactcgatccttcgcgtttccagtactacagaacgagtggaacagcagccccgtgaagatggccaaggccgaccgcaggcgtcagaaggaagaccgaggctggggttacagaatcctttgctgtaaattctgaatggcgcttgcctcccctgcatcctttttgcctgtcgagttgagcccttcgtctctgtcatgcttgagccccgtggaggtccatgttaaattcattcatcaaatgtttctctcctctcctctcctcttgtctttctgctcccctgctgttcttatttatctctagcaggttaatggcttgtcggattcggtagtggcttgtaatttacagaacactatgaagagtgaggactcaagtcatagctttggtatagaatttgcggatacttgttcgagtattattccggatgaatgaacatccattcatgtggggtgaatggcggccatttgagccgtgagcc

SEQ ID NO: 8910 - DNA, 2742 bp, Zea mays
  Clone ID: 700803483_FLI
aaagaaagcttcagtaagtccagaacagcaacctgtcattgcttctcctcagctcaaaatggacatgccgtcttttactcctgccattaagcacacagcaggatttgccttatccggtagcaagcttgttcctaagacgggtgagattgcctctgaacctaactaccaggtcactggtggtatggatagtgagcaaagaatcatcttttcagaaaagatccgttgtgcagtagaacaatcaactgcacaggctaaaggtgcaagccttgactcaatggaggcagttaagcacaaggaaggcgtatggagcaatctatccacaatctcaagaaacaagttatctccagaggtcgaagagaagcttacctcagttgcagcagctgctgaagcagcagtttctgttgcaaaggcagctgcagaagctgccaagatggcgtcagaggctgcattgcaggcgaaaataatggcagaggaaactcttagctcttttacatctgtaatgtccatgcatcacgaagttggtcaatctgatgtcattagtagtccactgatcttgtcaagttcaacaccagcatcatccctgaaaattaaggacaagagtcatgccccaggttccatcatttctgtggcacgggaggctgctagaaagagggttgaagaggcatctgcagctgcaaaacgtgctgaaaacttggatgccatattgaaagctgcagagcttgccgcggaggctgtgttcagggcaggaaccattattggaatgggagaaccactaccttttaccctaagagagcttttggaagcagggccaaatggctattggaagtctgcaagtgtaaggaataaatctggaagtggtaatgataatctagtaacagaaacattggaggtagatgcacctgctaaccctagcaaatctggcagaaagcgtggtcggaaacctaaatatgatcaagcactaccgaattcagagccattttcaaactgcaaagaattacagccatatggaatacactcaggacatggggttgtaggaaatgttcctgtcactgtgccaatggatggtaccaatgttacatcaccaataagcattgtctggaatggcattgaaaagggatctgcagttgaggttttatctgacaaggttgggtttggagtagcttggttttctgctaaggttattgatataaatgaaaataatgcttttgtcagctatgacaaccacaatggaactggtcctcgtgaagaatgggtgccattgagacaagagggggataagccgcctcagatacgtcttgcacaccctgctaccctctccaaattcaaaactaggaaacggcgcagggaaacagcaggcagttgtttatgggtcattggagatcatgtagacgcatgggtcaataattgctgttggcgagagggagttatttctcagaattatgagactgacgagacgaaatatgttgtacatttttcagttggaggtggtggtgaatccttagtagttgatgcttggagtcttcgtccatcacgtgtttggaaagatgttcaatggatagagtggtcccgtgcaagagaaaggaaatccaagtctaataagggcgattcacctcttgagaaacgccaaaagacagacttgcttcaagcaggtggcaatctatctgttgttgacgaaacgggaggatcttcaaaggacaagaatacaaacaatgcaaaaaaatcggatgaactaaagacattgtctttgtctcagggggaaattgttttcaacattgggaagagtgtagttgagaacaaatctgatgctcttgcattcaaacggcctggattacagaaagaaggatcaaaggttgtctatggtgttccaaaacatggaaagaagaagtttatggaagtaagcaaacattattacgcaggccagtttgacaagatttctgagggtaatgcatctaacagatttgtgaaacatctggtgacgcaattgccaagggaacgtgaaaatgattccaaagttgatcctattagaggaaggagagtgggtgagacgaggtctagattacctaaacctacgaagtctcagagcgttcgagctagcagtgctcctggaaatgattccttccccatgcatgttcagaatacttgtgtttctcaaaggagttttggttttgcgggaagttcgacaagcacttccaacaatgaaaagtccacttcagaaaaaaataatcctgcgcttggtgtgggctttagaactgaagttccttctgtttctgaactgcaaactgcatctactgttcctactaatcgagctaaaaagaaatacattcccactgttagcaacataaacagaagtatactcaatacctctgaaaaggcaaattctgattctggtgaaccccgaaggactacttctgattctaccgaacccagacggtctaacaggcgaattcaaccaacttcaaggttgctagagggattgcaaagttccctcataatctctaaagttcctggcgagaaggttcctaggagcaattacaaaagtgcatcgtcaagagggagagctcaatctcatggttgagtgaaggcaccacatagctaccttttgtgggatacctctcgttgtacatagctgcagccttctagtacggaagcaggataggattggagtaggaagtcttcattggagcacaaggattcggatgtattataaactagcttaagtgaattctgttaaccttttctttt

SEQ ID NO: 8911 - DNA, 890 bp, Zea mays
  Clone ID: 700803635_FLI
gtcttcagaccattagctttatctactccagagcgcagaagaacccgatcgacaccatgagggtgttgctcgttgccctcgctctcctggctctcgctgcgagcgccacctccacgcatacaagcggcggctgcggctgccagccaccgccgccggttcatctaccgccgccggtgcatctgccacctccggttcacctgccacctccggtgcatctcccaccgccggtccacctgccgccgccggtccacctgccaccgccggtccatgtgccgccgccggttcatctgccgccgccaccatgccactaccctactcaaccgccccggcctcagcctcatccccagccacacccatgcccgtgccaacagccgcatccaagcccgtgccagctgcagggaacctgcggcgttggcagcaccccgatcctgggccagtgcgtcgagtttctgaggcatcagtgcagcccgacggcgacgccctactgctcgcctcagtgccagtcgttgcggcagcagtgttgccagcagctcaggcaggtggagccgcagcaccggtaccaggcgatcttcggcttggtcctccagtccatcctgcagcagcagccgcaaagcggccaggtcgcggggctgttggcggcgcagatagcgcagcaactgacggcgatgtgcggcctgcagcagccgactccatgcccctacgctgctgccggcggtgtcccccactgaagaaactatgtgctgtagtatagccgctggctagctagctagttgagtcatttagcggcgatgattgagtaataatgtgtcacgcatcaccatgggtggcagtgtcagtgtgagcaatgacctgaatgaacaattgaaatgaaaagaaaaaagtattgttcc

SEQ ID NO: 8912 - DNA, 1424 bp, Zea mays
  Clone ID: 700803682_FLI
gcctgctcgttctatctgtccagcagacttgaggttccgagcggccggaaaccagcggcaaccgtcggcatggcgctcgtattgcattctggggctggaaacaaaaatgccttcaaggcacttattgctgcagaatacagtggggtcaaggttgagttgaccaaggattttgagatgggtgtctcgaacaagacccctgagtttctaaagatgaacccccttgggaaggttcctgttctggagactcctgatggccctgtttttgagagtaatgctattgcgcgctatgttgctcgcttgaaggatgacaaccctcttttcgggtcttcccgtattgaacaatggatggactttgctgcaacagaagttgatcctggtgttggatggtacttgtatccaaggcttgggtacatcccttatgctcacacgactgaggaaacagctattgcttcattgaagagatcccttggtgctctgaacacacatcttgccttgaacacataccttgttggacattctgttactctagctgacattgtattgacatgcaacctctaccatggaattgcacggatcttgaccaaaagcttcacttctgatttccctcatgttgagaggtatttctggaccatggttaaccaacctaatttcaagaaggtcattggtgaggtcaagcaggcagagtctgtacctcctgttcttaaaaagggtgttcctcctaaggagtcaaaggcaaaggatgtgaagaaagaaactccaaaggaggcccccaagccaaaggtggttgaggtaccagcagaagaggaagcaccaaagccaaagccaaagaatcctcttgacttgctgccaccaagcaagatggtccttgatgactggaagaggctatactcaaacacaaagaccaacttccgggaggttgccatcaaaggtttctgggacatgtatgacccagagggctactctctgtggttctgtgactacaagtacaatgacgagaacaccgtctcctttgtgaccctgaacaaggttggtggattcctgcagcggatggacctgtgccgcaagtacgcctttggcaagatgctcgtggtaggttctgagccacccttcaagctgaagggcctttggctcttccgtggccaggaggttcccaagtttgtaatggatgaggtctatgacatggagctctacgagtggaccaaggtcgacatctctgatgaggcccagaaggagcgtgtcaatgccatgatcgaggaccaggaaccctttgagggcgaggccttgcttgacgcgaaatgcttcaagtgagtgtgctttatccagagctgtttagccctcgaattggatgtctatgttgatctggtatatcttgctatgaactggttaaggtttgtgctggtttgagaatttttgtttaccttctc

SEQ ID NO: 8913 - DNA, 1254 bp, Zea mays
  Clone ID: 700803779_FLI
gttaaacctaactgcctctcctctctcccagtctctcgccgctcgcctctcagccgccgcgtgcctcccagtctcccgccctcgcctctctcttcctctcctctctccctgcgcgccgccgccgtgcctcgccttgcccagagactaaggcgccaggacagtataaatttagttcacgtggttgtggacttctcgctttttggattcaacattttctgcttctctgctctggaatacagaagtgccattgtgggctcaagaggataatgtacgggaggcgtgcatcgcaactgctgaaggagatcgactcctctgaggctggccagctcgtgccattcaacagtgacgtgtttgatcaagtgattagagagtgcaatgagcacaactcacaatttcaatcgttgatcaggaaaatggtggagcaaaacttagatatcgagacaactagaaatgaagatcactatggtgcagctatccaccatctttccctgctccgtaacaaaagatgccttatggcttacatgtacaaccgagcagaagttatccagagttttagatggaaaattggccctgtgcttcctcatgacatacaagaaaagctccatttctcagaaaaggagtacttcaagaaccactctgcagccattaaatcatacatatcagagatggatatagatttgacagtggacatggttcctcccaaggatccttacattcaggttcgggtgctggaggacattggtgaagtatcgctcggtgaccattctgtgtcattgaccaagaactcactccatttcctaaggcgcacagacgctgaacagtttatatcacagggtcttatggaagaatttctggagtagggatcacatgtatgaatgtatgatggtacaataggatggtgcactgccctcgttctccccagcgatgctgcctgatgccctatttgcaacaatgaaaagacgcgttctgtaccaaggagcttcttaactagtcgctggacgatgatttcgaaagttgtgcaggcagtcctatactagattcattgcctctatttacatgtggatgacttttagttagtgtgccatccaagaaagcagatgttgcaaacattgtaacttgtgtattaacattggttttgctggtagatttcatatttgtgtttccaagattccatgtaatcaagaaaaaaaatgaaatcttggttgaaacagtctttcacagtgaggagttagtttcattttatagctaacatgc

SEQ ID NO: 8914 - DNA, 1876 bp, Zea mays
  Clone ID: 700803832_FLI
gtcactcactcgtaggtggcttccacccatctccctcagcagtcagtcagcaggactcagcagcactatctcccacccccatccttcgctactctttcgttccttctgatcgccgctatcctcttcagccccgactgaggaggcggccggcgctccccaggcacgcacgagttgacgggtccagcagcggcctcgggatcttgccgccagctgcagcggcaatccggtccgtccgcccaggcttccgtggatatactggtctgagttgtcaagtccttgacctgatcatatcagttttgcttataaggatgggggtttacctcagtactccaaaaactgacaagctatctgaaaatggagaaaatgatagacttaagtttggtctttcatctatgcaaggatggcgagcaaccatggaagatgctcattcagcattgctagatcttgatagcgagacagcattctttggtgtttttgatggtcatggaggaagagtcgttgccaaattctgtgcaaaatatctgcatggtcaagtcctcaaaagcgaagcctattcaactggtgacctaggcgctgctgtccatagagctttcttcagaatggatgaaatgatgcaaggacagagaggttggcgagaactatctgcacttggagacaaaataaacaagtttagtggtatgatagaaggattgatttggtctccaaggggcagtgattcaaataatcaacaagatgattgggcttcagaggagggacctcactctgactttgctgggccaacatgtgggagtacagcgtgtgtagcactaataagaaacacccaacttgttgtggcaaatgctggtgattcccgatgtgttatttcaaggggtgggaaggcatacaatttatcgagggaccacaaaccagagcttgcagctgagagagaaaggataatgaaagcagggggcttcatccatatgggacgagtaaatggaagtctaaacttgtcaagggcaattggagatgtggaattgaaacagaacaaattcctgcctcccgagaagcaaattgtgacggccaatcctgatatcaacgtcgtggagctctgcgacgatgacgactttgttgttgtagcatgtgatggcatttgggactgcatgtcaagccaacagctggtggatttcatccacgagcgtataaacacggagagcagcctgtctgccgtgtgcgagagagtgctggacagatgcctggctccatcaacgatcgctggagacgggtgcgacaacatgaccatgatcatagtgcagatcaaaaaacctgtcgatcggaacaagaaggccgaagcagcagggcaatctgccagcaatgcggacgaagccaagagtcgtgttgctgaggagttaagcatggctggcactcacaagggcgcaaccatttgctttcataaggcaggtgaaaaaaaatgaacgaagaaacctgcagtgtacgtatctcaactgtacgtggcatgccatgcaaatcctgcctaagttaccccggacaatggcattgcctagtgcagtggtggatcttcagatcacaacctttcttgtgccagctttcggtcatctccactctccagccctcggaaccatggctgagtctgtctattctttgtgtggtgtgtagcattcctcgtgttttcgttgtccaaaatggtgtcaaatccagttttttgttgcgagaatgaaccgtgacgttagtgtgttttgctggcggttaggtgcaaaatactcgaaacctgaattgcccgctcgctatttcgggttgtaagtatatgatgaatctgattttagttgcatggtgtacccatcttatctgaaaataatgaaagatctgtttgtggttgact

SEQ ID NO: 8915 - DNA, 1760 bp, Zea mays
  Clone ID: 700803844_FLI
gtttctttaccctaacggcctaacctttctgctctagcgaaggcacagccgccgctgtttcttcatcttccttgcagcgccggcgctccatcttactctccctcccttactagcgcttgacacgcaggtgacggcggcagcgacggcgctcagactcgggtttttagtgacggcatcagcggtttcccctcccgcctcttgccagtcccatcgcgccctcgcctcgggtcctctgcacaccgtccagtgaccttgcgtgatggactggataaagttttgcagcgattttaccgcaagtgatgggaaacagcatgcattgcttgataatcttaatcaggaattgtcccagaagtctgtactattgggtgatggttttaaactgtcagctgctgataatgatgtgtttgcaactgttcatccttttgtgatccgtgttagtgacagcgagttgcagaaatatccacatgtactgcggtggatggactacattcagaacactgttggtgctggtacaactttgcaaaagataaatgtgaccaagtctgactttgatccaccttctcatccaaggaaagctgataaaaaagatgctgaatcaagttcaaagaaagccatttccgtacagaagactgctgacaagtcaaatggaagtgctgactcaaagaaatccacaagagagcctcctgaaaataaggagaatcctactgctgcggggaacagcaaaacctctggggagaaaaagaaagtgcaagagaagtcagcaggaaaaacaacagagaaagctccagagaaaattgcagacaaggaatcagagtgcgatatcagtatcctgaatatacaggttggccttatccgtaaagcatggaagcatccatctgctgacaggtgctgtattttcactcttctgcaacacttagaatttctctgtattttcactcttctgcaacacttagaatttctctcagtgcttatgttatagtattcaacctaacgttctgattgatgaccgaccagccttttagttgaggagatagatttgggagatggtaatgtgcgtcaagttgttagtggtcttgcaaagtattgcagcccagatgatcttactgtgagtagttagctgcaagaaggaactcaaattgtttttgaccattttctctctcatttaagatgtttgacctatgttgctgtgttttgctatgaacacctgtctgtcgttttcttctttcagaatcggcatgttgtcttgatcacgaatgtgaagcctggaaagctgcgagatgtaatgtctgctggattggtcctttgtgcttcaactgaagatcatgctgctgtggagcctttgattcctccagaaggagccaagattggagaacgcatttcatttgctgggtttgatgggaagcctgaagatgttctaaatccaaagaaaaagcagctggacaagattaccccgcatcttcgtaccgacgagaatggaattgcaatgttcaaaggtgttccctttactacatcagctggcccatgtagatcttcgattcacaacggaaatgttaagtgagcagctcattagacatggttgcatagattgacatcaaacttatgcaggctgtctgtgtaccattttgtcatacatcatgttttgcccatatttagcgttgcaaaatttgaacagagttacactatctgtaagcaattttctactaatggttggcccagagtttgcttttgagtatgctatcacagacaaatcaaatatcctt

SEQ ID NO: 8916 - DNA, 1360 bp, Zea mays
  Clone ID: 700803940_FLI
gagcaaaacaaatactaaatgccgccaccgcccaccgccgtatcatcctgctggcgcggcacaagacgccaccgagccaagaatttgcatcctcatcctgcggctgtcagtgtcaagcagccaggctcaggggtaaggtttcagcaattcagctccctcgcctccgccgcggcaccggcactacgagtgcttcgctaccagccagccagcacactctacgagtcgccatcttccactccaccgaggcagctccaagccatggccatggagaaggccgcctccttcctctcctccctcttaggcggcggcggcggggagccggcggcgactgtgaaatctatcttcatataccctatcaagtcctgcaggggtcttgccgtgtcacaggcgcccatcacctccactgggttccggtgggatcggcagtgggtggtggtgaacgccaaagggcgagcatacacccagagggtggagcccaagcttgctctggtccaggtggagttgccgccggaggccttcgctgagaactggcagcccacgcccgacgaccacctggttatcagagcacccggaatggacacactgaagatacctctaataacggaacacgccacaatcgatgatgtctctgtctgggagtggtctggctctgcgtatgatgaaggggctgaagcgtctgaatggttctccacttactttgggaagccaagtcgactagtgcgcttcaaagaagcatcggaaactaggccaaccgatccagattatgcccaaggttataagatcatgttcaccgattgcttcccatttctgatagcttctcagggttcactggatgcactaaatgagattcttaaagaacctgtaccaatgaaccgcttcagaccaaatattttagtggatggatgccacccatactcagaggacctgtggaaaaccataaagataaacaacctaacattcctaggtgtgaagttatgcaaccgctgcaaggtgccaaccattaatcaagaggatggagtacctggtactgaaccaactgaaactctacagacttttcggtccgaccaagtgcttcgtccaagccacaaaaataaacgacaggtgtactttgggcagaatttagtctgcaaggaatctctatcaggcgaaggaaaggtcatcagggttggcgatccagtttatgttgtgcaggcattcgcttcttctaatgaagccccagcctgattcagggttaaaagtagtgacagggtgttcaaaataagtgagtttgtcatgcacactggataaacaaaaaactgtgggctgttgaaactgttaatgagacaataaagcactggccgctggacagtaattatgaatt

SEQ ID NO: 8917 - DNA, 1323 bp, Zea mays
  Clone ID: 700803992_FLI
cccctttcgccctacttgcttcccacgccagggcccgagctccgagctagggtttcctctctcgccgccgccgccgccgccgccgccgacggagaagaggagtaggtgaagccgagttattagcgccaggggaggaacatggggacgccggagacgtcgcgggagccatgcccggaccggatcctggacgacgtcggcggcgcgttcgggatgggcgccgtcggcggctcggccttccacttcatcaagggcatctacaactcccccaacgggatgcgcatgtccgggggcgcgcaggccgtgcgcatgaacgcgccgcgcgtggggggcagcttcgccgtctggggcggcctcttctcaaccttcgactgcgccatggtctatgcgcgccagaaggaggatccctggaactccattatcgcgggcgccgccacgggtgggtttctctctatgcgccagggcatgggggcggcgggccggtccgcgctcatgggcggtgtcctcctggccctcatcgagggcgccggccttatgctcaaccgcgtcctcgccaacccgccgctgcccgcagaggatcccaaccttaccgcggccatgggcgacaaccctttcccgggcctgccacaggcgccgccggtcgtggcacctccggaagtggcgagctccagcggcgcgggtgggtggtttgggggactgattggcaggaaggatgaagagaagaaatccagcgcgggcaagtcggagatcttggagagcttcgacacgcccagcagtccgataccatcgttcgagtacaagtgaggaaaaggttggctgatgccactgttgcctgcacggccttgcagatgctgtgatggggtctggaattggtgattcatgtcagcaatacaataaccgacaggacaaaagagatggtatgcggcttaagccttttccgaaacgtggcagcttggctacttctcgagatgacgtagtatttgtagaagcaacagcagtagtacactgcccaatattatagcattcgtgttgtgcaatgtaatgcacgtgagaacgcttgtgtggttgtgcctctggctggcctctaaacggacgtcttttttgtggtcttattagtcgagtcgttcaactgcgccaagtcttgctgcagtttttttgttttgttgccactgtgtctgagcctcgggtggcctggtgtacctgcgaggctgctgttaagcagggtcttgtcagtcagggcagggacctttgttgccgcaattagtacggtacgtaaactgcccatctcggtgggtaagctaatcgaccaaggactagtgctgtggt

SEQ ID NO: 8918 - DNA, 1167 bp, Zea mays
  Clone ID: 700804015_FLI
gtagtgaggtgagtgagagagactgaggaggcatgtgaccctcttcactcgcttcaccctgttcatcactcgcttgtacaagaagtcacgcaccaaacgggcaagggcaaacaccaccaaagaaggcgagaacgcactccgtccctctcctccaggaccgcccgctcttatcccgtttctcccttctctgggctcggagaatcggagatggcgtccagcgcctctcggttcatcaagtgcgtcacggtcggcgacggtgccgtgggcaagacatgtatgctcatctgctacaccagcaacaagttccccactgattacatacccacggtgttcgacaatttcagtgcaaatgtcgttgtggatggcaccacggtgaatttgggcctgtgggataccgcagggcaggaagattacaaccgactgaggcctctaagctaccgtggtgcagatgttttcgtgcttgcattctcacttgtgagtcgagctagctatgagaatatcatgaagaagtggataccggagcttcagcattatgcacgtggggtgcctgttgtgttggtaggcacaaaatttgatcttcgtgaagacaagcactacttgatggaccatcctgggttggtgcctgttaccacagcacaaggggaggaacttcgtagacaaattggtgctatgtattacatcgaatgcagttcgaagacacagcagaatgtcaaagctgtgttcgatgctgccatcaaggttgtaatccagcctccaactaaactaagagaaaagaagaaaaagaaatcacgcaagggatgttcgatggtgaacatcttatctggaagaaaaatgctatgcttcaagtcctgaatgatcgaagggggtcttacctgaactaataccatgagtgtgaccccaagttcgcgaagcttgaaatcttgatgcgctcgttgcgcatgtatatttgcacctttggttattaatcactagaggtagatgattgaaactaatctgcttaaccaatgtgcactgctgggcgctggcgtggttagctatatcagttaggcagttcgacagaggtcaaagagattgagattttgttctttcttggcaatgtcacagcttttgtgaatctggtctcatcatactgtccgctagtttatccaatgattccatggtggaatc

SEQ ID NO: 8919 - DNA, 1152 bp, Zea mays
  Clone ID: 700804539_FLI
taaaagtttagatacagacgggattcgcataatttcaagcgttcttggtcaaagtatcgcccttgatcactatattcggcaggtcgatgatatggttgaggaattcactgaaattaatcgtgtcatggagaaaaccggtaactttaccatgcaaagaaaaaaactctttcaacttgtgggtaaggccaattctaatcttgcggatgttatcatcagacttggtctttttgacaggtcagaaattgcttggaaaaatgcaaattatgcacaaattctagaatatcttcgggaggaatatgaactgaatcagcgttttggaagccttgacttcaaactgaaatttgtggagcataacattcactttcttcaagaggtcctccaaaacagacggtctgatctgctggaatggggtgtcataatactgctgattattgagattgctatctcattatatgaaattgccaaggactccatgatcgattgagagctctgaacaacacctctattcatcctcgatcatcccattatgctaactccagatccactgttttaacaaaaaaaggaaaagaatgaccccagcttccatattttctgactatccatctccaccctttggatttctaaccttagatgaaaggaagttgggaatggcgttctggcttgagtttatttacatcctttaattctacaactccaaacgaaaagaagtttggccaattttcctatgtccaatgagttcccgggcagccaggttttccaatttgagtagaatctagttttcctttcaatattcatgccaggtgttcttgatacatgttcttggtgccactttttagtatcttgataggactgtcagctctttttttttgggggcaaggctgacgccaggcagctgcaactggacctgatggaaaaatcatgaaagtttttatcaaatggctttgtaatttgtacaaatacttagcgtgggaaggttccatttggtttaaccatactgaattgctcgttccattttgcgtggtaattaaccatgcatactgtaagtatgtgtagtacacttgatgcctatgagtgagagtgaattagatatttcttctagtcaaaatctatgcaataaataaactatctgtgtataattatatttttgacagt

SEQ ID NO: 8920 - DNA, 1622 bp, Zea mays
  Clone ID: 700804561_FLI
gtgacatcagacatcaccaactcgtcgacggtagagagagcaagctcttcggcgatttgagaagaatcgaggagcgagcgagcgagcgagcgagagaggaggaggaggagctggggcttgagcctgcgcccgggggccccgggtcacggaatcctaccattaccaaccctagccttcgttgatcgccgtctcaggtcatggcagggccggcgccggatcgggccgccctgactgtggggccgggcatggacatgccaatcatgcacgacagcgaccggtacgagctcgtgcgcgatatcggctccggcaacttcggcgttgcccgcctcatgcgcgaccgccgcaccagcgaactcgtcgccgtcaagtacatcgagcgcggcgagaagatagatgagaatgtccagcgtgagataattaaccatagatcattgaagcaccctaacattattaggtttaaagaggttattttaacaccgacccatcttgctattgtcatggaatatgcctctggcggtgagctttttgagaggatatgtaagaacgtgcgattcagtgaagatgaggctcgctacttcttccagcagcttatttcaggagtaagctactgccattcaatgcaagtatgccaccgtgatttgaagttggagaacacacttctagatgggagtgacgctcctcgcttgaagatttgcgatttcggttattccaagtcatctgttcttcattcccagccgaagtccactgttggaacacctgcttatattgcacctgaagttttgttgaaaaaagaatatgatggcaagattgctgacgtttggtcatgtggtgtaaccctctatgtaatggttgttggcgcatatccttttgaagatccagaagagcctaagaacttccgcaagacaattcagcgtatcttgaatgttcagtacgcaattccagacaacgtgaacatatctccagagtgcaggcatctaatttcgaggatttttgttggcgatcctgctacgcgaataacaatccctgaaatccggaatcatagttggttcctgaagaaccttcctgctgatctgatggatgatgatagcatgagcaaccaatatgaggagcctgaccagccaatgcagaccatggatcagatcatgcagattttaacagaggccaccataccacctgcctgttctcgcagtataaatgtcctagctgatggactggacatggacgacgacatggatgatcttgattccgactcagatcttgatgttgacagcagcagtgagattgtgtacgcaatgtgagtaacatctcagcagccatctcagcagtcaaccaaggaaccaatcaggcatgggatgccctgttgtatactctggcaaagggcatgcttccttttgtgaaaaacatccatgtagttttctcaaggaatcgcaatgtgttctgtggaacacatatgttgtagtcaaactcgggttactcagcttgtaaaactagcctcctcttgcttcctggttactgggctttggatactctcaggcttcgacttgtgtgttgctgttaaatatgtataagaaacttctactcaggttgatctgtgaatctggattcgggtagtggttttgctc

SEQ ID NO: 8921 - DNA, 2182 bp, Zea mays
  Clone ID: 700804601_FLI
ctttccgttgcccttttcccgttccctgccccttcttctccgtctttctccggtcggctttggagaaagaggtgatgtgaggttcccatcactcacgcctggctgggtagctagatgctcccgggccgtctttattacggctgtcgccgggctgggctgcggtcggcggcggaagggagtcttctggcggagatatgagaggattgttttagtgaggtctatgagctggtaccagaactgctcataatattcagggggaaaaaaaggcaacatggcggaatcgaaggtcgcaagtctggatgcccgaacgacgaagatcagaaacgtccccatcgcagtgaccccagaagggttctggtgctgcccgtcgcaagccgtgctccagaagacggcgaagagccaaaacccgcaggcgaagacgaagcccagagggggtgcctcgcctctcgcaccaaaggcggcaccaccaatccagagggcgcccacaatctcgtccgagagaaggacgcactcgactccgaccagggcgaaaaccaactcagaggagcagaggtgcttgccgccggcagaggacgctgcggctaataataacgccactaatccgcccaaggcagtgaacgagaggccacagaagcagcacaaggtatctgttgggttcggccagctcgagacgagtgacttgaaggtggtgctgtatggcaaggacggcgttgcggtgaagatgagcgtccacaagaacacccttgctggaaacagcaccttctttgctgacaagctctccgggcagtctccggtgtcgagtatagaagtgcctgactgtgaggatgtggagatttatgtcgagactgttgggttgatgtactgcagtgatgtcaagcagaggcttatcaagcaaaccgttcctcgtgttcttcgagtcttgaaggttgcagagctgctgggtttcccagcatgtgtcatgtcatgcttagactacttggaagcggtcccttgggtcggggaagaagaggagaatgtggtctcgtctgtccggaacctgcagagcgagaactatggcgtcagtcctgtgctgaagagggtagcaccatctgatcgaacaaccccaccaaacgatacgttttcacatatcatcgaactggtcttgagaagcagcgaggacagggggcggcgcgagatgaaatctctggtgcagaagcttctgaaggagagtagcactggctgcatgagtgggtcttccgacctgtgttctgcggtcctctacagatcatgccggaactgcctggattccttactaatcctgtttcagcaagcaaccgacagtgatttcgctgagcaggctcttaataccaaagaaccagttttccgacaagttgctctagaagcagataacctgctctggttagctgagatcttggctgacaggaatgccgctgacgagttcgcggtcatatgggctagccaacgtgagctggctgggctgcactctaggttgccagtcaagtcgcgccaccttgtcagctgtgtcacggcgaggctgttcgtgggcatcgggaaaggggagatgcttccttcgaaggacacgaggcggcttctcttggacgtctggttgcagcctctcatggatgactacaactggttgcagcacggctgcaggtcgttcgaccggaaagtggtggaggaaggtgttgggcggaccatcctgacgctccctttggaggatcagcagacgatcctgctctcgtggcttgggagcttcctgaaggttggggacagctgccccaatctccagaaggcctttgaggtttggtggaggagaactttcgtaaggccctatgctgagcagcaaggtaatcgatcgcaatcaggtcggagttgagatgtcaattggttgcagaagaagatagtcttgtttcctagtgtagtatatttgatgagaagttagggtggcggtttcttcttgcgtggtagcccgcgtgggagatccccagtatgtggaggaaatgcggttagtactcttgacctgcgtgaggcttgaggaagttcgcgttgtgcttgtgatgcttcgtatgtatgtcaagatctctgaattctgggtgcagaatttgtatcgtcaggcatctgttttgatgctctgttctgcttctcacaacgttgcacgatgttaattaaggatctgttatgt

SEQ ID NO: 8922 - DNA, 520 bp, Zea mays
  Clone ID: 700804610_FLI
gccgcatccaagcccgtgccagctgcagggaacctgcggcgttggcagcaccccgatcctgggccagtgcgtcgagtttctgaggcatcagtgcagcccgacggcgacgccctactgctcgcctcagtgccagtcgttgcggcagcagtgttgccagcagctcaggcaggtggagccgcagcaccggtaccaggcgatcttcggcttggtcctccagtccatcctgcagcagcagccgcaaagcggccaggtcgcggggctgttggcggcgcagatagcgcagcaactgacggcgatgtgcggcctgcagcagccgactccatgcccctacgctgctgccggcggtgtcccccactgaagaaactatgtgctgtagtatagccgctggctagctagctagttgagtcatttagcggcgatgattgagtaataatgtgtcacgcatcaccatgggtggcagtgtcagtgtgagcaatgacctgaatgaacaattgaaatgaaaagaaaaaagtattgttcc

SEQ ID NO: 8923 - DNA, 1047 bp, Zea mays
  Clone ID: 700804635_FLI
cttctctgcgtccccaacggatcgcgaagcaggcggagctcgcggcaagttctcaggtgaaatttccgcgcccgcgaagtcaggcgctgtcgcgtgggccacccaggaccgcgtctcccccagccgccgcgagaaaccagggcatgatccgcttctaccggccgactccttcttccccataaaatccagcacggcgacgctggcgcagttcattccatggcgctcctacgtcgcgcccttgcgccccctcctctctgctcgaccatgcccacgccgccaccatcccctatgctcggcgtgccccttctctactccctcttcgcgtcaccgacctcgcctggtgtacgctccaaccgtggaatcgccgccgccgcggtacctcctctgcatcctcacccagtgcgccagctttggtagtgacgttcgccaagtccttgcgtgtgcgttcagcgacttgccgagggtgattcgtgcactagtgcctggaattgctcaccggactgacgcttcaccgccgggccgcctaaactcgaggacaaaccgtctgcgctcgcgactcccgacgagcaagccactgtggaatctgaggttcaacaagtagagatagctgagcaggagctcattgaagacgagcaagccactgtggaatctgaggttcaacaagtagagatagctgagcaggagctcattgaagtgctttgttgtttctgttgaatggtgcggcgtgcgtggcatcagagctctccaaccacgtgtacgtgtgtactcgatgcgacggaacggagcaggaagcgatggtgcgttgacatgggagagcatacgacgacgcgacgcgacgcgagcgtgttgttgtcggtcaccagaacggagtagttctgcctgctaggacggatcacgggcatggacgacgatggaaccactcgtcccgtactgcttctgctagattaagaggctgtttgataccattacaagcgtgctaaaatagttggaaactccatgtttccgagtgatttctatttttcaaagaaaaataaactagtagtcttt

SEQ ID NO: 8924 - DNA, 1911 bp, Zea mays
  Clone ID: 700804649_FLI
tgaacattgatccgaggacagaaacaactgtattattgttagagaagcttgtgcagctagcagttacccctactcagaagcaaatagcttttcatcaacttgcatgcattagacttttgagaaaggaatatagtgaagctgaacaccaatttgaggttgccttctctgccggtcatgtgtattcaattgctggtattgctagagtcgctggcattcaaggccaaaaggctttggcttatgagaagctcagttcagtgataacatcaaatttgccactggggtggatgtatctggagaggtctttgtattctgaaggtgatagaaagctggcagaccttgacaaagcaagcgagctggatcctactctcacttacccttacatgtatcgagctgcatccttgatgagaaaaaaagatgctaaacatgccttagaggaaattaaccgactcttgggtttcaagttagcattggagtgcctggagctacggatctgtctatacctggctcttgaagactataagtctgctatctgtgatatccatgcgattcttactctttcacctgattatcggatgttggaaggacgtgtagctgcttccaaaataggcactcttcttggtgcacatgtcgagcagtggaatacggctgagtgttggctacaactttatgagcgctggtcatcagttgatgatattggctccctttcagtgatctatcggatgcttgagtcagatgcagcaaaaggtgtcctctactttaggcaatctttgctgctccttaggttgaactgtcccgaggcagcgatgcgcagtttgcaattggcaaggcatcatgcagcaactgagcatgaacgactagtatatgaggggtggctcttatatgacacggggcactatggggaggccctacaaaaagcggaagaatctatttccattcaaagatcatttgaagctttctttctgaaagcctatgttttggctgattcaggagttgatccttcttattctgcgacagttatctcacttcttgaagatgcattgaaatgcccttcagaccggcttcggaagggtcaggcattgaataaccttggtggtgtctatgttgattgtggaaagttagattcagcagctgattgctatacaagtgcattgaaaattcgacacactagagcccatcaaggtcttgctcgtgtacattttctgaggaacaacagggaagctgcatatgaagagatgacaaagttgatagaaaaagctaaaaacaatgcttcggcttatgagaaacgctcagaatattgtgaacgagaacaaactatgacagatttgcaaacagtgacccaattggatcctttgcgtgtttatccatacagatatcgagcagcagtgctgatggatagccacaaggagaatgatgcaatagcggagctcagccgtgcgatatccttcaaagcggacctgcatttgctgcatctccgtgcggctttccacgagcacattggagatgtacccagcgctctccgtgattgtagagccgccctctccttggacccgaatcaccaggagatgttggagcttcagaaacgtgtgaacagccaagagccctgacacattgtggtgctgtattgtgtattgtacaccacgactcatgccactttggtttgcctcgtgacagacagccttgacctgattcattttttttcgtttttccgttaattaattaatcaatcactgtaatacgaagttttcaggaagaaagtaacagagagcaagagagagaactagttatatgaaagcaggcattgataaagcctttttaactcgatgcctgtggcctctgtagaagtattgtgctaatccctgaactgtatcttgaaaaagtgattcgtgcataatgtatttttcagttctgttc

SEQ ID NO: 8925 - DNA, 1245 bp, Zea mays
  Clone ID: 700804659_FLI
cgcaacggcagtgacgtgtgcgcgttgccaaataaagctactatactagtcaccgctcgattgccgtcgcagccgcccgccggccggagatgggtgcgccggcgctgtcgtccgtcgtcgtggtggccacggcggcagtggtttgcctgtgcggggcctttgcgcaggcgcaggacatggacagcgagtgggcgcggccggcctaccgcgggttcttcggcgccccggccgggtcgctgctgccgcagtcggacgtggacctgctggagttcccgctgaacctggagtacctggagacggagttcttctgctggtccgctctggggtacggcctcgacgccatcgacgccaacctcaccggcggcgggccgccctccatcggcggccagtccgcgtccctcaccccgttcatccgcgacgtggccacccagttctgttaccaagaagtcgggcacctcagggcgatcaagcagacggtgaggggcttcccgaggccgttgctggacatcagcgcggccaacttcggcaagatcatcgagcaagcgctgaacgcgacgctggacccgcccttcgacccctacgagaacagcctcaacttcctcgtcgcctcctacatcatcccctacgtcggcctcaccggctacgtcggcgccaaccccaggctcctcacccctcaggccagaaagctgctggcggggctgctggcggtggagtcggcgcaggacgcggtgatccgtacgctgctgtacgagcgcgggatggcgcgtgtgccgagctatgccggcggggtggcggagatcacggcacgcatctcggacctccggaactcgctggggaggaggggcgtgaaggacgagggcctggtggtggcgcccgagctggggcccgaggggctgaccgtggggaacatcatcgccggcgaccacctgtcgctcgcctacgaccgcacgccggaggagatcctcggcatcgtgtacggcaccggtaactccgcccagcacggcggcttctttccccagggcgcagacggccgcatcgccaggggtctcctcgcgtagcgcatgggtgagttgtgaccgtgcgctgagcagtatgaatccgtgcacggcgcagactgtagactagctagcagtactatacttgtttgtgagttggtatggtgtggccttgagtgccttgtgtaaactgggtgatatacatgaatgtaggtggaaacaaataaagtaaataatgggttgctgcact

SEQ ID NO: 8926 - DNA, 899 bp, Zea mays
  Clone ID: 700804682_FLI
cgctgatcctgatcgaccagaaacactggatggcagagagcgagctgatccaccccaagaaggacgacgacgaccgagaggtttgccagcaacaagggcaggagcaagagaagggcgtgccgcggctggtgaagatgtgcagcaactgtctgtcaagccaaacgccacggtggagggacgggccgtcggggcgccagatgatgtgcagcgcatgcggcatgaggctcaagccagagaccaggttgtcagccgagcagcagtgcggccaggaagaacccaccaggaaggagcaagagccagacaggaagaggaagaaggcggccaagaagacgtgctacgagagcagcgacgccccgccgtcgtcggaccagcaagagaagcggtgcgcccactgcctgtcctccaagaccccgcagtggagggcggggcctctggggcccaagaccctgtgcaacgcctgcggcgtcaggttcaagtccggcaggctgctgcccgagtaccggcccgccaacagccccaccttcgtgagctgcttgcactccaactcccacaagaaggtcatgcagatgcggcaggccgtcgcgcagcagcagtgaggccgacgtctcccggaatctatcgttggaagcgcgttaggggatctcttagatcgtagcttagtcgatgctcagagaggatgagaacagagactttggttatagtagtagtaggcaatcgtcgttagctctagcggtgttctagctcagactgatttgctcggtgtttttagacgtcggattcaatacaatctcgatgttgtcctgaattgtgctatgggttttcggtccattagatgttcaaggtttcaattgggaactcggtgtttaaagagaattgctatgaaaaggcatcagttcctg

SEQ ID NO: 8927 - DNA, 1480 bp, Zea mays
  Clone ID: 700804878_FLI
tagagagttcttgtatcatattctaggggaagtcataaaagctggagctacgactctcaatatcccggacactgtcggatacaatcttccttatgaatttggaaagttgattgctgatataaaggcaaacactcctggaattgaaaaggctatcatttccactcattgtcagaatgaccttggtcttgcgactgccaacacactagcgggcgctcgtgcaggagcacggcagttagaggttactattaatggtattggtgaaagggctggaaatgcttctttggaggaggttgtcatggcaattaaatgccgcagagaactgttagatggtctctatactggaatcgattcccgccatatcactttgacgagcaaaatggtgcaagaacatagtggacttcacgtgcagccacataaagctattgttggtgccaatgcgttcgctcatgaaagtggaattcatcaggatgggatgcttaaatataaaggaacttacgaaattatatcgcctgatgatattggtctaacacgtgcaaatgaatttggtattgttcttgggaaactcagcggaaggcatgctgtgagatctaagctagtagagcttggatatgaaatcggtgacaaggaatttgaggacttctttaaacgctacaaagaggttgcagagaagaaaaagcgcgtaactgatgaagacttagaagcgttattgtcggatgagatattccagcctaaggttatttggtcccttgctgatgtacaggcaacatgtggtacacttgctttatctacggcaacagtgaaattgatagcaccagatggagaggagaaaatagcatgttcagtcggaacaggtccagtcgatgcagcttacaaggctgttgacaaaataatccagattccaacggttctccgagaatacagtatgacatcagtcacagaaggcattgacgcaatcgcgacaactcgggttgttgtcactggagatgtgagcaacaacgccaaacatgccctgactggccagtctttcaaccgctccttcagcgggagcggggcatccatggacattgtggtgtccagtgtcagagcttacctgagcgccctgaacaagatctgcagtttcgctggcgccgtgaaagccagcagcgatgtagctgagaccgcaagcgtcccgagcacagaatgagctcccgtttggttcagagtgacatgttgttcaaaatttctgctggaaggatcgtcccttgagcttaggacaggcaggaagtcttgggacctatgtagtgtacaatttctgtgtgtcatataccgtgctcgttgccagtttgtactgtaccatatataaaccatagaatctgttgccatttagaagtctggccaaggtcagctgtaatgcttcacatgcttatagcctggaaacattaaacattgaaaaacccgagcagtgaataaaggatgcccaaggtagaaactctgatgaatc

SEQ ID NO: 8928 - DNA, 1795 bp, Zea mays
  Clone ID: 700804929_FLI
ctttcctcgaattccccattctataaattccagttaaacttaattcgtaagatcaatcataattctcgagttgcaaaccatggacatggctttggcgtctaaagcctcccctccgccatggaatgccaccgccgccgagcagccaattccaaagcgtgacaaagccgctgcaaatgattcaacatacctcaatcctcaagctcatgatagtgttcttggaatcattctgggaggtggtgctgggactagattgtaccccttgacaaagaagcgtgccaagcctgcagtgccattgggtgccaactatagactgattgatattcctgtcagcaattgtctcaacagcaacatatccaagatctatgtgctaacgcaatttaactctgcttccctcaaccgtcacctctcaagagcctacgggagcaacattggagggtacaagaatgaagggtttgttgaagtcttagctgcacagcagagcccagataatccaaactggtttcagggtactgcagatgctgtaaggcagtacttgtggttgtttgaggagcataatgtgatggaatttctaattcttgctggcgatcacctgtaccggatggactatgaaaagttcattcaggcacacagagaaacaaatgctgatattaccgttgctgccctaccgatggatgagaaacgtgcaactgcatttggcctcatgaaaattgatgaagaagggaggatcattgagtttgctgagaaaccgaaaggagagcagttgaaagcaatgatggttgacaccaccatacttggccttgatgacgtgagggcaaaggaaatgccttatattgctagcatgggtatctatgttttcagcaaagatgtaatgcttcagctcctccgtgaacaatttcctgaagccaatgactttggaagtgaggttattccaggtgcaaccagcattggaaagagggttcaggcttatctgtatgatggttactgggaagatatcggtaccattgcggcattttataatgcaaacttgggaataaccaagaagccaatgccagatttcagcttctatgaccgttttgctccaatttatacacaacctcgacacctgccaccttcaaaggttcttgatgctgatgtgacagacagtgttattggtgaaggatgtgttattaaaaactgcaagataaaccattctgtagttggactccgatcttgcatatctgaaggtgctatcatagaggacagtttactaatgggtgcggactactatgagacagaagctgataaaaaactccttgccgaaaaaggtggcattcctattggtattgggaaaaattcatgcatcaggagagcaatcattgacaagaatgctcgaattggagacaatgttaagatactcaatgctgacaatgttcaagaagctgcaagggagacagacgggtacttcatcaaaggtggaattgtcacagtgatcaaggatgctttactccctagtggaacagttatatgaagtgaacgtgcgacatgcagctgtgtgtctcgacattcgacaatgatcagcacctggttacatgcgtgatctgcagatcagtctgttggagatcatcggagcaataaaagtgtcatccaaggcattttttctttctttttgctcttttgtgtccttcaatgttgtagggtagaatgttgtagcagcaaatgttagttacatgttgaatcgacattgggggcctggatttggggatacatcatgctgtaaattgatcagtttaattaccatactgtgctgctttgagcg

SEQ ID NO: 8929 - DNA, 1742 bp, Zea mays
  Clone ID: 700804994_FLI
ggaatatcatagtgaagaggaagatgaaggagaagagagtaatggccaagataacgatgatccttcagctccaaagaaaccaagggttgtttggtcagttgaactgcaccgaaaatttgttgctgctgtcaatcagctaggaattgacaaagctgtgccaaaaaggatacttgagctcatgaatgttgagagactcaccagggaaaatgttgcaagtcacctgcagaagtatagactctaccttaaacggctaagtgctgtggcatcacaacaggctagcattgttgctgctttgggaggcaacgacccctttatgcggatgagtgcatttgaaggactccatggttatcaatcttttgtctcttcagcagctctgccatctttcagtccacagggactgttaaatagaaataatccagcatcatttgcgattcaaggggtgtctgcttccaggccaattcagattgcaaccggcaataccacaatgagtcattccattggcgatccaaataataaatatcaccttagcttaccaggcactagtagcctacaaggaaatctagcacaaggtttgccaactccagttgggcaggtccagctgccacagaagtggatacacgaagaaaccgacgatctatctactatcctttctgcgagtggccaggctaataatggtgttcctggcacactccaaagtgtcacgaacagtcacttgctgcagcaaggctttgttgaacgtagacaagacaaagttgttatccagccatcttcatctgcaagttcagatcgtcctgaaggcactgttggagtttcctccagtctgatggattcctgtgcatcccatcagagggttgttccattgtctgccttctctagcagtgcagcgccaatgaatggctcgttttgcagcaacggtgtagctgagttgggtgctgcatcctctggaggtacaagtattttcccctccaatgacctgaggatagaaagagacagcaaagtgggagctagctctttcggtagtgtgatacttctgtctccagacactgtgccaaaccaaaaatacttgaacttcggcggtggaagcgatttgagaccgaacatggagggagggaacgcaggcaatctgttgaatcccaagctactatggagttgtttgccggcctctcagccgcctaatcttatcggaagtcatcatcccatgagccaaagactgaaccttggcggctcaatggtcagacagacaacagcaagtgcttcggcagctgccccacagacgaggatcgacatgtttatctccggagacgctccgaagagcgcgtcggatttgagcttccctaaggtccacagcgagcttagctctagcagctgcagcttcgacggcctcctcaactccataatcaaagtggagaaggacgatgcttccttcagcgatgacctgggatgcgacttgtactccctgggtgcctgtatatgatatctaccttccacgtatctgcatctgtgttaatctcccattgtatgctgtgcagctagtgttaatcttaggtagaattgtagctgtgcgcctatctttgcttgcccacagccaagaaaaaagaattgatgtctgcacgtgatgtgctagcagtaagatatctggattgtggaagtcaatgcccatttgctaaatcgagctggagacactgttggcacgagttgattctaaaagcggccttgatgatctaggcccaatttgaatgtcg

SEQ ID NO: 8930 - DNA, 902 bp, Zea mays
  Clone ID: 700805023_FLI
ctcctgagcactttccacattccagttccactccgcctccgctgccggtcgccgtctccgagactccgacagtccgaccgcaagaaggatgagtgaagaggataagactgctgcttctgctgagcagccgaagagggcccctaagctcaatgaaaggatcctctcttctctgtccaggaggtccgtagctgctcatccatggcatgatcttgagatcggtcctgatgctcctgctgttttcaatgttgttgttgagatcacaaagggaagcaaagttaaatatgagcttgacaagaaaactggactgattaaggttgatcgagtcctgtactcatcagttgtataccctcacaattatggtttcgttccaaggactctttgtgaagacaatgacccaatggatgtgttagtcctgatgcaggagcctgttgttcctggttcgttcctgcgagcaagagcaatcggccttatgcccatgattgaccagggtgaaaaggatgacaagataatagcagtctgtgctgatgatcctgaatatcgtcactacaacgacatcagtgagctgtctcctcatcgcctgcaagagatcaagcggttctttgaagattataagaagaatgagaataaagaggttgctgtcgatgcattcttgcctgcgaccacagctcgagaggccattcagtactccatggatctgtatgcgcagtatattttgcaaagcttgaggcagtagattggaagcaactatttatctgggcgtcttggaatgagtgtgattctaataagtcaaaacacttgatattgtgtgcaaatcttggggttgagaacaatgtcactagctgtgatttacttctgtgacttgcattttttttcttgttaaattatgaataagcgaagtccat

SEQ ID NO: 8931 - DNA, 1670 bp, Zea mays
  Clone ID: 700805106_FLI
atttgttatcggactgggaagcagcggcggtacaaagtgtgggagagaaaggagaagagacttgatgtcctcgcagtttgtccaatagatctcctcgccgcctcacccgtctcctcctccgcagcttccccgcgatcccgaccatggagggcgacggtaccaaccttgatgcggcgatagagtcgctcctgaatgtcgagaagcagatgaggctggccggagatgtcgccggcactcggaaggccgtcatcgacatcgtcgagctctgctacaaggccggcgcgtggaagacgctaaacgaccagatcgttctcctatctaagaggagaggccagcttaagcaggctattactgctatggttcagaaagcaatggagtacattgatttgacaccaggcattgacacaagcatcgagctaataaaaacactgagcagtgtctctgctggcaaaatctatgttgagatagagagagcaagattgatcaaaaggcttgcaaaaattaaagaggagcagggacaaatttacgaggctgctgatttgatgcaagaagttgctgttgaaacatttggctctatggcaaagacggagaaaattgctttcattcttgagcaggtccggctatgcctggatcggcaagattttgtcagagcacaaattttatccaggaaaatcagtactagagtatttgacgcagatccatcaaaggaaaaaaagaaaccaaaggaaggtgacagtattgttcaggatgctcctgcagatattccttcccttctagaattgaagcgcgtctactacgaactgatgattcgttattactctcacaacaatgattacttggaaatctgccgttgttacaaggctatttatgatattccagcaataaaagaggatccaacaaagtggataccgattcttaggaagatctgttggtacttggtgctagcacctcatgatcctatgcaatcaagccttctcaatgctacactagaggataaaaacctttcagaaatcccaaatttcaggttattactgaagcagctggtcaccatggaggtgatacagtggacaagtctgtgggaattcttcaaggaggaatatgagaaggagaaggatcttcttgggggagctttgggtgccaaagcttcagaagatttgaggctgaggattatcgaacataatatcttggttgtatccaagtactatgcaagggttaccctcgagaggcttgctgatcttctttgcctgactttgcaggaggcagagaagcatctctcagacatggttaactcgaaatctctagtggcaaagatcgacaggccgatgggagttgtcagcttccggacgacccaagacagcaatggcacactgaactcatgggccacgagccttgagaagcttctggacctcgttgagaagagctgccacgagatacataaagagaccatgatccacaagacggcgttaaaagtttaactcttttggtttaggttttgaaacccgtgctgttcatgagttaccgtaacaggagggggggttttttgttgttgttgggcacggccagtgtccccgcaaatttgctttgactcgctgaatatttttcggattcctagatctgcaatcagatacctagtcctgaaaaaaaaaagtagatgcacctttttttttatt

SEQ ID NO: 8932 - DNA, 1710 bp, Zea mays
  Clone ID: 700805206_FLI
caaacgccggcgcaaactctcgcccgagcccgacagatcttcaattccccattccgcccaccgatcgaccttcacgccagtctcggtctcttccgaaggcgtcgcgcgcggttgtttgagaggagaggaggaagatgagggagtgcatctccgtccacatcgggcaggccggcatccaagtcggcaacgcgtgctgggaactttactgcctcgagcacggcatccagcctgatggccaagtgcctggagataagaccgcgggacatcacgatgatgccttcagcaccttcttcagccagactggtgctgggaagcacgttccccgtgcaatcttcgttgatctagaacccactgtgatcgatgaggtgcgcactggcacgtaccgccagctcttccaccctgagcagctcatcagtggcaaggaggatgccgctaacaatttcgcccgtggccactacacaattggcaaggagattgttgatctgtgccttgaccgtatccgcaagcttgctgacaactgcaccggcctccagggcttcctggtcttcaatgccgttggtggtggcactggctctggccttggttctctcctccttgagcgcctgtctgtggagtacggcaagaaatccaagctgggcttcactgtgtacccatctccccaggtgtcaacctctgttgtggagccttacaacagcgtgctctccactcactcactcctggagcacactgatgtctccatcctgctcgacaacgaggccatctatgacatctgcaggcgctccctcgacattgagaggcccaactactccaacttgaatcgccttgtgtctcaggtgatctcatcgctgactgcttctctgaggttcgatggtgccctcaatgtggatgtgaacgagttccagaccaacctggttccttacccgaggatccacttcatgctctcctcctacgcaccggtgatctcttctgcgaaggccttccacgagcagctgtctgtggcggagatcaccagcagcgcgttcgagccggcttccatgatggtcaagtgcgacccacggcacggcaagtacatggcttgctgcctgatgtaccgcggcgacgtggtgcccaaggacgtgaacgccgcggtggccaccatcaagacgaagcgcaccatccagttcgtggactggtgcccgacggggttcaagtgcggcatcaactaccaggcgccgacagtggtgccgggtgccgacctcgccaaggtgcagcgcgcggtgtgcatgatctccaactccaccagcgtcgtcgaggtgttctcccgcatcaacagcaagttcgacctcatgtacgccaagcgcgcgttcgtgcactggtacgtcggcgagggcatggaggagggggagttctccgaggcacgcgaggacctggccgccctggagaaggactacgaggaggtcgccgcagagggcggcagtgatgacggtgacgaggaggaggaatactgatctgcttgcatgaatctgtttggctgtcgagccaggttgtggtgttgaaaaacctttgtttgtgtcctggcccccctgggtaatgtttgggtgtttccttccatcatcacttgctgaactgctctagtatttgcatttgtaattgaagtctgtcgctttaagcactcttggttctaaagatctctgtgcttttggggggtgtttttgcattgccccagattcc

SEQ ID NO: 8933 - DNA, 1187 bp, Zea mays
  Clone ID: 700805281_FLI
tgctcatctccctctgctcggcacctagccccagctcgcccgagctccctgcgccgacctcatcttccccatggcgcgtcaccttctagtcctctccttcccacggcacagcagcgcccctgcagctccccttctccagatccatggcacccaacaccttgagcgcccctgccgctgctcctccaccgggatctcctcctccactaggcgtccaggcttgtcccaccgtggctgcccctcctccatctcctccctccccaccaggttacccagattccatggccgccgccgccccagccatctccctggtggccgacctcgcccctgccccagccacagctcccccttcggccctgctgctgcaagcactcagcctctcccatggcacacgccccatctgcaacaccgtcgacccccgacgaggtcctttctcgccttgtcgttttagtactcggcgtcgattaagtagatgctaaccgtgtgtatattcgtgtgttcttgtgaggagaaatcccatgatttgggggaagacgaagtccaagcacaacccccgccaatcgctcgatgaaaaatctaaaccaaaaccctcagcgttttcaagggttccggagggattttatgttggtaaggctttgatgattgctgtacaaggatgatatggcctcccgcccaaagctgtctggtattcagaagcaggttttggcgctgtataggggattccttcggacagcacgccttaaggcccctgaagaacgccgcaggatcgagtctgttatcttggcagagttccgtgacaacgcaaggagtgttgaccttaggaactttgtacacatagagtacttgttgaggagagggaagaagcatcttgagcagctcaagaatcctgatattactggactcgctacccttgtagtaaagaaatgagcaagagaagaaggaagactagtcagacaaaatagaagacgagaagaactgatgtagccatgttcatgcttccatgtaatagttcattattccatacatatttctgtctatccagaatctactattgaaatacatatctagcatagcttgctcagctcctatctgttgtttcaacgttgatttaaaagaagagctggtagttgtgggcttttgaacaatagctggagtgatatgaaatattagtgatgtagttgtgggctttt

SEQ ID NO: 8934 - DNA, 1157 bp, Zea mays
  Clone ID: 700805353_FLI
gtcgaaaagacagatagttttagtgatcttgtcaacaggccactggaaggatttgatcctattgaactagacgaagctataattgaagagaacaggtcagattcagttgaagaaagctcaagcacattggacgtgcaagcatctgaacaacgcgatgatcagagagagagtctcactaataatgacgtgaaaactgatgcagcacatgaaacgggcaccgctatatctctatccaccagcaatggagagcacagtggcgtcaagggtgagaaatgtcagaaacatgagactgatggtcgagatacagatgatttcaacccaagagatgtggagcctggcacaaaagtaagcgaggacacaacggatgttaagagctcagctcatgtgcagacagaatctgtggttcaacaaaacggacctgatagcgcgaaagtgactactgcacagactgttattcgcaaccccttcgagtccagcttctctggacctagcattacgtcaggtcctctaacgccctctggtcacataccatattctggcaacatttctcttcgatcagagagcagcacaacgagtactcgatccttcgcgtttccagtactacagaacgagtggaacagcagccccgtgaagatggccaaggccgaccgcaggcgtcagaaggaagaccgaggctggggttacagaatcctttgctgtaaattctgaatggcgcttgcctcccctgcatcctttttgcctgtcgagttgagcccttcgtctctgtcatgcttgagccccgtggaggtccatgttaaattcattcatcaaatgtttctctcctctcctctcctcttgtctttctgctcccctgctgttcttatttatctctagcaggttaatggcttgtcggattcggtagtggcttgtaatttacagaacactatgaagagtgaggactcaagtcatagctttggtatagaatttgcggatacttgttcgagtattattccggatgaatgaacatccattcatgtggggtgaatggcggccatttgagccgtgagcccgtgatacaggcatatgcagtaaaatggtgcgcatacatgtaaatcactgaaactattacaagcaaataagcacatctgcgacctgatactaaagcagatgtatatact

SEQ ID NO: 8935 - DNA, 1252 bp, Zea mays
  Clone ID: 700805361_FLI
gcgcaaaaagcgcagaacgccagaggttttctccgcagtctagaaaatgtgccaaacccgtcgcttcgtcttcctctccttccggcttccggccccgctcctccccaaaatcccccaaaacctgacgagctggagggccgatccgcggctccccgccgcctgatccgagcagtctactcggcccagccggggatccaagcgggatggggtacttgagctccgtgatcggccaccccaccgatggatcctccgtcagcggcggcggcctcagccagaatggtagatttagctatggctatgcaagctcccctggtaaaagggcatccatggaagacttctatgagacaaaaattgattgtgttgatggtcagatagttggtctttttggagtttttgatggtcatggtggtgctaaggtagcagagtatgttaaagaaaacctgttcaacaatcttgttagtcatccaaagttcatcagtgatactaaagtcgctatagatgatgcttataaaagcaccgacagtgaattcttagaatctgacagtagtcaaaatcaatgcgggtcaactgcatcaactgctgtacttgttggtgatcgtctcttcgtcgcaaatgttggtgactctagggctatcatatgcagggaaggaaatgctattgctgtttcaaaggatcacaagcctgatcaaactgatgagcggcagcgtattgaagatgctggaggttttgtgatgtgggcaggaacatggcgcgttggtggtgtacttgctgtttcgcgtgcttttggtgacaaactcttaaagcaatatgtggttgtggatccggagatccgagaggaagttgttgatgacacactcgagtttcttatccttgcaagtgatgggctgtgggatgtggtctctaacgaggaagctgttgcgatgactagatccattaaggacccagaagaggctgcaaagatgctcttgcaagtggcgtacaagagggagagcagtgacaacataacttgcgtcgtcgtgcacttcttgcatgggcaaggtagcagcggatacgcttaaagcgtagcagtaaaattattttacgcagtggtgtgctctgatgtacatgcgtcgattgatttcccgatgttaaatggagaaacgtaactacgtaaggtaggaaacgtgtattatgatgggttgaactgggaaatgcgtgtaccctatactatatatatatactgtagtgtggtcgcggacgatgtttgggtctg

SEQ ID NO: 8936 - DNA, 418 bp, Zea mays
  Clone ID: 700805385_FLI
cgcgacatggacctgttcgagcacttcgccgccgtcgcccagcgcctcggcgtgtacaccgcccgggactacgcggacatcgtcgagttccttgtcaagcggtggaagctggagacactggagagcgggctctccggcgagggccgcagggccagggacttcgtctgcgggctcgcgccgaggatgcgccgggccgcggagcgcgccgaggacagggccaagaaggacgagcccaggatggtcaagttcagctggatctttgatagggaagccgttgtttaggcacttgttgctaactgtgatatgtgctcagatcatgtcgctagctgtcagtgtctttgtcacattgtgtttatgtgtttgaaatgccgtaagagtgtttttttcctgctattatcacaaaattctgcagaaatat

SEQ ID NO: 8937 - DNA, 861 bp, Zea mays
  Clone ID: 700805472_FLI
ggaattgacaccacatcaagattgctgtgcgcgacttaggtgcagagttaccatttccactgccatgtagtcaacagcctcttgggcgaaagacaggtatatcgggaactagggttgccttcggatggaattgcagatttgtagtgccgagttggaatgtcaggttcccagaaactttaggctgctagaagaactagaacgtggtgagaagggcattggtgatggaactgtgagctatgggatggacgatgctgatgacatatttatgcggtcctggacaggaactatcattggtcctcccaacactgttcacgagggacgaatctatcagttaaagctgttttgtgatacagattatccagataaaccaccgactgtccgattccagactcggatcaatatgacatgtgtgaaccaagaaactggattggttgaaccaagtctatttcctatgcttggaaagtgggaaagggaacatacgatggaggacattctgaccagcttaaaaagggagatgtcaactccacagaatcgcaggctgtaccaacctcatgaaggcaatgaagaccaaagagtagagcagaaaggggtgtctcttagatgtgtcatcatgtaatctatgtgcgttgcaatgtacagcattatcgaattgagcagcgagatgccgaggtgagagaccctctcaggaaatcatgtagttcgccttaatggtgccaccatcgcaataaaagcgtcgatgattgttaaaagtgcctgcacaccatgtaacgtgtaacccggttcgttcagattctgtgaaagacaactagttcagtgtctgtttgttaagggcttgctctaggcctgattattttctcgagg

SEQ ID NO: 8938 - DNA, 921 bp, Zea mays
  Clone ID: 700805505_FLI
caaggtctcaagtaagattggtgtcattggatccaccaacaatagcggcaaatggcttctttgggttggtggatccaaggtctcaagtaagattggtgtcattgagtccttgctggcgaaggtcgatatcctcatccttggtggtggtatgatctacacattttacaaggcacaaggatattctgttggaaaatctctcgtggaagaggataaacttgagctcgcaacttctcttattgagaaggcgaaggcaaagggggtttctcttttgcttcccactgatattgtagtagcggacaagtttgcagctgatgctgagagcaagattgtccctgccactgctatccctgatgactggatgggtcttgatgttggccctgatgccaccaaaacattcaacgaagcattggacaccaccaagactgttatttggaacggccccatgggagtgtttgagttcgagaagtttgcagctggcactgaggcgattgccaagaagctagctgagcttacaaccacgaagggtgtcactaccatcatcggcggcggcgactctgttgctgctgtcgagaaggctgggctggccgacaagatgagccacatttcgaccggcggcggtgcgagcttggaactcttggaaggcaagactctacctggtgtccttgccctcgatgacgcctagatccgctgctgctgctgctactcaggttctgccagctttgcgtgtcatcttgtttcggaccttggtgtagcactgcaaggctaaggtttactcctccgcacatggacttttggggataggcttgccaccgtgttttgctagatgagtcgtggaataagcttttacttcctcgctgctgtgggtgaagtgactggaattcggaaatttggaactaacaaaaccccccgtggatttgtatg

SEQ ID NO: 8939 - DNA, 1043 bp, Zea mays
  Clone ID: 700805614_FLI
cgtgatgtgccacttcagggtttctattaactctgtgtcaggcttgttgatggctgaaagaaaaaccagtgcatcactttcatcttcctcggaaccataaaccagcctgacacagagttaatagaaaccgtgatgtgccacttcagggagaagttcgaaaatttaccagagaaggttaacgggatagaagagcaacttcttcaagagttttccctggatgattcgtttcctcttggtgctccactattcatggagatgccacactcttgttcaatgtatgcagaaaaggatgaagaatgttttgacgaggacactgttccttctgagctagacgatgacgacatcatctttgagcatagtgggtctcaatctgacaggaaaacgtcaggttccatggcttcgtcagatgttctaactgtcaaccaactaatagaatctgttcatgagaccgcaaggcaagttgccaacgttccagttcccgccaaccctgtaccgtacgaccagatgaagagtcagtgcgaagccctggtcatggagaagcaacagaagatgtctgtcctcttgagcttgaagcattcgaggactgactcgcatggttcagccggtgtggatgggcttgaaacgaatgagtcttctctgctgtctgagcctgagttacagtcaacaaggaaggggcgcatgcgccgctgcgattcagcgtccagcgaatcagactgttcgttcaggctgccacctgctagcccatatgacaagttcctgaaggcggctggacggtagcctgatgcggttgcggcagcttggcgcttcagttttcaactctctcaagtctgcatgagagttcagtacaagtgattcatcggcaccctctcgttctcggagtccattctttcaagtgtatattatatttacatccctcgacaaggtgtataaagttctgttactgtttccttcagaataaaccgaagtgtataggcactagcggatgatcatgttcaagacggtatttgttcatttgttggtcgtgaaaagaaaacattttacac

SEQ ID NO: 8940 - DNA, 1616 bp, Zea mays
  Clone ID: 700805728_FLI
ctcatccaggaccttcgccttctcggatgcccctacaaggtcacccgctccgcactcaaggcccccggcaccccgcactcgtggccggtactgctctccgtactccactggctcaccctcctctgccactcccaaggagacgacctggatgccccgagtggcccatccgacgatctcttgctctacatcacccagtcgtactcccacttcttgtcgggggacgacgccgccgtcgaaaccgtcgacgaggagtacgcctccaaagcccggatgaccggtgaggcgtacgttgcaacggctcgtgccctggagaaggaggctgaggaactggagacccaggtgaataagctcatctcgggtccctcgcggcgggaagcactggagtcagagaaggaggccttcaatgctgatattcacaagttcgacgcagtggtgaatgcttggaaaactaagttcaatgaaagggaacaatcgttgggggatttggagaaagagttggaggccaaagtgtcggacacccagcgcgctgctgctgaaattcaggatctattgaaacaagtggatgctcagccggtgaatgtgaaggatgtggatagaatgcgtagggagatgcaggctattgaagatgacattgccaacgctgagaaggggaaaacagcactggaggataaggtctgggaacttgaagctaagctggttaccaagcttgaggagcttgagaggcatgctgagcagtgcaaccaggccctcaaaaagttgaaacctactgttgcttttcagtacatgatagattcaaaaggatcttctcctgctgagatgctaggtactggttacaaaacagtactaaaacctgcacttctggctcatgctgaggagaacaaaaggatctgtctctcaaatcttgaaaacttaaatgatctacagaagcagctgcaaggaaatgctaaggttctagaggaggaaaggaataatatttccagtctccaggaaaaaaatgacgaaatcgttgctcgtttgaatttactggatcgtgaaattataaatgatgactcaagattcacatctgaagctgcacaaatgaaagatgagttggagaaaaagaagaatagtttgatttctgctgaaaagcaggcagatgattttcttaagaaatcggagaagaggctccaagatgtaacacttaaagttgaagaagaaactcaggcagctgctaaggagctgctggagcttcttgattccatggctgaacataaagagttcatggaaacaacaattgctcagaggaggaaggacctctatgaaactgcagattatatagcatctgtggcatccaagacagtcatcacccaagtacccaaccctcctgaatcctgatacctgaattatgcagtgatcttttcgcatagaaagttgatcatagcaggcctgtggcagccttctctggcatgtaatataagtcaaagttgtcccacttgaagctctggtctttttgtccttggactttggtttgcgttctggtgaggtagtagttggtatgttcgggcttcaatcctagatgtcatgaaactgttgtaatttcattgcttcagtaatgaactttggattggtccgctgtg

SEQ ID NO: 8941 - DNA, 1752 bp, Zea mays
  Clone ID: 700805738_FLI
cagacccacaagcgccagcacgctcgagactgtgccgtgggagtgggaggttcctcaggtgctgagcagtcgccggcggcgaccgccggtgtcggagatgaaggagagaagcggctccagggcggcggtggacgagcgctacgcgcagtggaagtcgctcatccccgtcctctacgactggtttgccaaccacaacctcgtctggccatccctctcctgccggtgggggccacagtttgagaaagctacctacaagaatcgtcagcgcctgtacctatctgaacagacggatgggagtgtgcctaatactctggttatcgcaaattgtgaagttgtgaaacctagggttgcagctgctgaacatatctcacagttcaatgaggaagcacggtcaccttttgtaaagaagtacaaaactatagttcatcctggtgaggttaacagaatcagggaacttccacagaacagtaagatcatagccactcacactgacagtccagatgtacttatttgggatgttgaagcacaaccaaatagacatgctgtcctaggagcaagcgagtctcgccctgatctgatattaacaggacataaggaaaatgcggaatttgcgcttgccatgtgtccagcagaaccatatgtcctatcaggaggaaaggacaaatctgttgtcttgtggagcatccaagaccatatatctgcccttggggattcctcgtcttctcctggagcatctggcagcaagcagtctattaaaactgcaaatgaaaaggagagccctaaagttgatcctagaggtatatttcatggacatgacagcacggttgaagatgttcagttctgcccttccagtgcgcaggagttttgtagtgtgggtgatgatgcttgtcttattctgtgggatgctcgaactggcactgccccagctgttaaggttgagaaagctcacagtggagatgttcattgtgttgattggaatccccttgatgttaactatatcttaactgggtctgccgataactctgtccgaatgtgggatcgtcggaatctgggttcaggaggagctggttctccaattcacaaatttgaaggccataaagctgctgttctttgtgttcagtggtcacctgacagagcatctgtttttggaagttctgcagaagatggtttcttaaacgtgtgggatcatgagaaggtggggaagaagaaaaattctaatgtcccagccgggcttttctttcagcacgctggtcatagggataagattgtagacttccactggaattcgtcagatccttggacaattgtcagtgtctctgatgatggcgagagcactggtggaggtggaacactgcagatttggcgcatgagtgatttgatctaccgcccagaggatgaagttcttgcagagctggagaatttcaaggctcatttggccagctgtgcaccgaagaattgagtcatgtgggttacctgcggaatgcaatcctgtggaaactgagtaggtgatgtagtttcatggccataagtatgagccccagttgacattgaatctgtcctctgatgctcctagagctgtacccttgaggggcttgtgcttttgtgagcttgtgttaaacctgctgtacgagtaaactagtatgtccgcaaacgcgtcagagccggatgtctgtgggccagctattgggatactgccggatatcgtcaacaattgttccagattggtgtattggatctaatgagattgtcagc

SEQ ID NO: 8942 - DNA, 712 bp, Zea mays
  Clone ID: 700805836_FLI
gcctcaaaagggcagacagccaaatgccccaccacagcgtagcccctcctcactgactcgcctgcaaaaaccacttgcaaaccacacaaaccgaaaacgccagctcccctgcctccatttttagcaacttttcccttctgtcttcccatcacagtcacccttcttgcccccacgcagccgagcgtgcctacccctcctcgacccttctctggggccgccgttggacgctcatggagaggagtcgtccgggcgccgcgccgaaaccatcgccagaggaggaggtggcggcggagggccatgcgcatggtgacgatgtgacggggcaggaggaggaggaggaggcgacgccagtggtgctcaagaagggcccgtggacggcctcggaggatgccatgctcatggaccacgtccggcaccacggcgaggggaactggaacgcagtacagaggatgaccggcctgctgcgctgcggcaagagctgccgcctgcgctggaccaaccacctccgccccaacctcaagaagggctccttctcccccgacgaggagctcctcatcgcccagctccacgcgcagctcggcaacaagtgggcgcgcatggccgcgcacgtaagcaccctatcctttgccctggataacaaatttatttatggcgagtggcggcgacctgctgatgtgactgacgtttgcgagttcgttcctcgagcgaattc

SEQ ID NO: 8943 - DNA, 1060 bp, Zea mays
  Clone ID: 700805878_FLI
ctccttcgacctccgccgctcgccgccgtttcccgtccgcggcggcgcctcctcccctcccactcctactcgttgtcgatctcgtctcgggtaccatggcaagatcactctccaccgccctcatgaggggacttatgagatcgtcccgtgcatcgacatcagctgctgtgtcacgaccagctatccagcagtttatgaactattcatcaggtcttagtggcactcctaatgcaaatggggactcagtgacaacacgagtagctgctgatcacgacacccatcaagattttcagccaacaagtaaaagttcagatatgtctttcagtgacattgttgctcaggatgtgaaggagcaccctgttgtcatctatatgaagggttatcctgatgctcctaggtgtggtttcagtgcattagcagtgaaggtcctccagcaatatggtgtccccatcagtgctagagatattctttcagatctaaagctcaaagagagtgttaaagcatacagtaactggcctacgtttccacaaatatttatcaaaggagagttcgttgggggatctgatatcatactcaccatgcaccagaagggtgaactgaaggaactgcttggcgatattgcacaaaaagccgaacaaagtggttcttcatgaaacaagcatcagtatttgtgatgcaaacttcccggactggatgttccttctcagaagattttaggtgatcttgcattgttgccctgtggcttcggatttgaatacgttctctgttttgttctgttctgttcttgccagttgtgatggaagatccactcaaggccgaattgcaggagtaaccaaagttctagttctcgataaataaatgccaatgctcgacactattcttttatgcatctagctgcctgccttagcttaagcttgggtgctttaagttgcttttaaactgaacggtgctgttgaaacatgtaattagtatgtgacatgcttatacgctctatgttttgttcttttttgacatcaactctgtttgcagttctactcaaatagatgtactgctttgttcc

SEQ ID NO: 8944 - DNA, 217 bp, Zea mays
  Clone ID: 700805935_FLI
gcagtttgcggctaaccccgcaaccctcttacaactacaacaattgttgccctttgtccaacttgctttgacagaccgagcggcctcctaccaacaacacatcattggtggtgccctcttttagattgcttattagttgtaattcaataataaagttttttggatgatgtatgtggccaaccagaaataagaagttacatttccagattttaatgtg

SEQ ID NO: 8945 - DNA, 3066 bp, Zea mays
  Clone ID: 700805988_FLI
tagagagggccggggcgaagggggcaaagatgcgttcttgaggagcctgtgcaggggaggtccaatccagaggccgccattccttttcttttccccccaacctctgcaggctcttcagatccagcaatccggcttgtttcttttgctggttgatttatactctatagtggttctctacttagcatcaagtcttggcatggcaatggcctcgtagctcgcggctctctaataggaataattttactcaaaatgaagctatagcgtcatgctatcttaggttgtttggacagttccttaggatactgaaactgtcttagataatggagatgatgttcactcaaacatttctcccgatagatatacaattgtaattacaccagaactgtacttacaattaagaacaacatcagctgtaacattagtagtaagaaacagttcagatagtgtgaagaagttcatctgttggcctgctatttcagatactgtgtgtgttcctgaaacttcatggagacttccatatctccaccaggcacatcaaagcagtcagctgtccgcaaaccttctcctggaagctctcttaaggatctgtgccttgtttccaaacaagggtcaatagctgaagtagaatctgctttggccttgttgaaaaaaagtggtgggaacattgatggtagaaatgcatttggtcttagtgccctccaccttgcaacatggagaaatcatctacccattgtgaggcgactcctagatgctggcgctgatccagatgcaagggatggagaatctggctggagtagcctgcatagagcacttcattttggtcacctatgtattgctggtgttcttttacagtttggtgcttccctcgctttggaggacactaagggccgtacacctgttgaccttatctcctgtccagtatcacaggccaatggagattttccagatgcagttgcaacggaagtcttcagttggggaagtgggacaaattatcagctgggaactggcaacgcccacatacaaaaactaccatgcaaagtagaagctttgcatggatcatatatcaaaacagttgctgcatcaaagtttcacagtgtagcagttagttctaatggtgaactatacacatggggatttggtcgaggtggtcgtcttggtcatccagatattcacagtggacagacaactgctgtgattacccctcgccaggtgacagtaggattaggccgtaaacgagttaatgctgtggctgcagccaaacatcatactgtgattgctacagagctgggggaattgtttacctggggatcaaatagagagggtcagcttgggtacccttctgttgatacccaaccaacaccaaggcgtgttggttcgctcaagcaaaggataatttcagtagctgctgcaaacaagcactccgctgcagttgctgatactggcgaagtattcacctggggttgcaataaggagggccaactaggatatggcacttcaaactcagcatcaaactgtatcccaagaatggtggagtacttgaaaggaaaagtacttagaggtgtttctgcagcaaagtatcatacaatagtgttaggagctgatggagaggtgttcacttggggccatcgccttgtcaccccacggcgtgtcgtagtagctcgatgccttaagaagggtggaaatacaaatctgaagtttcatcgtatggaacgacttcaagtgatttcagtggctgctggaacaacgcacaatactgctttaacagctgatggtgctcttttctactgggtttcatcagatcctgatctaaaatgccagcagatattttcaatgtgtggaaggaatattgtgaacatctcggctggaaagtactggaccgctgtggctacatcaactggtgatgttttcatgtgggatgcaaagaaacgtaaggacgaaacgccaattttcactcgggtgcatggtgttaagcgagcaacatttgtttgtgttggtgaaacgcacatgcttgtgctctcaagtatataccatcctgagtatccacccaagcctaaaagccaaggcttaaaatccatgttagaatggaacggtggaacagaagagctgggtgaagatatcctgtttgatgatgttcagcccaacagtggtttatcaggaagcagtggtgaaatgagcaaaggtgtgcctagcttgaaaagcctctgtgagaaggttgcagttgagtatttattggagccaaaaaactcaatacagcttcttgaaattgctgattccttggaagctaaggagctcaagaagcattgtgaggatttagctattcgcaacctcgattacattttcacagtgggagcttcttcaattatgaatgcttcttctgaaattcttgtgaacttagagaaattgctagatgagaaatcctcagagccttggagtcagcaccgtcttcccacaatgacagctacctatcctgctgtcattgacagtgatgtagaggaagatgaagcaagagaattccccaagacccgtaaatgtgggaaatctgcatcaaggccatctgcgatgtctagtgatgacagcttccttcagaaagactgcaccgctgaacaagccgtctctaagcagatcagagcacttcgcaagaagctgcaacagattgagattctcgaggctaaacaacttgcaggtcatcagcttgacagtcagcaggtagcgaagctcgagtctagggctgcccttgaaggtgaacttgctgaacttggcattccctcagagatatactcaacttcctctgcttgtccagcagaaggtaggacaaacagaaaacctgaggtttctaagaaacagaagagaaagaacaagcagtcaacacagaccccgtcagtgaaaaatgagcctgggcaacaaatccccattacggaacttcaagttctacaagtcaatgtctctgctgaaaaggaggcgtatgccgctgatccaattaaacctatggaggctgccgcgttcagcaacacaaaggacaccgcttctccaccggagaagaaaccttcccaaccaactccatcaaag

SEQ ID NO: 8946 - DNA, 279 bp, Zea mays
  Clone ID: 700806037_FLI
gacattctcagcgtatcctccccttggtaggtttgctgtccgtgacatgaggcagacggttgctgttggagttatcaagagtgtggagaagaaggacccaaccggcgccaaggtgaccaaggctgctgccaagaagaaatgatgcgatcctgcgcctgctttagcaatacctagttttcatcattacaagttttgtttgtggtcgttgctgttattgtgtgaactgttgagctctgttagcctgtgcacttttatctatttatttggtaccttcttgct

SEQ ID NO: 8947 - DNA, 944 bp, Zea mays
  Clone ID: 700806127_FLI
agaaacacaccaagcgaagcgcactagcaacaacctaacaacaatggctaccaagatattatccctccttgcgcttcttgcgctttttgcgagcgcaacaaatgcgtccattattccacaatgctcacttgctcctagttccattattccacagttcctcccaccagttacttcaatggccttcgaacacccagctgtgcaagcctataggctacaacaagcgattgcggcgagcgtcttacaacaaccaattgcccaattgcaacaacaatccttggcacatctaacaatacaaaccatcgcaacgcaacagcaacaacagttcctaccagcactgagccacctagccatggtgaaccctgtcgcctacttgcaacagcagctgcttgcatccaacccacttgctctagcaaacgtagttgcaaaccagcaacaacaacaactgcaacagtttctgccagcgcttagtcaactagccatggtgaaccctgccgcctacctacaacagcaacaactgctttcatctagcccgctcgctgtggccaatgcacctacatacctgcaacaagaattgttgcaacagattgtaccagctctaactcagctagctgtggcaaaccctgttgcctacttgcaacagctgcttccattcaaccaactaactatgtcgaactctgttgcgtacctacaacagcgacaacagttacttaatccattggcagtggctaacccattggtcgctgccttcctacagcagcaacaattgctgccatacaaccggttctctttgatgaatcctgtcttgtcgaggcagcaacccatcgttggaggtgccatcttttagattacatatgagatgtactcgataatggtgccctcataccggcatgtgtttcctagaaataatcaatatattggttgagatttatctcgatatatttctg

SEQ ID NO: 8948 - DNA, 885 bp, Zea mays
  Clone ID: 700806267_FLI
cagaccattagctttatctactccagagcgcagaagaacccgatcgacaccatgagggtgttgctcgttgccctcgctctcctggctctcgctgcgagcgccacctccacgcatacaagcggcggctgcggctgccagccaccgccgccggttcatctaccgccgccggtgcatctgccacctccggttcacctgccacctccggtgcatctcccaccgccggtccacctgccgccgccggtccacctgccaccgccggtccatgtgccgccgccggttcatctgccgccgccaccatgccactaccctactcaaccgccccggcctcagcctcatccccagccacacccatgcccgtgccaacagccgcatccaagcccgtgccagctgcagggaacctgcggcgttggcagcaccccgatcctgggccagtgcgtcgagtttctgaggcatcagtgcagcccgacggcgacgccctactgctcgcctcagtgccagtcgttgcggcagcagtgttgccagcagctcaggcaggtggagccgcagcaccggtaccaggcgatcttcggcttggtcctccagtccatcctgcagcagcagccgcaaagcggccaggtcgcggggctgttggcggcgcagatagcgcagcaactgacggcgatgtgcggcctgcagcagccgactccatgcccctacgctgctgccggcggtgtcccccactgaagaaactatgtgctgtagtatagccgctggctagctagctagttgagtcatttagcggcgatgattgagtaataatgtgtcacgcatcaccatgggtggcagtgtcagtgtgagcaatgacctgaatgaacaattgaaatgaaaagaaaaaagtattgttcc

SEQ ID NO: 8949 - DNA, 948 bp, Zea mays
  Clone ID: 700806288_FLI
ggaggagatcattggaaggggagaaaagggaatggagcatgatgaagaggaggagctgccttcaccttcttcctccttgggctacctgatgctgtgtaggatctgccacgaggaagaggacggagggcgtgcgaccatggagtccccttgtggatgttccggctctctcaagtacgctcacaggcgatgtgtgcagagatggtgtgatgagaaggggaccgccatctgtgagatttgccttcagaatttcgagccagggtacacaatgcctccaaagaaaactccggtggttgaaacggcggtcacgatcagtgaacacgaggacatgcaatctttggaatctcgggagggcttgagtggcagtgcaggctacaccaggtgctcctacaccgcagatcaatgcgccacatggtgccggtcgctggcgatcacgttcaccattatgctgctggcatggcatctggttgcagtggtgacggttgaagcagcagctcactgcacgttcagtctcctggcaatgtacttgcttcgcgctgctggtattctgctgccgctgtgcgttgtcatgcgactgattcgcatcgtccagagtggtcaggagcagcagtatgggctgcagctgctggagcaccaaagaagaaatgcatcaactatatgaattatatgcgtgtccaggaggaggaccagcgagtaattaatattcattaagccaatgaatctcaatgcaagattgcacaaatgtgcattaagtattaccatggaaactttcaaacagaacatcatttgtaaacatttagggggtgtttgggagtgaagttttttcaaagttttggaagaatactgcagtattctcaaaaactgtagtattatataccaaaaggtgtttggcaagccagctaaaatctctgttttcaaaactaaagtattacaaatactgcagctcttttg

SEQ ID NO: 8950 - DNA, 509 bp, Zea mays
  Clone ID: 700806358_FLI
taaatggcaagaagcatcagagagcactgggcatgtctatgcgtgttgaaagggcatcacttgaacagctatgcaggcgcttattgatcttcacgtggaggacaatgcaaccgcgacgatacacaaggtataagaagttcaatcaacattttccctccatgagtgaatgcagatcgatcaaattgagaagatgactacttcaattgaagatgatcggaagataagtgtttgtgatatttttttattgccactttttgttcctaaatcaatcatttgctgtggttccagaaagtaactgaggagtgataaaacgacaattttgagcttcaacgctttgctaggttggcaaaaaacttaaagcaacagagtgttcaagctaatgttttggtgctagaaaaggctttaatgcatcaggcttgtgttcctgtgttggataatgcttagagaagtttagcagtgataatgcttcactattcgaaaatcagtaaaaagtttagaccatttatgtg

SEQ ID NO: 8951 - DNA, 1890 bp, Zea mays
  Clone ID: 700806549_FLI
gttgccactgctgccccaccatctgaggaggaattgaacccgtacactatatttccccaaccagaggaaaacttcaaggttcatacagaaatatttttcagtgatgggaacatatggagagcgcataacacaaaggaaattttagaaaaacatcttaaagcaactggaggaaaagtgatgacccgttttcaccagaacctaatggatatcttcatattggtcatgccaaggctatgtttattgattttggtctggctaaggagcgaaatggccattgctaccttagatttgatgacacaaatccagaagctgaaaagaaagaatacatagatcacattcaggaaatcgtccattggatgggatgggagccctacaaagtaacatacacgagtgactatttccaagctttgtatgaacatgccgttgagttaatacagaaagggctagcatatgtggatcaccagactgcagaagaaatcaaggaatacagggaaaagaagatggatagtccatggaggggtaggccaattgaagagtctctgaaattatttgaagacatgaggcgtgggttgattgcagagggtgcagcaactctccgtatgaagcaggatatgcaaaatgagaacaaaaatatgtctgacttaatagcatatagaataaaattcaccccccatccacatgctggcgacaagtggtgtgtctatccgagctatgactacgctcattgcatggtggattctcttgaaaacatcacacattcgctgtgcacacttgagtttgacatacgtcgcccttcatactactggctacttgttgccttgggcctttatcaaccatatgtgtgggaatattcgaggctaaacatatcaaatactgtgatgtctaaaagaaagttgaatcgacttgtgacagagaagtgggtagatgggtgggatgatccccgcttgttgacactggctggtctccggcgacggggagtatcatcaactgcaataaattcctttattcgtggaatcgggataacgagaagtgacaatagcttaattcgtgttgatcgtctagaatatcacatcagggaggagcttaacaaaacagcccctcgaaccatggttgttttgcgacctctaaaggtggtaataactaacttggaagaaggaaaagtactagaccttgatggcaaaatgtggcctgatgcttctgatactgatgcttcctcccactataaggttccgttctcaagaactgtctacattgagaaaactgattttcgcctaaaggactcaaaagactactatgggctagcccctggtaaatctgtcatgctaaggtatgcgttccccataaaatgcacagatgttatctctggtgatagtcctgatgatattgttgaaattcgagctgaatatgatcctttgaagacttctaaactgaagggtgttcttcactggattgctgagccagcacctggtgtagagccattgaaggtggaagtaagattattcgagaaattgttcatgtcagagaatcctgctgaattggaagattggcttggcgatcttaacccacactcgaaagaggtgataaaggatgcttatgctgtaccatcacttgccactgcggttctgggtgacaagttccagtttgagcggcttggttacttcgccgtggatactgactccacacctgagaaactcgtgttcaacagaactgttaccctccgtgattcgttcgggaaagctggacccaagtgactgttcagtgtaatttagggagggcgctggttttgatcggttgcagaggcgcacctgaactatacagtttgtgaagaaaatggtcgtctaatacagaacagtttaaaggccttactctttataaaatttagggtttttt

SEQ ID NO: 8952 - DNA, 516 bp, Zea mays
  Clone ID: 700806560_FLI
gttcgatcaaatgtcgaaccaggaatacgcgagggatacgcgaggtcgctcatcactcgctttggttcagcttgctggttcgttgttgttcatctccgtgtcgggtgtaccacaatattgtagatctatccttgatgcttgtcgtcgatccgtcgcctcgcctcgatgctggctcctacatgacgtctcgaacttgtgtttacactaaaaatccgagaagattaggcgtagaaggaaaaaaatcagtacgcagccggaaaattcttgatgtggatcgagaaggcagtgaagtccgtgtggtgctcaccacgtgctcgacgtaatggcgaaattggaaatcgtagttgtgctcgtggctgtcaagacggattaaattattagtgagctgtcgtcgctctcgctcttcgttttaatatttctcatcagtttagtatacttgcggtgttaatgtggaccgatgatgtgcgcgtaaatcgcactagtgacactacaagaaactgataaatgttcgtggat

SEQ ID NO: 8953 - DNA, 1195 bp, Zea mays
  Clone ID: 700806773_FLI
gtttagactcagcacacagcattcattcagctagcgagcgagagagaggggaacaaaaaggaggggcgaggaggacagggagccgagcgcaagagctgaggcttcgccgcgaaaccccagacctcgcgccgccccttcccctccgcggcgtcgtcctcgcacgctctccgatccaagatgtataagctggggagaggaaaccgcgacaaggtgcagcagttcatgaccattaccggcgccagtgagaaggttgcccttcaggcactgaaagctagtgattggcacttggaaggagcttttgacttcttctatagccaacctcaggtttctgtggtcaatactcggcatcttgaagatattttcaacagatataaagaacctgatgctgatatgataatggtggaaggaatatctcaattttgcaatgatctgcaggttgatcctcaggatattgtcatgcttgtcatatcatggcacatgaaagccgccacaatgtgtgaatttactcgtcaggaattcattggtggactgcagtcaattggggtagattcaatcgagaagtttcgtggaaaattaccatcattacgagctgagctaaaagatgacaataaattccgtgatatatacaactttgcattcacttgggcaagggaaaagggtcaaaagtctctctcactggagacttctattggaatgtggcagttgctatttgctgaaaggaactggcctcttctggatcattggtgtcagtttttacaggtcagacacaataaagccatatctagagacacatggtcccagctgctggaatttgtgaagacgaccgatccacagttatccaactacgacgacgaaggtgcctggccctacctcatagacgaatttgtggaatatctgactgagaacggactcgtccagcgtaaaagatgaacaacggggagatgcatctccaaacaatggttgggctgtacaaacatgatttatctcggtcagctcgacgcccagggcctgatattggcactcctgctcaattcattcaccaaactgttggcatatcattgaatttgcttataaacgtggggaaacataacttgcctgggaagtggtggctgtcagcctgcgatcgtgaactgtaccttatcgaaaatgcaacggagtttgggactctactatatgatttgtttcagtttttctt

SEQ ID NO: 8954 - DNA, 941 bp, Zea mays
  Clone ID: 700806970_FLI
gcattatcccagggaataccattttttcatgctggtgatgagatactacgatctaagtcgcttgatcgagattcatatgactctggtgattggtttaacaagattgattttacctatgaaacaaacaattggggtgttgggcttccaccaagagaaaagaacgaagggagctggcctttgatgaagccaagattggagaacccgtcgttcaaacctgcaaaacatgacattattgctgccttagacaaatttattgatatcctcaagatcagatactcatcacctctctttcgcctaactacagcaagtgatattcaaagggttcactttcacaacacagggccctccttggttccaggagttattgtcatgagcatcgaagatgcacgaaatgataggcatgatatggcccagatagatgaaacattctcttgtgtcgttacagtcttcaatgtatgtccgtacgaagtgtctatagaaatccctgatcttgcatcactgcggcttcagttgcatccagtgcaggtgaattcatcggatgcgttagccaggcagtctgcgtacgacaccgccacaggtcgattcaccgtgccgaaaaggacagcagcagtgttcgtggaacccaggtgctgatggatgcctttcgctagcgagcaagtgcattcggcatccaagtcgaagcaaacgaatgaaataagagaaggccatcgaataaaacgaagtatataaatagattgaataagacgttgcccaagttgccaaggcacgctttgccatatgtatgcgttgaaaaataaataaataaataaataaatgatgttatagaggtacaaaagcattggaacatttctttatagaggtgaaccaccctattttccagtttccatgtgtgaattgtgattagcatatgtatggaataataatataaattaattttatgc

SEQ ID NO: 8955 - DNA, 596 bp, Zea mays
  Clone ID: 700807059_FLI
ccatccagaatccagattagattatttcagagatgctacgccacgttacaataatgcactatttcagatgcttacacacgtttcccttgctgtccaggcggcgacagagggttcagccggagcatctggacggtgaaggagtacgtcgccggcggcgaatcgccgcacatgaccttctactaccgcagcttcgacggagagcaaggcctgccggggaacgtggacgcgtacgtgacgtaccgcgtgtcgggcgcctacacgctgggcgtgcacatgaacgcgacggcgctggacagggcgacgccggtgggcctgctgctgcacgtgtactggaacctgggcggggagggcagcggcgacgtgctgggccacacgctccggatccgcgcgtcgcggcacgccgtgctggacgacgagctcctgccgtcgtcggggcgcgtggagcccgtggccggcacgcccctggacttccgcgcgcccgcggcgatcggctcgcgcatccgccgggtcgtcgtcatggggggccgcgccgtcgggtacgacaccaactacgtcgtcgacggcgaagggatgcggccggtggcgcaggcccggga

SEQ ID NO: 8956 - DNA, 1250 bp, Zea mays
  Clone ID: 700807107_FLI
tatcaacgacgatccacgagtagccctgaacacttactcatggacaaagatggctagcctcctcttggtcgactcgccagcaggtgtgggctactcgtacgctgatcatgaagatgactacaccacagatgacacaagcagggtagcggacctgtatgactttctgtcaaagtggttcgctgaatacgcagaatttctgtcgaatcctttctacgtagctggatgctcgtacagtggagtgatagtacctgtacttgcacacgaaattataaagagaaatgaagaatctggtggggtcaagatcaacttcaagggatattcattatgtaatcccgctattgatgttgacatagagaacaatgcacatgttccatatgcatttcgaatgggtttgatttcagatgaattgtttcagagtttagttactacatgtaatggaaagtattggaataactccaatccatcatgccaagagaacatggagcaattttatacccaaatcaaaggtattaacatggagcatattctatgcccgccgtgtcgatacaagatggggataaccaatcaattcattgaatatgattctggtcaaatgtttgagagcctttcaaaaacctccaagcatggtttagaatgcaatgatcaagagttggcccttgagaaactctttgatacaagatcaggtagagaaaaactgcatgccaaaaaggttgaagtatcaggaccatggaagaggtgccccaagcgtgttctgtacacgagggatattctaacattgatagagtatcacttgaacataacatccaaaggatacagagtgtttatttacagtggagaccattccttgcttgttccttttacttcaactttggagtggctaaagaaactaaactacaaggaaatcgagaaatggcacccttggtacgtggagaatcagattgctgggtactcaattaggtacgagaacaatatattgtttgcgacaataaagggggctggccacgttccatcggactatctgccattcgaagtatttgctgcctatcaaaggtggatagacggagctacttctctctgatagcgcttgtcgtactcttgtgctgcaaaatctttgcatgataattaataaatccgaatagagtaccgaggccaactgggagatcacctctgttgttaacattgaaaaccaatgtaagagtggttaatggctactccttctattctagattattacaagtcatttcaacttc

SEQ ID NO: 8957 - DNA, 949 bp, Zea mays
  Clone ID: 700807171_FLI
ctgaatcctccgcaactcgccgccgccgggaccgaccgacccgatcctatcgatcgaggatgtcgtacgcctacctcttcaagtacatcatcatcggcgacacaggcgtggggaagtcgtgcctgctgctgcagttcacggacaagcgcttccagcccgtgcacgacctcaccatcggcgtcgaattcggcgcccgcatgatcaccattgaaaataagcccatcaagctccagatttgggacacggctggccaagaatcattcagatctattactagatcatactacagaggcgctgctggtgcccttttggtttatgatattactaggagggagaccttcaaccatctcgcaagttggttagaagatgcaaggcagcatgcaaatgctaacatgactgtgatgctgattggaaacaagtgtgatctttctcatagacgtgctgtcagctatgaggaaggtgaacagtttgccaaggagcatggtctggtctttatggaggcatctgctaaaactgcacaaaacgttgaggaggcattcattaagaccgctggtacaatatacaagaaaatccaagatggcatatttgatgtatcaaatgagtccaacgggatcaaagttggctacgctgttcccaactcatctggaggtggtgctggctcgtcctctcaggctggtggctgctgcagttgagtggtggcagcaagtcatacaaatgcacaaggttctccctgcagtatcttgatgtttgcctatagctggccccggatgattcgttctttcagccatcatgtttcaatccataaacaaatcatcttcagtgtttagctgtcctttatacttgtgcaattcacgattagtaccctatgtgagtatgtgtcttgtgtaaccaaattgaaatcagttttatggtattcatttgttcaacatgtatatatgcttctctggct

SEQ ID NO: 8958 - DNA, 776 bp, Zea mays
  Clone ID: 700807182_FLI
tggacgtcagcctagcaattagctcatcgactccagattggagaactcgacaccatgaaggtgctgatcgttgcccttgctctcctggcgctcgctgcgagcgccgcctccagtacaagcggcggctgtggctgccagacaccaccgtttcatctaccgcctccgttctatatgccgcctccgttctatctgccgccgcagcagcagccgcagccatggcaataccccactcaaccaccgcagctaagcccgtgccagcagttcggatcctgcggcgtcggcagcgtcggcagcccgttcctgggccagtgcgtcgagttcctgaggcaccagtgcagcccggcggcgacgccctacggctcgccacagtgccaggcgctgcagcagcagtgctgccaccagatcaggcaggtggagccgctgcaccggtaccaggcgacatacggtgtggtcctgcagtccttcctgcagcagcagccgcagggcgagctcgcggcgctgatggcggcccaggtagcgcagcagctgacggcgatgtgcggcctgcagctgcagcagccaggtccctgcccttgcaacgcagctgccggcggtgtctactactgaggaaactatgtactgtagtaataatgtaatggagccgctgactagctacctagctcgctagtttactcatttagcggcgatgagtaacgtagtgtcacccatcaccatgggtggcagtgtgagcaatgacctgaatgaaccattgaaatggaaaggaataatatataagg

SEQ ID NO: 8959 - DNA, 949 bp, Zea mays; identical to SEQ ID NO: 8957
  Clone ID: 700807354_FLI

SEQ ID NO: 8960 - DNA, 1857 bp, Zea mays
  Clone ID: 700807442_FLI
aacgatcagcaccttcatggtgtcgagttctccaatctggagtcgatgagctaattgctaggctgacgtccagtggtggtggtgccgccgctaatcctgttcctaataccaacagcccaccacctacaatggaggagcatgcaattactgaccgtgagcttccgattgagggtcttaatcaaccactgtcagattttggaaatgatccggagttgttttctgaagcacagcctgtttcttcccatggtcaaggtcagggttggctcagtgaggggggtgacaaagctgaggtcgtggatgcttccattagcaatgatgttgtggtagtagcagagaacacctgcactgatatctctcttggggatattgagcagtttctcatgcaaatatctgatgatcagcaaaacgatgaattgttctcagatttatcaacaccacttccaaaactgcagttccagtgcgatgatcgtcaggtttggcttgatgccgaaaggggacatgaagtttatgctgcggatcctactgccagcagtggtgctgttgtaactgcagaatgcactgtcacagaacttccacttggagatcttgaagggcttctgctgcaaatagccaatgaccagcacatggtcgaatcccaatcagatctttctgcaccaactccacatcataacttcaatcaggctgacattggggatttacatgaatctcatggtgctcgggttggtaatctttcttgtatagttcaggaaagcacattttgtgaaccacggactgagccaagtgatcaatttccacagtctaatgtaaccaatttgccatttagcggagaagcaaattcttctgaagggaccagtgtggcacattctgtgtcaggtcagaatgcaaattgtatgacaactgagtacatgatgtctgcaacaaatgggatgtttgacaatttggaatactctgatgcttcttcgtttctacctgggtcatttgacatagttggattgggagctgaaaatcaatattttgataccgataacagtggaattcaaaaccagggatatcaaaatacaaccgaagtaaggacatataatcaggctgctcttactgtgcggagccatatgaagcatgatcatgtagtcttatcctcgcatgcatcaggcactctgaatatccatgcggcaaatgagctacataaccagagctccacatcttcacaatcatggttcaatgcggctctatcagccttgttggactctgtacctagtagtccagcattagctgctgaaatcgaaaacactgttatcaacagaacactccagcgcatctctagcttccgaccacagcaaactgcaggtgaagaaaacacttttatcaacagaacacttcagcacatctctagcttcaggtcacagcaagcaacaggggaagaaccaggcacccctagtattcaggttaccagaggtggcaggctgatgttcatatctctactggttatacttgcttctgttatatggacctttacttcaggctccgccctcaacttttgcaagggtttatggaaatcctcttctacgtgacagattaagtgggaacctggtgaccttgccctctgtaaattttttggtcctcggtaccatttatggtttgaatatcctttcgctttcaaaagggtgaagaggtagaaacattttgagggtggtaatatgattataggttgtagagcctatttaaaacggtaaaacgcaaggggaaaaagcatatctgatggtaatatttgaaactaatgggttactgttctcatttgtattttgacagatatatgtactgaatgtaattaacctattaatatagcttcagtttctgtgc

SEQ ID NO: 8961 - DNA, 1135 bp, Glycine max
  Clone ID: 700807532_FLI
acttcttggttgttgcagcagaggccccgagagaatcctagtttatgaatatatggcaaatagcagccttgacaaattcttatttggttccaaaaaaggttccctcaattggaaacaacgttatgatataattttgggcacagcaaggggactagcatatctacatgaggagttccatgtgtccatcattcatagagatataaagaccggtaatatccttctagatgattatctccagcccaaaattgcagattttgggttggcaaggcttttgccaagggatcgttcacatctcagcacaaaatttgctggaacactgggatacacagcacctgaatatgcaatgcaaggtcaattatcagagaaagccgatacctacagttatggtattgtggtcctagaaatcttaagtggtcaaaagagtaccaatgtaaaggttgatgacgagggtcgcgagtaccttcttcaacgagcatggaaactgtatgagagaggcatgcagttggagcttgtggacaaggacatagaccccaatgaatatgatgcagaagaagcgaagaaaatcattgaaattgctttattatgcactcaagcatcagctgcagccaggccaacaatgtctgaattaatagttctactcaaaagcaagagcttagtggagcaccttcgaccaactatgccggtgtttgttgaaacgaatatgatgaatcaggaaggtggcagctctcctggtacatctaatgctactatctccatttccgttctatcggccagatgattattggatcaatgtggtaaagggtcttgatgaactgaatcaataagcaacagaataaaatggataaagattgcttttgattccagttgtttaattgtcaactgtttaagaatagctatgttgcaaagtagagactactgtgtggtgttgttgatttattagtagagtataaaattaaggatgttttgtcaatgtgtgatgctacatattttctactttgatagtttcctgttcaaaatcacgcaagtataagtgcatgcaatttcaaattccgtgttgtatatatgttaagctactatatgtatgtgatctgttggcacgacttgtgccttttaataaaatagttctttgaattcc

SEQ ID NO: 8962 - DNA, 829 bp, Glycine max
  Clone ID: 700807549_FLI
atataataaaatctatctgcaatattatttttctgagtttgtgtctagttagtgtctgggtcctggtcctgccaattgtgtcaattaattgtattgaatcataaaagatggcttcctcaagtggaacatcttcagggtcatctctgcttcagaactctggttctgaggaggatttgcaggcggtgatggatcagagaaagaggaagagaatgatatcaaaccgcgaatctgcacggcgatctcgcatgaggaagcagaagcacttggacgatcttgtttcccaagtggctcagctcagaaaagagaaccaacaaatactcacaagcgtcaacatcaccacgcaacagtacctgagcgttgaggctgagaactcggtgcttagggctcaggtgggtgagcttagtcacaggttagagtctctgaatgagatcgttgacgtgttgaatgccaccactgtggcgggttttggagcagcagcaacatcgagcaccttcgttgagccaattaataataatagcttcttcaacccgttgaatatggggtatctgaaccaccctattatggcttctgcggatatattgcagtattgagatccatggtctctgagtctgagatttgatgaggatttcttcttcttcttctaggtttgagtctgttgagaaattgtaatcactaccatatggtgataaggaataataataatgaatgtgtatcgtaaaacggatgggattgttgggtgctggttctgtaaatgtggcatgggccattactgtaatttgtcaccctcctttcctatattattataataataatattgacctacttctct

SEQ ID NO: 8963 - DNA, 1384 bp, Glycine max
  Clone ID: 700807584_FLI
ctcctggagttctgcaaaaggagaaggaccacgttgagggttttgctcctgaggttgcttgggtgacaaagtctggggaatccgaattagaaattcctatagctattcgtcctactagtgaaacagtgatgtatccctactactctaagtggataaggggacatcgtgacttgcctttgaaacttaatcagtggtgcaatgttgtaagatgggagttcagcaaccccactccattcatcaggagtcgcgagtttctttggcaagaagggcacactgcttttgcaacaaaggatgaagcagatgcagaggttcttgagattctggaattatataggcgtatatacgaagagtatttggcagttcctgtcataaagggtaagaaaagtgagcttgagaagtttgctggtggactctacactaccagtgttgaggcatttattccaaacactggtcgtggtatccaaggtgcaacttctcattgtttgggccaaaattttgctaaaatgtttgagataaactttgaaaatgaaaagggagagaaagcaatggtctggcagaattcatgggcctatagtactcgaactattggggtcatggtgatggttcatggtgatgacaagggattggtactacctcctaaagtagcatcagtacaagttattgtgattcctgtgccttacaaagatgccgatactcaaggaatctttgatgcctgttctgcaactgtgaatacattgaatgaagcaggtattcgcgctgagtcagattctagagataattattctcctggatggaagtattccaactgggaaatgaaaggggttcctctaagaattgaaattgggccaaaggatttagcaaataagcaggttcgcgctgttcgacgtgataatggtgcaaagatagacattgctagtgctgatttggttgtggaaataaaaaagttgctcgatactattcaacagaacctgtttgatgttgcaaaacaaaaacgagatgaatgcattcagatcatacacacttgggatgaatttgtgcaagctttgaaccaaagaaaaatgatcttagctccttggtgtgacgaggaggaggttgaggctgatgtcaaagcgaggacaaagggtgagatgggagcagctaagactctttgcagtccctttgatcagccagaactcccagaaggcaccaagtgctttgcatcaggaaagcctgcaacaaagtggacatactggggaagaagttactaggctactggctgttgattgtggtattttctggaattaatttggtatttaatggtaccttgtacgaatttgtggatcacacagatattagttttcttctcttgggaatatttttcaactgatagttttactttgatttt

SEQ ID NO: 8964 - DNA, 1894 bp, Glycine max
  Clone ID: 700807591_FLI
cattggtgctggctctgatgagattgagatctcacctcattctcagcctttggttggtgcatcttcctacatcaattgcaataacaacagcaccaacacatcatgttatagtacccctttgagttcttctccaaaggtgaacatgaacaagatccccacaatggtgaagcacttggtgaaagagggcatgcccctaagtttggggacatcaacgtccttgaattccaccgtggcggaattctcagctgatcctggctttgctgagagggctgcaaagctttcttgctttggaagtaggagtttcaatggcaggaccacccaattgtgcctcaacattgctgaattggctcagagatcttctccattggtggaaaatgggaagaagcagctccctagagtctcaagtagtccatcactcaaagtgcttggatctcaaatgggtactcaggagaacaagaattctccattgcaagacctaatggaagtggccaattctcaagaggagtccgcaatctctgaacaaacaccaaatggagacactggggagaaaccttccccttatgtgaattctaggaaaagaaaaggtccatccaaaggaaaagccaaagaaacttcaacctctaccaacccccctatggctgctgaagctagcgatgactcgaatgcaaagcgcagcaagcctaacgaaggtgaggggaatgaaaatggccaagtgaaggcagaggaagagtccaaaggaggtaataatagtaatgcaaatgatgagaaacagaacaagagtaactcaaaacctcctgagcctccaaaggattacattcatgttagagcaagaagaggtcaagccactgatagtcatagtcttgcagaaagagttcggagggagaaaatcagtgaaagaatgaagcttctccaagatcttgtcccaggttgcaacaaggtcacgggtaaagcactaatgcttgatgaaattataaactatgttcagtcattgcagcgccaagttgagtttctgtctatgaagttggcttctgttaacaccaggctggattttagtattgagagtctaatctcaaaagatatatttcaatcaaataattctttggcacagccaatattcccaatagattcctcggcgccacccttttatgggcaacaaactcagccaaacccagcaatccacaataacattcctaatggaactatgacccacaactcagtggacccattagatactggtatgtggattgctgggtttggcatgcatttaccacacctaaatggttttaatgaaggtggctttcagtatccaataacattctctgaagatgacctccacaccattgttcagatgggatttggccaaactgcaaataggaaaacaccaatacaatctcagagtttcaatggctcaaatcaagaacccctatgaaaatcaagctctgattcaccattcattacgcctgaattgaagctcggaggaataggaagactactgctgtacacaacaaaaagaagagatttaatttgaaccaccccttgaattattaagccattattatcactaggtctaatagaaccctcttttgtccttatgtatgttagccattttcttttcttacccttttcatgattttaatttttaatcatcaggggcagttcttttcattattttttttacaacctattcactgtaaaatctttaggaccgattctgtattctctttggtgcaaattcttattattacggcaccaattgtaagatatagtgcttattaaaggagtttttctactacccagccattatgattatccctcctcactttgtctattattgtacgctttatataattcatacatcacatcaacccacaaagatttttcgtgggactttatt

SEQ ID NO: 8965 - DNA, 1930 bp, Glycine max
  Clone ID: 700807611_FLI
ggggagtactagccttcttcttcgtcgcttctctcttcattgcctgcttcttctacttggattacaagggcttccgctctagaggcaccactatcattgacttggatttttcatcatcatcatcttcttcttcttctgtttctgtttctgtttcttctgccccagttcagtttctgagccaagacggtgataaatgtgatatctttgatgggaattgggtttgggatgagacctatcccctttaccattccgtaaactgttctttcttggatcaaggttttcgctgctccgagaatggcaggcctgatactttctacaccaagtggcgatggcaacccaaagattgcaacttgcccagatttgatgcaaggaatatgttggaaaagctacgggacaagcgactagtgtttgttggtgattcgattggaaggaatcaatgggaatcactcctttgtatgctctcttcggcaattgcaaataaggctagggtctacgaggttaatgggaacccaattacaaagcatacaggcttcttggcatttaagtttgaagatttcaactgtaccattgaatactacagatcaccatatcttgtagtgcagggacggcctccttctggtgcacctgatggggtaagaatgactttgagagtggatcatatggactggatttctcataagtggagagatgctgatgtgctgattctcaatgctggacattggtggaattatgagaagactgtcaaaacgggttgttacttccaaataggggaggaagtgaagatgaatatgactacagaagacgcattcagaaaatcaatagagacagtagttgattggattaccaatgaagtaaacataaacaaaacttacgtcgttttccgaacttatgctcctgtccatttcaggggtggtgactggaatactggtggtggttgtcacttggaaacattacccgatttaggctccttgccagcagtatctgacatccatttcagaactgtcgttgatgtattgtcagaacgcacgaataaatcaaaagttttgaatctggacttgcttaatgtcacccaaatgtcaatacgcaggagagacggccatgcatctatttactatatcggaccagacagcacagcctctatgcagcggcaagactgtagccattggtgcctacctggtgtgcctgattcatggaacgagattctttatgcacttcttctcaagcgggaggatatttttgaacggagacagaatacaacaaaaatttctcaagttccaccataattggtctatacagtttgcagagaatgttctaagttatacaagtcctttcccaacccttgctgaatgaggtgaagttgcaagttgaatttgacatctttctggtcagtctctagttgatgatccatctaactatttgttagtttgcttaatgtttacagaattttattcttagcaatcaaagaagttaagctgttttaatttcctacaaaatgattgcttgaccatttttgtagtggtctgccattgtaggtgaacatatctagatgggaacttaatttttgaaggtgagtttcagtgatatcttgtacaaaaaagaaaaaaataaccaccgaaattcgaacttgattgatcagaaggcatacatcatcttttgttgtaaatttcatatgatggtcggagtccatgatgcagctgtttgttgtaaattgtatgtaaaaagagattgtttttttgtttttggttaattgtatttttatttatatagacaaataccctggagtaattgatatggatgatacttgttggagatacagaagattatcgtggctcagtcatcgattcatacatgcaatctggatcaagtttcgagatttatttgtattttcaagttccttagaataatactaatgaatcatatacgttatatt

SEQ ID NO: 8966 - DNA, 1267 bp, Glycine max
  Clone ID: 700807612_FLI
gaaaacaagagcagagagatgtcagcagaattttcaggatcagctgaccttactttggaggggaaccaattaagtggaccagaatttccagttttcaattttagttgcatttctatagccacaaacaatttctctgaagaaaataagcttgggcaagggggttttggccctgtctacaagggaaagcttccaggcggagaacaaatagctgttaagaggctttcaagacggtctggccaaggcttagaggagttcaagaatgaaatgatgctgatagccaaactacaacacagaaatttagttagattaatgggttgctctattcaaggggaagagaagttgctggtatatgaatacatgccaaacaaaagcttggattgctttttatttgatccagtcaaacaaacacaactaccttggacaagacgttttgaaatcattgaaagcattgcgagagcattactttatttgcaccgtgattcaagacttagataattcatcgagatttaaaagcgagtaacattttgttggatgaaaacatgaacccgaaaatatcagactttggcttggccaggatatttggtgggaaccagaatgaagccaatacgaacagagtagttggtacttatggttatatggcccctgaatatgcaatggaaggtctgttttcagtcaagtctgatgtatacagttttggtgtattactactagagattttgagtggccgcagaaacactagctttcgtcactcagatgactcaagcctcataggatatgcatggcatctttggaatgaacacagagcaatggagcttcttgatccttgcattcgtgattctagtcctagaaacaaggctttgagatgcatacacatagggatgttatgtgtgcaagattcagcagctcacaggccaaacatgtctgctgtggtgttgatgctggaaagtgaagcaacaactcttcccatgcctacgcaacctttgattacttcaatgaggagaactgaggacagacaattttacatggatggccttgatgtttcaaatgatttgacagtcacaatggtggtagggagatagaaattgattccagtccctttctgtgtcagttttgtttgcacttctctttcacccttcacacatacattcatagggctcactgttttagtttttcccttatgaccctggcgaaattaaactttactatactcttaatattgaatacacatttgtatatatcaatgacaattggtattttgagacttcag

SEQ ID NO: 8967 - DNA, 1195 bp, Glycine max
  Clone ID: 700807649_FLI
taataacttagaccctgcaaataagataggtgaaggaggatttgggcctgtatacaagggtgtgttgtcagatggtcatgtgattgctgttaagcagctctcctccaaatcgaaacaagggaaccgtgaatttgtcaatgaaattggaatgatatctgctttgcagcatccaaatctggtgaagctttatggctgttgcattgaaggaaaccagttgctactaatatatgaatacatggagaacaacagtcttgctcatgcactttttggtgaacaagagcagaagctgcacttggattggcccacaagaatgaagatctgtgtggggatagcaaggggattggcttatcttcatgaggagtcaaggttgaaaatagtacacagggacattaaggcaaccaatgtcttacttgacaaggatctgaatgccaagatctctgactttggtttagctaagcttgatgaagaagagaatactcatatcagtacacgtatagctggaacaattggttacatggctccagaatatgctatgagaggttacttgacggataaagcagatgtatatagctttggagttgtagctttagagattgtcagtggaaaaagcaacacaaaatacaggccaaaggaggagtttgtatatcttctagattgggcatatgttctccaagagcaaggaaaccttctggaattggtggatccaaatcttggttcaaaatactccccagaggaggccatgagaatgctgagcttggcactcttatgtaccaatccatctcccactcttagaccaaccatgtcatctgtagtgagcatgcttgaaggaaaaattccaatccaagcgccgataatcaagcgcagtgagagcaaccaagatgtaagatttaaagccttcgaattgctatcacaagacagccaaactcttgtttcttccgcatactcacaagaaagtatgaagcaaagacacatatcagaagatggaccatgggttgactcctccatatctcttccaagtggagatgattattcttcaaccagtaaacttgtttaagattcacttgatgtgtgacttcattaaaaaaattaaagaggactactaaacgttaaattccagttcttttttgtaggagataaatttgcagcacagagagatagcacctacaatatacttatctaatagcatatactcttc

SEQ ID NO: 8968 - DNA, 2205 bp, Glycine max
  Clone ID: 700807673_FLI
catttatttatattgtgtgcttttgatcttggagcaagacttcaattcatatacaccaaagacacatactatcttcataagcaaaggactcaaagtaatagttttctacaaaaaaattgaagtttggggggggatctacatctctatgggattatcactttccttactctcatcagcctgggaagaaatcgttagacattcactatttggtctgtctttgaacttcacttttggttccaaagatggggctatgattttgagatcaggtagcttcaagataagagaatcagaaactacttcaaagggtgcctctaccaccaacttttcaagcaaattgacggattgcaggcccgaacacatggtcctcgaaccaaacctttcgtgcattaaagatatggagatcatggaatcaaagagcagtgaacaacaattgcagcaccagcctgtccctgttctctctctgcctaaagaagtggttttctcttcgccaagaccggttagtgagcttgatgctgcggctactaagcttcaaaaagtctacaagagttaccgcactagaagaaaccttgcagattgtgctgttgtggtggaagaactctggtggaaggcattagactttgcttctcttaaacggagctctgtttcattctttgatgtggagaaacacgaaaccgccgtgtcacggtggacaagagcaaagacaagagcagctaaggttggaaaaggtttgtctaaggatgataaggcacaaaaattggccttgcaacattggctcgaagctattgacccacgtcatcgctatgggcacaatttgcacatgtattacgatacttggtttgaaagccaaagcacccaaccatttttctactggttggatgttggagatggtaaagaaataaatcttgagaaatgcccaaggaccacccttcaacgccagtgcattaaatatctaggaccaaaagaaagggaagagtatgaagtaattgttgaaaaagggaagctggtgtacaaacaagatgggaggtttgtggatactaatggaaattccaaatggatatttgttcttagcacaacaaggtccttgtatgtggggcgcaagcagaagggtgcatttcaacactctagctttctagctggggctgctacaacagctgcaggaagattggtggctcagcaaggtgtacttgaggctatttggccatacagcggtcactatcaccccacagaagagaacttcaaagaattcataagctttcttgacgagcacaaggtggacctttctaatgtcaagaaatgtgccgtagatgacgatgctccttcaattgttgggtccaattcatttattgacattaatgaatcacaacaaattaatgagggtcccactgtctcttcttccaataatgtcaacaacaatggcatcaccattaatgcaacatttaacaaagagattgaaaagaaggtggtggccacagtttttgacgtgcccaagaggctaacatgcaagtggtctactggggcaggtcccaggatcgggtgtgtgcgtgactaccctggacaccttcaaataagggccttggagcatgttaacctatctccaaggcctgcttctgcacgcccatatagttatggcccaattccttctccaaggcccagcccaaaagttagaatgtctccaaggcttgcttacatgggcttgcccagcccacgcacctcaattcctgccacaagttaagtgcctgtttgtgtggatgtttctaagggagtttgcatcatcccgaggcaccaacgcaaaagaccaaagttcgttatttctgcgttttattcattggaaagagtgaaaattggtgacaagttggaaacaaacatagcctaacagcaaaatcatggttgggaattatatatggctaggctcacacatgtatacacttgtccccataatgacaaaaaatgtgttagttatgatgaaaattgaggtgacaccaagagagacttttaattctatctctctaattttttatttaatttttttattcttgggttaaccgaggcattttattaaccctatttgtctttggttcttttttttttttggaaagatcactcagttaattcttcattgtaagtagagtacaaaatttctaattaaacattagatattttttatctgtaataaaaattcagctattaagaacaatctggtgttgt

SEQ ID NO: 8969 - DNA, 2476 bp, Glycine max
  Clone ID: 700807675_FLI
gaaacacagtgagttaagtgttcacaaaaaacaatggatgatattgtaggatacggttttcgtccaacagatgaagagcttgtgaagttctacctcaaacacaagttgctcgatgatgatccctgtgtccacttcatcctcgacgttgacctttgtgaagtggaaccttgggacttaccattgttattagcagattcagctgtgcgattcaatggccgtgaatggttcttcttcagtcctgtcgattacaagtattcaaatagtaaaagggttaacaggacaaccaagtgtggcttctggaaacccactggaaaagaccgtggcattaggagcaaggacaccaacaatgtcatcgggactaagaaaactctagtttactatcaaggccgtgtttctagtggtgtcaagtccaattgggttattcatgaatatcatgctgttacctttcatgaaagccagaggacttttgttttatgtcgcttgatgaagaaacctgggaaaacaactgaaggtggaactgatgcactgatctgtgatgaaggggggcccagtagaagcatggtttctgactatgaaaatcaggcaacaacacaaggaattccatctgtaagctgaagcatccttcatggacatattttacactctgccatgtgaaacatgctaaggagatataagggtggttggatgattaagatagaagggaatgggggaaaggtcgcgggttcgattccccagctaacaaattaacaactaacatttgccgataaaaaaaaatgtgaaacatgctaacaactgattcttgattgtgtgtatattttttttttttcagggaggtacttttacaggaatggaaacaacctttcagggaatgcatctggctgagaaatacttctccccaacacaacagtctcccactggtattgagcaggaagaaccatcctttacaaactatccatttaacaatgcctattttagaaatgaagacaactttatgcagactccatttgaaactaaggaggaagatgcgttcctgaattcaatttttgttgatgagaatttagttatcaatgaagaaagtatgcatgcttttgtcaatagctccacccaatcagagtcattgagaagggtatattgtgaaagcagtgatacagatgctgaagtagtctctgaaagggtaaagaaatattgtccaaagtccaaataatattggggagcagatctccatttgtttctgaaccgtcatattggtttattaagttaaaattgcaatgtgcattgtggcgatgtaaatttttgctacattttttcaatgtttagtgattttctactatatagtctgaaagggaactctagtgaaatatttggtttgagttggttttgatgctttgttgtgagtcatgattgattcacggaacattactgagttagtgaatgcttggacaaagggaatatttgggataggaaataaaatgtcgataaagcaatctctttctataccaatttttacccttccttgcatctcttccctaaaataaactttaggtcttcaaaactactcttttcttgggtttgtgatatttttttattttattttgagcacttcaagaattgaattcgtctgtttgtcttctgaaatgatcacaggatgataatattgttgatgtttcaacaatgtgcaacgaatatcctaattcagacggatactattcatcagaaaggtttgaatcatcacatggtgctgtccaagatagcttatgtcttctatctactaaccacgaagcaaaccaagagacaatggaaagtatactccaaaataatttctggggaatggagcaatcctattgtgactctactgcaaataaacctttggagatcaattatactgaaatttctagttctccttccactcggaggagatggataaatcagtatcatccaagaccagactacttcacatcccaaaagactgatgaagatctgagacacagaggaaggtttcaaacaatgcagtatcgcatgtagaggctcagaaggaattgctcattgtaaaatcagaaaaatgctcaaaatactagttcaagagagaacttagaagccagaagccatcatcctctgatgacaataggaaaggttctttcatctatgtgaagactgaagattacttcatcaagccagagcctatttccatgcttactatatcttgtcaatttaatggtagggattttgttgttaatagtcataagattggagtgggaagtattatcatgttacaacttcgaaatacaagtactatgcatgaagggcttgtgagtgtgtcaccatggttccttttcatgtagtgctactacatggcaagctctgttttaggaatttcatcattataagataggtgaggcttatagttcatatgtattttgcaatgagttatcctcattgcttctttcttatcataatgaaatatctctgcttaccattt

SEQ ID NO: 8970 - DNA, 1756 bp, Glycine max
  Clone ID: 700808306_FLI
tttgagagctttgcataaagcaataaaacaaagtgaacctgctttagtggctacagatcccaaagtgcaatcgcttggatataaccttgaggcccacgtgttctcggccccaggtgcttgtgctgcattcattgctaattatgacaccaaatcttatgcaaaagctaaatttggaaatgggcaatatgatctaccgccttggtctatcagtattcttcctgattgcaaaactgttgtttacaacacagcaaaggttggttacggctggctgaaaaagatgactcctgtaaacagtgcatttgcttggcagtcatacaatgaagaacctgcctcatccagtcaagctgattccattgcagcatatgcactttgggagcaggtcaacgtgacccgcgattcttcagattatttgtggtatatgacagatgtcaacgttaatgctaatgaaggatttctaaagaatggacaatctcctcttctaactgtaatgtcagctggccatgttctccatgtgttcattaacggtcaacttgcaggaactgtgtgggggggattgggaaatcctaaattgacatttagtgacaatgtgaagctgagggctggcaataacaagctttctttacttagcgttgcagttggtctcccgaatgttggtgtgcactttgaaacatggaatgcgggggtgttaggcccagtcactctgaagggtctaaatgaggggactcgagacttgtcccggcagaaatggtcttacaaggttggactgaaaggtgaatccttgagccttcacaccgaaagtgggagtagctctgtggaatggatacaaggatcattagtggctaaaaaacaacctttgacatggtacaagacaacttttagcgcaccggccggcaatgatccattggctctagatttgggaagcatgggaaagggtgaagtgtgggtaaacggtcgaagcattggtcgccattggcctggatatatagcacatggtagttgcaatgcttgtaattatgctggatattatactgatacaaaatgccggacgaattgtggacaaccttctcagagatggtatcatgttcctcgctcatggctgagctcaggtggtaactccttggttgtgtttgaagaatggggaggtgaccctaatggaattgctttggtgaaaagaacatgaagtgtgatattttatgatgctctcttaaaaggagcagcattgacaggcaatatatatcttgtaacaaatgtctaggaaatgcaaagaagctgtcaagtgagtcctatgcggttaggaccctatgatgcagcaatttaccaaatacgtgtggtttagatcatattaggttcagtatataaaaaatatttgaagttcataattggtgctccttgtcttctggttgttcaagtatacctcaaaagattgccaaggcctaatcatgcattgcctggccaaaaacaaagatttatataagagaatttggatgcgcaaagactgtgtatactgtacatagtcaagtcaggctattgtgctgaatattgccccatgtattacagggcttgtatcaatgaagattgagcccttacacatttatttaatttactatgatacaatggaaagaattgtagacacgcaaaatgtgtcggagagtatatttgctatattctgccagaaataattgtgttttcccattataattattatgtaagaacagattgaaagtaataaaatatcctttgaaaaaataaaaaaaag

SEQ ID NO: 8971 - DNA, 1406 bp, Glycine max
  Clone ID: 700808313_FLI
cattttttgactctggaaagaatggggatgtttttccttgactcttcggtgtacacgccaagtgctccgccactttgtctgccaaatggaattgattatagttcttacaaagaggtcttggaagctgaaccccctgagtggctccctgatagttctactactgtttgtatgcaatgtagtgctccttttactgcgattacccgtggtagacatcattgcaggttttgtggggggattttctgtcgaacatgtacaaaggggcggtgtttaatgcctgttgggttcagggaaagaaatccccaaagggtttgtgatgcctgctatgatcggcttgatcctttacagggcgttctgatcaacaccataagcaatgccgtacagggggctaagcatgatgtcacggactggacttgtgctagaggatggattaatcttcctattggtttatctatggagcatgagatttataaagcatctaatacattaagaaactactgtcaggtggccaaatccaatcctgagaagtccattcctttaactgttcttaaaagtgccaagggcctagcaattttaacagttgctaaagctggtgcactagtctcttacaaactgggtactggcttggttgttgctcgaagatcagacggatcatggtctgcaccgtcagcaatattctccctgggtttaggatggggtgctcagattggtggtgaacttatggattttatagttgttcttcgtgatatgaaagctgtgaagacattctgcagccgtatgcatttttctctgggtgctggttgtagtgctgcagcagggcctgttgggagagtgcttgaggcagatattcgtgctggtgacagaggctctggcatgtgttacacttacagttgcagtaaaggtgcatttgtgggagtgtctttggaaggaaatatagttgcaaccaggatggatgccaatttgtgcttttatggtgatccttacctcaccacatctgacattctactgggaatggtggacagaccaaaggctgctcaacccttgtatggcagtcttcaagaactatattcctgtctacgattctaagctggtccctggttccagttacagaattgcatcattttttctgtcttctgcaagtggtgtgataaatagtgcctgatgtatatacagttctagttctacatggatttctgaaatgtatggatgagggatctcctcataattcagttatacatcatatgtttactacaaatgatccatatatctaatacacgaatttataatgtgaatatgttagactaattgtacatagacaattggtgaaataagttctattcgtttgctgaattcttgttattcttgctgtgggactttcctcgaactgaaattgtaagttggtaatattt

SEQ ID NO: 8972 - DNA, 613 bp, Glycine max
  Clone ID: 700808322_FLI
ggcattcttcttgaggcagacaaggattccaagtatcgaaacatttggaatttgtatcacagttggtttggaagaatggcacttttctttgcagcattgaatatagtcctggggatgcgagctgcgggagcagggaatgattggaaggcaggctatgggttccttcttagcattgtacttgtcgcagttatcgttctggaagtcttggcgtatttgaaaaggtcagaaaagcgttctcttcctcagactttccaaatggacccagttggagatgctaacttcccaaccaatctagctaaagggtgaatgtgttggctcctagttttgtttgcacttgtacaagctgtgtcaattgtctcattcagccacttcagactaaacctcattcatcctacactactgcatgtgaactgagttgtggagctttcttgatgtagatagatatgtagccacctagaagtttgccaagatggacaatcctgacgtttggcttcctcacctgaacttgagattgaaccttttttgctttcttcattggttgtttttttgcatccgcatggtcagaaatggaatgctactacatttacatctatatatattttgttattcttct

SEQ ID NO: 8973 - DNA, 354 bp, Glycine max
  Clone ID: 700808401_FLI
tccaaagggtggcttttttgagcttgtgatttgcccccactacttctttgagattactgtgttttatgggatcttcttcatttctcagacattatattcattcgctttcgctgtaggcactactatgtacttggtgggtaggagttactcaactaggaaatggtatctttctaagtttgaagatttccctaagcatgttaaggctgtcatcccatttgtcttctaaatgttgtaatgaacatctaattctacttgagttgtaagtgtgctgctagattgtgtttattggaattgcagctctccaacatccaagtttgagtgatttaataaactattttttaactttggttgatt

SEQ ID NO: 8974 - DNA, 552 bp, Glycine max
  Clone ID: 700808407_FLI
gagtcccttgggtatctcaggtttggctcatttgtttggcatcttagccttcatcctcttgctcgtttggttgttgcattaccgtgaaggaattgactatgattcagacaatggatttcgcgtcttcaatgctcaccctttattgatgtactcgtgcttcattttccttgctggagaagtggctttttggtttcgttgtgttcatgcttcaaggagcttcagctacaacaagagctaaagtgctaccatggcacaaagttggtggtagagcactgttgttcatggcagtgtgtgctgctgaaacaggattgatggagaagtctagtttcttaacaaatttaaaattgttacacgagagagaatccaatttaatcaacttcacgggtcttgcgattctcttgtttggagtttttgtaaacttttctgttggtttctcttagtttgccataaaattactctcattcgtgcacttgattccacatcataaattggattgattccactgtttattgattttgtaataaataaattatttgattcgtggaatgcttt

SEQ ID NO: 8975 - DNA, 1075 bp, Glycine max
  Clone ID: 700808420_FLI
gcaagaatggcacttcgttgcttggtgatgtccctttctgttctcttcactcttggtcttgcgagagaaagccatgccagagacgaagatttttggcatgctgtttggccaaacactcccattccaagttcattgcgagatcttctaaagcctggccctgcaagtgttgaaatcgatgatcaccctatgcaaattgaagaaacacagtacccgaaaaccttcttctataaagaagaccttcatccaggcaaaacaatgaaagtacaattcagcaagcctccctttcaacaaccatggggtgttggtacatggttaaaggaaattaaagacactactaaagaaggatatagttttgaagagctatgcatcaagaaagaagccattgagggagaagagaagttttgtgcaaaatccttgggaacagtaattggttttgccatttcaaagctgggaaagaacattcaagtactttcaagttcctttgtcaataagcaagaccaatacactgtggaaggagtgcagaatcttggagacaaagcagtgatgtgtcataggctaaatttcagaactgcagtattttactgccatgaagtccgtgaaacaacagctttcatggttccattggtggctggtgatggaaccaaaactcaggcacttgctatttgccactcaaatacttctggaatgaatcatcaaatgcttcatcaacttatgggagttgatcctggaactaaccctgtttgccatttccttggaagcaaggccattttatgggtacccaatttatctgtggacactgcctatcagaccaacattgttgcttaattagtccatgcatcttgagcaccatgagaatgagattgtgtataaaataaattatcatgtgctgtgtgttgtgcaagtactaccttctctagctagattgctagagctagaatttcaacctacctatgtgtactgataagatctgcttccctacttaaagagagcatcatcctgtgatcagtgtgcttcgtattctctctctctatatatatatggtaaaaagtggttatctcgtgcctcgccttgagct

SEQ ID NO: 8976 - DNA, 982 bp, Glycine max
  Clone ID: 700808438_FLI
aaaatccctttgtttgctcacataagatttgggtttcttcaaaattatctttttttttctctcctaaaaaaaaaagagaaaactttgtttgattctttgaaggaggtttgaagaaagcaaaaggtgtagttttgttttaagtttctttgaaatggttttcatgtctgagatattgttccccgaagaaaaaattgaggaaggagagtgggagaaggagagataagaagaagagaagaatacctacccagcaagcagaattagagaattttttttcacaaactgttgatttgattcattttcatctgcttctgctgggtggttggcaatgtctgctcctatgatcattgaccctatgatgatatcggcaccagaaactcaatcagcagcagctagcatactagttgcacaaagtgaagttgaatttgctgtatgtgactgttgtggactaacagaagagtgcaccccagcctatatagaaagaatcagagagaggtactttggaaaatgggtttgtgggttgtgtgctgaggctgttaaggatgaaattgtgaggtctgagagacttgtttgcacagaagaagcaatggctaagcacatgaacttctgcaaaaagttcaaggcatcagggcctcctccaaatccgacagtgcacttgatatcagccatgagacagattcttagaaggactttggattctcctagagtaaggtccacaccaaatagtccaaccaagactctcacaaaaattcatggttctgtgcttacaagatctgagagctgcttccctactctctctgaagggttgtgatgaagggaatacttgtgtatttagttggataaaaatggaagcaggaagcataaataaggacagaaaaatataagctgcaaaagtttagatgttcaattgtagttttgtccagtacagaactttcaatctgtttgttagaaaatttgaacataatttggtcaagaattttgcttc

SEQ ID NO: 8977 - DNA, 695 bp, Glycine max
  Clone ID: 700808447_FLI
cttgcagtggccagggtaccatatccttggagattctggaacaagcaccacaaatagatacgctagtagtacccataagtggtttgttcacttttttttctgacaaattgtgaaccaaaatgttgtaaaaatcgcataaattccaaaatctgcttcttgattttccaacaaatgaaactgcaggtggtggtttgatatcaggaatagcattggctgccaagtccattaacccagctattcgtatttttgctgctgaacctaaaggtgctgatgatgcagcacaatctaaagcagctgggaggataatacgattgcctgagaccaacactatagctgacgggcttcgagcatttcttggagatttcacatggcctgttgtacgagatcttgttgaggaaattataactgttgaagacagtgaaataataaaagccatgaaactgtgttttgaaattcttaaggttgttgtagaaccaagtggagcaattggccttgctgctgttctatccgatactttccagaaaaatcctgcatggaaggattgcaaccatataggaatagtagtttcaggaggcaatgttgatctggccatgctttgggattctttgaacaaaggaaagtgacttctttttgttttgcttatgtggaccttcattgttctctatgtgagtgtaaatgatccaatttgtatggac

SEQ ID NO: 8978 - DNA, 305 bp, Glycine max
  Clone ID: 700808473_FLI
gcagtgttgggagtacttctgatccgaaagaatgaggactttgaaaaccttaagaagctatttgatgagactacattatatgacaagcaatggcaagcaacttggcaggatgagaattcaagcacttccaaaaatgagtagtggaattgctgttttgtagttctccctccctcaattgtctcttaatacagtgctgtctgataattttgttagtacaaaacaagacatggatatggattagacattatatttcgtttccttctctcgtcctagttccaaatgaccgagaaagtttgtttgtttgc

SEQ ID NO: 8979 - DNA, 1153 bp, Glycine max
  Clone ID: 700829626_FLI
tttacttttgagtttggtcagcaggaggtatcaccacgcacctcaggaagactctctcacagcagtggccctcttaatggctccctaacagatagccctccggtttctccttctgaaattgacgatttcaagtataaccgttccaacaacaaccacaacactgtcaacatgatcaccggcttgaatggtcaatactggggtgccggcggcgcggcgacgaccgccggtggtggcaagacggtggggaggtggctgaaggacaggaaggagaagaagaaggaggaaactagggcccacaatgctcagctccacgcggcggtttcggttgccggggtcgccgccgcgatggccgccatcgccgccgccacggctgcctcgtcgggctccaggaaggacgagcagatggcgaagaccgacatggcggtggcgtcagcagcgacgctggtggcggcccagtgtgtggaggctgccgaggccatgggggccgagcgcgaccacctggcctcggtggtcagctccgccgtgaatgtgaggtccgccggtgacatcacgacgttgacggcagctgcggccacagctttacgtggggctgccacgttgaaagcaagggtccttaaggaggtttggaacatagcagctgtgattcctgtggagaagaatttgggcagtggcagtggtggcggcgataatggtaatggtagcaatggtagctctaatagtagcttcagtggtgaaattgtaccagaagaaaatttcttggggatttgtagcagagaattgctagccagaggttgtgaacttctcaagcgcacacgcactggtgaactgcattggaaaattgtatctgtttacataaacaggatgaatcaggttatggtgaagatgaagagcaggcacgttgctgggaccatcacaaaaaagaaaaagaatgtggtgcttggagtgatcaaagatatgcctgcttggcctggacgccacttgcttgaaggtggtgagaaccgtcgctactttggtttgaaaacagtgatgcgtggtgttgtggaatttgagtgcagaaatcaaagagagtatgatgtgtggactcaaggtgtgtcaaggcttctatctattgctgcagagaggaacaacagaaacagaatataaatatataatg

SEQ ID NO: 8980 - DNA, 1099 bp, Glycine max
  Clone ID: 700829628_FLI
gggatcgcaaaggagtgttttggtgcgggttaaaatgcaacgataacggttgaaatagaaaaaagaaaaacagtgttttggtgaagctgagaaaacaaaggtttagatcacctctgaaattctgctatggcctcaaccagatcactcattctttgtctgttcattcaactgtgcttctaccttctacccctctcattcgctcaatcccccgccaccgggtctgccgaaggttacaccatttatggtcgagtgaagatccccagtgtgggaacaaaagattatattcttcctggaaaaatttcaaatgtcaaagtcatactcaatggtggtcaaagagttacttttctgaggcctgatggatatttcgcattccacaatgttcctgccgggacacatctaattgaagtggctgcaataggctatttcttttctccggtacgagttgatgtaagtgccagacaccatggcaaaattcaggcagcactgacagaaaataggaggggacttagtgagtttgtcttggagccattgaaggatgaacaatattatgaggttagggagccattctctattatgtccattgtgaaaagtccaatgggtctgatgatgggatttatgctgattgttgtcttcctcatgcccaaattaatggagaacatggatccagaagaaatgaggcgtgcacaagaagaaatgagaaatcaaggagttccatctttagcaagcctgttacctggtgctgcaagaagcaactaggtgtatgagtaacggaaaaccagtgagcaagttggttacccccaagcaggagctgaaaaaatgacatacgatgattggagaattttcttgtgacaaattgatagcgatggaaatctttcgattatttatgtagtgaattagtaaaaatttgaaatttctgatagaggtttatatgtttgatttgaacagtcgggagtaggtttctacgtaattcttgttcactttctcgtcaatgttgataaccatgcactgatggatgatttttttttttttggtttacttatagaaactgttaatttccacttttggtccttttgcttgaaaaaggaattgatttatgatc

SEQ ID NO: 8981 - DNA, 1301 bp, Glycine max
  Clone ID: 700829708_FLI
gaaacttgtgcttactcttgcagcaaagcgaataatggcttcactttccaccttcctcacactcactctcttcttcctctcacacgttaacgccaaagaaatcgtcatcaccgaagagggttacaccgtgaccaccgtattcgacggccacaagcctcacatcttccctttcaccgttctccagcgacccttttcctccgatctcatccttctcgattccgtcaacagcactttctacacggcgcaattccccattacagaagaaagcgttttcacgaggctttctggcgatgggtctgtggggtattctgatggggacgtgggttctgctcggttcgccaaacccagaagctttgcttttgatatgagagggaatgtgtatgttgctgataagtccaaccgtgcaataaggaaaattagtgccaagggtgtgaccacgattgctgggggagagttctcagaaaagtcaagaacaaaggatgggcctgcacttaatgcatcattttcaaatgattttgacctgactttcattcctgggctgtgtgctttgctcgtgtcagatcacatgcatagattggtccgccagattaatttgatggaggaggattgcacccttggttctaaacctggactaggcgcagttatgacttggactcttggattaggactttcatgcttacttggcttagtaattggaattgtggtgcgtccttacatcatccctaatacagaaaggcaccaacccttgccacttcaccgagacatggaagcgttacctaaccagtctggggaagctagcacagacgctcttcttcggtgccaaaagcgcaattgctagctgcagttgctcctctgtttacaaaatcctgatgagcttttggagattgagtctctctcatcttgtttgcatgtctagaattagaatcaacatagtttctccaaggccacatctggaatcagtgtctttgctagatttagatgcctgcaatagcggtgaggtaacaaagtcaggtaagtattatgaccaattgaaggatttgatgagttttgatgaagattcaaacaatggcaaggcaacctttaacaaaggaaatgatagcataggaaggaggaatgtgtgctatgaaggtgatgtcatgatgaaggctaacatgggctttgtagagacacctaaagataacaataacattgttcatcaagaatcttctgtgtgtaaaatgggtattgtgaagcgtagatgaaattatttgtaagacatgaactatgttatgaaactagcatgcatatattttgtcaccagc

SEQ ID NO: 8982 - DNA, 1674 bp, Glycine max
  Clone ID: 700829731_FLI
ttctcttccaatggcgtcttctctttccaccaaaccattctcagccgacgctctctccgccttcgcttctctcaattccgatctcggatccctcccccccgcctacctccgactctcactccgtcctcgtcttcccaagagacttcacatacaggcggctgggagtacctatggaaatcactttcgtgttacaacatatggggaatcacatggaggaggtgttggttgtgttattgatggatgtcctcctcgccttcctctctctgaagctgatatgcaagtggatcttgacagaaggaggccaggtcagagccgaattacaactcctagaaaggagactgatacatgtaaaatattttcaggagtttccgaaggaatcactactggaactccaattcatgtatctgtacccaatactgatcaaagaggacatgactatagcgagatggcagtagcttataggccctcccatgcagatgctacctatgacatgaagtatggtgtcagatcagttcagggtggtggtagatcttctgcaagagaaacaattggaagggttgcttctggtgctgttgctaagaaaatccttaaagaattttctggaactgagattctggcctatgtctctcaagttcataagattgttcttccagaggaccttattgatcatgacactctgactcttgatcagattgagagtaacattgttcgatgtccagacccggagtatgcagagaagatgatatctgcaattgatgctgtgcgagtgagaggtgattctgttggtggtgttgtgacatgcattgtgaggaactgtccacgaggtctcggttcaccagtatttgacaaacttgaagctgagctggctaaagctgcaatgtcattgcctgcaaccaagggctttcagtttggtagtgggtttgcaggcacctttttgactgggagtgaacacaatgatgagttctatatagatgaacatggaaacacaagaacaagaacaaatcgctctggtgggatacagggtggaatttccaatggggaaatcattaatatgagaatagctttcaagccaacatcaacaattggaaagaagcaaaagactgtgactcgagataaaaaagaaacagagtttatagcccgtggtcgccatgatccttgtgttgtcccaagagctgtacctatggtagaagcaatggtagctttggttcttgtggaccaattgatggcacaatatgcgcagtgtaatctttttcccgtaaactcagatttgcaagaacccttggtgcccatactacggccagaagaagcgctcctctgaagaggaagggggtccataaatcagtaattggcctttgataaaatcttccttatggctagtgtttaattgacacggttaattcactttgatgacaagtccaagtgaacattgtggcagatatttttgcgggtgcaatctatcgttttgtattaatgtaagttaaactatgttttcttttcctctcttcttctattttcattctgagggtgaacattgtttctagtaaaccttgttgcaaaagcagagatagatgtattcttaaagtgaactgatattaaaaattgtaagaaacgtatcagtttttggtcttaataagtgttgctctgctttgcaataaatgaaagctttggcaactt

SEQ ID NO: 8983 - DNA, 1094 bp, Glycine max
  Clone ID: 700829782_FLI
ctttcacttcacttgtggttcctcactctctctctctccacaccacactgaggagggagacagtggaaggaaggaacactcaaatcactgaaccagccatggctaccttctccaaggaacgcgagaactttgtatacgttgccaagttagctgaacaagctgaacgctatgatgaaatggtggatgccatgaagaaggtggcgaagctggacgttgagttgagtgtggaagagaggaacctgttctctgttgggtacaagaatgtggtggggtcacggagagcttcatggagaatcttgtcatcgatagagcagaaagaggattccaaagggaatgagttgcatgttaagcatatcagggattacaggaacaaggtggagttggagctgtccaacatttgcagtgacattatgataattttagatgagcatcttattccatccactaatattgcggagtccacagtgttttattataagatgaaaggagactattaccggtatttggcagaatttaaagctggcaatgaaaagaaagaggtggcagatcagtcacttaaagcatatcagacagcttctaccactgctgagagtgaactacaacctacacatcctattcgtttgggtctggctctaaatttctcagtgttttattatgagatattaaattcacctgaaagggcctgccatcttgcaaagcaagcctttgatgatgctgtctcggagctggataccctgaatgaggattcttacaaggacagtaccttgattatgcagctgttgagggataaccttactttatggacttctgatatccccgaagagggtgaggacctaaaaatggaaagcgcagccagggttgatcaaggagaagatgagttaggccgctaacccatcattctgtcatatgtctaagatttgatgcattaatttttctcaatcatattttctccattgtagtgaagcctctatctgaatggtgcactgcacctcatcaactttgagtcattcttatttttgagtgatggcctatttgagtcatctacttcatttttatgctattgttgagtagttttattcatgtgtttgtgacac

SEQ ID NO: 8984 - DNA, 1946 bp, Glycine max
  Clone ID: 700829816_FLI
cataattccaaatggcttcgtctactctcatctgtgacactcagcaatggaaggagttaaaggctcatgctgaggatgtagaaaagactcatttacgtgatttattgagcgatgatgagagatcccagtcaatggtggttgaatttgatggaattctattggactactcaaggcagcaagccactcttgaaacaagggaaaaactcttcaaattggcagaggttacatccctcaagcaaaagataaaccagatgtacaatggggagtatataaacagcactgaaaatagatcagtacttcatgtagctcttcgtgctccaagagatgctgttatacagagtgatggaaacaatgttgtcccagatgtttggaatgttctggacaagatccaggagttctctgagcgggtccgcagtggatcttgggttggagctacaggaaaggaattgaaggatgttgttgccgttggtattggtggcagtttcttaggtccattatttgtgcacacagctcttcaaacagatcctgaagcaattgaatctgcaagagggcgtcagctacgctttcttgcaaatgttgatccaattgatgttgctagaaacatcacaggattaaatcctgaaacaaccctagtggtgattgtttcaaagacttttacgaccgccgaaaccatgttgaatgcccgaacactcagggaatggatttctaatgctctagggcccttagcagttgcaaaacatatggtggcagtcagtaccaatctcacacttgtggaagagtttggcattgatcccaataatgtttttgcattttgggactgggttggtggccgatatagtgtctgcagtgctgttggagtattgcctttatccctacaatatggtttctcagtaattgagaagtttttaaagggagcttccagcattgatcaacatatgtattcagaaccatttgaaagaaatctacctgtgcttttgggaatgttgagtgtatggaatgtctcatttcttggatatcctgcccgggctatcttaccctattctcaagccctggagaaatttgccccacacattcaacaggttagcatggaaagtaatggcaagggtgtttcaattgatggtgttccactaccatttgaggctggtgaaattgatttcggtgaaccaggaacaaatgggcagcacagtttttatcaacttatacaccagggacgcgttattccttgtgattttattggagttgtgaaaagtcagcaacctgtttatttgagtggtgaggttgtgagcaaccatgatgagctaatgtcaaacttttttgcacaaccagatgcccttgcctatgggaagaccgctgaacaattgcaaaaggagaatgttcctccacatcttgtgccacacaagacattctcaggcaaccgaccttctctcagccttctgcttccatcattgaatgcttataatattggacagttgttggcaatctatgaacacagagttgctgtagaaggttttatttggggcatcaattcttttgaccagtggggagtggagcttgggaagtcattagcctctcaagtgagaaagcaacttaatgcatctcgcacaaaaggagaaccggttcaaggctttaacttcagtactactgctatgttgacaagataccttcaggcaagtgcagacgtcccggctgatcttccaactcgcttacctcagatttaactgtcttttttgaggaatgttattttttttatattttaattggatcaaagtcatcttacaaatctcactcatataagctgttaaacagcatccttcaaacttttgtttctgggctacttattgagtaacttctagtacatcatccttcaattttgttttgaaatgatgtcctaaaaaaaccattgctcaatattttgttggattttgaaaggcattgtttaatttgtc

SEQ ID NO: 8985 - DNA, 1336 bp, Glycine max
  Clone ID: 700829824_FLI
gaggaacgcagaccgaggcgtttccagttcgaaagggaaatgaaagtgtctttgttggtgaagggtaggtgagagaaacgaaaggggtgtgtgttgggttgaataggtatagataggatcaatgagcaacaacaacgcaggaaaggtggtgtgtgtgacgggtgcttctggtttcatagcttcatggatcgtcaaattccttctccaacgtggttacactgtcagggccaccgttcgctacccaagtaatctgaaaaaggtagatcacttggttaaacttgagggcgcaaaagagaggttgcagctgtttaaggcagatctgttggaagaaggttcctttgactctgttgtggaaggctgtcatggtgtttttcatactgcttcacctgtccgttttgttgtcaacgacccacaggctgaattgcttgatcctgcagtgaagggaactcttaatgttctcaaatcatgtgcaaaatcaccatctgtcaaacgggttgttttaacttcttctatttctgcagttgcatttaatcgaagacctaaaactcctcaagtggtagttgatgagacatggttttcagatccagatgtctgtagggaattagagttgtggtacacactttcaaagactttggctgaggatgctgcctggaaatttgtaaatgaaaacagcattgacatgatttctattaacccaactatggtggcaggacctctcttacaaccagagattaatgaaagtgttgagccaattttaaacctaataaatggtaaaccatttccaaataaatcttttggatgggtcgatgtgaaagatgttgctaatgctcatattctggcctatgaaattgcttcagctagtggaagatattgtttggttgagagagtcatacactactctgaacttgctacgattttacgtggtctgtaccccacattacaaattccagataagtgtgaggtagatgagccgtatatcccaacataccagatttccacagaaaaggcaaaaaaggacttgggaatagagtttactcctttggaagtgagtctcagggagactgtggaaagctttagagaaaagaagattgtcaactttaatccgtgatctatcctaaataaataaatgtcgatgatctcaaccacgttcaatttgtgactgataaatgtcaggcttcagaaggaattatcactgtaaaatatggattgcaaacaggttaatattgtttgatgaaggaccgaatataaaaggataaattgtatatacattcctgaactttgggcgaattatgctttgtccttttttatgaatttcaactgtacaatgttcgagtac

SEQ ID NO: 8986 - DNA, 836 bp, Glycine max
  Clone ID: 700829957_FLI
aactctttcttctcataactctgccgccgcaacagccccaaatccaatggcttcagagaagaaactttcgaacccaatgagggagataaaggtgcagaagctcgtcctcaatatctccgttggcgagagtggagatcgtcttaccagagccgctaaggtgttggaacagcttagtggccaagcccctgtgttttccaaagcaaggtacacggttcgttcctttgggattagaagaaatgagaagattgcatgctatgtcactgtcagaggtgacaaggcaatgcaacttttggagagtggtttgaaggtgaaggaatatgaacttctcagaaggaacttcagtgatactggttgctttggctttggcattcaggagcatatcgatttgggaatcaagtatgatccttcaactggtatttatggaatggacttctttgttgttctggagcgtcctggctatcgtgtgggacgtcgccgaaggtgcaagtcccgtgttggaatccagcaccgtgtcacaaaggaggatgctatgaagtggttccaggtgaaatatgagggagtgatccttaacaagtctcaggcgattgtttagttagactgagttcatttcaggggagtgtttttatcagttttgtcaactatctttctgggatagtatcttaattttgaggcaggttatgaatcaatgtttctcatttcagttttgtgatgaagcacatgtattaacaatagcccttttaaacgacacttttattgcaacaagaacatgtgagacacttttaaatgcattctctttattgattatttattgaaaatgatcaaattttgtgggtctt

SEQ ID NO: 8987 - DNA, 823 bp, Glycine max
  Clone ID: 700830011_FLI
gaagttgtaaggagagctttattgaagatggccgaagaagctgacttttttggcgatactgttccccccaaattgaaagttcctttcatacttaggacgcctgacatgtcagccatgcaccatgacacaagttctgatctgaaagtggttggaaacaagttaaaggatatattagagatctcaaacacatcccttaaaatgaggaagatcgttgttgaactgtgtgacattgttgctactcgcggagctcggcttgctgctgctggtattttgggcatccttaagaaaataggaagagacacagttaaggttggggagaagcaaaagtcagtgatagcgttggatggggggttgtttgaacactacaccaaatttagagaatgcttggagagtgcactgaaggaattgctgggagatgaggctgctgagaccattgtcattgagcatgctaatgatggctctggcattggtgcagccctcctggcagcttctcactcccaatatttgggagtggaggagtcttaaattttattgccaaacaagggaaagacgtgtaatactagtttcattttttgcataggtggtagatcaacacattgaagcaatggtgccttgcagctggtgactgggggggcattcattattttggtttcagtgtttgtttctccttcgttaaggaataatatcaaagatataaacttcatcttgagtgactagacaccttttgcggaatgtagccaacgagaataaagcaggacttaatgtattgacaagcctaaatttgtttttatttcaaagcttttctgagttatcaatgaagact

SEQ ID NO: 8988 - DNA, 876 bp, Glycine max
  Clone ID: 700830015_FLI
ggtcaatgccgaggaagatttgtctgatgatggatcacaagcaggggagaagaagaggaggctcaacatggagcaagtgaagacacttgagaagagctttgagttggggaacaagcttgagccagagaggaaaatgcagcttgcaagagcacttggcttgcagccaagacaaattgctatatggttccagaacagaagggctaggtggaagaccaagcagttggagaaagactatgatgttctcaaaagacagtatgaagctgtcaagtcagataatgatgcacttcaagctcagaaccaaaaacttcaggctgaaatattggcactgaaaagtagagaaccaactgaatccataaaccttaacaaagaaacagaaggatcctgcagcaatagaagtgagaacagctcagacatcaagttggatatctcaaggacaccagctattgacagtcctcattctacacatcagcaaagcagacccctctttcctccttcttctgctaggcctgcaggagttgctcagcttttccaaacctcttcaagaccagaccttccatcatgccaaaagattgaccaaatggtcaaagaagaaagcctaagcaacatgttttgtggcatggatgatcaatcggggttttggccatggttggagcagcaacatttcaattgaatattccaaaggaagagagagttattaattaatttaaaaaattggatgtagtaggttttctttttccctgtgaaatcaagagggtgtccatcaatttatcacaccatactttattatgatgagttcttaaattaaaaacccatgttttggaaacttggtgtataaaataggatatatatcaagtagaaattttctggcggcgcttg

SEQ ID NO: 8989 - DNA, 3445 bp, Glycine max
  Clone ID: 700830084_FLI
cttgccttgccatggcctcaaactccatggctggcttgatcaccggttcgaattctcacttctcgcgtgactccgatgagcatcagactcctcctacccgacaggcttcatcgaaaactacttgtcgagtttgtggcgatgagattggatacaaggaaaatggggagctgtttgtggcttgtcatgtgtgtggatttcctgtttgccgaccgtgttatgagtatgagaggagtgaagggaaccagagctgtcctcaatgcaacactcgctataagcgccacaaaggttgtcctagagtagctggagatgaagaggacaactttgatgcagatgattttgatgatgagtttccggttaagaatcatcgtgaagatctagatcggaaccatgatgttaatcatgtggaaaatggggactacaatccagagaagttgcatcccaatggtcaagcattctcttcagctgggagcgttgctggcaaggatttcgaaggggacaaagaattctacagcaatgcagaatggcaagaaagagtagagaaatggaaagtcaggcaagaaaagagaggtcttctaaacaaagaagacggaaaagaagatcaaggtgaagaagatgattaccttttggctgaagctagacaaccattgtggcgcaaggttccgatatcttcaagcttaatcaatccatatcgcatagtgatcgtgatgaggctggtcatcctttgtttcttcttccgattccgtatcttaactccagcaaatgatgcatatcccttgtggttaatctctgtgatatgtgagatatggtttgcactgtcatggattcttgatcagttccccaagtggttccccatcacacgtgaaacttacttggaccgtttgtccttgaggtttgagcgcgaaggggagacaaacgaactagctccagttgatttctttgtgagtacagtggaccctttgaaggaacctcccattataacagccaacactgtcctttcaatcctctctgtggactatcctgttgacaaagtcagctgctatgtctcagatgatggtgcatctatgcttctgtttgattccttggcagaaactgctgaatttgcaagaagatgggttcccttttgcaagaagtataacattgagccaagggctcctgagttttacttttctcagaaaattgattacttgaaggataaggtgcagcctacatttgtgaaggaaagaagggccatgaagagagaatatgaagaatttaaggtgaaaattaattctttagtggcaaaggctcagaagaaacccgaggaggggtgggtgatgcaggatggaactccatggccagggaacaacactcgcgatcatccaggaatgattcaggtatatttaggaagtgccggtgcgctagacgtggaaggcaaggaacttcctaaacttgtgtatatttcacgtgaaaaacgtcccggctatccacaccacaagaaagcaggtgccatgaatgctttggttcgagtttctgctgttcttacaaatgcaccattcatgttgaatctggattgtgatcactacgtcaataatagcaaggcagtcagagaggccatgtgctttttaatggaccccaaccttgggaagaagctgtgctatgtccaatttccacaaagatttgatggtattgatcgccacgatagatatgctaaccgaaacacggtgttctttgatatcaatatgaaagggcttgatgggattcaaggtccagtatatgttggtactggaactgtgttcaacaggcaggcattgtatggctacgatccaccagtatctgagaaaaggccaaagatgacatgtgactgctggccatcatggtgttgctgttgctgtggtggttcaaggaagtccaagtcaaaaaagaaatcaggaaaaggtctcttcagtgtgttctccaagaacaagaacaagaagaaaatgatggggaaagactatgttagaaaagggtcagggtccatgtttgatcttgaagagattgaagaagggcttgaagggtatgaggatctagagaaatcatccctcatgtcccagaaaagttttgagaagcgattcgggcagtcaccagtgttcattgcttccaccttgatggaaaatggaggacttcctgaaggcacaaatagccaatcattggttaaggaggccatccatgttataagctgtggctatgaagagaagactgaatggggcaaagagattgggtggatttacggctcggtcacagaagatattttgactggattcaagatgcactgcagagggtggaaatcagtatattgcatgccaaagcgaccagcattcaagggatctgccccaataaatctatcagatagattgcaccaagttctgaggtgggctcttggctctgttgaaatttttcttagtcgtcattgcccgttgtggtatggctatggaggaaaacttaagtacctacagaggatggcttacaccaacaccattgtttatccatggacttccatccctctgcttgcatactgcacaattccagctgtgtgtctcctgactggaaagttcatcatccccacactaaacaaccttgctagcatttggtttatggctctatttatctccatcattttaactagcgtgctggagctccgatggagtggtgttaccatcgaagccctttggcgtaacgagcaattttgggtcattggaggtgtttctgctcaccttttcgccgtgttccaaggcctcctcaaagttcttggtggagtagacaccaacttcactgtgacagcaaaagcagcagaggacactgaattcggagagctctatctcttcaagtggaccactcttctcatccctccaactactctcataatcttgaacatcgttggagtcgtggccggagtctctgatgccatcaacaatggatatggttcatggggacctttgtttgggaagctgttctttgccttctgggtcattgttcacttgtaccctttcctcaaaggtctcatgggaaagcaaaacaggactcctaccattgtagtgttgtggtcaatccttctagcatctattttctcattgatttgggtcaggattgatcccttcttgcccaagcaaactggtccagtgctcaaacaatgtggggtggaatgctaataagactctgtggagaggccatgttgatgtcccaatgataagagttaattgcacttgtgtgcatgcttttattttcttactgctattgagtggtttgccttaattagaagagttatctgtgtacatagtcttaaaagaggaaagttgggtctgattggaatgtattcatttgatgatacaacaaaaccatatattgtagtatagccattgtcattgtttgggaaaacatgttctgtgttttggtgctactagatgatttttcatctattgagaataagaat

SEQ ID NO: 8990 - DNA, 1116 bp, Glycine max
  Clone ID: 700830206_FLI
ctcatctggagatcgcacatttgctagtcctcttgctagaaaattgggcgaagagaaaaatgtacctctctctagcattaaaggaacaggacctgaagggctcattgtgaaggccgacattgatgattacttggcttctggtgctaaagaagtttcagcatcctccaaggccaaggttgcaacagatgcagcattggattatactgacattcctgtctctcagatacggaaggtcacagcttcacggctactattatcaaaacaaactattcctcattactatttaacagtagatacatgtgttgacaaactcacgagtttgcggacccaactcaattcattgcaagaagcctctggtggctcccgcatatcagttaatgaccttgtaatcaaggctgctgctttggctctccgtaaagttcctcaatgtaacagttcatgggcaaatgattatattcgccagtataataatgtgaatattaatgttgctgtgcagactgataacgggctctttgttccagtcatcagggatgcagacaagaaaggcctctctacaataggggaagaggtcaaacaattggcaaagaaagccaaagaaaacagcttgaaaccccaagattatgagggaggtacatttacagtgtctaacctgggagggccatttggtgtcagacaattctgtgcaatcatcaatcctcctcaggctggcattcttgccgttggatcttctgagaggagggtcgttccgggttcaggtgctgaagagttcaagtttgcttccttcatgtctgtgaccctcagctgtgatcatcgtgttatagatggtgcaattggtgccgaatggttaaaagcattcaaaggctatattgaaaatccagagaccatgttgttgtaagaataaattgaaggctcccatgacgtactaaattcctttcaagacgttgtaggcaggggatgagattttgttcaccttggtatttctatatggcccatttgggttttgttattgtatccctgaccaatttttgattgaagtatttaatcactgaaaataaattttgcagatttgtaattcttttaataagagagggtagattaggcatttaatttaaaccc

SEQ ID NO: 8991 - DNA, 728 bp, Glycine max
  Clone ID: 700830288_FLI
aaaagaaggaagccattgagaacataggagctgactcatttgtggttagccgtgaacaagatcagatgcaggctgtaatgggaaccatggatggtatcattgacacagtttctgctgtccatcctcttgtgcctttgattggcctgttgaagcctcatggtaaactagtcatggttggtgcaccagagaagcctttggagttgccagcattttctttacttatggggaggaaaatggttggtggcagtagcatcggagggatgaaagagacgcaagaaatgattgattttgctgctaagcatggagtgaagcctgatattgaggttattcccatagattatgtgaacactgcaatagagcgcctcgccaaagcagatgtgaaatatcgatttgtaattgacattggaaacacgttgaagccaagctcttgagtatataaagaaatatgcatgcgtgattcagacttcagatactgaacgtacatggggaaagagataaagattgagaattgataataatttctttaagcattatatgtgttttccgtaatgagtttttgtttcaaggatttagctacgctattccttgataataagcaattaagtgtggggtgtgcaattgcttaagcttggttataatccctttgggacgaaaattgttttgtactatatatacattttaaagagtgaaattgtgtgagattatgaacatgttaaatgtttttaatt

SEQ ID NO: 8992 - DNA, 995 bp, Glycine max
  Clone ID: 700830312_FLI
cgtggatcatctcaaagctctctgcttttttgtgacacagatcccttgctgggttcaagttcctcactttggattctctccctaatgggttcctctgatcgattgtttaaccggcaaagaagtcttcatgagatccttggtggtggtcaagttgcagatttaatactgtggaggcggaagaaccttactgtggggatattgttggtcacactagctgtttgggttgtgtttgaaagatctggttatactcttctgtctcttgtttctaatgttctcctcctcctcattgtcattctttttctctgggccaaatcagctgcaattctcaacagacctgctccacctctaccacagttgcatctctcagaggaaatggcaaacgaagtgaagacttttatccgcacaagagttaatgatctgttatcagtttctcaagatattgcccttggtaaagactcaaggctgttcctgaaagtagctgcatacctctggataatttctatcatcggtggcttaactgatttccttaccctggcatacaccagtctttttattgttcttacagtaccagcaatctatgaaagatatgaagattacatagataagtatatcttgaagggttacagaaaattatgcctattacatttgaaaataaatgagcaatatgtcaacaaagtccataattggatcctggagaagaaaaagctgagctgagtttgtgtttttcacattcattttcacaatttcttttattattcttctaaaatatttcttacaggatcactggtgagattgtaattgagtttgagggacaacaatagtgatcttctccccccaaaatgagtgtcttttgcattttccatcttcaatgatggatcacttttttggtacataatgatgaaactcttacgttgggctggttaatgtagtccactaagcatctaagatttattcttaggttaacaaagaaaaaatataggtgccactacctatac

SEQ ID NO: 8993 - DNA, 3006 bp, Glycine max
  Clone ID: 700830313_FLI
gaaaagcccggtggtgctggcgagtttggaaagtactttagcttgcctgctctcaacgatcgtagaatcgatagacttccttactctgtgaggatacttttggaatctgcaatccggaactgtgatgagtttcaagttaagagtaacgacgttgaaaaaattattgattgggagaatacctctccgaagctggtggagattccattcaagccagctagagtgcttctccaggattttactggcgtgcctgctgttgtcgatcttgcttgcatgcgagatgccatgaacaaacttggtggtgattctaataaaattaatcccttggtaccagttgatcttgtcattgatcactctgttcaagttgatgtggcaagatcagaaaatgctgtccaggcaaatatggaacttgaattccaaagaaacaaggaaagatttggtttcctcaaatggggttctaatgcattcaataatatgcttgtcgttcctcctggatcagggatagttcaccaggttaatttagaataccttggtagagttgtgttcaacacaaatggtgtgctttatcctgacagcgttgttggaactgattcacacacaactatgattgatggcctgggtgttgctggatggggagttggtggaatagaagcagaagctgcaatgcttggccaacccatgagcatggtcctaccgggtgtcgttgggttcaaattattaggcaaactacgagatggtgtcacagctactgacttggtgttgactgttacacaaatgctaagaaagcatggggttgttggcaagtttgtagagttttatggggaaggcatgagtgaactgtctttggcagatcgtgccaccatagcaaacatgtctcctgagtatggtgcaaccatgggcttctttcctgtggatcatgtcactttgcaatatttgagactgactggcagaagtgatgagactgtttctatgatagaatcgtacttacgagcaaataagatgtttgtggattacagcgagccccaagtggagagagtgtactcatcgtatttggaactcaatcttgaggatgtagaaccctgtgtctcaggtccaaaaaggcctcatgaccgtgtccctttgagagaaatgaaggtagactggcatgcctgcctcaacaataaagttggattcaagggttttgctgtaccaaaagaatctcagaataaggttgcagagttcacattccaagggacaccagcacatcttaggcacggtgatgttgttatagctgctatcaccagttgtacaaatacttcaaatcctagcgtaatgcttggagctgcattggttgcaaagaaagcatgtgaattgggattgcaggtgaagccatggattaaaacaagccttgccccaggttctggtgttgtgactaagtatttgcagaggagtggcttgcagaagtatttgaatgagctagggtttaatatagttgggtatggatgcaccacatgcattggaaattcaggggatattaatgaagctgttgcatctgcaattactgaaaatgatatagtagctgcagctgtactgtctggaaataggaactttgagggccgagttcacccattaacaagagctaattatcttgcttctcctcctcttgttgttgcctatgcccttgctggcacagtggacattgactttgacactgaacccattgggatagggaaggatggcacaaagatcttcttcagggatatttggccatccagtgaagaaatagcaaatgttgtacaatcaagtgtgctgcctgctatgtttagggacacatataatgcgatcacccaagggaatcccatgtggaataatttatctgttccaactggcactctttatgcttgggaccctacatcaacttatattcatgagccaccttattttagagatatgagcatgtctcccccaggctctcatggagtgaaagatgcttactgtttgctcaactttggagacagtatcacaactgaccacatctctccagctggcagcatacataaggacagtcctgcagccagataccttatagaacgtggggttgatagacgggacttcaactcctatggaagtcgccgtggtaatgatgaggtgatggcccgaggaacttttgccaatattcgcattgtcaacaaatttttgaatggagaagttggacctaaaactattcatattccttctggggagaagttatcagtctttgatgctgcagagaaatacaagagtgaggggcatgatatgattatcttggctggtgctgagtatgggagtggaagctctcgtgattgggctgcaaaggggccaatgctactgggcgtgaaagctgtcatagcaaaaagttttgaaaggattcaccgaagtaatttggtgggaatgggtatcattccattgtgttttaagcccggggatgatgctgattctcttggattaactggccatgaacgttacaccattgatctaccaagcaatgtgaatgaaatacgacccggccaagatgtcacagtggtgacagatgccgggaaatcatttgtatctacactgagatttgatacagaggttgaactagcttacttcaaccatggaggcatcttacaatatgtcatcagaaacatggtcaatgctaaacattgaatcagatataaaccaagtttgcaggttgaattgatagcactcactggcgctgattcttaactttggtcttaataatctagtatggcctgctacaaggaaatccattgctattcagctattgtatcaataaaccaaggaactagatggctactacgaggaagagttatgactgtcgtttgttgaagaaatgtgattttctttttcaaaaattctattggtcattgaggatgaaaattccttgttacatttttactggttttacagttgagtttttaggaaacatttgccttctattgctgcctcccgactcttgagaattaaggaaatcaggaacattttttg

SEQ ID NO: 8994 - DNA, 1291 bp, Glycine max
  Clone ID: 700830314_FLI
atacggcatcgttaccatggtcaacaagaatgaaaattgcagctggagctgcaaagggtctagcctttctacatgaagcaaagaaaccagtcatctatagagattttaaagcttcaaacatcttgttagactcggtaagtaatcaattactagtcactttctctgacatactctaattaatgcaccgtttggacaatttcactccttaattaatcaattattaactcactctttttaattattcttccaggattataatgcaaaactttccgattttggcttggccaaagatggtcctgaaggagatgacacacacgtttcaactagagtcatgggcacacaaggctatgcggccccagaatacatcatgacaggtaaataatttcacatcaagaagtaaaaaacaatgacaggttgacttggagtttaatttttaactcattgctagctcaaatctcacacgtgtacatttttttcttcttccgtataggacacttgacagcaatgagtgatgtgtacagttttggagtcgtgctcttggagcttctaacaggacgaaggtcagtggacaaagggcgcccacaaagagaacagaacctcgtggaatgggccaggtctgctttgaatgattcccggaaacttagcagaataatggatccaaggcttgagggtcagtattctgaggttggggcaagaaaagcagctgcattggcttaccaatgccttagccacaggccaaggagtagacccttgatgagcactgtggttaatgttctcgagccacttcaggactttgatgatgttccaattggaccctttgtttacactgttccagctgaacaacaacaatacaatgaagtcgcaaaagagagtgaaacacctaaggagaggaagagggaaaatggtcatcatcataaccgacgtcatcatcatcatcgccacaatggtcataggcatcatccacttaaatctcctaagacaccaatgccatcagatcagtcacagaatgatgaacaccgaaatggtagaaaaagtgggtctaattcacctgatacattcaatgcatcagaagctcaacgaagcatgggttagtagacacatatagatctttactgtacataggtgaattattagagttacatagtgtgccacgtactagtactaagtgcaacgagccttcaaggcaataagaaacaggaaaaagatgaaaaggaaaaggaaaagaaaaagagagtgccatatgtaatggtccttgcatggaaaacatgattgagttctatttttttttttt

SEQ ID NO: 8995 - DNA, 1165 bp, Glycine max
  Clone ID: 700830416_FLI
agttttgcaattgaaatggcttctacttctaatgccatcatccaatgcacctcttcttcttcttcgtttgagtatgacgtgtttgtgagcttccgcggtgaagacacacgaaacagcttcacaggttttctttttgaagctctgaaaaaacaaggcatcgaggccttcaaagatgataaagatatcaggaaaggcgaatccatagcaccagagctaatacgagccattgaagggtctcatgttttccttgttgtcttttccaaggactatgcttcctcaacttggtgcctgcgtgaactagcacatatctggaattgcattcgaacatcttccagacttcttctgcctattttctatgatgttgatccatcacaagtgcgaaaacagagtggagactatgagaaagccttttcccaacaccaacaaagttccaggttccaagagaaggaaattaaaacatggagagaagttctgaaccatgtaggcaatctctctggttgggatatcagaaataagcaacaacatgcagtgattgaagaaattggtcagcagataaaaactatcttgggttgcaaattttctactcttccatatgataatctaattgggatggaatctcattttgctacattatcaaagctaatatgtctggggccggttaatgatgttccagttgttggaattactgggatgggtggaataggaaaatctactcttggtcgatctttatatgaaagaatctctcatcgatttaattcttgttgttatattgatgacgtaagcaaactttatcgacttgaaggtacattaggtgtacaaaagcaactactttctcaatctctaaatgaaagaaatctagagatttgtaatgtatgtgatggaacacttctggcatggaagaggttacccaatgcaaaggcacttatagttcttgacaatgttgatcaagataaacagcttgatatgtttactgggggtagaaatgatctgttacgtaaatgcctaggtaaagggagcatagtcattataatttctagagatcaacaaatattgaaggcacatggagtagatgttatttaccaagtggagccattgaatgacaatgatgctcttcaattgttttgcaaaaaagcatttaaaaataattatattatgagtgattttg

SEQ ID NO: 8996 - DNA, 1180 bp, Glycine max
  Clone ID: 700830431_FLI
gagcaacttcatttgctgaggctctccgcatgggcagtgaagtttatcatgtattaaagggaataatcaaggcaaaatatggacaagatgcatgtaatgttggagatgaaggaggatttgctcccaatgttcaagataacagggaggggcttgttttactcatggatgccattgacaaggctggttatactggcaagattaaaataggtatggatgttgcagcttcagagttttacactaaggatgggaagtatgatttgaacttcaagaaacagccaaatgatggagctcatgttcactctgctcagagtcttggtcaactatataaagattttgttaaagaatttcccattgtgtcaattgaggatccgtttgatcaagatgattggggttcgtgggcttcattgctcgcttcagttgatattcaacttgtaggagatgatttgttagttacaaatcctaagagaatagctgaggccatcaaaaagaaggcttgtaatggtttgcttctaaaggttaaccagattggtacagtgaccgaatctattcaggctgcacttgactcaaaggctgcaggttggggtgtcatggttagtcatcggagtggcgagactgaggataacttcatcgcggatctctctgttggcttggccagtggacagataaagactggtgctccttgccgaagtgagcgattggcaaagtataatcagcttcttcggattgaagaggaacttggaagcgtgcgatatgccggtgaaactttcagatcaccttagagtgaactcaattgatccaaaaaatcttattctggaaaagattctgcatcagaatcattgtcatcattgaatttaccaaggaaaatcctgagttttgatatagttgctagccttctggggttttcagatctacttgattagctttaagatatgttttgaactgaaattaccatgtgattggatgataacttggtgcagtaacatggtttcgtcggtgtaactttttttctttttttgaaagaaccctgcttgtgaattagtccccctgcttacgacaataagattttatagtgtgtcatcctttgaagaagggagaggtttagacgttgttgtttggtagttcagtgtttgtaatggtatttctctacataacttatgaacaattcccgtttgttactacc

SEQ ID NO: 8997 - DNA, 548 bp, Glycine max
  Clone ID: 700830504_FLI
ccaatgttacgtatgaggacattcttttgaaggaagagctggacggtcttgcttctaactatccagatcgattcaaaatatactatgtgttaaatcagcctcctgaggtatgggatggtggtgaaggatttgtgtcaaaggagatgattcaaacccattgccctgctccagcacaagatattaagatattgagatgtggcccaccacctatgaacaaggccatggctgcacaccttgaagcccttggatatgcttctgagatgcagttccagttctgattctcttcatcgggggtgcttaacattgcatgcatttcatggccttggccattgaaaaacatatagcaactttttgtttctttttttcctggctatgaatttgtgaaacattggactaacagtgcatttagtttcacaaggttcttcagagttgaggcctgaataattgcttcttgtacgaaatgagatgtataccttgaccatgtgctagagttgcaaactatgaattagacttgttagtattgactacaaatgtcatcactttggcat

SEQ ID NO: 8998 - DNA, 2083 bp, Glycine max
  Clone ID: 700830512_FLI
cattaacacaaatcgcaattaccccaaattcctcaccctagcgtagatcgatctcttcttccttcgtgaattctggttcagggtggctgccatgtatggcacttagtattttccctttttgaagattaggggtgggtgggttgtgtctcgcttagggttccaaagtttgttgttttgaatggaacctcgcgttgggaataagtttcgcctgggtcggaagatcggaagtggctcctttggggagatctatttaggcactaatattcagacaaatgaagaggttgcaattaagcttgaaaatgtcaagacaaaacatcctcaattgctgtatgagtccaagttgtacagaattctccagggaggaactggaattccaaatgtcagatggtttggagtggagggagattacaatgttttagtgatggatctgcttggaccgagtcttgaagatctttttaacttctgcagtagaaagctatcactaaagacagttctcatgcttgctgatcaaatgatcaaccgtgttgagttcattcattcaaaatcgtttctgcatcgggatatcaaaccggataattttctaatgggattaggaaggcgtgcaaaccaggtttatgctattgattttggtttggctaagaaatacagagatagttcaacacatcaacacattccttacagggaaaataagaatttgactggaactgcaaggtatgccagcatgaacactcaccttggcattgaacaaagcagaagagatgatcttgagtctcttggttatgttttgatgtacttcttgagaggaagtcttccttggcagggtcttaaagcgggaacaaagaaacagaagtatgagaaaatcagtgaaaaaaaggtttctacctcgattgaagccttgtgtcgaggttatccaacagaatttgcatcttacttccattactgccgatcattgaggtttgatgataagccagattatgcgtacctcaaaaggatatttcgtgacctgtttattcgtgaaggattccagtttgattatgtctttgactggaccattttgaagtatcagcaatcacagctagccactcctccaacacgggccattggtcctagtgctggaaccagttctggaatgccccccgctgttactaatgctgataggcatacaggaggggaagaaggtagacctcctgctttggtttcagtggattcctcgaggcgcagaatgtcagggcccattttaaatactttatcaagtgccaatgccttgggtcagtcaagtggatcatctaggagggttgctgtctctagtagccgtgatgcatttgttggtgctgagtcagatatccgtactcgcactgctgaggctagccctggagcagcacatcgagctttgagtgggcaaagaagttctccaattggatcttctgatcctaagagagttgtatcatcagggagaaatgcttctcatgtgaaaaattatgacactgcacttaggggcatggaaggtttgcaattagaaaatgatgagaggacccattattaatttcacaacttctctcctattaatttgtgagttgataggcactgccaacgttgcttgtgttgctaagttgagctgtgagaaaattcggatctgaacttgaaattctggctttgtattgttaacccatctggtcaaaccgatgaagctgtgaagctgaaataatttgagccaaaccagggattgtgcttgctgtaaagctcagttttaattggttcttctagctggaactcctaagttttataacatttttctgagttattatattggtttaccagatgtttacagtttcacgtggactgcaaatgtcaaaaactatcaaataccagcaaaaatgtaattagccattgtactcttgttggataagattcccttggtttacacgatgtaattgtctggcaaatattttggtattaggaacttgaatgttcgtatttgtgaggttccttcaaaagcttaaatgcatctctgtagtttttattagatctatcacaatgaactcgtatgcattttatgttgatctgtgaaaaggttttcattatt

SEQ ID NO: 8999 - DNA, 1359 bp, Glycine max
  Clone ID: 700830681_FLI
gatgctataaaactctttcctccgtggctgagaagaaccactcgtttgactcagcgaggaggttgatactcaagtttcaagaggtaagtccctggaccacgttcggacatgtggcctccaacggggcgcttttggaggccttggaaggcgagccaaagctccacatcatcgacctcagcagcaccctttgcacgcagtggccaacactccttgaagcgttggccacgcgaaatgatgagacgcctcatcttaaactcacagtggtggccatagctgggtcggtgatgaaagaagttggtcaacggatggagaagtttgcaagactcatgggcgtgccctttgaattcaacgtcattagtggattaagccaaatcaccaaagaaggcttgggggttcaagaagatgaggctatagctgtgaattgcgttggagcattgagaagagtccaagttgaagagagggaaaacttgattcgtgtgtttaagtctcttggtcctaaagtggtaaccgttgttgaagaagaagctgatttttgcagctcgaggggggatttttttaagtgctttgaagagtgtctcaagttctacacactttacttcgagatgttgaaggagagtttccctccaacgagtaacgagaggttgatgttggagagggagtgttcgaggagcatagttagggttttggcttgttgtggtactggtcatgagtttgaagatgatcatggagagtttgattgctgtgagaggagggagagagggattcagtggtgtgagaggctgaggaatgcgttttcgccaagtggattcagcgatgatgtggtggatgatgtgaaagcattgctcaagaggtaccaatcagggtggtcacttgtggtgactcaaggagatgaacatatctcagggatttacttgacatggaaggaggaaccagtggtttgggcatcagcatggaaaccctagaatatacttacttgaattcaatgaatgtgtgtgtattgatgatcattgtatatatatatatatatctgtgtttggtgtatggtaccattactatatatatatattggggggctaggctaaagctaaagctagctaaccttaaaaccaagggactgaagagaagtacactggaaattaaggtgctctctggggatatataccaataccaagagtattattattagatggagctagcaatggatggatggatctggatttttcttttaactttctcgtatgattcttgcacactttgtaatttttctcccgtccaagtctcctttaaagggcaagactttttgcttgggagtttgtgttgttagacttttacacctttttattatagttaagttaatat

SEQ ID NO: 9000 - DNA, 1548 bp, Glycine max
  Clone ID: 700830687_FLI
ctagtgtggttttttcccttcatcgtcttcctcttgaaggtattgaagttgttttgttatgtgtttgccagagggagagagagagccatggcactagaggcagtggtatttccacaatcacaagacccttttggtggtagtggttacggatcagtgaataataaggacttctacaactgcaccttgttggctgctacttcacccaactcatggggggactatgagcaacacatcaacatcaacaaagaagaagaacaaggtggtgcttctatctccacttttcaaccagagagtaattacccttatggaaattggaccagctcctcctcatctatgttaccccacttcaacaatgaacttcaagaaaccactactactgaccccagtaacaccttagatagcttaaacactcgtcccaagaggcgcagagccaaaagcagaaagaacaaagaagaaattgagaaccaaagaatgactcacattgctgtggaacgcaatagaagaaagcagatgaatgagtatctttctgttcttcgctctcttatgccagactcttatatccaaaggggtgatcaagcttctataattggaggtgctattaactttgtcaaagagcttgagcagaggatgcattttcttggtgctcagaaagaaggagaggggaaatctgaggctggtggtgcaacaaacatgcccttttctgagttcttcacctttcctcagtattcaactagtggtggtggtggttgctctgataattctgcagccgtaggtgaagacgtgggtgaggttaagtgtggcattgctgacatagaagtgaccatggtggaaagccatgcaaatctcaaaataagatccaagaagcgccccaagcagctcttgaagttggtttctggtttgcataccatgcgcctcacaatcttgcacctaaatgttactaccaccggtgaagttgttctctactctcttagtgttaaggtagaagatgattgcaagttgggatcagttgatgatatagctgcagctgtgtaccagatgctagataaaattcagcaagaggcaatgttgaattaagatcaaaccttgaccaaatttgccttgccccacttggtttttaacctcatgtcaacaccttacttcatggtggatcattgtctctcgctatttttctctttcaagatgtacctaattattgcaacttctgttcacttcaccctttgttaatctactgatggtgccttgatgtgggctccttggaggaagttttttggtttattccttcttgtgtatgtctgtgtagctcacgagctccttttaatctctctctatctctctcttctctttttctctggggtagggggtggagaaggctgtgtattatattgctcgagacatattctagtgcttggtcaattttgcctacctagctttgaaattggtaggtcttgtctacctcaaccataagccaaagccattaatttgtcaagctgaaattgagaacatctcaaaaataaaattgaatgaaaatgagagccgaagatttttggc

SEQ ID NO: 9001 - DNA, 444 bp, Glycine max
  Clone ID: 700830740_FLI
aatttgttgagtttttgaacttaatggccaagaaaatgaaggaaactgatgcagaggaagatctcaaagaggctttcaaggtgtttgacaaggatcaaaatggctacatttcagcaagtgaggtatatgtataaacttttattctttctattcactttttattgtaactttctttctctgacggcaatgaccaatcaaagtattcatgagatttctgacaaagtaaggttccttcaaacttgaacaaaaagcaagtagggtcaagatgttgcagagtgcaaactagattacaactcttgaatcttcccttttgtatttttttaatactttttctataaatggtgcgtttacttttctgcctacgtaatagaggctgcatatgcaatttttcttataaaattcctacttcaagtttcagccaatcttactcaaatttcttccttg

SEQ ID NO: 9002 - DNA, 2296 bp, Glycine max
  Clone ID: 700830793_FLI
aaacacgacagcaagactcctactaatactaaagaagcagtggcgtattgtgttgtgtcggtggcattgttgttggagtgagcgaagaatatgtattctagagattcatggggtggaccgttggagataaacgcgacggactcggcgacggaggacgagcggagccggaacctgcaggacgttgacagggcagcgctgtcgcgtcccttggatgagacgcagcagagctggctccttggccccggcgagcagaagaagaagaagtacgtcgatctcggctgcatcatcgtcagccgcaagatcttcaagtggaccctcggcacaatcctcttcgccgccttcctcgccggcctcatcgccctcatcgtcaacaccgtcccccgccaccgccacaaacacccccctcccgacaactacaccctcgccctccacaaggccctcatgttcttcaatgcccaacgatcggggaagttgcccaagcataacaatgtttcatggaggggaaactcgggaatgcaagatgggaagtcttcagatcattctgctgcgattaaggatctggtgggtgggtactatgatgccggggatgctatcaagtttaactttcctgcttcgttttccattactatgttgagttggagtgtgattgagtatagtgcaaaatatgaggctgctggggagcttgaacatgttaaggagatcattaagtggggtactgattattttctcaagagtttcaatagtactgctgacaccatcaccacccttgctgctcaggttgggcttggagatacttccggtggtgacagtccgaatgaccactattgctggatgcgcccagaggacatggactatgaccgccctgtgactgaatgccatagttgttctgatcttgcagctgagatggctgctgccttggcatctgcttccattgttttcaaggacaacaaggcctattcgaagaaactagttcatggtgctaccacgctgttcaagttttctagggagcagagaggcaggtacagtgcagggagttcggaagcttctatattttacaattctaccagttactgggatgagtatgtttggggaggcgcatggatgtactttgcaactggaaattcatcgtaccttaagcttgctactgctcctggcctggccaagcatgctggtgccttctggggaggccctgattatggggtactcagctgggataacaagcttgctggtgctcaggttcttctgagtcgtttgaggttgttcttgagtcctgggtatccatatgaagaaattttgaggacctttcacaatcagacaagcataatcatgtgctcctatctaccagttttcacaagctttaacagaaccaaaggtggcttgattcaattaaaccatggtaggcctcagcctctccaatatgtggtcaatgcggcctttttggctgccctatatagtgattatcttgatgctgctgatacacctggatggtattgtggacctaatttcttttcaaccgacgtgctccgtagctttgccaagtcccagattgattacatccttggaaataacccaaggaaaatgagttatgtcgtaggttttggtaatcattacccaaaacacgtccaccatagaggagcatctgtaccgaagaacaagatcaagtatagctgtaaaggtggatggaaatggagggacacttctaagccaaacccaaatacaattgttggtgccatggttgccggtcctgacaagcatgatggcttccatgatgttcgtacaaactacaattacacagagccaacacttgctggaaatgccggtttagttgctgcactagtggcattgtcaggcgacaaaggcacatctattgacaaaaataccattttctctgctgttcccccaatgtttcctacaccgccaccacctccagcgccatggaaaccataagctcatcgtgccattggttatttctttctagcaagtaccccagatgatatgagtgcaccgttaaccttcgttgttttgtatcaacttgaagatcagggtaattttgaagaaaaaaaagcttggagaagtggagcttggccactgaatatagctgcctggggccaatgatcgactcaagattagcattaagaattgataaagtggtacttgagagtgtgtctctttaaatttttgtgatactcatatagtatatatgtatctaaatcaaatcttgtattctttaaacatgaaaaactgaacagcttgtaattgtttgacagtttcatctaatgccttcacagttttaccc

SEQ ID NO: 9003 - DNA, 526 bp, Glycine max
  Clone ID: 700830794_FLI
cttggttctgggtgtgtcctttatttccaacatagctactttcatggctgtgactacctcttccagttccaccagcggcttcttcagtctccggtcaccaaattcggtcgattccagcagggtctcctccacccacggctcttcctccgcttgcggaaagttcgatggggtggccatgtggttcatcaacggcgtcacaaccgctttcttcgcctccttgaaccgttgctcttgcattcgcatcgccaccgaagaagacggcgacgatgccaacgacttgccgttgatgctcaacgacggaaacctccgccaggatggcgtcgtcgttgcgtgcaccaccagcaggagaaggacgggtaaagggaagaagagtgaagctgttctcgtcgacgacgactgaaaaaaagtggtaacaaatacgtactacgtaccctttgatgaggccttgaacaaattaaatcatatcaatgtctctcttaattttcttgctaagtgatcatatattataatgttatatgggtttgtt

SEQ ID NO: 9004 - DNA, 975 bp, Glycine max
  Clone ID: 700830806_FLI
aaacacatttggtcacagcatactccactctctctacctcagagacttattaagatgaagcccaagacttgcgagctttgtcatcaactagcttctctctattgtccctccgattccgcatttctctgcttccactgcgacgccgccgtccacgccgccaacttcctcgtagctcgccacctccgccgcctcctctgctccaaatgcaaccgtttcgccgcaattcacatctccggtgctatatcccgccacctctcctccacctgcacctcttgctccctggagattccttccgccgactccgattctctcccttcctcttctacctgcgtctccagttccgagtcttgctctacgaatcagattaaggcggagaagaagaggaggaggaggaggaggagtttctcgagttcctccgtgaccgacgacgcatctccggcggcgaagaagcggcggagaaatggcggatcggtggcggaggtgtttgagaaatggagcagagagatagggttagggttaggggtgaacggaaatcgcgtggcgtcgaacgctctgagtgtgtgcctcggaaagtggaggtcgcttccgttcagggtggctgctgcgacgtcgttttggttggggctgagattttgtggggacagaggcctcgccacgtgtcagaatctggcgaggttggaggcaatatctggagtgccagcaaagctgattctgggcgcacatgccaacctcgcacgtgtcttcacgcaccgccgcgaattgcaggaaggatggggcgagtcctagctgatgatagctataccaatgcattgtaatgtatgtgtaatccaaatgtgtggatttcaaatttgagtttagtttcctttgcttttcttttcttttttgtatctacgaatggttgttgattaatgtgtagcaattggatcaacaaattcgaatataaatgaaaaactagccagccaagcaactcattct

SEQ ID NO: 9005 - DNA, 1038 bp, Glycine max
  Clone ID: 700830813_FLI
gctggtgctctgtggggattatcagtctcggaaactaacagtgttgccattggacgagaaggaggtgttgcacctctgattgcacttgcacggtctgaagcagaggatgttcatgaaactgccgcaggagcactatggaatcttgctttcaatgctagtaatgctctaagaatagtagaggaaggtggagtatctgcacttgttgatctctgttcttcatcagtatcaaaaatggcacgattcatgtctgcgttggcattggcatacatgtttgacgggagaatggatgaatatgctttagtagtcacttcatctgaaagtatttctaagagtgtgagcttggatggagctagaaggatggctttgaaacacattgaagcttttgtccttatgttctctgatctacaagcatttgcggctgctgctgcatcatctgctcctgcagcattagcacaggttactgaaggtgcgcgcattcaagaagcaggacatttgagatgcagtggtgctgaaattggaagattcatcactatgctacgaaatccatcatctatactcaaggcttgtgcagcatttgctcttctccagtttaccattcctggtggacgacatgccatgcaccatgctagcctcatgcaaagcctgggagcatcaagagttctgcgtggtgcagctgctgcagcaactgctccacttgaagcaaaaatctttgccagaattgttctgcgcaatcttgagtatcaccagatagagcaagcactagcgtagatgagttcatttgttgtttacagtcccctttctcaaaccattttggacttctaatatttcacatgtagacaaactgtccaatgtgtcataagaacactagtcggtgaccgtgatgcatgtgatgtgaagcaagctataaattgacatgtttctattttccatctttggaactgcttagaaattaagatgtatttctttcctcccctgtaccaatctcttcatatcaaggctgcaacaaataggcaccttgacataaattttattgccttg

SEQ ID NO: 9006 - DNA, 1410 bp, Glycine max
  Clone ID: 700830841_FLI
ttacaacaaaaacaataaaatactaaaaaaaaaaaaaactacacttcacccaccaaaccaaagcaaaagggaaagaggacgatcgggaaagagagtgtctttaatttcacagtttcatagcaattatcgccgaaaaatgcaaaatttccactcatatctctttgtttatgacatctaaaacatctatctactctctacccactttctcagttccaggtcagcaagagaaacagtacttatccatattacagggttatgtgaactgaagagggagggtactggtttgtggaggcagtgacacttttgcaagcttagaatcctctatcctagttttttgtgaaaacaaatagtgtgatgcttttggaggctccttttctcaaagcttgcgtgtagcactatctgcattttggtgataagttgaagtgtgggaaaaaatctaaagctaaagagagtttgggaagctggaacaatgggttctgtttgttgttgtttgagttttgatgattttgaagattatgtaaatccaaatagtcctgtatataggaactgcgtgtgtctcagttgcttgatacagaaccttttgagtgtgtattcgtcaatattccgtagaggggatgctcattcaattccttcgtctattcaaggggcagcatctataacttcagcagcatcactcgataattcactatctgacatgtaccgctctcctccaaggccattaccatatgatgcagaacccagatattttcgctcacaacgtgatggactagtttcaaggcgtgagaagggttcaagtcattcaaatgaggaaacagaacctctaagaagtgatgcagatctggatccagagtctttaaattcaggagacaaatggaatgaaagtgcctgtgaagctgggtcaaaggaataccattctaagtcctccctaagacttcaatcaacaaaatattcaactggagtgggccttgtctatgcatcatcagaggaggaggatgtttgtccaacttgtcttgaagaatacactaaagagaatccaaagataatgacaaaatgctctcatcattttcaccttggttgcatttatgagtggatggagagaagtgacaactgtccagtttgtggaaaggtgatggtattcgatgaaacgactttcacttgatttcaaggtttatgttgtggatgaagccagcaactgaggcatggaagaatacaagtatatagacattgtgaatactacagattaagtgtttgtcatgtatagtaagaatgaaaagtttccttaaccattgttgtgagttcattctaatcccgcttgtttttgtgttttaaaatttccacatgtccaaaactgtgaagaaagaaagaatatgcaattttagatggaaaactttgtgatggcttcaacatctt

SEQ ID NO: 9007 - DNA, 1215 bp, Glycine max
  Clone ID: 700830845_FLI
gggtgaggaagaggaagagagaaatgtccaatttgagatcaacacatatgatttcaagattgattctggtcccgtcagcttggtagttaatgcttgtgcaagcagggatcttcaagataacattgtgggagtttgttttgtggcacaaggtataactgctcagaaaacaatgatggaaaaattcccccgaattgaaggtgactacaaggcaattgtacagaacccaaacccattgatccctccattatttaacacagatgaatttggttggtgttgtgaatggaattcagctatggcaaaattaaccggatggaagcgagaggaggtgatggataaaatgcttttaggagagattttcgggacccagatagctggttgtcgcctaaggaatcatgaagctgttgttaattttagcattgtacttaatacagccatggctggtttggaaacagagaaggttcctattggtttctttactcgcgatggaaagcatgtagaatgtcttctttctgtgactaagaaattggatgcagaaggtgcagtcactggtgtcttctgcttcttgcaactagctagtccagagctgcaacaggcattacacattcagctcctatctgagcaaactgcattgaaaagactgaaagatttaaattatttgaaaaggcaaatccggaatcctttatatgggattatgttctcccggaaattgttagagggtactgaattgggagctgaacaaaaacaatttctgcaaacgagcacgcagtgtcaacgccagcttagcaaaattctggataactcagatcttgacagcatcattgatggaaacattgctgaaccagatgtttggacgtgatggacatgaatctgaggagggtattagcatgctgattagcagaaagctgttaaagctcatgaagggagacgtacgttacataagggaagcaggcaaatcatctttcatcttatctgttgaacttgccgcagcacataaatccaacacttaacactttggaaataataccaaaccatattaattttttctaaatcagaaagtgaaggaagcaagaaatttgcattccttgttcaatatttaactcttgttattaagtaccttgatgtaaggtgatgtagatatgtaatgtataactaactagctatttacacactttatagacctgttctcgtctacagcaatgatgattcatttgcaac

SEQ ID NO: 9008 - DNA, 1682 bp, Glycine max
  Clone ID: 700830872_FLI
gagtttaattcgaaactttctgactttggtttagctaaggcgggtcctactggcgatagaactcatgtgtccactcaagtaatgggtactcaaggatatgcagcacctgaatatgttgcaactggtaggctttagcttcacctaaatcatgagttggtggtttaatttcggctcatcatactgataactggtgtctgggttttcatgattttccttatgagttttagtcctcattttcgtttcaaaccaggcattttgtgcctcaactttttaggatcatcatgttttttatgttgtactactccctctgtcccaaaatgattgatgtttaagcctttgaaaaaaattctacattgattgatcttctcacttttcaatgaaatattcaaacatctatttcaaatttaccctgtaataaataatgttgtcttgaaagacttaataatacatttattgaaattaagagagagaacaagaatattttagtaaaattgtctcctaaccatcagtcattttggaactgagggagtatttcataggatgaggaatgctaataacgcacactcttaccctctattttaaattctctcgcattattgagcaaaatttcatgataacatcactaaataacttggggcctgtatggaattttacccaataattgtgttgaaaagagatagtcaggtaaaggtgtgttgttagcatctctcttcataggataaatgagaagaagactcatttcacatctcattataggttaaaacattacactaaatccctgattgatttccaggtcgtttgacggccaaaagtgatgtctacagctttggagttgtgttgcttgaacttctatccggaagacgcgctgttgataaaaccataaccggcatggagcagaatctggtggactgggcaaaaccatatttgagcgataaacgaagactgttccggattatggataccaagttggagggccagtacccacaaaagggggccttcacggctgccacacttgctctacaatgccttaacagtgaggccaaggcaaggcctccaatgacagaggttttagcaactctggaacagatagaggcccccaaaactgcaggcagaaactcccattcagaacaccatagagttcagactcctgtgagaaagtctcctgcacgaaaccggtcaccgttaaatctaactcctactgcgtcccctctcccagctcaccggcaatcgcctcgtgttcactaagctgtgaacatagagcatctgcatgcatgtaaattccttaaatttatcaggttgtgttttggaccgcgtgcgttgaggcatgtgtacttgaatgcaattttgggtacttgaatgcaattttgggtcatgcacggtagaatagttaacaccacatttatccaaatgctatgcaagttattgcatcagtattctgcatgtatatttcctttttccccacgtagaatgtcttgttgataataacaaccagacacattgcttcccttctattatgggtgcctcataatttgggtttttggcctaaaacaattccaaaacatggagagggttgttatgtacttgtaagttgttctattcttgtatatattatttttatcatatcactagttaatagttaatgtgagattttaaattctttctttttactactttaaggactg

SEQ ID NO: 9009 - DNA, 757 bp, Glycine max
  Clone ID: 700830907_FLI
ggtttggagaaaaactacattaaggaggcattttctggaacaaatggacctgctatgggaacaaaagtggccaagtaccctcaatgtccacaccctgaactggttagaggacttagagaacacacagatgctggtggcatcatcctattgctccaagatgaccaagtgcctggcctagaattcttcaaagatggcaagtgggtggagattccaccctccaagaacaatgccatttttgtgaacacaggtgaccaagtagaagtgttgagcaatggcttttataaaagtgttgtgcacagggtcatgcctgacaaaaacggaagtagactctccatagccagcttttataacccagttggtgaagccattatttcccctgctaacaaactcttatatccaagtaattatcgttatggagactatttggagctatatggcaacaccaagttcggtgaaaagggtcccagatttgaatctatcaagaatatgaccaacgggcactgcaatcttaaaccttgaataaagatcaaacatatacccttcattctagttaattttacaagtcatgtttttcgcgttctccttaaaagtagtcaagaaagaaatacgtaacataagtttttttttttttttttatggttttaatatcaataataacaaagaagaaaacacaagttttttctttatctatatccatccctttctttctgtactttttataaactttcagttattctacatactagtttttatgaac

SEQ ID NO: 9010 - DNA, 1538 bp, Glycine max
  Clone ID: 700830949_FLI
gttggtttatttccgtgatagtgcaatattattgacttatttctactgggaaaggttccagagaatgtgtcaatatgtaaagcacctctagtgttgtggtttcacctttacttaatggagttaacaaagttatagagaaaaacttagttccatttggtccatcaggtagctcggcagatttgacacattctctggaacctttcccagtagaaataagtcaatcagagtcacagttggtttatttccgtgatagtgcaatattattgtctccctatcatgtcaagcaacagacaacttttattaagactccaagcactcgggtagaatcattcacagtgatggaccccactaaacgtgctggtacagagttgaaatacgggccatatgaaaatcatcccccgtattcatattctcctgtacttattcattttgaaaataacaatgcctttgctgttgttgaggagctagaacgggaaattgaaatatctcactggggaagcgttcaagtcactgagcgatatagcttggtccatgctggtgctcgacataaaggtgttttttcaagggttgaatatcaaactaaaccaggtggtactggtgtctcttcatttaaacatcttttagcgaaactaccccctagggttcactcagtatactacagggatggaataggaaatatttcgtcgtcacatctacgtacagattcttggaagtcagaacttgaaattgaacctcggtatcctctatttggaggctggaaatcaacctttgtcattggttatgggctaccattgcaagactttctttttgagtctccagatggcagaagatacctcaattttacttttggttgccctcttgttgagacagtggttgacaagttgattgtaaaagttgtgctgccagagggatccaaagatcccactgttgagattccttttgaagtgaagcaacatctagagatcaagtattcataccttgatgttgtcggcagaactgtggtggttctagaaaaaagaaatgcagttcctgagcataatactcctttccaggtatactacaggtttaaccccatattcatgcttgctgagccattgatgctggtatctgcatttttcttgttttttgtggcttccgtggcatatcttcacattgatctttccatacgcaagtgatgaacacctagctagtttcttgaaaggtatgcgtttttttttaaaaggcagtgactgagcagatccaagggttccttattttggaaggtcatattgcattgtggcaattttgtgtggagttaagaggactaattgcagttatagatatacttgtttgtacaatttttcccaggcaatttgatcttgtgccattcatccaaactaactttgaaccattccttctatttaagaaacataggatatgttagttaaagaccaacatcctaaaggcacgtaatgggaacaaacttgtaagatcttactagctatgagaaatatttatgtgatacttagcaatcaatatacaaactttaaatgaaattt

SEQ ID NO: 9011 - DNA, 501 bp, Glycine max
  Clone ID: 700830969_FLI
tttgcgagatgacaagcaatttctgattgatcatccgggatccgcacgaataacaactgctcagggtgaagaactgaagaaaatgattggtgcagtcacttatattgagtgcagctccaaaacacagcagaatgtgaagacagtttttgatgctgcaataaaggttgcattgaggccaccaaagccaaagaagaaaccacgcaagaaaaagacctgtcctttcctctgatatttcattattcagttatctttcaccccaaatcatttatagagcagaagtcaagtccaatgctttttagtttttgtgatctatatatataaagagcctgtgggtttttggataatatctgtgaagaactttagattcctcttgaattgtaaacgatggcaaatgagcttaagtgttacattgttcaattaattattttattttgcagtgtctagctgaggctctgtatttcaatacttttagtacaaaaagaggtctccaatttgaaattg

SEQ ID NO: 9012 - DNA, 1686 bp, Glycine max
  Clone ID: 700831054_FLI
attccacaccctcttctcacaaacaaaataactgcaacctttctgaaacagagcatggctcctctcacattctccttcttcttcatccttatctcttacatttcttcatcatcagaagcgggatcaatcggaataaactatggaagaattgcgaacgacctacctacaccggcgaaagtggtggagcttcttaagagtcaggggctgaaccgtgtgaagctctacgacaccgacgccaccgtcttaaccgcgtttgccaactcaggaatgaaggtggtggttgccatgccaaacgagcttctcgccaacgccgccgcggaacagtccttcaccgacgcgtgggtccaagccaacatctccagctactaccccgccacgcaaatcgaagccatagccgtgggaaacgaagtgttcgtggacccgaacaacacgacaaagttcctcgtacccgccatgaagaacgttcacgcttctctagtcaaatacagcctggacaaaaacattaaaatctcctcacccatcgcactctcggcgctccaaaactcgttccccgcctcatccggttccttcaaaaccgaactcctcgaaccggttatcaagcccatgctcgacttcctccgccaaaccggttcctacctaatggtgaatgcctatccgttcttcgcttacgctgcaaactctgataaaatctctttagactacgcgctgttcaaggaaaaccctggcgtggttgattcgggtaatggtttaaaatacaccaacttgttcgacgctcaaatcgacgccgtttttgctgccatgtcagcagtcaaatacgacgacgttaagattgcagtttcggaaactggttggccttctgctggggactctaatgagattggagccagccccgacaatgcggcgtcgtataacggaaacttggttaagcgcgtcttgagtgggagtgggacacccttgaagcccaatgagtcactcgacgttttcctcttcgcgcttttcaatgagaaccagaaaacgggtcccacatcggagaggaactacggcttgttttatccaagtcagaagaaggtttatgatattcagctcacggcggaggcgccaccgtccggagttgggaagagccaggttccggtgagcggtgacgtgacgacgtcgtctaagggccagacgtggtgcgtggcgaatggcggttcttcggagaagaaactgcagaacgctcttaactacgcttgcggagagggtggggctgattgcactcccattcagccaggtgccacgtgttacgatcctaacactttggaggcacatgcttcctacgctttcaacagttactatcagaagatggcacgtgcatccggcacgtgctattttggtggcactgcttatgtcgtcactcagcctcccaagtatggtaactgcgaatttcccacgggatactgaaatgatggagatggagtgtttttggtgaaaccttaattgatttggatttatctggatttcgcgggagtttttaggagcttttccattggtagcacgtgtttaggctttgagaaatatgcgttagcgttactgtttgtaataaatcattatgatgattactttgtggggttattgatttccttgactcatttatttgtaattatctctattttttaatgaagaataatatagaatacatttcttttg

SEQ ID NO: 9013 - DNA, 852 bp, Glycine max
  Clone ID: 700831056_FLI
gggagatgctgtcaagtatgtgaaacaactacaagaacgtgtgcaaactctggaggagcaagcagcgaagagaacacttggatcgggagtgctggtgaaaagatctattatcttcgctgatgatgaaacttctgacagccactgtgagcattcactccccgaagtcgaagtcagggtttctgggaaagacgtactcatcagaactcaatgcgacaaacacagtggacatgctgcaatgatactcagcgaattagaaaagctttacttcattgtccagagtagcagctttttgcccttcggcaatagcaaaactgatgtcactattattgctcagatgaacaaggaaaactgcatgacagcaaaggatctcctaggaaggttgcgacaggctttggtcgggcataactagttcaaggaatttatgtctatgatgtgcatgattacaagaataagtttagtcaataatgatttttatcgcagtgctttatttttcctttttcgtccatgatgtggattctggagttacatatcaagggcctgcgagtatctgtttacataggacttacatggagttgttcattctgctgtgaggtgtggggagtttcaacagaaacaacacatgatgccaaagtgttttttttctgttgctttttgcgtagttgattggtcggctatgttgccctacaccagaatagcattttcaaatctcagtagtttttttccctctcattaagaaggatttttgagaggctttgacttatagatcacctctttcttctctgtttccctgttgtgaaaaagggttccggtttgatagaagctaaatgccgagcacttatttaaatttgtttc

SEQ ID NO: 9014 - DNA, 1258 bp, Glycine max
  Clone ID: 700831088_FLI
gttcgccatggatgaatcaccggcgaacagggagggcaaaaacagagcacagggaaacgaggaacaagaagatgatgactacatgggtgacctttctcagtttcttccttccgatgctctcttccctcccaagttgttttcatccaaaaagatttccagcaagaaagatccttcagtcaattcttccaagaaccggttgaaaactcatagctggcaagaacggagaaaacttgaaagagaaaggaagcaacaagaagaggatgagcaaacattagcgaaagttgaagctccaatagcacaatccaacattgggtttaagcttctcaaacagatgggttacactccaggttctgcgcttggcaagcagggctcgggcagggccgaaccagtggggattgaaattcgacggtcacgagctggtgtaggcttagaagatccccacaaggagaagaggaaaaatgagggaatcatgatggacaggaaaaggaggaaagaggaggacctaatgaaagaatttgggtccaggcaaaagtcacagtggcagagtaggagagttataattaattacaataaggcaaaggctgcccttgatcaattggagaatagggaaattgtggagccacaaaagaatgacgatgacgcagagggtgaagaagaagaagaggaagaaataactgaagaggacttgcacgatgttttgatgaaactgagggatgaatttaattattgcctcttttgtggatgccaatacgaatcgagtgatgtcctcttgggcaactgccctggaaccaacgaagatgaccactaaattgaagatttctgatgtgaacagtttccattatcagattttttgtggttgtcaagcaagttctggaagcttttaatgcttattattccaatggagctgtataagcttacatctagtggatgattggacttatggcatttcttgtgccaatatacaaatgaattgtgtctatgctctcgttacaattcagataggaggttgcctcatcttcatccatgccgaattgccgagggacatggcagcctgtcctctttcatgaaatggattggctcatatacagtttgtgaaactttcaattcatattggaaaatttcacagtagtttactcggtcaatgttttaattttagactgcatttagaaagtttgtgacctgacattcttacctgaacttgacatggatattacatcaaaattttagcaaatatcaatcagatgtattgattgttatt

SEQ ID NO: 9015 - DNA, 1175 bp, Glycine max
  Clone ID: 700831147_FLI
gttggccctgaatactgcaaccagtcccccaatttgcaggctcaaaatggtactcacttagattcaggagaggcggtggatgcctcatctactttttctaatgaagaagacgatcaagtcactcatggtagtgtatcattaggttatgatggggaaggagatgaatctgagtctaagagaaggaaactggaatcatatgcagagttgagtggagctactagagccattcgcgagcctagagttgttgtacagactaccagcgaagtagatatcctcgatgatggttatcggtggcggaaatatgggcaaaaagttgtcaaaggaaatcccaacccaaggagttactacaagtgcacgaatgcagggtgcacggtcaggaagcatgtggagagagcatcacatgaccttaaatctgtaatcacaacatacgagggaaaacataaccatgatgttcctgctgctcgtgccagcagtcacgtcaacgctaatgcttccaatgccgttcctggccaagcttctcttcagactcatgttcatagacccgaaccatctcaagttcacaatggcattggaaggcttgagaggccttctcttggctcattcaacctacccgggaggcagcaactaggaccatcccatggcttctcctttggtatgaaccaatccatgctatcaaatctggtgatgtcagggttaggccacgcgcaagcaaagcttcctgtcatgcctgttcatccgttcttggcagcgcaacaacaacatcaacagcgacaacaacatcaacagcagcagcaacatcaacagcagcagcaacaacatcaacagcaacagcaacatcaacaacaacaatgcgctgcaaatgatttgggtttcatgttgccaaagggagagccaaatgtggaggctattcctgaacatggtggccttaacctgtcaaatggctcatcagtgtaccaagaaatgatgagtcgcatgcctcttggacctcatatgtaaaattttattccctgattctttaaagaaaaaactaatgtttacatctgataacatacatatatagatttatacatatatgtaatgccaaggcatacataggcggacttttcattattagactcattgtaatgtttgacattcttcatcacatgtcaaaggtatatgttattttgctcatt

SEQ ID NO: 9016 - DNA, 994 bp, Glycine max
  Clone ID: 700831164_FLI
gcatgacggaagagctctctctctctcttgttcttatccatcgcattgaaaagcagcaccatcaccacccccacctcttaccccttctttcataaatatgcgtctctgcaacaacatgttcaccaccacctccttgttcttcacatcatcctcatcatcttcttcaatcagttgactcttcgttcctccctctattctttcggatggagcccatggacatcgttgggaaggccaaggaagacgcttctcttcctaaagcgacaatgacgaaaattattaaagagatgttgcccccggacgtgcgtgtcgccagagatgcacaggatttattgatcgagtgttgtgtcgagtttataaaccttgtctcgtcagagtccaatgaagtctgtaacaaagaagaaagaaggacgattgcaccggagcacgtgttaaaggctttaggggttcttggatttggcgagtacatcgaggaagtttatgcagcatatgaacaacacaagttggaaacaatgcaagattctttaaaaggtgcaaagtggagcaacagagctgagatgactgaggaagaagcattggctgaacagcaaaggatgtttgcagaggcacgtgcaagaatgaatggaggagccattcaatccaaggagccagaggctgaccaaagtttagagagctaactttataggacacttttattttcttttgaagcataggcaagcagcatctcttactcttccctatgcgttgttaatttagctcgattttgcacatacccccattcactagtttgctggcctacgtgaatgtactcgccatttgtgttcttttagtaatccatatttgtaagttaatgtaattattggagttcatctaaaccctcgtctatttagaattttacatgtagattatttcatttacctgttgtatctcccacaccaacaacagctattgccttgattttgacaatagttgctatattagaatgtaacaatctatt

SEQ ID NO: 9017 - DNA, 589 bp, Glycine max
  Clone ID: 700831219_FLI
gacagctgaaactggaacataccgttggatggctcctgaggtcattgaacacaaaccatatgaccagaaggcagatgttttcagttttggaatagctctttgggagcttttaactggagaactgccttactcttgcctgaccccattacaagcagcagttggcgtggtgcagaagggcctgcggcctacaattcccaaaaatacgcacccaagactttctgaacttcttcagcggtgctggcaacaagatccaacgcaaagaccaaatttctctgaaataatagaaattcttcagcagatagcaaaagaggtcaatgatcacaaagataaatcatcccatggctttctctcagctcttagacgggcccatcattgatattgatataagagtattacacgaaagtatagcctttttgctcctgtatagtagtcatactctgaccaaatatctattgagttggttgtttataatactcttgaaagattccattgtattgtgcttgccttaaatttctgttacaatctgcgtctttctcccatttgtctatcaacttattcgcctgtgaataggatggatgcaagtttagtg

SEQ ID NO: 9018 - DNA, 703 bp, Glycine max
  Clone ID: 700831325_FLI
cgacgccgtacgacgagcgcgtggagaaccacgagaaccacgcggtgcacgccacgcaccagatcgcggagtcgtggattcacgcgtcgcggaaggttctggagagaatcgcggacgcggtgctctccagaaccttcctgaaagcagcagaggactgctacgccgtggagaggatctggaagcttctcgcggaggtggaggacctccacctgatgatggatccggacgatttcttgaggctaaagaatcaactctcggtgaaatcctcgagcggcgaaacggcatcgttctgcttcagatcgaatgagttagtggaactgacgaagatgtgcagagatctgaggcacaaggtgccggagatattggaggtggaggtggatccgaagggaggaccgaggattcaagaggcggcgatgaagctctacgtttcgaagagcgagttcgagaaggttcacttgttgcaggcgatgcaggcgattgaggcggcgatgaagagattcttctacgcgtataagcaggtgttggcggtggtgatgggaagttcagaggctaacggtaaccgagttgggttgagttgcgactcggctgactcgttgactcagattttccttgaaccgacgtattttccaagcttggatgccgccaagacttttcttggatacctgtgggataataacgataataacaaatggatatgaaaacg

SEQ ID NO: 9019 - DNA, 671 bp, Glycine max
  Clone ID: 700831422_FLI
gggagcttgaacaatttgtccctactcaacaagcaatatggattgtcaaagagtactgacgaggccatgtttgtgattgaagcttataagactctccgtgaccggggtccataccctgcagatcaagtggtcaaggaacttgatggcagttttgcttttgttgtctatgacagcaaggttggcagtgtctttgcagcactgggttctgatggaggagtgaagttgtattggggtattgcagctgatggatctgtggtgatctctgatgatctagaagtcataaaagagggttgtgccaaatcctttgctccctttccaacagggtgtatgtttcacagtgaaggaggtctgatgagttttgagcatccaatgaacaagttgaaggcaatgccaagggtggacagtgaaggggccatgtgtggggccaacttcaaagttgataagttcgccagagtcaacagcattcctcgagtgggaagtcaatccaattggatggaatgggaccaacattagcttagaaataaaaccttaggataatgtaaaataaaaaagtgccatctatgtatgttcctttcctaacttaccattctgaatttgttttgttttctgcttgcttgtgctgttttcccgtttccctttccggcattgtacatattgaattactttttcat

SEQ ID NO: 9020 - DNA, 1062 bp, Glycine max
  Clone ID: 700831452_FLI
caagaatggcacttcgttgcttggtgatgtccctttctgttctcttcactcttggtcttgcgagagaaagccatgccagagacgaagatttttggcatgctgtttggccaaacactcccattccaagttcattgcgagatcttctaaagcctggccctgcaagtgttgaaatcgatgatcaccctatgcaaattgaagaaacacagtacccgaaaaccttcttctataaagaagaccttcatccaggcaaaacaatgaaagtacaattcagcaagcctccctttcaacaaccatggggtgttggtacatggttaaaggaaattaaagacactactaaagaaggatatagttttgaagagctatgcatcaagaaagaagccattgagggagaagagaagttttgtgcaaaatccttgggaacagtaattggttttgccatttcaaagctgggaaagaacattcaagtactttcaagttcctttgtcaataagcaagaccaatacactgtggaaggagtgcagaatcttggagacaaagcagtgatgtgtcataggctaaatttcagaactgcagtattttactgccatgaagtccgtgaaacaacagctttcatggttccattggtggctggtgatggaaccaaaactcaggcacttgctatttgccactcaaatacttctggaatgaatcatcaaatgcttcatcaacttatgggagttgatcctggaactaaccctgtttgccatttccttggaagcaaggccattttatgggtacccaatttatctgtggacactgcctatcagaccaacattgttgcttaattagtccatgcatcttgagcaccatgagaatgagattgtgtataaaataaattatcatgtgctgtgtgttgtgcaagtactaccttctctagctagattgctagagctagaatttcaacctacctatgtgtactgataagatctgcttccctacttaaagagagcatcatcctgtgatcagtgtgcttcgtattctctctctctatatatatatggtaaaaagtggttatctcgtgcc

SEQ ID NO: 9021 - DNA, 507 bp, Glycine max
  Clone ID: 700831485_FLI
ttaatttgtaacacttaattttcattgattgagtgtgtgttgctacaacaatggcctcaagccagggttggactccgaagcagaacaagagatttgagaatgcccttgccatcttcgacaaggacaccccagataggtggcacacggtggccagggccgtcggaggaaaaacggtggaggaagtgaaaaggcattatgagaagctcgtggaagatgtgaagaagatagaggaaggtcacgtgcccctccccaattaccgaagtgctgcaagaggctacggttacatggatgaagaaaccaggatgaaggctctgagtctgcagtgaagtgtgatttaccaataaataatatatgttggatgcttggcttcgtaccataagatattttattcacttttttgttttttctttccatataatatataggcaaagcatcgttgccttgtgtttctgtttctataaatgtaaagatgaaattgtcccaaagacgggcccactagttaatagt

SEQ ID NO: 9022 - DNA, 1487 bp, Glycine max
  Clone ID: 700831503_FLI
cactaccaaaaagtaatatcttctgaaaaggaaaggaagaagaaaactcccaagtgtcattgtctgattgacaaattgtatctggaactgtttttatcaaacatttacatgctctgagtagaatgaacatcctatattttctcttttcacacctacggctctcatttatgctaatccagctattatggatggattaggttcgccatcccagtggctgagggagctgagatgggactcccagggcttaaatccaataagccttcttattgactgtgccaaatgtgttgcatctggaagcatcaagaatgcagatattggccttgagtacatatatcagatttcatctcctgatggtaatgcagtgcaaaggatggtcacttatttcagtgaagcacttggttacaggataataaaaaatttgcctggtgtatataagtctctcaatccatcaaaaacatcattatcttctgaagatatccttgttcagaaatacttctatgaactgtgtccatttttgaagttctcatacctgatcacaaaccatgccattgctgaggccatggagtgcgaaaaggtggttcacattattgatcttcactgttgtgagccaactcaatggatagatcttctactaactttcaaaaaccgtcagggaggtccaccccatctgaaaattacaggaattcacgagaagaaagaagtattagaccaaatgaactttcatttgacaactgaagctgggaaattggattttcctttgcagttctatccagttgttagcaaactggaagatgttgactttgagaagttgcctgtaaagataggagatgctcttgcaatcacttctgttcttcagctgcattctcttcttgccactgatgatgatatggcagggaggatctcaccggctgcggcagcatctatgaatgtgcagagagcactgcatatgggtcaaaggacttttgcagagtggcttgagagagatatgatcaatgcatataccttgagtcctgattctgctttgtcaccgctttccttgggtgcctcacctaagatggggatctttctcaatgctattagaaaacttcaaccaaaactagtagtgattactgaacaagaatcaaatctgaatggttccaatttgatggagagagttgatagagcattgtacttttacagtgcattgtttgactgcttggactctactgttatgaaaacatcagtagagaggcaaaaacttgagagcaagcttcttggagagcagataaagaacatcattgcttgtgagggtgttgatagaaaggagagacatgagaaactcgagaaatggattcgaagacttgaaatggctggttttgaaaaggtacctttgagctacaatgggaggttagaagcaaagaatctgttgcagagatatagtaataaatacaaatttcgagaagagaatgattgtttacttgtctgctggagtgacagaccattgtttt

SEQ ID NO: 9023 - DNA, 1752 bp, Glycine max
  Clone ID: 700831516_FLI
gttgccgccttcaaagagggagtttaaagatatttatgtagtctttgagcttatggagtctgatctccatcaggtcatcaaagctaatgacgacttgacccgcgaacaccatcagttttttctttatcagatgctacgtgcaatgaagtatatgcatacagctaatgtatatcacagagaccttaagcccaagaatatactggcaaatgcaaactgcaaactcaaagtttgtgattttggattggctagagttgcattcagtgatgccccaacaacaactttttggacggattatgttgctacaagatggtacagagccccagaactatgtggctccttcttttcaaagtatacaccagcaattgatatatggagcattggatgcatttttgcagaggtgttgacaggaaagccactgtttcctggtaaaagtgtcgtgcatcaattagatttgattactgatcttcttgggacaccaccacctgaaactattgcaggagttcgaaatgacaaggcaaggaagtacttgatggaaatgcggaagaaatctcctgtgccatttgaacagaaatttccgaatgcggatccattggcacttcgcctattgcaaagacttttagcatttgatccaaaggatcgaccaactgctcaagaggcactagctgatcccttctttaagggtttggccaaagttgagagagaaccttcttgtcagccaatttcaagattagaatttgagtttgagaggagacgagtgacaaaagatgatgttagggagctaatatatcgggaaatattggaataccatccccagttgcttaaagattacatgaatggaactgaaggcactcacttcctttaccctagtgcaatagatcaattcagaaagcactttgcttatcttgaggaaaatcatggtaaaagtggcccagtgatacctccagaaaggaagcatgtctcccttccaaggtccactgttcactctagtacaattcctcctagtacacaaccatcttttacttcatacgagaacaagcatatggcagaagaggcatcaaaggttacgagatcagtagaatcaaattccggaagtcaattaaggagttcgcgacctccgccaagagtgccagcagccaaaccaggtcgaatcgtagggccagttttgcactatgacaatgggagaaccttaaaagacacttatgaccaaaggatcttctaccgaaacacgcttcctcaagccgtctctccacactgtttccatagggtgcagcaacctactatcacaaaaactacttcagaaacatacaagaatatcccccaaggcaaacatcaactcccatcccaacagtgtagcatgccagctagaccaactattgatctaaataccaacccatactaccaacagggaaagagtgatcacttaaatgatcctgttgcttccattgatgcaaaactactgcaggcacaatctcaatttggtggagttggtgctgcagcagtagctgttgctgctcacaggcattcagggagctttcagtatggattgtcataggttgttaggtttaaaagagatgcatacaataactagtatgctttatctaatgcctggggttgggaggaaggaaggaacttgatcaaattttagacgggtttaggtctggtaagattttccacttttgctttcagattgccatccttgtaattacatgtacatcatttaattgattaataaaaaaattgattgtttctctc

SEQ ID NO: 9024 - DNA, 996 bp, Glycine max
  Clone ID: 700831537_FLI
gctgggcaaatatctgtacctattgtctttagaggacccaatggtgctgctgctggggttggtgctcagcattctcaatgttatgcatctttgtatggttcatgccctgggttgaaagtcttgtcaccatattcatctgaagatgcccgtggtttgcttaaagctgctattagggaccctgatcctgttgttttccttgaaaatgaattgttatatggtgagtcattccctgtttcggccgaagttcttgattccagtttttgccttcccataggaaaagcaaagattgagagggaaggaaaagatgtgactattacagcctattcaaaaatggttggctatgctctcaaggctgctgagacactggcaaaggaaggaatcagtgctgaggtcattaatttgcgttcaatccggccgcttgatcgatccacaatcaatgcttctgtcaggaaaaccaacaggctggtgacagttgaagaagggtttcctcagcatggcgttggcgctgaaatctgcacatctgtcattgaagaaagttttggttatcttgatgcacccgttgagagaattgctggggctgatgttcccatgccttatgcagcaaatctggaaagaatggctgtcccacaggttgaagatattgttcgtgctgcaaagagagcatgctacagatctgtgcctttggctgcatctgcttgaatgttctggaaaattttcatgtcctggttagttctttgcagaaacaaaattttccctattttccgccccaaaacagcaggaagaaattgcaaccaaagaatgctgattttaactcatttattatgttaggctttggtttaaaagattctgttgtatgcataatactgtcctaattttcaggactcacagatgctatacattttttccccttctcagcatatctgggaggaagttaatgttaaataacttgtacaacaatgacacaaaggcagcaggaagttttctgcgtttttggtt

SEQ ID NO: 9025 - DNA, 672 bp, Glycine max
  Clone ID: 700831544_FLI
agaagatattacaattgaaggattcaatatcccacgagacacaattgtgatcattaatggttggggcatgcagagagatcctcagttgtggaatgatgccacatgctttaaacctgagaggtttgatgtggaaggagaggagaaaaagttggtagcatttggcatgggaagaagggcttgcccaggagaacccatggctatgcaaagtgtcagctttactttgggattgttgattcaatgttttgactggaaacgagtaagtgaggaaaagcttgatatgacagagaacaattggatcaccttgtcaaggttaattccattggaggccatgtgcaaggctcgcccacttgccactaaaattggaatttaattattaatagtatttttatttggtaaacttgggtgattcagaatctaatacttataattttagtgtgtaagagtggtgatcatatatacatttcaaaattaataatctttgtccaaaaatcatccatggacaactatatgtcaattgacatctagagagaaatatagatataagaatatttatattttattactcttctttatcttatgtgtcaaggcccattgtagaattgggtgagcattaacatatatcaatattgtataccgcccagttttctcaaataaatttctttactttcaatt

SEQ ID NO: 9026 - DNA, 593 bp, Glycine max
  Clone ID: 700831614_FLI
agaacattcatagagaagcttgcagtttgagtatttaatggagatgttcatcaagcagcattccgtgtcctagcagattttagaaaaggtaagtttggttggactgcactggagaggcctcctaggtgaaggccagatgtttgcttttaaaagcagaactctgtgaagcttgaattggaaattacgctagagacctcttggaacttactgcagaagacaactccacatggtgttagatgaatgtggatattgtcattatagaagggaaaggtgaatgctcccacaagacaacctttggatcctcgaggcacacgaaacaggatttgaagccatggatgcttcttgttattaccatgtaatttggtctcgtgcatctgtctatagaactagtgtgccatgggatgggagttcgtagtcatcatgctcatattttgtatagtatatacttaattgttatagtcagatgtttcttaaaattagggctgatgcttgttgcactttggggatggtattcagcccatattgtttaaacagataaacatgattatgccaaagcaataaaattgtaagacgattcaacagaagttacatat

SEQ ID NO: 9027 - DNA, 1060 bp, Glycine max
  Clone ID: 700831628_FLI
gtgtgagtgagtgaactcaattcaactcaacattcttcaatcaaatcagccatggcagcagaacccacccgccccgtaaaaatcatcgccgccgccgatgacttcggcactcctctcaaagacgccctcgtcgctcacttgcgcactctcaacatccaagtcgaagatctcggaacctcttcctactactccgccggagccgaggtcggtcgccgagtctcccaatcctcctcctccgacatccgtggcctcgtcgcctgcggcaccggcgccggcgtctccatcttcgccaacaaatatcccggcgtctacgccgccacgtgcctctccccctccgacgccgtcaacgcccgctccatcaacaactccaacgtcctcgccgtctccggcaagtacacgtcgccagaggccgcagtcgaggtcctggacgcgtggctgaacacgccgttcaagtccgcgtgcccggccaacgacgacaagccctggccgcaggagattcactcctttctcgaacactcgctcgtggagatgccggagatcggaaaagagggcgcgtttgacacgtgcgcggtgtgctgtctggtgaagaaccgggaactgaatccgatcgatttgattccgggcgggtcgatgaagattctaagggaaactccgacgtcggcgttcgtgaggttcaaggccgggagcgtggagcccgcacaccaccacacgtttgggcacgacttggttgtgatcgaagggaagaagagcgtttggaatctgacgaaggaacagaggtatgatctgacggttggggattatttattcactcccccaggggatgtgcatagggttaagtatcatgaggatactgaatttttcatcaagtgggatggccattgggatatgttctttgacgaggatctcgacactgctaaaaacgctattgataaggagttaggattagccaagtgaattactacttcagtttggatcatgtcatgtgtcatgccatgtattctgttcattaataagctcctttatatttgtcttttgtatccaattttaatgtctcttcccc

SEQ ID NO: 9028 - DNA, 1133 bp, Glycine max
  Clone ID: 700831637_FLI
gtggaagcttggaaaaccatttgttcaggagaggctcatattttcaaccactttcttggagcttacgtttgaaggtagctcttgatgctgccaaagggcttgcatttctccacagtgcagaagcaaaagtgatatatagagattttaagacttcaaatatcttgctggattcaaaatataatgcaaaactttctgattttgggctggcaaaggatggaccaacaggtgacaaaagtcatgtctccaccagggtaatgggaacctacggatacgcagcacctgaatatctagccacaggtcatcttactgctaagagcgatgtctatagttttggggttgtcctgctggaaatgttgtctggcaagagggctgttgacaagaatagaccatctggacaacacaatttggtggaatgggctaaaccttacctggcaaacaagcgtaagatatttcgtgtgttggacacccggctcgaaggacaatattcaacagatgatgcctgtaagctagccacccttgccttgcggtgcctatcaatagaatccaagttcaggccaaacatggatgaagtggttacaacattggagcagctgcaagttcctaatgtaaatggaggccatcaaaatgggtctcgtgttcgtagaagaagtgctgatgtgaatagaggctatcaaaatccttctgttaatggatctcgagttcgtagaagaagtgccgatgatattagccctatggagactcccacagcttatccccggccttctgcatcccctctctatacttgatattgcaaacttatcatcatgcatctgttgctggtgatctcatccaccaactcagtcacctcagtagctattagcctattgcactctagtattgtacatatcttatttcacataatgtattcagtattgctagtccaccaattaatattttcggagttctgttttaagtgtttgtaactactaaactagatgcgaaggcaggtacattatatttgtatgatagctctgattagctcatttttgttcttgttgtctatattagggtgctgtggttccctagtctattttgtaacacctagttgccttatgtgacttctacatcaaacataccaaatagtagtacatttt

SEQ ID NO: 9029 - DNA, 1191 bp, Glycine max
  Clone ID: 700831677_FLI
actattttcacccctttttcaatgctagtggttttctctctcccacaaatagagtcatattcattcatcatgtcacacccaaagggataaaagaaaaaacttaatagtacatgggagttgatgatgaacaagagatggaggaggaggaggaggaggagagagaagaagagaaaaagaagcataagcaggctcctccttctctcttccctattagtgtgagaaaggggtttagtggtgaaagagtgaagagagatgagtggagtgaaggggcagtgtcaaccctacttgaggcctatgaggccaaatgggtgctaagaaacagagccaagctcaagggccatgactgggaggacgtggcccggcacgtgtcgtcacgtgccaactgcaccaagtcaccaaagacttcaacgcagtgtaagaacaaggtggagtccatgaagaagaggtacagatcagaatcagcaacagcagatcatgcatcatcatcttggcctctttattcacggcttgatcttcttcttaggggaactgggcccgtcttctcgtcgccgccggggccgctgatggtggctgcgcccatgccgcctctgtcgccggtggaaccgtcgcaaccgctggctccttcagggccacttgctaatgcacaaaactcgcatggatccaatggggttgatgagaagcttgctaaggaagatgggttaggaactaagtcatctgatcaagtatctagcaagaatccattggacacagatagcagcacgccagcactttatagccagaaggaggagttaagaagcaacaagaggaagaagaaaacaattgatcacaacacaggacgaagaaggaaagaatatgtggagatagcagaaagtttaagatggctagctgaagctatgataaggtcagaacaagcaagaatggacacaatgaaggagatagagaggatgagagttgaagctgaggccaagagaggggaaatggacctcaagagaactgaaattattgccaatacacaattagagattgctaggatctttgcaagtgtcaacagtaaaggtgttgattcatctctaagaattggaagaagttaattaagggtaggttgtggaagctaattaataaaatgttattattgtaagtgcacataaagttaacaaataatgctattaattaatataataaaatttgagt

SEQ ID NO: 9030 - DNA, 1153 bp, Glycine max
  Clone ID: 700831734_FLI
tctctttctaaatcttaacaaaacgccaacaccgtaacaaccaaaacgcatacacactctcaaaaactctttctccttcttctataaactgtaactgttttcttctctcccagatcttcggcgcagaaaaaggttctcgaatttcatcgcttcctcctttcgcgatgatgctatagtagaagaagaagacaaagagagaaaaaaaaatggacgatagaggtagctcattcatcactgttaggagaattccccacggagaaacctgccattcaaattctgctgaggttgtggtagggtcagccgcatggcttgggcgaggtctgtcttgtgtctgtgtacaaagaagagatagtgatgcttctaacactttcgatttaaccctagcccaggaggaatgcttgcagaggatacagagacgtatagatgttccatatgatagttctataattgagcaccaggatgcccttagggctttgtggaatgctgcatttcctgaagaagaacttcatggcttgatatctgagcagtggaaggaaatgggttggcaagggaaagatccatcaacagattttaggggtggtggttttatatcattggagaattttctcttctttgctaggaatttcccgaaatccttccaggatcttttacgcaagcaagaaggagatcgatcagtgtgggaatacccatttgcagttgctggtgttaacatcacatacatgctgatacaaatgcttgatcttgaagcagtcaagccacgcaatctggttggagcaacttttctaaaatttcttgcagaaaatgagtcagcttttgatcttctctattgcataactttcaagctaatggatcatcaatggctttctatgcatgcctcatacatggattttaatgcagtgatgaaagaaacacgacgccagctagagaaagaacttctcgttgaagacatagcccagcttgaagatttaccctcatacaaattactttcccgatagtaacagtcccaaaatcctgactgggaccgattaaaccagtgaaagcattggtttaagagtcaactagcgagaagcctgtgccgatacacgggctcatactctaattttgctatcattactgaagaaacaacaaagatatagatatatgcattgaacat

SEQ ID NO: 9031 - DNA, 952 bp, Glycine max
  Clone ID: 700831735_FLI
gaaacacgtagacatcagtttcaagttagtttgtgcaatatttattcattgacctgatatttttctatgtatgtttcacttttgaagatggtctcaaatagcggcgcgtttgcctgggcgaaccgacaatgaaataaaaaacttttggaattcaacgataaagaaaagactcaagaacatgtcgtccacgacgaccacaacctcaacctcaccaaatgcaagcgagacctcaatatccgagcctagtaataaggacctcaacaacatgggagggtttatttccacactacataataaacatgcaggttttgttcctatgttcggttcatctccatcaccatcaatgatgcaaaccagtacagttttcaataacatgattgaaaggtttcctatgctggagcaaggactgattaacatgccagcttctggagggtacttcgaaggcacaggtagtactccttgcttttcgcaatgtgaagttcacaacaataaaggttcttgttatttagaaaacgaagtgtttgagagtgtaaatatcggggtagaaggggatatgtttgttcctccccttgagaatgttacatgcaagagagaagaaacaactaacagcagttactttgacgatgacataaatagtatccttaataactgcaacaatattggcatagctgaaaataaggctcatcatggggtggagaatttgtttcagcaagagttagccactgccacaggagaatgggactttgaagagttgatgaaagatgtttcctcctttccatttcttgatttttcatactgatcaatgaaccttatttggcacactgcagggtgatatattcttcacatagagccttgtataatagtatactggtattttttacccttataccgaattcacaagttaacaatcaggtataggcctcaaataaaagtccaatatatatatatatac

SEQ ID NO: 9032 - DNA, 1840 bp, Glycine max
  Clone ID: 700831777_FLI
tgaatggaaaaagaagcttcctcgggatgaggataaaggggcttgccggaaaatataaaaaagaaagaaagaggtggtaacacgaaaggcgcgtggcagccgctggtttaaccgaaaagaaagcaactttgtcctacatcagaggcaacggaaaagaggatcctttctgcttcttctcttctcttccacacaaagacatcgtttcattgctctctctcttgtgcggacacaatttttgatggggatatacctcagcactcccaaaacagagaaggcctctgaagatggtgagaacgacaagcttcgcttcggtttgtcttccatgcagggctggcgtgctaccatggaagatgctcatgcagctcatccatgtttggacgagtccacgtcatactttggtgtttatgatggccatggaggcaaagcagtttcaaaattctgtgccaagtatctacacctgcaggtgcttaagagtgaagcttacttagctggagatttaggcacatctttacagaaatcttttctcagaatggatgagatgatgcgtggacaaagagggtggagagaattagcaatcttgggggataaaatagaaaagttgtctggtatgctagagggctttatatggtctcccaggagtagtgaagccaatgaccgtgttgatgattgggcttttgaggaggggccccattctgattttactggaccaaactctggaagcacagcttgtgtggctgtcgtccgaggaaacaaacttgttgttgctaatgctggagattctagatgtgtcttatcaaggaaaggccaggcacacaatttgtccaaggaccacaaacctgaacttgaggctgagaaagacaggattctaaaagctggtggtttcatccaagttggacgggtcaatggaagtttaaacttggctagagcaattggagatatggaattcaagcagaataagtatttgcctgccgaaaagcagattgtaactgctgatccggacataacttcagttgagctttgtgatgatgacgagtttcttgtaatagcttgtgatggaatatgggattgtatgtctagccaacagcttgtagacttcatacatcaacagttaaaaacagagaataaactttctgcggtttgtgagagagtatttgataggtgcttggcaccaacagctggtggtgagggatgtgataacatgaccatgattttgattcagttcaaaaaaccttccagcagcccagatgcatcatctgtcatgaaccagcctcaatcgtctgctcaatcatctgaagctgatagaagttcggagacagtagaatcgaagtgagagaatttcgaacctgacttgatgactaatagtcatcaatttcttactgcatgttgaagcattggtgagctgaggttcttgccttcttgggtactattttatatccaaatttcaggatgttaattctcaatagggggattgtaaattggtgacaaactaattcatggggctagtattggcttttgtacataagtgtgggtgttcagaatatgaaggaaaaaaaaggttcaacaagcatactgatgtacactgaatgactaaaatcacctttgtgaaacttacccaatgccaatgagtgccgaccggaagaatgtgtagaaagaacatgtctggatactggagttatatccatgatccatcagtagcagttccttaaggatttagtgcgatgcacggatttgcagaggcattttttgtttctgcaccccctttatcctttatgggttgatgcatccgtgatgctctattgttatttttctcgttttggaaattacaaatcctcgtttactt

SEQ ID NO: 9033 - DNA, 444 bp, Glycine max
  Clone ID: 700831855_FLI
aatttgttgagtttttgaacttaatggccaagaaaatgaaggaaactgatgcagaggaagatctcaaagaggctttcaaggtgtttgacaaggatcaaaatggctacatttcagcaagtgaggtatatgtataaacttttattctttctattcactttttattgtaactttctttctctgacggcaatgaccaatcaaagtattcatgagatttctgacaaagtaaggttccttcaaacttgaacaaaaagcaagtagggtcaagatgttgcagagtgcaaactagattacaactcttgaatcttcccttttgtatttttttaatactttttctataaatggtgcgtttacttttctgcctacgtaatagaggctgcatatgcaatttttcttataaaattcctacttcaagtttcagccaatcttacccaaatttcttccttg

SEQ ID NO: 9034 - DNA, 1658 bp, Glycine max
  Clone ID: 700831873_FLI
gaggggaagtacttagaaacagaaacacagagatggaaccagaaacatctctgaactttactttgatgctgactttcttactttatctgaacttggttatgggagtgctgagcgttgatcattatcgcagagttgactttcctgatgaattcgtttttggttcaggcacctctgcttatcaggtggaaggagcttctaacgaagatgggagaactcctagcatctgggatacctttgcccatgcggtgtatgagcatggagaaaatggagatctagcctgtgatgggtaccacaaatataaggaagatgtgcaactcatggtggaaacaggtctggaagcctatagattttccatttcttggtcgagactgataccaaatggtagaggacctgtcaatcccaagggattacagtattacaacaatcttattaatgaacttattagcaaaggaatccaaccacatgtcacactacacaactgtgatcttccgcaggcacttgaggatgaatatggaggatgggttagtcgtgatatcataagagacttcacaaactatgcagatgtgtgttttagagagtttggtgatagagtccagtactggactactgtgaatgagcccaatgcctttgccttgggtggctatgatcaaggaacctcccctcctcagcgatgttctcccccattttgcactacaaacagcactaggggcaactcaacatatgaaccctacttggcagttcatcatattttgttatcacattcttcagccgtgagattgtatagaagaaagtatagggaccaacaacatggatatgttggtatctctgtctatacatttgggttcattcctcttacagattcagagaaagacaaggcagcctcccaaagagcccgtgattttttagttggttggattattgaacccttggtgcatggagactatcccatttccatgaagaaaaatgcaggtgcaagaattccaaccttcacaactcgtgaatccgaacaacttaagggttcaagtgactttataggcgtaatttactacaacaatgttaatgtcacggacaatcctgatgctctgaagaccccacttagagatatcctagcagacatggctgcaagtttaatctatttacaggatctattttcagaggaagagtatcctgtcacaccatggagtttgcgggaagagctgaataacttccagctccattatggcaatcctcctatattcattcatgaaaatggtcaacggacaatgagcaattcatcacttcaagatgtgtcaagggtgaaatacttgcaaggaaatattggtggcgtgcttgatgccctgagagatggatcaaacataaaggggtattttgcatggtcttttctggatttatttgaattgctggctggatacaaatcgagcttcggcctatactatgttgatagggatgatccagagctgaagagatacccaaagctatctgcaaaatggtacaaatggtttttgagaggaactattgaactcaagaaggatgcatcatttgattctgttggccatttatttcaataggttctataattttttgtattacaacattgttgcatagtggtgtgtttgactttccgcttctataagagataaggaataaaatagatgatt

SEQ ID NO: 9035 - DNA, 1242 bp, Glycine max
  Clone ID: 700831916_FLI
cactgctttctctctgtctattccgttcaaagcgttgcgtagaacagagaaaaagaaagtaccaatttcttgagagagaaaacccgaagaagagtcatggcttccaccttcgacgccttcaccgtcgacgacgaccacttcgccgccccctccgccgctgacaccttctccggctacggcgacttctctactttcccctccgacgatgtccccgtcgaccacgccgccaccgcggcgtcgccggagatcttcggattcagcgatcccgatccaggctactccccgtctcccttcgagcaagtgcacgagaatgggaacggaaatggaaccgtaaacggctacggcgacggcgttttcgtctccgatggaccggtgcttccgccgccggaagaagtggagccggaggaaggtcacgcacttcgggagtggcgccgtcaaaatgccattcagcttgaggagaaggagaaaagggaaaaagaaatgagactgaagattattgaggaagctgaggagtataaggtggctttctatgagaaaaggaagcttaatgttgagactaacaaggtgcaaaacagagaaagggaaaagttatacttggctaatcaagagaaattccacaaagtggctgacaaaaattactggaaagctattggggagatcattcctcgagaggttcccaacattgagaagaaaagaagcaaaaaggatcaggagaataagccatcaatcacagtcgtccaaggcccaaagcctggcaaacccacagatctttctaggttgaggcagatattgttgaagctgaaacatacaccaccagctcacatgattccccctcctcctgcacctgctaaagacgccaaagatgggaaagatggaaaagacggaaaagaaacagcatctaaagccaatggatctgcaccagacgccgcacctggatcacaaccaaaggatgccaccactaataacggtactgcagatttaccccagaaagaagctccaccaccccctgaggagcagtcttctacataactctgcctttcatgcatacttaagctctcacaatcttctgcgattacttttgccccccgcagttctttacggatccttttgccatgctattagtttctattgcttttttggtttgcatttatttctatcattgaggttttgtatcaattataccctttactgactattatgaccttggaaattcaaatgttcatgggttttaatacaccattt

SEQ ID NO: 9036 - DNA, 1261 bp, Glycine max
  Clone ID: 700831948_FLI
ctttctttcatgcttcttaggctttgatcgatctcctttttaccttctcatcttctctctttctccttccttctgccagttcgtcttgggacagggatttgactacaggataaaatgggtcgtgcaagaatcagcttgaaacatatctcaaatgagagatctcgcaagaaaactttcatggagagaaggaaagtacttataaaaaaaatctctgaattttccaccttgtgtggagttgaagcatgcttgattgtgtatgatgatgggaatggtgacattgaaccagtgacttgtcccaaagaccctgtattggcacactccatacttcaaaactatgagtttcaaaagaatcagagacctcccaagaagtttggtattcaggactttgttgaggataggaagaacatcattgaagctgagatttccaaagtgcataaagagatcaccaacatcaagtatccaacttcggatccaagtttcataaacatggaagaggatcaattgagggccttcattgctctggtggatgctaagattaggacctgtgatcattctttgaaaaacatgcatcaaagtgaagccaacttcatgcaaaacatggcttggggaagtgcttcctcctcccatcctactcctatggagccacttaataataatgggagggtggatgttacaaactcaatagatcaggtttatgaagctatgcaactagttgatgctccctttagttacattccagacatggttcagaaaagttttaattgcttgcaaaacatctctcaaagccaacccatacttgatgttgaggatgagatggtaggttttagtaatagagttgatgtgtcactggatacaactaatcaaattgctgacttgttggactggtttgatggacctattattggttggtctgatcttgtggattggactagtcaacctgatgaatctcagaatgagcaacaaggtggaggagatttggatggatttcaaacagaatgctataatctgaatttctgaatggctaactatgagttaactttgattttgatgctcttagtatttagtttaatgtgtaacttttagccatttatgtgcttgaaagtgctttcagctggaaatgtaggttttatgttgctagaaagtgtaggtttgggtatcatatatattgtttcagagtattgtctattttgcatataatatttatttcgaattcattgttcaaagtttgaatttacacatatatgataattaatgttttgat

SEQ ID NO: 9037 - DNA, 2130 bp, Glycine max
  Clone ID: 700831968_FLI
attggaggaaatagacttgtcccataatgaattgagtggctcaattccacccggatcaagcaggctcttggaaactctcacccacttggatctttcagataaccatctccaagggaatatccctgcagaaaccggtcttctatcaaaactaacacatttgaatctgtcttggaatgatcttcattcacagatgcctccagaatttggcctccttcagaacctggcagttttggatcttcgcaatagtgccttgcacggttcaattccagcagatatatgtgactcaggcaatttagctgtcctccaacttgatggaaattcatttgaagggaatattccgtccgagattggaaattgtagctctctttacttgctgagtttgtctcacaataatttgactggttcaattccaaagtccatgtcaaagctaaacaagctcaaaatcctcaagctggaattcaatgaactaagtggagagataccaatggagcttggaatgcttcagagtcttcttgctgtaaacatatcatacaacaggctcacaggaaggcttcctacaagtagcatatttcagaacttggacaaaagttccttggaaggaaacctgggtctttgttcacccttgttgaagggtccatgtaagatgaatgtccccaaaccacttgtgcttgacccaaatgcctataacaaccaaataagtcctcaaaggcaaacaaacgaatcatctgagtctggcccagtccatcgccacaggttccttagtgtatctgctattgtagcaatatctgcatcctttgtcattgtattaggagtgattgctgttagcctacttaatgtttctgtaaggagaaggctaacatttttggataatgctttggaaagcatgtgctcgagctcttcaagatcgggaagtccagccacaggaaagcttatcctgtttgattcccagtcctcacctgattggatcagcaatcctgagtccttgctcaacaaggcatctgagattggagaaggagtctttggaacactctacaaggttccattgggatcacaaggtagaatggtagcaatcaagaagcttatatccacaaacataatccaatatccagaagactttgatagggaagttagaatcctcgggaaagcaaggcacccaaatctaatagcattgaaaggatactattggactcctcaactacaacttttagtaactgagtttgcaccaaatggtagcttgcaagccaagctacatgaaaggcttccttcaagtcctcctctttcttgggctataaggttcaaaatcttgcttggaacagcaaaggggcttgctcatttgcaccactctttccgtccaccgatcatccactacaacataaagccaagtaacattttgcttgacgaaaattacaacgccaagatctcagattttgggttggctcggcttctgacaaagctggaccggcatgtgatgagcaacaggttccagagtgcactaggatatgtggcaccagaattagcatgccagagcttaagggtcaatgagaaatgtgatgtgtatggttttggggtgatgatccttgagctggtgacaggtaggagaccagtggagtatggagaagacaatgtgctgatactgaatgaccatgtgagggtgctgcttgagcaagggaatgtgttggagtgtgtggatcaaagcatgagtgagtatcctgaagatgaggtattgcctgttctgaagctagcaatggtatgcacctctcaaattccttctagcaggcctactatggctgaagtggtgcaaatactgcaggtcattaaaaccccagttcctcaaaggatggaagtattttgatgagatatgcttctctgttgaactagcttgacatatagaaaatctgtgactgatgagatttttttcttttcttttttcctttatgttgtgtatcctttttaatttccttggctatttggtttatgtagactcttgttttatgtccaagtagattttcctcgtataaatggaaatcactatcatataaatccgttattcgcaactcttgttttctcttttactgatttcagtttatcgattgtattatcaaattttaataatattacaacttacaaact

SEQ ID NO: 9038 - DNA, 1426 bp, Glycine max
  Clone ID: 700831977_FLI
tttgatacaatttgtaaggttaattctcagctcatcagcaatgtctgcactgatgctctctctgcagagaagtattattatttcatccgtcttatgggacgcaaggcatcacacgttgctttggaatgcaccctccagtcccatccaaatatggtaattcttggtgaggaggttgctgcatcaaagcttaccctttctgaaattgcaaaacagattactgatgcaattcaggctagagcagagcaagacaaataccatggagtcattctccttccagaagggctgatagagagtattcctgaagtgtatgccctcttgaaggaaattcatggtttactcagacaaggtgttgaagttgacaagatatcttctcagctaacaccatgggcatctgctttatttgaatttctgccaccctttattaggagacagttgctcctttaccctgaatccgacgactcagcacagttatcacagattgaaactgagaaattactagcatatcttgtggaagtcgagattaacaagcgtctgaaagaaggcacatacaaggggaagaaattcaatgccatttgccacttttttggttatcaagctcgtggatctctgccatcaaaatttgactgtgattacgcatatgtccttgggcacatctgctaccatatactggccgctggtctaaatggatacatggcaactttaactaacctgaagaatccagtaaacaagtggaaatgtggggctgctccaattgcatctatgatgactgtaaagcgctggtctccaaatccaggagctacatcaattggaaaacctgctattcatccagctactgtggacttgagaggcaaagcatatgagctgttgagacaaaaggcacaaagctttcttatggatgacatctacagaaatccaggtccacttcagtttgatggtcccggcgcagatgccaaggttataactctttctgttgaagaccaggactacatgggccgcattaagaaacttcaggagtaccttgaacaggttcgaaccattgtcaagccaggatgccctcaggaggttttgaaagctgctctaagcgtcatggcgtcggttaccgaagttctagctgcaatgtcaacatcttataccaacaccctggcatccctgtgagagtagcagatggaagttgtattcttccataaaaattctacattttatagccatggaagtagtttttgattggaaataagagttatagctgacatggtgcacgtcaacgtgagatgagatttactgtaatcaaagttttggctctctatgttcccaactgggtaatttttttgttttttgttttttgttttttgttttcaaagacatgtgggatccatgtgaaattgtttgataacttagcttgctgcttgaaaatattattgttcttttt

SEQ ID NO: 9039 - DNA, 1605 bp, Glycine max
  Clone ID: 700832032_FLI
tcaagatttggattcctgagaaaacatcaaataaaatcaaaacccaaattcgcaggttattgaaaattgaaatcctaggagaaacacatccacagcaaaagaagaagaaggaagaaaccagcgtcactcatctcatcgtggttctgcaaagtcttcttttcttttcggtgaattaataaagggtttttgcgtggtgattgtgttgtgttgtgctgtgctgtgtatctgaatccgcgcaattaggttttgtgattaattcattgattaatcagagagagaagggggaataatgggagatcaagtggagggaacggtgcagaacgttctggaacaggagactctgaagtgggtcttcgttggtggcaaaggcggcgtcggcaaaacgacatgcagttcaatcctatccattctcctcgccaccgttcgctcctccgtcctcatcatctccaccgaccccgcccacaacctcagcgacgccttccagcagcgtttcaccaaaacccccaccctcgtcaatggcttctccaatctctacgccatggaggtggatcctactgttgagcatgaagacatgggcggcgctgatgggatggacaccttgttctctgagctcgccggcgcgattcccgggattgacgaggccatgagctttgctgagatgttgaaattggtgcagacaatggattattctgttattgtctttgatactgctcccactggccatacactcagactattgcaattcccatcggttttagaaaagggccttgcaaaagtgatgtctttgaaaaataaatttggtggtttgtttaatcagatgactcgcatgtttggcatgggtgacgattttggggatgatcaaatccttgggaggcttgaaggcatgaaggatgtaattgaacaagttaataagcaattcaaagatccggacatgacaacctttgtctgtgtgtgcattcctgaattcctttctctgtatgaaacagaaagattggttcaggagcttacaaagtttgaaattgacactcacaatatcatcatcaatcaagttatctttgatgatgaagatgttgaatccaagttacttaaagcaaggatgaaaatgcaacagaaatatctggaccagttttacatgttgtatgatgactttaacattaccaagctgccattgctcccagaggaggttactgggattgaagctctgaaagcattttcaagacattttacatcaccatatcaaggcttatgtggtaaaggagacccggttgaacggttagagcgtaaagtatcagcactacagcgccagttacatgaggctgaagaagaactggagagactcaaaaggggcaactaggtttgatggcctccattcatgaataatatgtcattgtattcctttttggttcacattattttttagcttaaatttgataaagcatcttttttctttgttgggctgccaacacaagtcattccctatatgttttttatttaattattggcacagcgagctttcttatgtaacccccaaaaaatattgctgaggttagcctaatttgtttcacgaatattcttttcatattatgagttggataatttcttatc

SEQ ID NO: 9040 - DNA, 1485 bp, Glycine max
  Clone ID: 700832050_FLI
atcacagcctagtcttcccagtctttactttgctctttgcacctcagcacagtttcccatcgaaaactagcccatctttttccctcgtaccttttgcttcagcaacaacaacatcgtcgtcacaaatctagagatagatagatagatagagagaaacggttgaattgaagatgaaaatcactgtcatgactgctgatgaacaaatcatcacgttagatgtggatccccacgaatctgtggaaaacgtcaaagcattgctcgaggttgagacaagtgtgcctcttcaacaacagcagcttctgtttaatgggaaggaagtgaggaattctgagaagttgagtgctcttggtgttaaggatgatgatttgctaatgatggtgtctggtgctggcgctactgcttctagtggatctacgaatgatttgagcttaaatgctgatggatctgctgtcaaccctggttctttccagcagcacattagacatgattctaatttgatgagtcagctctttcagagtgatccagagttggcacaagctattttagggaatgatctgaacaaattgcaggaagttttacgattgcgtcatcaccaaagagatgaattaaagcgtcagaaggaagaagagcttgctcttctttatgctgatccttttgatgttgaagcacaaaagaagattgaagctgccatccgccagaaagggattgatgaaaattgggctgctgcattagaacataatcctgaagcttttgctagagtggtcatgttgtatgttgatatggaggttaatggtgtcccattgaaggcatttgtggatagtggagctcagtctaccattatatcaaaaagctgtgctgagcgtcttggattgttgagacttttagatcagcgttacagaggaattgctcatggagttggccaatcagaaatattgggtcgtatacatgtagctccaatcaagattgggagtatattttacccttgctcattcttggtgctggattctcccaatatggagtttctctttggactggatatgctccgaaagcaccagtgtataattgatttgaaagaaaatgttttgcgagttggtggaggagaagtttctgtaccatttttgcaagagaaagacataccatctcggtttctagacgaggaaaagtatgctaaggaagcttcaggctctggtggtcaagttgcatcaggcagcaataatccatcaacaggaggccactcttctggtggagcttctggtgacaggactaaggattctgagtttgaagccaaagttgcaaagcttgttgaattgggatttgaaagaaatgcagttatacaagctcttcaattattcaatggcaatgaggaacaggcagctgggtttctttttgggggctagaaataacgtttattttggaaattgattgatttattacttgaaacaatttttacttttagccaattcaattacaaattctaaattatag

SEQ ID NO: 9041 - DNA, 1739 bp, Glycine max
  Clone ID: 700832074_FLI
gcaaaacctaaattctgagcggctccatatccgtcacttatctcaccaaccataaaatatactcatggccgagcacggttttgatggacatgatgtaggatatgtgcctgaggaccctaattttcctcagaatcattctgatgaacatgatgtagggactgtgattgatagctccggatttcctcacctgctacctgatgaagatgatgcaggcaatttgatggaggacgccaattttcctgaaaatgattttgttgggcatgaacatgatgttggaggtttggctggggacgcggattctccaccggaggagcatgttgaggaagttcatggtgctggagatgtgcctgaggattttgattctctgccgaaacagggatccgagattgattcgaagggaaatgaaataaaaaagtggccgggatggcctggagagaatgtcttcaggatgttggttccagtgcaaaaggttggcagtattattggccgaaagggcgagtttataaagaaaatcacagaagagactaaggcgcgaattaaaattcttgacggtccacctggaatctcagaaagagcagtaatggtttctgcaaaagaagagccagattgtcccataccacctgctgttgatggtttgttaagggttcataagcaagttatcaatgttgatcgtgaccttgcagatagtgcattggctgctgggcgatcagttgttaccaggcttctagtggcggatactcaagcaggaagcttgattgggaagcagggatcaaccataaaatccattcaagatggctctggttgcactatacgtgttcttggatcagaaaacctgccaatatttgctttgcgagatgatagtattgttgaaatacaaggggaatctgctggtgttcacaaggcagttgaacttattgcagttcatttacgcaagttcttggttgaccgcagcatagtaggagtttttgaaacgcagatgcaaatgtcagatgttagagttaaccagaatttgccaccgcatcaaaattggggtcctcctcctcaagggtttcctgctcctgctggtggtggtggtggaggaggacctgcttttgcacctaatcatcaatatatgccaccttcacatcactatgatagttattatccacctactgagttgcctcccatggacaaacaccttcatcaaggtccaccacctgcctatgcaagggatgcttctatgggaattcattcatcaagtgcacaaccacaacaatctgttgtaactaaggtcacacagcacatgcagattcctcttacatatgcagatgctgttataggagcatcgggcacaaatatcagctatatacgtcgtgctagtggagcaagtattacaattcaggaaacaaggggtgtgccaggggagatgactgttgagataagtgggacttcttctcaaatacaggcagcccagcagctggttcagaatttcatggctgaagctgcaagtgcgacacaggatcctatggggggatcagtcagccaaggttacagtgcctatccaacaactgctccagtttatgctcctccacccactagcgctggtggtcatacaggccatgcgccttctgcagattatggccccgtatatggtaccaattatgggtattaagatgcttcatttaattttggtcaaggagctttgtgtaaacaatatactgtaaactttacgttcttatagtatttcttttttctttttt

SEQ ID NO: 9042 - DNA, 1423 bp, Glycine max
  Clone ID: 700832181_FLI
gttttctttcaatctcatgcttgtgaatctttagaagggaattctaaccaaacatcttcagccaccacattgataaggaaaatgggagtctcaggcaacaatgaagttttagtgacaacaaaggtagttgttgactatgatagagcaagtgagctcaaagcttttgatgacacacaagatggtgttatgggacttactgatgctggtgtcacaaagatccctcttatattccataaccccaaaaattctcatcatgatgaatctgatgatggttcaggtagcacacaactcagtgttccttcaatagatcttgttggtgttgctgaagatccagctacaaggaaagtggtggttgagaaaatcagacaagcatgtgagacatggggtttcttccaagttgttaatcatggaataccattgagtgttttggaggagatgaagagtggagtgaataggttctatgagcaagactctgaggtgaaaagggaactatacacacgtgaccctttgaggcctttggtgtataatagcaactttgatctttttacttcaccagctgctaattggagggataccttttactgcttcatggctcctcatccaccaaaacccgaagacttgccatcagtgtgcagagacatactgctggaatatgcaaaagaagttaagaagctggggagtgtgttgtttgagttattatcagaagcccttgagctgaatccaaactatttgaatgacattggttgcaatgagggacttacacttgtttgccattgctaccctgcatgtccagaaccagaattgactttaggtgcaaccaagcacactgataatgacttcatcactgtgcttctgcaagatcatattggtggcctccaagttcttcatgaaaacaggtgggtggatgtgtcccctgtaccaggtgctctagtgatcaacattggtgatcttcttcagcttataacaaatgacaaattcaagagtgttgagcacagagtggtggcaaaccgtgtaggtccaagagtatcagttgcaagcttttttagcacaagtcttcagccatcaacaaagctttatggccccataaaggatttagtatcagaagataatcctccgaagtacagggaaactacagtgcaaggctatgtttcctattccctgggaagaggccttgatgggacttctcctctgccacacttcaggattaaagatttctgatacatgtataaggattttattatttttatgggcaaatattagttttaaatatattagtttttgttgatgagagatttaaactcataatttttttttgttcagttaattttatatctttgatatatgtataaggatgttttaacatgaatacctaagaattctgtagtatatactttgccatatttataagacaatatgattgcat

SEQ ID NO: 9043 - DNA, 1844 bp, Glycine max
  Clone ID: 700832220_FLI
tttgataccaaatagtaagtagatcacaccaattaccaatatatattgcagagtggttctagtaattcagtgctgctagaagatggaaactagtgaatggcatatcgagcgaagatctagcttcggctctgaatcccccttagcaagagaggcaggaaatgtgcctgaaactgggtcactctctattgtggtgcttggtgcttctggtgatcttgctaagaagaagacatttcctgcacttttccacctatacctgcagggattcttaccaccagatgaagttcatatttttggctatgcaaggacaaaaatctctgatgatgaattgagaaaccggttgcgcggctatcttgttccaaagaaaggtgcttccccccaacagttggaggatgtagagaagtttttacagctgatcaaatatgtaagcggctcttatgattctgaggatggcttccgcctgttggataaagagatttcagagcatgaatatttgaaaaacagtgttgagggtttatctcggaggcttttctatcttgctcttccaccttcagtatatccatcagtttgcaagatgatcaagacttgttgcatgaataaatctgatcttggtggatggacacgcgttgttgttgagaaaccttttggtaaggatctagaatctgcagaggaactcagtactgagattggaaagttgtttgaggaaccacagatttatcgtattgatcactacttgggaaaggaactagtgcagaacttgttggtacttcgctttgcaaatcggtttttcttgccactttggaaccgcgacaacattgacaacgtacagatagttttcagagaggattttggaactgatggccgtggtggatattttgaccagtatggaattattcgagatattattcaaaaccatctgctgcaggttctttgcttggttgctatggaaaaaccagtttctctcaggcctgagcacattcgggatgagaaagtgaaggttcttgaatcagtgctccctattaatgatgatgaggttgttcttggacaatatgaaggctataaagatgacccaaccgtacctgatgagtctaacaccccaacatttgcaactgttgttctgcgaatacacaatgaaagatgggaaggtgttcctttcatactaaaagcagggaaggcactaaattctagaaaggcagagataagggttcaattcaaggatgtccctggtgatattttcaagtgtaaaaagcaggggagaaatgagtttgttatccgcctacagccttcagaagctatttacatgaagcttacggtcaagcaacctggactggagatgtctacggttcaaagtgagcttgacttgtcatatggacaacggtatcaaggagtaaccattcctgaggcttatgaacgcctaattcttgacacaattagaggtgatcagcaacattttgttcgcagagatgagttgaaggcatcctggcagatcttcaccccacttctgcacagaattgatgaaggggaattcaagccactcccctacaaaccaggaagcagaggtcctgcagaagcagatcagttacttgaaaaagctggctatgttcaaacacacggctacatatggatccctcctaccttgtagagtgatctaatgtaataagatgaggaatttttagctgctaatgaatacacaataagcttgtgaggcttcttccctttgaagcactcccacggatgtgtatcaagcatttggaacaatataagagactaagagtgtttggcacggtttgtgtaactgatttgcctttaaatgcaaaataaatggaaaatgaagtccatttactagt

SEQ ID NO: 9044 - DNA, 813 bp, Glycine max
  Clone ID: 700832235_FLI
catgtacatgatgtctgtagacccagaggatgctcctgatcaagcagaatatgtggaaattggattagagtcggggcttcctgtttcagtcaatgggaagaggctttcaccagcatctttacttgctgagctcaatgagattggtggaaagcatggaattggcaggattgacatggttgagaatcggcttgtaggtatgaagagccgaggagtgtacgaaactcctggtggaaccatactgtttgctgcagcacgagagttggagtctttgacacttgatcgtgaaacaatacaagtcaaagattcattagcccttaaatatgcagagttagtgtatgctggcagatggtttgatcctcttcgggagtccatggattcctttatgcagaagatcacagagaccacaacaggttctgtgactttgaaattgtacaaaggttctgttattgtaactagtcgaatgagtccctttagcctgtatagggaagacatttcatcatttgagagtgggcagatatatgatcaagctgatgctgctgggttcattcggctttatggtcttccaatgaaggttcgagcaatgcttgagcagggcatctaagatttcatttctcaacatgtacttgatataattgtccatagaaaatgtggattgacacagttcgttgtttgtcgtgactactattgtcattattggtgttactgagttaatttggataggataatgcaaataagtggtaaatgtaacgaaattacatgatccttgcagtgaaggttccaaattatgtacacttttcttacagaaaagaaaat

SEQ ID NO: 9045 - DNA, 779 bp, Glycine max
  Clone ID: 700832243_FLI
tagaagcagggttgatcccaattccggggtacagtagtggtaccaccacaacctcacccttcaccttggattgggtgaacactagtcctgcttatgatgatggcttcaaaggaatcactgctaagagatcctcctctggaagaccccttgagcaggaaaggaagaaaggtgtgccatggactgaagaggaacataagttgtttctactggggctgaagaagtatggcaaaggtgattggagaaacatatcgcgaaattatgtgatcactaggacgccaactcaagttgctagccatgctcagaagtacttcatcaggcaactatcaggaggcaaggacaagaggagggctagcatccatgacataacaacggttaatctcacagaaaccaccagaacttcttctgatgaaagcaagagatctgcttcgccacaaaattccgcaatgctctcacgccaccagcagctgaattctaatgctgcctcatccggattgaatttccagtggagcgatcagccaaatgcaggggtagctatggcactcaaccctgcacatgaacaagtcttcatgtccccttatggccttaactcatacgggtttaagatgcagggccaaaatctgcacagaagttctcttcatgagtcttcttacttaggacctcagacaccaaacatggttttccaaatgcagccctcccaacactattcccatgcatgaggtggtggtggttgttgttttgaattattattactattattattattattattatttatggct

SEQ ID NO: 9046 - DNA, 1873 bp, Glycine max
  Clone ID: 700832290_FLI
gaaaggcaacgttcaaaagaacatagggtgtttgacactatgcactgctttactctctctcatcacaatcttcattattcccttttgtgagtccttcaactacggccaagccctgtcccagagcctcctctattttgagtcacaacgttcaggtcgcttaccctacaatcaaagggtcacttggcgacaccattctgccctcactgatggcctagaacaaggggtggacttggtgggagggtactatgatgcaggggacaatgtgaaatttgggctaccaatggctttcaccataacactcctctcgtggggtgccatagaatacggcgaacaaatcgccgctgccggcgagtatgctcacgctctggaggccatcaagtggggaaccgattatttcatcaaggcacacacacaaccaaatgttctttgggttgaggtgggtgacggcgacactgatcactactgttggcagcggccggaggacatgactacgtcacggcaagcttacaaggttgactcgaacaaccccggctcggatgtcgccggcgagaccgcggcagcgttggcagcggcgtccattttgtttaggagaacaaatccacattactctcaactacttttgcatcatgcacaacagttgtttgagtttggtgacaagtacaagggcaagtatgatgagagtgttggagtggttaaagggtattatgcttcggttagtggctacatggatgagttgctgtgggcagcagtttggctatatagggccacccaaaaggaggaatatttaacctattttttggacaaggcttatgactttggtgggaccacttgggccatgactgaattcagttgggacgttaagtacgttggtgttcaagccattgcttccatgtttcttatggaagaaaagaagcacaagaaacaccaagtcatactcaaacagtatcgttcaaaagccgagcactacctatgcgcgtgtctcaacctcaacaacattactaacgtggagcgcaccccaggagggttactatacatccgccaatggaacaacatgcaatacgtagcaacggcatcgtttcttctcacggtgtattctgatcatctcctagccacagatcagaagctgcattgccagaaaggagaggtgggtccccatgaaatgttggcctttgcaaaatcacaagttgattatattttgggcactaatccaatggctatgagctacttggtaggatacggtccaaaattcccgcagaaggtgcaccataggggcgcatccattgaatcatatggggaaaataagggttttattgggtgcactcagggctacgataactggtatgggcgcgttgaacccaatccaaatgtactcattggagcactcgttggtgggcctgatatcaaagaccaatttaaagatgagagacgaaattacattcaaacagaggcatgcacctacaatacggcagcactagtaggggtttttgctagattgcatcaatcacatgcacatgctgaaacccctttagtagcttctagctaattggggttatacgttatagagataaatttttggttcattgttccgggcaaagaatatttcttactagtgcttactgttgtactgccattgtaattgtaatttgagtatagtatatcgtaagatacaaactatacaaccaatgttgactcaaaaatgcgtctagagacattaggtggaatagcaaattgtaccacttatacttagtctagcaattggaaagagttgcattaggagttaaagtagaaggttctgttcttttgggttagtagtcaaagacttgtattcatagttaaaacttggataatttagcatgcacttttatttttggtc

SEQ ID NO: 9047 - DNA, 1251 bp, Glycine max
  Clone ID: 700832291_FLI
gtgaggaaaaaggaatttctggacgcactaacagtaaacctggatactcgtttcttcggggtggaaatttaatggatgaaaatactacttgctatattacactctcggagttgaaagaagctactgacaatttttcaaagaaaattggcaaaggaagctttggatctgtctattatgggaaaatgagagatggaaaagaaatagcagttaaaagtatgaatgaatcatcttgtcacgggaaccagcaatttgttaacgaggtggccctcctatccagaattcatcacagaaatttggttcccttgattggatattgtgaagaagaatgtcagcatattctggtttacgagtatatgcacaatggcactttacgggatcacattcatgagagtttcaagaagcagaagttagactggttagctcgtcttcgtattgcagaagatgcagccaaaggtcttgaatacctacacacaggatgcaatcctagtatcattcaccgtgacataaagacaggaaatattctcctagacatcaatatgagagcaaaagtatcagactttggactctccagattagctgaagaagatttaacccatatatctagcattgcacgaggaactgtaggctacttggatcctgagtactatgcaagtcagcaattgacagaaaagagtgatgtatacagttttggagttgttctgctagaactgattgctggaaaaaagcctgtgtcatctgaagattacagtgacgaaatgaacattgttcactgggcaagatccttaactcataaaggagatgcaatgagcatcattgacccttctctagaaggaaatgccaaaactgagtccatttggagggtggttgaaattgccatgcaatgtgttgaacaacatggtgcctccaggccaaggatgcaagaaatcattttggctatacaagatgctatcaagattgaaaaaggaacagagaataagctaaagtcttcatcatcattttcaggtagtagtagttcaaagccacattcttcccggaaaactttactcacaagctttcttgaaattgagagccctgacgtatcaaatggttgccttccatcagcaagataattaaattggacatgccttacattccatgtgttgattttgtttctatatttacttctttttaaccattattattctaccaatatgtacttttcaccagtaacagtttgacactgactagtgacaacattccaaatttggaacc

SEQ ID NO: 9048 - DNA, 1503 bp, Glycine max
  Clone ID: 700832383_FLI
tgggagttaggttctgcacgctctgcttccagcgagtgttctttcttcgtttcaacaccttaatttgcacacgctgcttcttcagcttgaggaatggcacaagaaacctttctattcacatctgaatctgtaaacgagggtcaccccgacaagctgtgcgaccagatctctgatgcagtgctcgatgcgtgccttgaacaggaccctgacagcaaggttgcctgtgagacatgcaccaagaccaacatggtcatggtctttggagagatcacaaccaaggccaacgtagactatgagaagattgtccgtgacacatgccgcgaaattggattcatctctgatgatgttggtcttgatgctgacaaatgcaaggtgttggtcaacattgagcagcagagccctgatatcgcccagggtgtgcacggtcacttcaccaagcgcccagaggaggttggtgctggtgaccagggtcacatgtttggctatgccactgatgaaacccctgagtacatgcccctcagccatgtccttgcaaccaaactcggtgctcgcctcaccgaggttaggaaaaatggtacctgtgcttggctgaggccagatggcaagacacaagtaactgttgagtactacaatgacaatggtgccatggttccagttcgtgtccacactgtcctaatttccacccaacatgatgagactgtgagcaatgaccaaattgctgctgaccttaaagagcatgttatcaagcctgtcattcctgagaagtacctggatgagaagaccatcttccaccttaacccttctggccgttttgtcattggtggccctcatggtgatgctggtctcactggaagaaagatcatcattgatacctatggtgggtggggtgctcatggtggaggtgccttttcagggaaggaccctaccaaggttgacagaagtggtgcctatatcgtgaggcaggctgcaaagagtgttgtggcaaatggccttgccagaaggtgcattgtccaagtttcctatgccattggtgtccctgagcccttgtcagtgtttgtggacacttatggaactgggaagattcctgacaaggagattcttcaaattgtgaaggagaatttcgacttcagacctggaatgatcaccattaacttggaccttaagaggggtggccataggttcctcaagacagctgcttatggacactttggaagggatgaccctgacttcacctgggaagttgtgaagccactcaagtctgagaagcctcaagcttaagattgttgtgaagttaatcactcccttcaatggatgtcttgctaggtgtggatgaataatttgcgtgttccatgactactactacttcattcataggtctaatgtcatctcatcaatacttaaactgtttttttttttccttttctccttttactcacaatttattttttggttatgcaatgttaccgttttgatgcaatggaaattttatcagaattttgtacc

SEQ ID NO: 9049 - DNA, 841 bp, Glycine max
  Clone ID: 700832462_FLI
gatttgacttactctccggcgctgccattctttctttctatcttcaatcaatttcaagatcgtaacactggtattatatggcctccttcagagcattctggaacagtccagttggtcccaaaacaactcacttttggggacctattgccaactggggatttgtggcagctggattggctgacttgaacaaacctccagaaatgatctctggcaacatgacaggagcaatgtgtgtctattcagcattgttcatgagatttgcatggatggtacagccacggaactatctactttttgcttgtcatgcctccaatgagactgttcaactctatcacttcacccgatgggcaaaggcacaggggcttctgtcggaaaagaaggaggaagcttcatcccagtgatttggtgatgctaaaagactttcttgagtggagcgattttaaagattttgcatttgaacttggcgatgtatgaataattgattactgattgtaagaaggggcttgtggaaactgtaaaagattgtggctgtgcaagagtattcggattagaaaggattgctcagaagtctaaactatttgttgaaggcacatgggtgggtttaatatgtctaacatctggctggcccaaaagtctttaaacttataccataggcaaaggatttgtctattatatctcatactgaaattccgctcaattactctacacagttgggcgttaagaattgtactgtgactatttattcattgaaacttggatgtcatgttaataatttttaatgccctattctttctaaattgtaatctgagcatgaggaatgaataggtttctcggcataacc

SEQ ID NO: 9050 - DNA, 536 bp, Glycine max
  Clone ID: 700832582_FLI
ggttaccggcgacggcggcgtgcggcggtgcagccactgtgcctcggagaagacgccgcagtggcgcgcgggaccgctgggaccgaagacgctgtgcaacgcgtgcggggttcggttcaagtcgggtcggctcgtacccgaataccgacccgcggcgagccccacgttcgtgctgactcagcattcgaactcgcaccgcaaggtcatggagctccgtcgccagaaggagctgctccgccaccaacaacaacaacaattacaacaagagcaatgccaccgtcacactcacaaccaccacgatttcaaagtttgctgacgtgtcctttgtcggtgcttccttcttttataattaatgatgactaatgtcttcagaatattatcagtaaataaaaaaatgatttttttttccatttttactagtttcataaggagaaatgctggtaatctacatcacaatgtttttgccttaaaaaagaaatatcacgaagttttgtaaatctaatttgttatttaatgaattttactcgtaatttttt

SEQ ID NO: 9051 - DNA, 1258 bp, Glycine max
  Clone ID: 700832588_FLI
ggatggctcatttatcatagtagtgcttcctcctttaccatttgaccatatttatccatctcaatcacttcccactttttatgagcattggccaacccccacgcttcctttattctccctctcaagcttcaagctactcacaccaatgaagatccagtgcgacgtttgcaacaaacacgaggcctccgtcttctgcaccgccgatgaagccgccctctgcgacggctgcgaccaccgtgtccaccatgccaacaaactcgcctccaaacaccaacgcttctctcttctccgcccttctcctaaacaacaccctctctgcgatatttgccaggagagaagagcctttacattctgtcagcaagacagagcgattctctgcaaagagtgtgacgtgtcaattcactctgccaacgaacacacccttaagcacgataggttccttctcaccggtgttaaactttctgcttctgctatgcttcgttcgtcagaaactacctctgattcaaactcaaacccttctcttcttaacttttcacaccaaacaacattactacctccatcttccaccaccaccaccaccaccatcaacaacaacaacaacaaggttgctgttgaaggaactggttcaactagtgctagcagcatatcggagtatttgatagagactcttcctgggtggcaagttgaagactttcttgattcatattctgttccctttggtttctgtaagaatgatgaagtgttgccacggtttgatggtgaaatggaggggcatctgagttctttctcaaccgagaacatggggatctgggttcctcaagcgccaccaactcttatgtgttcttcacaaatggatcgggtgatagttcacggtgagaccaatatcaaaggtagcagcagatcaaggttgaaggatgataatttcactgttccacagattagtcctccttccaattccaagagagccagatttctgtggtagaaacaaataaacaaacaaacaagcctcagtttccattctcttgaggcagaattaacaaccctctttgttttgttttgtcccttttctctttttcttaccctggcttgtagtttactctgcccatgttttcaatttggttcagtttgactttttttttttccctttttcttgtttctcctccctctttccctactgggctgtgttttgataaatttgtgcacctttctactagtgattgtaaatataaaccttttcaaatgcatgttgttttttgac

SEQ ID NO: 9052 - DNA, 1327 bp, Glycine max
  Clone ID: 700832621_FLI
cttgctcagaacattcccatggtcatgcgccgcaaagaaatcaaagattatggcactgctaaagctattgaaggcgatttcaagcctggccaaagttgcttaatcattgaggatttggttaccagtggcacgtcagttttggaaactgcggcgccattgcgtgctgtgggattaaagatcagtgatgctgttgtgttgatcgatagagagcaaggtggcagagaaaacttggaggagaatggcatcaagctgcatgcaattattaaattgactgaaatggtgaaaattttgggcaatcacgggaagcttgatgaagagatggtaggggttgttacgaagttcttagaggataatcgtaaggttgctgctttggcaaaggtggagaagcctgtaactaaggtcaaagctttgccatttggggagagggctaagctgtcgaagaatccaatgggaaagaggttgtttgagataatggctgagaaggagagtaatctatgtttggctgctgatgttggaactgcagctgaattgcttgaaattgctgagaaggttggacctgagatatgcttgctgaagactcatgtggatatttttccagattttactgctgattttggctctaagcttctctcgattgcagaaaaacataacttcttaatctttgaggatcgtaaatttgctgatattggcaacacagtgaccatgcaatatgaaggaggggtttttcgtatattggattgggctcatatagtaaatgctcacataatctcaggtcctggaattgttgatggattaaaattgaagggtttacctcgtggtaggggtctattactgcttgctgaaatgagctcagctggtaaccttgccaagggagattatacaacttctgcagtaaaaattgctgaggatcattctgactttgtaattggcttcatctcagtcaatcctgcatcatggccaggggcaccaataaatccttctttcattcaggcaacccctggagttcaaatggtaactggtggcgatgctttagggcagcaatataacactccatattctgtgatccatgataggggcagtgacatcatcatcgtgggacgtggcatcatcaaagcagcaaaccctgctgagatagctcgtgaatatcgtcttcaaggatggaatgcatatttggctaaatgtaattgatgcctgcattcctagaataaaattatgagcttaaattatgttttaatgggacatctgatctcactgtaacccagatgaataaggtcttggggtacaatatgaagacatttttcggttggaatattgaagtggatttttc

SEQ ID NO: 9053 - DNA, 1076 bp, Glycine max
  Clone ID: 700832650_FLI
cttagcatcatttcatatatacaaataacatatatggcttcttccttctctccaagcctatcatcacttgtgcctctgcttgtgagccttttcattgtggtttgtgctgccggtaacttcaaccaagactttcagattacgtggggagatggtcgtgcaaaaatactcaacaacgccaatcttctcactctctcccttgacaaggcctctggctctggcttccaatccaagaacgaatacttatttggcaagattgacatgcagctcaagctcgttcctggaaactctgctggcactgtcaccgcttattatctatcttcaaagggatcaacatgggatgagattgacttcgagttcttggggaatctcagtggtgacccttacattctgcatactaatgtgttcagccagggcaagggcaacagagagcagcaattctatctctggtttgacccaactgcagatttccacacttattcaattctttggaatccccaacgcattgttttttctgtggatggcacccctataagagaattcaagaatttagaatcaattggagttccttttccgaagaggcaaccgatgaggatatactcaagcctatggaacgctgatgattgggccacaaggggtggacgcatcaaaaccgattggtccaaagctcctttcactgcatcctacagaaacttcaacgctaacgcttgtgtttggaacagaggaaaatccacatgcaaatcaaattcaccatcctctaatgcatggctatcacaagagctggattccactgctcagcaaaggctgagctgggtgcagaagaattacatgatttacaattattgctccgacaaaaacagatttgctcaaggccttccactcgaatgcacacattcgtagaggacttcatcttccactagcacaagtgttacattataatttcatttaccattcttttattttatttttttttaattcctgttcacagtttgtgctcttttacgatgtaaaatatatcgcatgtaaaataacggttctgttatttggatgtcaaattttttcatgatttttgtacttgt

SEQ ID NO: 9054 - DNA, 931 bp, Glycine max
  Clone ID: 700832734_FLI
agaagccagcagcagtaggcaaaaatgtcgagttccatgatgacgctctcaaggaggctctattgctctctgcttcgaacccccaatgcatatcgccacttctccaccgatcaccttttcgactcggacgaggccgactcagcacccgacccacccgcacccgacgccgttcaagaagaagaaaagttcgtcatcgatcgccccctcgagaatggcctcgacgttggcatctacagggctattctggtagggaaggcggggcaggctcctttgcagaagaagcttaagagtggcacctccgtcactcttctctccgtcggcaccggagggattcacaacaaccgcaggcctcgcgtcgacgagaaccctaaggactatgccaatcgctctgccattcagtggcatcgtgtctccgtttatcctcagaaattgggagaccttgtcaccaaacacgttgttcccggttcaatgctgtacgtggaggggaacctcgagaccaaatgcttcaccgatccgataaccggcattgcccgccgaattcgagaaattgctgttcgacgaaatggtcgcattgtatttttaggtgaaggcggtgatgctgagctgcagacactgccaaaagacctgagagctgttggctattactaacgttagatgcttgaaatgggaacattgcatttagttcataatggagatttttctattttgtaattatactctgattttttaccgcaaatttggaattatttcgcagacatttgtcatgagggaaactctaggtttgagcgatcttgtagtttctacgtgtaattcataatcagggaatatagagctcaaccttcctgattttgtatgttggtaaacttgtggtagggcaagtatttcaattttctctttggttttaaattggaggaatgattgctttatgctc

SEQ ID NO: 9055 - DNA, 292 bp, Glycine max
  Clone ID: 700832792_FLI
ggtgttcggaactgagcactcccacattcttcgagttccctttagaactgagaagggaattgttcgcaagtggatctcaagattcgaagtctggccctacttggaaacttacactgaggatgttgcccacgagcttgccaaagagttgcaaggcaagccagatctgattgttggaaactacagtgatggaaacattgtcgcttctttgttggcacataaattaggtgtcactcagtgtaccattgctcacgcacttgagaagaccaaataccccgaatccgacatttactgg

SEQ ID NO: 9056 - DNA, 1959 bp, Glycine max
  Clone ID: 700832793_FLI
gttgattctcagattatgggaactctgagtggcgatggcgatgaggatgatctgaacgcggagattgcggaggtgcgtgcttgtcttgccaacgaagagaacgagctcggtgagacccctctgttcacagctgctgaaaagggtcaccttgatgtggtgaaggagttgcttaactattccaccgctcagactgtttccaagaagaaccgatccggatttgatccattgcatattgcagctagtcaaggccaccaccccattgttcaggttttgctagattatgactcaggattgagcaaaactattggtccctccaactccactccgcttataaccgcagcaacaagagggcacacggaagtggtgaatgagctgctgtcaaaggattgtagcttgttagagattgctagatccaatggcaaaaatgcgttgcatttagcagctcgtcagggtcatgtggagattgtgaaagccttgctcagtaaagatccacagttggctcggaggactgacaagaaagggcaaactgcattgcatatggctgtaaaagggcagagttgtgatgtggtgaaattgcttcttgaggcagatgctgctattgttatgcttccagacaaatttggtaacacggcgttacatgtggcaaccaggaaaaagcgagtagagatagtgaatgagttattacatctgccagacaccaatgtgaatgcattaactagagaccacaaaacagctcttgacattgctgaagatcttcccctctccgaagaggcatcagatataaaggactgtctttctcgatatggagcacttagagctaacgagctcaaccaaccaagggacgaactgaggaaaactgttactcaaatcaagaaagatgttcacacccaacttgaacaaaccaagagaaccaacaaaaatgttcacaatatttccaaagagctaaggaaactccacagggaaggaattaacaatgccacaaactcagtgacagtggtggctgtgctgtttgctacagttgcttttgctgctatattcactgtgcctggtggggatcacaatgacggctctgcagtggtagcagcttatgctgcttttaaaatcttctttgtctttaatgctatcgcactttttacatctttggctgttgtggttgttcaaatcactttggttagaggtgaaactaaagcagagaaaagggtggtagtggtgatcaacaagctcatgtggttggcttctgtctgtacttcagtgacgtttattgctgcttcttacatagttgtgggtaagaagaatgagtgggctgcaattttggttacattagttggaggggtgataatatctggagttattggcactatgacttactatgtagtgaggtctaagagaagcagatcaatgaggaagaaggagaagcaagctgccaggaggagtggatctaactcatggcatcattctgaattctccaattccgaggttgatccgatttatgcgctttgagtttgaacttgcaaccttcaggggatcatgaagaacaaattgttgtgaaaaagatgacaggtttttaggtttgctacttgctccatgttaccactttaagagttcttcactgtacaggaaattgttctcttcggcttagctgctgcttttctaggatcttatatacaaattggaatgaagcatgcatcatcattggaatgaagcatgcatcatcccggtctgtgatttttaagaacaaaatccaacattgctttaattctcaattatgtattgatgtattagcaaaatgtctcccttccctgttcgttactgttttttttctatcactagaattgtcttcggggcctaatctacacaattgacccttgataatgctgcatgctgagttctgatagagaatgaaatagtaatacgtgttaattgtatttttttttatttgttgatatattttgtgttgtg

SEQ ID NO: 9057 - DNA, 268 bp, Glycine max
  Clone ID: 700832794_FLI
cggtgatcgcaacctcgtttgcacccttctcccaacatcacaggttgttgaagaacaagctgctgcaacggcctaatcttttcttccattgacaagtattttcattttttaaattgtacataaactcttcctatcattcaggcgttgctgcttgacctttgcttcattatatcataatgatgatgatgtaagtttcattcagccacataaccatacctaaacacagcaaagaaaggtatccaaaaaagaaataaactgttgtgacttg

SEQ ID NO: 9058 - DNA, 1327 bp, Glycine max
  Clone ID: 700832820_FLI
atacctggcaaaggaagaggtcttgttgcatcacagcctctaaaagcaggtcaaatagtcctcactgaatcccctctcattctctactcagcttctcctctcctcacaccctcttcttcaccttacacttactgtgaccattgtttcagaatcttacctctcactcacaatagtactactgtcacgtgcccttcttgctcaaaccacagtttttgttcccagaagtgcttctcccttgcactcaaatcctcacactccacttgggtatgcaaagcactcatgtctcttcaacaacaccccaattcaacacttcttcaacaacacccccaagaacgccaagtccaagcccgtttaattgttgcttctcacaagctcttccttcacaatcacaccccttctgagctagacacttttctttctcttcatggcaccccagatgatgctattcttgatgctgctaactttcttcactcgctaatctcaccacttttcccacctcaggctcaactctctgtggatctcattgcacaacttcttgcaaaggacagactcaactcctttggcttaatggacccttattcccctgatggccctcagagatctattaaggcttatgctatttaccccaaagccacgttcttcaaccatgactgtgttcccaatgcatgcaggtttgactatgtggacagtactaatgatgattatgaacacaacagtactgacattgttattaggttgattgaggatgttgatgaggggaaagaggtttgcatcagctatttcaggattggtagggactattgtacaaggaaaaggatcttgatggaggattatgggtttacttgtggatgtgataggtgcaagattgaagctaattgggatggtgaagaaaacaacagtgaccttccacacgtgcggtttcttagcaagtatgtttgtgagaggaagaattgtgcgggaactatggctcctctgcctccaaaagatgatgtgccatctaatgttctggaatgtaacttctgtggtaattttaagattgatgctgcttaattggcctttaacacctatcagttattatatttcatctttggtagaaatatatatgttgaggttgctcttgtcttttagcattgcctagagaaagtgatattgcaattctgtattttactttgactctgagagtggagtccttgcatgttctcattcacacctcagtttggtggattttgcgtgcaatatggaagatgaattcatgttttttcagcaacaagctcagtttctgagtccagtgttgtttagtgatgttattggaattcagttcctcgtt

SEQ ID NO: 9059 - DNA, 661 bp, Glycine max
  Clone ID: 700832843_FLI
gttaccaatgggagccatcaccgcacgctaccttaggcacattcaagcactcggccctgcatggttctatgctcatgcaggaatgcaagtgtttggtttcgttctgggaacagtggggtttgtgatcggaatcaggctggggcaactgtcgccgggagtggagtataggctccaccggaagcttggaatggcggtgttttgtctggggggtctgcagactctggccttgttatttaggccaaacacaaggaacaagttcagaaaatactggaagtcctaccatcactttgtagggtactcgtgtgtggtccttggctttgtgaatgtctttcagggatttgaggttatgggggcaagcagatcttacgccaagttgacttactgcttaggtctctccactctcattgggctttgcattgctttggaggtcaactcttgggttgtcttctgtaggaaatccaaggaagacaagatgaggagagagggactcattggaacttcccacaaacccatccacaattaacattcatcattattcttattatatattattacatttcattcctctttaatttctcttttactaatacattacattttctctccaattaatgccaaggtctgcaattatatataaagattaattttgtcgtttcgattc

SEQ ID NO: 9060 - DNA, 908 bp, Glycine max
  Clone ID: 700832851_FLI
gcatcgtccaaggtagcgacgacgacgacgacgacgacgaattcggatatttcgagccagcaggtatgggacggcgccaccatggagatggagtctcaagacaacatgaacatgagcatgagcctccaggatttgttgaccgaaaacgacgccgtgccaccctctcatagtcatggaaggggaaagagaaaaaccctagtggaggaacccctcgtcgtcgataaggtcactcttcagaaacagagaaggatgataaaaaacagagaatctgccgctaggtccagggaacgcaagcaggcttacacagttgagctagaatctttggttacacatctcgaggaagagaatgccatcttgttaaaacaagaggccgataggaaaaggcagaggttcaatcagctcatggagtgccttattccagttgaggaaaaacgtaaaccaaaaccaatgcttcggagagtgaattcatcccaatggtgatgtaatatgttgcttgtcctaatggactagttttcaagtcctggtgtatagataccaaacaaatgatgcatgatagtgttgaaaggataaatatgaaaaagagaggaaaagattttttttatatatacatatagctttgctgattattttccaggatcacttggagttacattgctgcagagagaaaatagatgcagccaaataattcaactaatttgattcaagctgaagcttattattggaagatccttgaattgatggatattgcggggatagatctttattgggggaagggagttgaaattagaatttatgtttaatgttagattgtctgctttttgatatttcagggagggaacactgataaaccttgaccatgtacaaacaagtatcgataagtggtatatacatgtgttatctatactgct

SEQ ID NO: 9061 - DNA, 507 bp, Glycine max
  Clone ID: 700832864_FLI
aagaatagctctttctatcaaacggatggtgctgaggatctattgagctatgcttggcaactttggaaggatggaacacctttggaactgatggaccccatattaagagaatcctataatcagaatgaagtcatcagaagcatccatattggtttgttgtgtgtccaagaagatccagctgacagacccacaatggcaacaatagttcttatgctagacagtaacactgttactctaccaactcctacgcagcctgcatttttcgtccacagtggaactgatccaaacatgccaaaggagctgccattcgatcaatcaataccaatgtctgtgaatgacatgtcgattagcgaaatggatcctcgataagcttgatcgcttggaggttctaatatgtattattatccatgtacttatttctcctagttttaaatgacgaaaccttggaacactttgtattatagttgcttatttttcaactaaataaaatatatgtattatgcaggt

SEQ ID NO: 9062 - DNA, 1418 bp, Glycine max
  Clone ID: 700832879_FLI
ctaaggctgttaaagagaaggcaggagaaagagaagaaaccacagaaagatcgggcatgacagaatgcaagtattatcaaaggtctgggggttgtaagtttggtaaatcttgtaaatataaccacacaagaggaaaaatttcaacagcaccagcaccacttttggaacttaactttcttggcctgcctattcgtctgggagagagagagtgcccctactacatgcgcactggctcttgtaagtttggagcaaactgcaagttcaaccatcctgaccctacagctgttggaggagtaggaggtgatcctgcttcagggtatggtaatggagggtctatttcattacaaggtgtatcacaaacatctgtaccctcctggtcttctccaagaacattaaatgaatcatctccttttgtgccaatgatgctttcacctactcaaggagtttctacccaaagttctgattggaatggatatcaggcatctgtctacttacctgagaggaacatgcatccaccttctacatttgtcatgaacaacccagcaattgatacaaatgtttacatgcaccatcaaaagcagatgcctgttgatgagtttccagaaaggcctggtgaacctgaatgcagctacttcttaaaaactggggattgtaagttcaagtctaattgtaaattcaaccatccaaagaatcgggttgcaagattacctccatgcaacctcagtgacaagggtctgcctttgagacctgaccaaagtgtctgctcccattacagtcgctatggaatttgcaaatttggaccagcttgtaagtttgaccacccgataaacttgcagcccgtgatgattcctggacttggtcagcaatcctactcaaactcagctagtgttgaagtggctgggatatttggaagtacaggtgttgtaactgatgcgacaattcagcaatctgtgtaaacatgtttgtctgaggatctttttgctttgaggatcataacacccgaaatttgtagttttcttcttaaacatgataaatttattttacttttcctagcactgtccaatgcagcacaagctttgcaaggaatatcaacacacacacacatcaaacagtttttatgcatttattacaagtaacaacatctgcatatgtagattatcttttgtttatgatcagttggatcataattgttttgaaatggttgtcaatgtgggtttttttttttttttccagctgccaacggggttatgaaccttggcaaaattggcaactagtcaatacatctgatggatagaataaattgataaaccaatccatatggagatcattttttttgtttgcttgcaaaaagattgaccttacatttgctaacaaaatttgtattaatgaaggagttatcttgcctgttggtctgtttt

SEQ ID NO: 9063 - DNA, 2196 bp, Glycine max
  Clone ID: 700832904_FLI
agacgggtctttgtgaacctatgatcttgtgaaaacccagaaagcgatctttgatgcactcataggattggccgattcagtcgcgtgttcggtggccgttgatttcgtgacaaatgaacggtggcgatgaggtagtggcagctccggcggctccaccgcaccctctggagtggaaattctcgcaggtcttcggagaacgcacggcaggggaagaggttcaggaagtggacataatttctgctattgaatttgacaagtctggtgatcatcttgctactggtgatcgaggtggtcgagtggttctctttgagagaacagatacaaaagatcatggtggatcaagaagggatttggagaggatggactattctattggtaggcatcctgagttccgttacaaaacagagtttcagagtcatgagccagagtttgactatcttaagagtttggagattgaagagaaaatcaacaaaatcagatggtgccaaacagctaatggtgccctgttccttctttctacaaatgataaaacgatcaaattttggaaggttcaagaaaagaaggtcaagaagatttctgagatgaatgttgacccttcaaaatctatggggaatggatctattgctagttcaagcaattcaagtagttctaggccatatcttgtaaatggaggatctccagatagatacaattatataagcaatgacttttcatttccaccaggaggcctaccatcactaagattacccatggtaagtagccatgaaaccagtttagttgctcgatgtcgtagagtgtatgcacacgctcatgattatcacatcaattctatttcaaataacagcgatggtgaaactttcatatcagctgatgatttgcgaataaatctttggaacctggaaattagcaatcaaagttttaatattgttgatgtaaagcctgcaaatatggaggatctgacagaggttataacatcagcagaatttcaccctacacattgtaatacgttggcatatagcagttcaaagggttcaattcgtcttgttgacttgcgacaatcagcattatgtgattctcatgctaaactatttgaggaacaggaagccccagggtccagatcatttttcacagagattattgcttctatctcagacataaaatttgggaaggatggaagatacatactaagtcgtgattacatgactttaaagttgtgggacattaatatggattcaggccccgttgcaactttccaggttcatgagtatttgagacccaagctttgtgatttatatgaaaatgattcaatcttcgataagttcgaatgttgtctaagtggtgatggattgcgcgtagcaactggttcttacagtaatctatttcgtgtgtttggttgtgcccctggaagtgctgaggctacaactctagaagccagtaaaaatccaatgagacgacaagttccaaccccttcaaggccttcgagatcactgggaaatagtataacacgtgttgtaagacggggagcagaagcccctggagtggatgctaatgggaattcttttgatttcacaacaaagttgctgcacttagcatggcatccaagtgagaattcaattgcttgtgctgctgcaaatagcttgtacatgtactatgcgtaaagagagatgattgaaggcgcaatgtgtatctgcatggtcacatcatattgctgtggagaaggcttcttcttttcccatcttaccaaccacactgggttggaggatacatatacactattaactctcacactacaagtgcccttcagagagcttttagaaaaaggatccagaagtggctgttttgaaattcctggattggcaggagaccttattttgttactggatgggcagcatctctttttttttcctcttcccctcctttcaatcctaatattctttccctctatttctgtatcttcttctgaaagagaaggtgcaatcaatgtttcaaattgtgtttggcttgcaagtgaagaagaaaatgtgattgtagctctcctacaacagatactaaaggatgtttcaatatctgccaccaggattcagattaaaaaatgtagtttttcttttctttttttgcccagatatttctgtgggatggagcagttgaaacctgcagtgcatcatttttttattgattaattttgtgttggaattt

SEQ ID NO: 9064 - DNA, 1508 bp, Glycine max
  Clone ID: 700832944_FLI
tgaggaatgagtttcttgcagggaataattgattccttcaactccatcttcacacatgataacaacaacaattatcacaacaccaattctccttcttcttcttcctcaacgaatcgaatggaagcttctcctcctccttcggtttcgaacgagcgcgttgcatacaagctcaaaggctacttcgatttagcaacgcaagagatcgcgaagggcgttagggcagaggaatggggcttgatcgacgacgcgcttcttcactaccgtaacgcgcactcgatcctcctcgaagctaattcaactcccgttccttcctacatcactaccagtgaacagcagaaggtgcaatcgtatcgagagaagatatctaaatggcagagtcaggtttctgagaggttgcagactctcgctagacgagctggcagctcatctgcaaatcagagcacctcaaaacttggtcaaactgctgccgctccaattaagacattgagtactagaaaaaatgtgttacaaaagccccctcaaagaggaggtcaggtgaataaagttggaagcccaaaatctagtcaagcatctggtgtaaattatgatgacaaactagttgaaatgattaacactgccatagtagatagaagtccttctgttagatgggaagatgttgctgggcttgaaaaggcaaagcaagctttaatggagatggtcattttgccaactaaaagaagagacttgtttacgggacttcgaaggccagccagaggtttgcttctctttggtccgcctggtaatggaaaaaccatgcttgccaaagcagtggcttcagaatcacaagcaacattttttaatgtcacagcagcttccttgacatcaaaatgggtgggtgaagctgaaaagcttgtccggacactattcatggtagctatatccagacagccatctgtaattttcattgatgagattgatagtataatgtcaacaaggttggcaaatgagaatgatgccagcagacgattaaaatctgaatttcttatccagtttgatggggtgacctccaatcctgatgatattgtgattgtaattggtgcaacaaataagccacaagaattagatgatgcagttcttaggagactggtaaagagaatatacgtacctttaccagatgaaaatgttcggaagcttctgctgaaacacaaactcaagggtcaagcattctccttacctagtagagatcttgagaggcttgtaaaagagactgaacgatattctggcagtgatctgcaagccttgtgtgaagaagctgcaatgatgccaattagagagctgggtgttgacattcttactgtaaaggctaatcaggtaagaggactgagatacgaggattttaagaaggcaatgactatcattaggccgagcttaaacaaaagtaagtgggaagagcttgagcgttggaatgaggaatttggctctaattgaagtcatattctgatgcatatatatgcatcaaattatttttt

SEQ ID NO: 9065 - DNA, 1840 bp, Glycine max
  Clone ID: 700833022_FLI
agttaccgaagcataacaatgtgtcttggaggggaaactcggggatgcaagatgggaaatcttcggatcattctgctgcgattaaggatctggtgggagggtactatgatgcaggggatgctatcaagtttaactttcctgcttcgttttccattactatgttgagttggagtgtgattgagtacagtgcaaagtatgaggctgctggggagcttgatcatgtgaaggagattatcaagtggggtactgattattttctcaagagttttaatagcactgctgataccatcaccacccttgctgctcaggttgggcttggagatacttctggtggtgacagtccgaatgatcactattgctggatgcgtccggaggacatggactatgaccgccctgtgactgaatgccacagttgttccgatctcgcggctgagatggctgctgccttggcttctgcttccattgttttcaaggacaacaaggcctattccaagaaactggtgcatggtgcgaccacgctgttcaagttttccagggatcagagaggcaggtacagtgctgggagttcagaggcttcaatattttacaattctaccagttactgggatgagtacgtttggggaggtgcttggatgtactttgctactggaaattcgtcgtaccttaagcttgctacggctcctggcctggccaagcatgctggtgccttctggggaggccctgattatggagtactcagctgggataacaagcttgctggtgctcaggttcttctgagtcgtttgaggttattcttgagtcccgggtatccatatgaagaaattttaaagacctttcacaaccagacaagcataatcatgtgctcctatctaccagttttcacaagctttaatagaaccaaaggtggcttgattcaattaaaccacggtaggcctcagcctctccaatatgtggtcaatgctgcctttttggctgccctttatagtgattatcttgatgctgctgatacacctggatggtattgtggacctaatttcttttcaactgatgtgctccgtaattttgccaagacccagattgattacatccttggaaataacccaaggaaaatgagctatgttgtaggttttggtaatcattacccaaaacatgttcaccatagaggagcatctataccgaagaacaagatcaagtatagctgtaagggtggatggaaatggagggacacttctaagccaaacccaaatacaattgttggtgccatggttgctggtcctgacaagcatgatggcttccatgatgttcgtacaaactacaattacacagagccaactcttgctggaaatgctggtttagttgcagcactagtggcattgtcaggcgacaaaagcacatcgattgacaaaaataccattttctctgctgttcccccaatgtttcctacaccgccaccaccaccagcaccatggaaaccataagcgcatcatgccattggttatttctttctagcaagtatcccagatgatttgagtgcaccggtaaccttcgttgttttgtatcaactgaaagatcaaggtaattttgcagaaaaaaagctttgagaaatagaagaaatggagcttggcctactgaatatagctgcctggggccaatgatcgactcaagatttagcattaagaattgataaagtggtacttgagagtgtgtctctttaaatttttgtgatacacatatagtatatatgtatctaaatcaaatcttgtattctttaaacatgaaaaactgaacagcttgtaattgtttgacagtttcatctaatgccttcacagttttactcaat

SEQ ID NO: 9066 - DNA, 1611 bp, Glycine max
  Clone ID: 700833080_FLI
caggaggttaaataataacagccttacaggatcctgccctcagtctcttagcaacattgaaggtctaacccttgtggacctctcctacaacaatctgagtggttccctgccaagaatatcagcaagaactttaaagattgtgggtaactctttaatttgtggcccaaaagcaaacaactgttctactattttaccagagccactttccttccctccagatgcactgagaggccaatcagactctggtaaaaaaagccatcatgtggcacttgcttttggtgcaagttttggtgctgcttttgtccttgtgattatagttgggtttcttgtttggtggcgatatagacgcaaccagcagatattctttgatgtcaatgaacattatgatccagaggtgcgtcttggtcatttaaaaaggttttcattcaaagagcttcgagctgcaactgaccatttcaactcaaagaacattcttggaagaggtggctttggaatagtttacaaggcatgcttgaatgatgggtctgttgtggctgtcaaaaggttaaaggactataatgcagccggtggtgagatccaatttcagacagaagttgagaccataagtttggctgtccaccggaatcttctgcggctttcggggttttgcagtactcagcatgaaaggctccttgtttatccctacatgtctaatggcagtgtagcctctagattaaaagatcacattcacggtcggccagctttagattggacgaggcgaaagagaatagctttaggtacagcaagagggttggtttacttgcatgagcaatgtgaccctaaaattattcaccgcgatgtcaaagcagcaaacattttgctagatgaagactttgaagctgttgttggtgattttggtttagctaagcttctggatcatagagattcgcatgtgaccactgctgtgcgtggcactgtcggtcacattgctccagagtatctatccactggccaatcatcagaaaaaactgatgtgtttgggtttggaatcttgctgcttgaactgatcacaggtcataaggctctagattttgggcgagcggcaaaccagaaaggtgtaatgcttgattgggttaagaagctccaccaggatggaagattgagtcaaatggtagacaaagatctaaagggcaacttcgatctgattgaactagaagaaatggttcaggttgcactcttgtgtacacaattcaatccttcgcaccgccccaagatgtcagaagtattgaagatgttagaaggggatggcttagctgagagatgggaggcctcacagaggattgaaacaccaaggtttcggtcttgtgagcctcaaagatattcagatttaatagaggaatcttcactcgtagttgaagccatggagctttctggtcctaggtgacaaacaagtatcttggttttccactatagctccttgtttaaaaggtgtagtttaaatgttaaatatgacattgtcattcgtgtcaatagctatgtaatgctcgtattcatctgtaaaaagaaaaaaaaaaaagaggaaagtcatgtataagtatcttctttgttggaatgttgatttagttgcttcag

SEQ ID NO: 9067 - DNA, 715 bp, Glycine max
  Clone ID: 700833113_FLI
gtaagcaagaggcatatgctggaccaaccaaacgtggccttccggatggtgggatattgatgagtggatgtcagaccgaccaaacttctgccgatgcaagtcctgcaggaagcgctgccagtgcttatggagcttttagcaatgcaatacaggctataattgaggagactgatggtgcaatcacaaaccaagaacttgttcaaagggcaagagagaagctgaagaactccggtttcactcaaaaaccgggactctattgcagtgatcatcatgttgatgctccttttgtgtgttgatctgttctcatctgatgcagagaaagagagaataatatgtgttgtttatagtctgcttgtgtattgctgtatagttggagactcaaaatgaagttaatgttttcatccagttatcatatgctgctctattatcaggaattatattccttcaacattttagcccttgttgtgtctttgctgctacatgaccattgtgctgggagaccaaactatcagagcaagttccatgcaccaaaccacagattttggctttggaagtctgaatatattggtgtatgtgaaattattaatatcattatttataaaatatatagttaaattttgtatgtcgtttgaaacattcttgcaactttgtaaggattttaatttgttgaacaaagtttgtagtatacttacaatgtcaagtgtttttgtttctc

SEQ ID NO: 9068 - DNA, 1329 bp, Glycine max
  Clone ID: 700833139_FLI
gtgcttctggatgactattgtgaggctgttgttggagattttggccttgcaaagctccttgaccatgctgattcccatgtcacaactgctgtccgtggcactgttggacacattgcaccagagtacctctccaccggccaatcatctgagaaaacagatgtctttggatttggcattctcttgttagagctcataactggaatgacagcactcgagtttgggaaaacagtgaatcaaaaaggtgctatgctagagtgggttaggaaaatactacacgaaaagagggttgcagtgttggtggacaaagagctaggagacaattatgatagaatagaggtgggggagatgctgcaagttgctttactgtgtactcaatatttgacagcccaccgccctaaaatgtctgaagtggttcgaatgcttgaaggtgatgggcttgctgagaagtgggcatcttcacataattacggtaatcaagacatgaaccccagccacggcaacaatagcaatacttcatcccgccctacctctgcttcaaaacatgatgatgacgttcatgaccgttccagtatgtttggcatgacaatggatgatgatgatgaacagtctttggaatcctatgcaatggaactctctggtcctagataaacagtaaatgtggaaaagaaaacagcaagatagaaaaggagaaagaaagaaaggagttttctttgccataaatcttaattagcttttcttttcctcttcttaattagctttgcttattctaggataattaatatatatatatatatatatatatatatatatatatatatatatatatatatatatattatatatatatatataaatcaaatcaaatgtatatatattctaaaatttttgtcatttgggtttgtaatattgtaaataaacaatttagtattattagtgcatttgtactcatgttgtgctgcatttgggtggaaaatatgtataatggtagaaaatggggtaggtgggtgcgcaatacgcacggtagactttgtatagggtggacagggaacatcatcagattctttcctatcgattgtgaagctgaagcagcagcagaggcaagagggtgtgtttccacagaatgatattaagatgggcatgcatatcttgcagtgtcctctcagtttgtcttgttcaatatgtatgttcaaacttgaaagcatcagtttcaatatgtatgttcaaacttgaaagcatcagtgtgtgatggtcacggtctgagagcttttgagctgttagaggtcattgtcgatctgatagctttgcagggtcacgcttgctctttttctc

SEQ ID NO: 9069 - DNA, 556 bp, Glycine max
  Clone ID: 700833222_FLI
aaaggatcttcaaaagaatggaatgaagcctgctaccaacactgcacagaggaggagtgcagctcaaattcaaggcatttcttccaagcccaagcctaagaagaagaagagtgaaatcagcaagagaacgaagcttaccaatgcccatcttccagagctctttcagactttaaacagttcctgattaactctcagcaagtgttggtgtagttcaaatagatactttatcagccagtctataaactagattagcagagtgaaatattcaggaggttcttgctgctgtgccctacttttaatttctatacatcaaggctgcagctaatggactattgtggtctataacaactcgtcttgtgaatccctgtatattaaaatcatgttgcatttagttttctagtcttgtaactttttatacataaattattagattggaagttcaatttttttcttcaacttatctaatgagcttaagcagctgtatgtttaacatgggatagtaacctacccaatgtttcaaaagtggacttggttaaaaataccccgaattcaacgt

SEQ ID NO: 9070 - DNA, 1515 bp, Glycine max; identical to SEQ ID NO: 8286
  Clone ID: 700833227_FLI

SEQ ID NO: 9071 - DNA, 838 bp, Glycine max
  Clone ID: 700834170_FLI
ctacaccttaggtttaggagaggcgaatatcgcgggaaagaagatatttctcttcgacgcggtttgcaggccgagggagattcactcgttggagacgacgccgtttgatgattacgtggggaaccacgagaacaagacgctgcacgccacgcagcagatcgccgagtgttggacgcgctcggtgaagaagctgctggagagagtaacggagtcggtggagaaaaaggcgttggagaaggccgcgagtgagtgccatgcggtggagcggatctggaagttgttaacggaggttggggacatgaacctcatgatggatccagaggatttcttgaggctgaagaaggagttagggatgatgagaactgcgggcgaaacggtggcgttttgcttcaggtcgagggagcttgtggaggtggcgagggtgtgtaggaatctgagggagaaggtgccggagatattggaggtggaggtggaccccaagggtgggcccgggatgatggaggcggcgatgaaggtttactcggagaaagagaaagggaaggttcatgttttgcaggggatgcaggggattgaggtggcgatgaagaggttcttctacgcgtataagcaggttgtgacggttatgatggggagctccgaggccgataatgggttcaccaagatattccttgaacccacttatttccctagcttggatgctgccaagacctttcttggttattacaaccaaaattaattcttttattcacttcaattccatcttactcacacaaagaaacaaaaaggattgaattttgtaaacaaatctttgtctgtaaaaatatatttatttgacttc

SEQ ID NO: 9072 - DNA, 983 bp, Glycine max
  Clone ID: 700834192_FLI
agcaatgccaatgaaggtttaatgatggaccggactgttccttcaaggttgatggatgacattgcagctactcggattcaaaatgcatttcgttcatttatggcaagaagaacattacaccatctaaggggagcagagaaattcgaagctttaattcaagatcacctggccagagagcaaacagcaactgcactaagctatatacattcatggagcagaacacaagagcaaattagagctcgaagaatctgtatgataacagaagccaggattaagcagaagaaattggaaacccagttaaaaattgaggccaagattcaggagctcgaggtggaatggtgcaatggttctgaaaccatggaagaaatcatttccaggttacatcagcgagaggaagcagcaattaagcgagagcgagccatggcatatgccttctcccatcagtggaggccaaactgtagccagtattttggtcaggcttcttatagccttggtaaggaaagttggggttggagctggaccgagcgttgggttgcggcacgtccttgggaagttcgggttcgaggtcagaccaccaaaacaacaaaactcaacggccatgggcaggtgcaaaaaaccaaattagacaagatgaaccaaaatgaaagcaaagtagccttggctaaacctacactatcaaacgggaaggaaaggaaaacggtacttcagggctgtcaaagaacaatgtatccaaatagcccattctaatttgatggtttatggtttcttcttgcacttctttgggggtttattttccatattttgcttggtgagaatctaccttttggtgtgtacgttccactaggagagacttcacttattgtctgcttttgcatggtgcatatgattatgaatatgaattccctagttttggttgagacatgagaatggtctattattgttatccctttcatttcaggggcagttatttaaatctttaccgc

SEQ ID NO: 9073 - DNA, 506 bp, Glycine max
  Clone ID: 700834262_FLI
gaattcatcatcgtgagtgtgtaacagtgataacaagtttgagattgaaaggtgaaatgggtgcgataacgagcgcggtgatagcagtggtgggagttcttctaggttggatcacaatagagattgcatgtaaaccctgtcttcaacaggctcgccaagccatcgatcggaatctcaatccagattacgatcccgacgacgacgacgccaccgccatccgcgccccactcaaccccgcccccacagcagcttcctccgccgccgtcaaagccgtttgagaatcgatgtcccttcttctcatgtttccgcctggtattctattcgatgtctaaatcaaaaggctattttttttttatgtgtgcatttgctcgtttttggtggcgaaattaggatctaaaatgtgtggagacttgttattgtatgaatggagattgtaatttacctcagtcattggggatcgtaatgttttcttcatcattgtgaatgtataattacttatatttgtt

SEQ ID NO: 9074 - DNA, 1292 bp, Glycine max
  Clone ID: 700834281_FLI
gttaaagaccggcaccatgaagaagtctaccttggaaacttgaagaggttccaattcagagaactccagattgctactaacaacttcagcagcaaaaacatactgggaaagggtggttttggaaatgtctacaaaggagttttccctgatggcactcttgtggctgtcaagaggcttaaagatggtaatgccattggaggagagattcaatttcagaccgaagttgaaatgatcagcctagcagtgcaccgaaacctcctcagactgtatggattttgcatgacaccaacggaaaggctcttggtttatccatacatgtccaatggcagtgttgcttcccgtctcaagggtaagccagtgctggactggggcacaaggaagcacattgctttaggagcaggaagaggactactttaccttcatgagcagtgtgatccaaagataatccatagggatgtgaaagctgccaacatattgcttgatgactattatgaagctgtagttggagattttgggttggcaaagcttttggatcaccaagattcacatgtcacaactgcagtgaggggcactgtggggcatattgccccagagtacttatccacaggacaatcctctgagaagactgatgtttttggatttggcattctcctccttgaattgatcacaggccaaagggctctagagtttggaaaatcagctaacaacaaaggagccatgcttgattgggtaaagaaaattcatcaggagaaaaagcttgatatgctagtagacaaggatctcaagaacaactatgacagaattgagcttgaggaaatggttcaagtggctctcttgtgtactcaatatcttcccggccatagaccaaaaatgtctgaagtggtacgcatgcttgaaggtgatggactagcagaaaaatgggaagcttctcaaagagttgactcaacaaagtgcaaaccacaagagtcctcttcatcagataggtattctgatctcactgatgactctttgttgttagtccaagccatggaactctcaggacccaggtgaattaatgtctagtagaacatttttatttttgttttaaaggtttttaaaagaaagcatatgaaattcaagagcatatgatagttgaatctttgttataaatcccttgaagaagattataatgttgtatgatagagatctaccgaagctgcaaaaaaaacggctttggtaatgtttactttcaaatgtacagaatctgattcgttgaatgttaattttgtaatgcaaattttgtaatattgttg

SEQ ID NO: 9075 - DNA, 939 bp, Glycine max
  Clone ID: 700834292_FLI
gaaaaagaaaacttgtattgcagtgtttaacagaaccagcatcattgcagggataattcaatgggatcttccaatgaaggatcttcttcttccaccctaacctccggaaggtcatggtccaaccatgttttcttgagttttcggggtgatgacacacgcaaaggtttcactggccatctttttgcttccctagagagaagggggatcaaaacattcaaggatgatcatgatcttcagagggggaaattgatatcagtggaactcatgaaagccattgaagggtccatgcttgctcttatcattctctcaccaaactatgcctcctcaacatggtgtttggatgagctcaaaaagattctagagtgcaagaaagaagtttttccaatcttccatggtgtagacccctctgatgtgaggcatcagagaggaagctttgcaaaggctttcagtgaacatgaagagaaattcagagaagacaagaagaagttggaaagatggagacatgccttgagagaagttgcaagctactctggctgggactccaaggaacagcatgaggcaacattgattgaaacaattgttggacacatacagaaaaaaataattcccaggttgccatgttgcacagataaccttgttgggattgattcacggatgaaggaagtgtattcactcatgggcataagtttaaatgatgttcgcttcataggactatggggcatgggaggcataggtaagacaaccattgctagatttgtctacgaagcaatcaaaggggatttcaatgttagttgctttcttgaaaacattagagaggtgtctaagacaaatggcttagttcacattcaaaaggaacttctttttcatcttaatgtaagaagcagtgatttttataatcttcatgatgggaaaaatataatagcaaattctttaagcaac

SEQ ID NO: 9076 - DNA, 889 bp, Glycine max
  Clone ID: 700834294_FLI
ggtggcatgatcttcgccctcgtttactgcaccgctggcatctcagggggacacataaacccggcggtgacatttgggctgtttttggcgaggaagttgtcgttgcccagggcgattttctacatcgtgatgcaatgcttgggtgctatttgtggcgctggcgtggtgaagggtttcgaggggaaaacaaaatacggtgcgttgaatggtggtgccaactttgttgcccctggttacaccaagggtgatggtcttggtgctgagattgttggcactttcatccttgtttacaccgttttctccgccaccgatgccaaacgtagcgccagagactcccacgtccccattttggcacccttgccaattgggttcgctgtgttcttggttcacttggcaaccatccccatcaccggaactggtatcaaccctgctcgtagtcttggtgctgctatcatcttcaacaaggaccttggttgggatgaacactggatcttctgggtgggaccattcatcggtgcagctcttgcagcactctaccaccaggtcgtaatcagggccattcccttcaagtccaagtgattcaatcaaacggttcatgcttaatcaagttgggaacaacaacaacaacaaaaatcaagccaatgtttgtgggttttggtttcatttcattaagatgatctgtttatctcttttcttctttttaaaatttaaagtctttgtattttgtatgtaaagatgtaaaattatgattattaggtggtgcatgtgtcgcgtcatgggccaatgttatcctctgcttttaagttggaagaggcccaactcatgtgtgatgtacggctgtgattgtgtaatttaatttgcaaaatcaaaaataacaccagagtcatat

SEQ ID NO: 9077 - DNA, 1332 bp, Glycine max
  Clone ID: 700835214_FLI
ctgtttgataggattgtggcacaagataggtactcagagactgaagctgcaggtgtggttcggcagatagcttcaggattagaggctattcataaagctaacattgtccacagggacttgaagcctgagaattgcctcttcttggatgtgaggagggactctcctcttaagatcatggactttgggttgagttctgttgaggaattcactgacccaattgttggtttgtttggatccattgattatgtttcaccagaggctctttctcaagggaagataactactaagagtgacatgtggtctctgggagtgattctatatatcttgctctctgggtatccacctttcattgctcagaataatcgccagaaacaacaaatgataatgaatgggaatttcagtttctatgagaagacttggaagggcattaccaattctgcgaagcaactgatttcagatcttctcactgttgatcctagtagaagacctagtgctcaagatcttctgagtcatccatgggtggtaggtgacaaagccaaagatgatgcaatggaccctgagattgtctcaagattgcagagctttaacgctaggcgcaaactccgtgcagctgcaattgctagtgtttggagcaccgcaatctttctcagaactaaaaagctgaaatccttggtaggaacacatgatctcacagaagaggaaattgaaaatctcaggatgagttttaagaagatatgtgtgagtggggacaatgccactctatctgagtttgaggaggtgctgagagccatgaaattgtcatcactgatccctctagcaccacgtatatttgacttgtttgacaacaaccgtgatggaacagttgacatgagagagatactatgtggtttttccagcttcaaaaactccaaaggagatgatgctctccgtttgtgcttccagatgtatgacacagatcgatccgggtgcatcaccaaggaagaagtagcatccatgctgagagctttaccagaagactgtcttccagctgatatcactgaacctggcaaattggatgaaatatttgacctaatggatgccaacagtgatggaaaagttacatttgatgaattcaaagctgctatgcagagagatagctcactccaagacgtagttctctcttctcttcgtccacaatagttctcctaattttcattaattttatggtattattaattattatggtcttttcaatatggagtagtactattattttctccttttcttcttcctcgggcattctttttgctgacttattgatactataggacaaaaagagagtattggagtact

SEQ ID NO: 9078 - DNA, 1285 bp, Glycine max
  Clone ID: 700835245_FLI
gaaaatgttcaaacattaccggtggccccggttagtggttcataaacctttctctaagcttccgactctctctctcttacggggtctttgcagtccgtggaagagcttgttgggttatctcagctttcacctttccaggctctgattcaaagaaaaatctcaacttccttcaacaattcatctctacaatttctggatagtgtcttttttttagcaagaatggctcaacattctaatgttccaaagtttggcaatcaggagagtgaagacaacgttttagacacagctcattctgacaaagcccagaaaggtcagtctggttcaaagatgattaatccaaatgacaccaaggaaaattcggacatagtttcttctgctgacctaccccattcaaaacccagagttcattcagaggatccatctggaaagggatcagtgagaacaacacatgagttacaaaagagtagggaggatggtgatcctaaacaatttactgactctccagctcgccatggtggcggtgattcttcccatcgaggtcatggagtaggttctgctgacaaccgtaaaagaccttcaagacaaagtactgggcctgagcacaacattgaccgttcaccccttcatcgccaggcaaaaacccctggcagagatagtccttcttgggaaggaaaaaattcatatgatagcagccatggtaccccaggaaggtcccgattgagaccatcttaccgaggggatgaaactcctgatgaaggtgctgctgttccaaagtttggtgagtgggatgagagcaaccctgcatcagctgatggctacactcacattttcaacaaagtgcgggaagagaaacaagtgggggctggacacgtgccaggcacacctaatgggagacaatatgctgctcggaatcaacgtgccaacgacaaagctcagagttgctgcttttgctggggcaaaatgatttatgtgaagcatgaattataatctgaactgaagagataaaaatagtgttgtgaatggccatgaggtgtgtgtagcacttgtaaatattcaaggctctgtcttcctagaaaaaaatcattgaagaacaattgtcttaattttttgcctttttcttcctctgtcttttggtcaatagagacactttgtgtggaagattgtgatttgtcctgtttatctattttttattttgttatgtaattgccacgctttataactcgatttgtctgtatttagctgggaaatacaagatttattatacaattcttttggttgtgattct

SEQ ID NO: 9079 - DNA, 1325 bp, Glycine max
  Clone ID: 700835320_FLI
cttaacatatactatctttctactgtggagttgtgattcttcaataccatatattctctctctttctctttttctttcttgatttgtgctgtgaaacagttagaagtggtgttgatgtctgaggcattggaagatgttccttcaatgaaaggagggtgtgaagaagaagaagaagggttgaacctgaaggctactgagctgaggcttgggttaccagggtgtgagtcaccagagagggagggtgcgtttaggagtgtggtggtgtctggggccaagaggggtttctctgatgccattgatgaaaactggaatggtggatctgaaaaagatgctgccttgttttctccaaggggtgctgttagtgttagtgctgccaagtctctcactctcactgcaacagactgcaccaaccaaccaactgctttgggtgcttctgttctcaaggaaactgttccacgctctccaaaaccattgcatgagaaaaagccccagatttctgctccagctgctaaggcgcaggttgtgggatggccaccaatccgttcattcaggaagaactcaatggcttctcagcctcaaaagaatgatactgatgcagaagccaagtctggatgcctttatgttaaagtcagcatggaaggcgccccatacttgaggaaagtggatctgaatagttttaccacttacaaggacctctctttggcacttgaaaagatgtttagttgttttacactcagtcaatgtggctcttatggggtttctagtcgagaaaatttaagtgaaagtagattgatggatctccttcatggttcagaatatgttcttacctatgaagacaaggacggagattggatgctagttggtgatgttccgtgggagatgttcactgagtcttgcaagaggctgaggataatgaagagttttgaagcaattgggctagcacctagagccatggaaaagtgcaaaagtcgtaactagtgccaatgctgtatgcttttgtcttctaatccggaaagatggaagatcacatttaagcatataataccttgtttcttacctataattctatatacgagattggggtgtcctgaactttagtgggaaagatatattgatgacagcatattagttttgttgtagtagcggtctatatcattgatgtagacgtttaaggtttaaggttttaggttttaggttgttctcccacacttcaattactgccatcatggcttaccgtagtttgtaaattttgcatttctgtaagcgagcattttgtttgtcatggcaagccaagaaaagaaatatcatactttctttatgtgtcc

SEQ ID NO: 9080 - DNA, 772 bp, Glycine max
  Clone ID: 700835346_FLI
cgcgtgtgtctgcgttgcgagtgtcgtcgttttgattcccctctctctctctctctctccaccttcactcactctgcatgcttcttcttcttctctcactctgattccgcgaaatcaaatcaaaatcagcttctcggaatcgaatctcagatctcggagatcagaaatggtggatccaactggaaaaggatcggagattgaagtcgaggactcaaactcaaaccctaacgctccttcctcagggaacagtccaagcagcaacaatgagcagaagaaaacctgcgccgattgcggcaccaccaagactcctctctggaggggtggtcctgcaggacccaagtctctgtgcaacgcgtgcgggatcagaagcaggaagaagaagagagcgatcttgggaataaacaaggggagcaacgaggacggaaggaaaggaaagaggaccggcggcgctttggggaaggaggtgttgttgcaccgatcgcattggaagaagctcggagaggaagagaaagctgcggtcttgttgatgtcgctctcttatggatccgtttatgcctgaactgaaccagaattaatcaattattattattattctagttctagatgaacaattattgaggagaattctagattttgttttaggatgttccttcccctaaccctttcccgaagtgtatatgtttagttttttttttttctctgttgaatgagtgtgtgggttggatgtcaacaacagttgtaagaaatgaaattattcaagtccaattttggt

SEQ ID NO: 9081 - DNA, 768 bp, Glycine max
  Clone ID: 700835470_FLI
ctttgtgtgatagagttctcattctcatggctattaccggcgatattttccggcagagcataacggaaatgcttgcggagtccccttccggtgcgccagaacttcacgttctcgccgtcgatgacagcctcgttgatcgcaaggtgatcgaacggttgctgaagatttcttcctgcaaagtgacggttgtggagagtggaacgcgcgctcttcagtatcttgggttggagggagagaacggttctcttgggtttgatagtgttaaggttaatctcataatgacggattattccatgccggggatgacaggatatgaattactcaagaaaatcaagcaggagtcttctgtgtttagagagattccggtggtgatcatgtcatcggagaatgttttgacccgaattgataggtgcctggaggaaggagcagaggattttctgttgaagccagtcaaattgtcagatgtaagacgcttaaaagatttcatcatgaaagggaaagtgaaggaaggtgagaaaatatctcacaaaagaatgaggtcaattgattgcagtccacctctaactgcaacatgctcactattgtctcttccatgcgatccatcaccatcattactctcaccattatccacgaagaaggctagattgtgatcagagattgagtagtagtagtgtgctatgtctccaattttgcctacactagtgttcaaatcaaagcatgtagtgtattttgcatttgtttaccaatctacaccttaccttaggaacg

SEQ ID NO: 9082 - DNA, 2143 bp, Glycine max
  Clone ID: 700835511_FLI
gtcattcagtgaaagctcatagaccaaatactctgtctgcactccagtgcttttacaatcatggaaaatcatggtgcagtgtctgaaaccaagtgtacgtttgatgttttccttagttttaggggtgaagatacccgtcacacatttacttgtaaactctatgatgctttgtggctgaagggaattgacacctttatggataataaagagctgaagaatggagacaaaattggccctactcttcataaagccattgaagaagcaaggatttcagttgttgtcttgtctgaaaattatgcagattcttcatggtgcctcgatgaacttgtcaagatccacgagtgtatggagtcaaaaaaccagctcgtttggcccatcttctacaaagtgaatccctcggatgtgaggcatcagaaaggaagttatggtgtggccatgactaagcatgaaacaagtcctggaatagacttggagaaggtgcacaaatggaggtcaaccttgaatgaaatagccaacttgaaaggaaaatatttggaagaagggtaggtaaaaatggtaaaatatatatgttgttattaattttcgctgtttgcttcttgttaatttatggccaaggatgattgttcatatttcgatttgtggcgtgtctttggctttatatacacttttcctcatcatttttgttttacgcaaaatgaagtttgaacctcatgtgaacatcttttaacttcagtgtacttctgaatgtcatgaaaatgtccgatatataataactacttctgcaggttagtaatttttttcctcctttctattttacttttacttttgggtattctgtctatgaataactgtgttattataggccagaaattttatttccaaacatattttctgctagggatgtaacactttgccgattatgatccaaactcaaatttgtccccagctagaagtaggtcgtagaattaatttttgagaaattcaaacatggtactaaactaagtttggagtttcaatagtatgtttcaagtccccaaatgggtacccaaacatatcctaagtgagctggattggaccagatttgttctgtatattttactacccaaccctgatcaatatacacaaaatataatttggcaaaatcaatttgttgcttaatttaaagagcattgttttttcaggagggacgaatccaagtttattgatgatcttgctactgacattttcaaaatagtatcttctaaagatttatctagagaaatgtttatagtcggacgagagtatcgagttaaagaattgaaattacttctagatcttgagtctcgtgatatcacttgcctgttagggattcatggaactggtggaattggcaaaactacacttgcaaaagctttgtatgactccatttacaagcagtttgacggtacaagttttctcaacgttggagaaacctcaaatcctaagacagacttaaaacatctgcaagaaaagcttttatcagagatacttgaggacgacaaaatccactggagaaatattgaagaaggaaccgcaaaaatagaaaggagacttggttttaaaagagttctaatagttcttgacaatgttgatgacattaaacagttgaataatttggcagggaaatgtgcttggtttggtcctgggagcaggatcatcataacaacgagagataaacatttgctagatcttggtgaggttgaaaagagatatgaagtgaaaatgctagatgagaaagagtctctagagctcttttgtcattatgcctttcgaaaaagttgtcctgaatcaaactataaagatctgtccaatcgagcaatgagttgttgcaaaggccttccattggccttagaagtactaggctctcatttgtttaaaaaaaatgtggatgtatggaaggacgcattggatagatatgaaaaaagtccacatggaaatgttcaaaaagttcttagaataagctatgatagcctgttccgccatgaaaagtctatttttcttgatgttgcatgttttttcaaagggcaacgattggattatgtaaaaactgtactagatgcatctgatttcagctcaggagatggtattacaacattagttaataaatcacttttaactgttgact

SEQ ID NO: 9083 - DNA, 578 bp, Glycine max
  Clone ID: 700835521_FLI
ttatcatggcttcgggatcaccttcctcttcctcttcctccaattacgatgtgttcctcagcttcagaggggaagacacacgtcttggttttactggccatctctacaacactcttcagagcaagggaatccacactttcattgatgatgaggagcttccaagaggggaggaaataacaccagcacttatgaaggcaattcaagattccagagttgccatcactgtgctctctgaacactatgcttctgttagcatatcagaggcaacaagcatggcatcaggaaacaaagacgtgaagcagaagaaagtacaggaggtgcagatagcaaagaagcccaaaagaaaggttagaaggccagcttacttgaaggactacgcgtaagggtaaattgggaagcatcatcagcccagaaatcaccatacactgcttgattgtagcttgttccccatagttagacaaagataaccgtatagaatattctgtaggcagaagagtacaaattctgttattagaaactcttatatatatatccatgtaataatcaatcaggcatatatgaatacaacttttccttgc

SEQ ID NO: 9084 - DNA, 1003 bp, Glycine max
  Clone ID: 700835534_FLI
gccaaggggaaggaagggttgggacaaggcgtgattttatactgaaagactatgcaactgatgaagttattggaagggcaacaagcaaatgggtaatgatgaatcaggacaccagacgactccagaaggtttctgatgatgttaaagaagagtatttggttttctgtcctcgagagcccaggttagctattccagaggcagatagtaatagcttgaagaaaataccaaaattggaagaccctgctcagtattccagacttggacttgtgccaagaagagcggatctggacatgaatcagcatgttaacaatgtcacctatattggatgggtgcttgagagcatgcctcaagaaatcattgatagccatgagttgcagagtattaccttggattacagacgagagtgcggacaacatgacatagtcgattccctcactagtgtggaagcgatacagggtggtgccgaggcagttccagaactgaaaggtacaaatggatctgccacggcaagggaagacaaacatgaacaccagcagtttctgcatctacttaggttgtctactgaaggacttgagataaaccggggacgaacagaatggagaaagaaagctccaagatgagaaccattatgtgtgcttccacccgaatccatgattctgtttttgtcttgtgttgtttcatgttaccagggttgtcttatcaattttcccttgatattttgcttagagtttgtgcgcttaatagggattgaagagttaaaatattgcttctgttttcttgtcatgctcaaaaatttaagttgtccaaatcccgtagttaggctatataggttgacatcaatctctgatccattagtatcagattccatgaatgtcattgtaccttaagggagcatagaaatccaggaagttggtatggatctgccatctactgcatgacttgaacaatgtgtgttaaaataatcattttgaaataattcaattagctaattattaatgttctt

SEQ ID NO: 9085 - DNA, 989 bp, Glycine max
  Clone ID: 700835540_FLI
attttgttctaccatcaaaaaagtacgctgacgtgatcattcctcgtggaggtgataatcatgttgccattgatttgattgtgcaacatatccgtacaaagctcggccaacatgatctatgcaaaatatatccaaatgcctatgttattcagtctacattccaggtatctttaaacttagtttgccaattttattattttattttattttccaccttttatgatttaaaatttggggaagatccagtggcacatccttacaactgaacacaaatagactggattaccttacttaatgaacctttacaaaccctttactttataattttttattattggtggaattgaaaagaaaaaattatcctcaagttttacattttttgaattgtaggaattattattttaatgtaactaaagcacctggtttcattatgatttatgacctagaaagaacttaaagaagtattttgataaaacatcacatggagattattcatgtttttatttgaattggatacatgccaaattataatgtgtgatccatgtagatagctgacctcatctagtaggataaggcttttgttgttgtatatgaatttttggatacatttcaaagttgcacaggagttagaaactgagaataatccaatgttgttaatggcggatggcggttcatgacggaaagccaaaaatccgccataaaaatatggcggatggcgtagcggaaaatggaggatgtcatggtggacaaaaaaaaatatacatatatgtataattataaataaccaagtaccaacaccaaataaactcattgaaattgaaaaaaacaatggattgcattcaaataaactaaaaaagttaaaaaagtttcatgagttcatacaataaccaagtaccaacaccaaataaactcattaaagagttcaaaataagaaaaggataaaaacataatgcaaagtgcaaagtgccatttaaaagaggactgaacag

SEQ ID NO: 9086 - DNA, 1658 bp, Glycine max
  Clone ID: 700835567_FLI
gaacaacatagagtcctaccctccggttctccgccacctagaccaccaccaactaccaccaccaccaaaccctgacccggataaagacccgacccaacaagactcggatccaatacccatcatagatttttcatgcttaaaccatgacaagagcaagttggacgaagcttgcaaggattggggtttttttcgtttggtaaaccatgggattcccatgacccttttgaagaagcttcaagaggtggccaaggaactcttctctttgtcctttgaagcaaaagaaggtgcatgcagtggcagcccagtgtcctacttttggggcacccctgccctaacgccatctgggacaacaacgagaggcccccaaaacatgaattgggttgaaggctttgatgtgccgttgagtcaactcccacacttcaaccctcatcagcttcccacgctcgagtccatcaggtaagacacaaagttttccaaccaatataaactcttgcattattattgatttgtcttcttccacatttttctatgcattttgtttccttttggtttattgcgttttatttttttgtttctttcatgtgtacaggccatcgggtctatctttttggattgtgtgtgcatgtatttgtgttggaaaattataatgtttttaaatctttttataataatatatattattactccttaattataagaaataattgattaatttatatttattgtaaatatttgttaacttagttatcaatattaaatttatttatgattacaatattttttaaaatttatctttaaccttaccggaatctatttatttttgtataggagaaaaaaagagataatttatgatattttgataaaaaaataattaatgaaatattataaaatggtattttattttctaaaactataatgtcttagaaataataaagacaggagaagtatgtataagtcattggattacaaacataatatatagttcattgattttcataataatttttttaaaaattataaaaaattacaagtaaaacaatttaaataaaaaaatttataattttattttttgtgtttatcttttttcattatgacttgaaagagataaataaataaaatatttttacaaattattatatctatatcacatatcaaaattatgtggttaacaatttctaattggtttaatattaaccctttttttttcaaaaatgcaagtcattaaatacaaaaaagtactgacaatgtatggtaatttatatattatttggagattgggtgatagagtaaatatttttatgttttagagatttgttgttggtttggatgttttcgagatgttgaattgatgtatcgtataaaattaaatattactaaataatttttttttatataaaataatagggaaatattattaaaatataacccagtgttgaaaatagggatcgatggatcttggccattgcctcatggttttggttgtggggtaccccgtacccgtcacctttttgagattatgacattgatggcactgcatgaacggggtgtttcgaccaattgaattgtgttattgcatatatggagaaagattatcagatttgatagtcgcgtttaacgtataatttccttaattagatatgaaagaccaacaaaactag

SEQ ID NO: 9087 - DNA, 1515 bp, Glycine max; identical to SEQ ID NO: 8286
  Clone ID: 700835739_FLI

SEQ ID NO: 9088 - DNA, 680 bp, Glycine max
  Clone ID: 700836843_FLI
tttggatgttgaatcctctcatggtgacatgtttaccgaggaacagaatgagttaattgaatcagcagccgagatgctttatggtctgattcatgcccggtacatattgacaagcaaaggaatggctgcaatgctcgacaagtacaagaactatgattttggcagatgcccacgagtttactgctctggacaaccttgtattccagttggtcagtcagacatccctaggtctagtactgtgaaaatatactgccctcggtgtgaagacatttactatcctcggtccaagtatcaaggcaacattgatggagcttattttggaactacgtttcctcatctgttcttgatgacttatggacaactaaagccacagaaaccatcacagagctatgtcccgagagtttttggcttcaaacttcacaagccctgaagctgaaattttaagcttccatgaaagagcatgttgtaaagagaattgcagacgcgacatgtcatgcaagtgcttagtttcaatttcagcttggaattcagtgagcttcaagttcaatgagcaagtgcgtaatacttcaatgcactctaagtgcttattgcaaattgtattcttgcggttagttttaattaaagttgtttatgtttgtctcagattacagatactctactattttatattattttattcc

SEQ ID NO: 9089 - DNA, 1576 bp, Glycine max
  Clone ID: 700837637_FLI
gatcctcaacggaaacgggcttttgcggctacggtggagcatgcaggaacgacgtcgtccagccaggggatggtgagaggaagcggaggggagatagttcaagttgaaggcggtcacattgtgcgctccacagggcggaaggaccgtcacagcaaagtgtgcaccgccaaaggccctcgtgaccgacgggtgaggttatcggcccacaccgccatccaattctacgacgtccaggaccgcttgggctacgaccgccccagcaaggccgtcgactggctcatcaacaaggccaagtcctccatcgaccaactcgcccacctccctccctggaaacccactctcccctcacccgcaccacctcatctaaacgacgaccattcagacaaacctaaccctaaccccaaccccaaccccaaccccaaccccaaccccaaccatagccctgatgcccaaattctcaaccagttcgaccacgacgatggagctggagctggttccagttatcttcctatggataacgacgcgataaggtcgttcttccccacgacgacttcctcgttggttcaattccagagctacccaccggatttgctctccagaaccagtagccaggacctgcgtctctcgcttcagtccttgcaagaccctattttacttcaccacaaccacaacaacaacgagcacgtgcttttcgctggaaccgcctttgataacatggtagcgtggaataataatagtaataataatcataataataataatcataataataataataataataataataatactgcttctaatgatacttgtggtggtggtggtggtggtggaggaggaggaggagggtttgtgtttaacgctccttcgactttgccggggccggcgacggtggcgtcgccgacggtggtgtttggtcatggttatggtcaaggccagtatttttctcagaggggaccccttcagtccagtaacagcccttccgttcgtgcgtggattgacgcgccatcgttcgtcgctgctgccgccgatcatcggcatcatcactatctgtctcccgcggcagcggcagcggcgttggtgtatcagtctgctccttccacggcggcatttacggcggcgcccggtggcttctcgggattccgcgtgccggcacgaattcagggtgaggaggagcacgacggcggcatgtccgataagccgtcctctgcttcctccgattctcgccgttgaaccgtcgagatcgtcagccgatttctgtctccttggaatcaattgggtatgtgtgtgatctgttttttgcagggatggaggagacgaagttggacttggaatggttcggttcggttcagtggactattatgcttgtggaatgaagaaaatctggggttgaatatccaggtttttgaattctccagtctgttatgttaatttattttatgtttttcatgtttcattagggagactttcaagtttgagtactgttgtgttggattgtctgtttgatgatgtttgttacaatttgtactagtggatgtatttgtacttgggtatctagtttcttagttttggtttg

SEQ ID NO: 9090 - DNA, 949 bp, Glycine max
  Clone ID: 700837648_FLI
attgccttggatgttgccagagggatggagtatctccatactctggctcaccaaagcttcattcacagagatcttaagccgtcaaatatcttgcttgctgatgatttcaaagcaaaagtctccgattttgggttggtaaaacttgctcctgaaggggaaaaagcatctgtagtgacccggcttgcagggacgtttggatatttggcgccagaatatgcagtgacaggaaaaatcactaccaaagcagatgttttcagttttggggttgtgctaatggagttgttgactggattaatggcacttgatgaggatagacctgaggaaagccaatacttggcagcatggttctggcatataaaatcagataagaagaaactaatggctgccatcgatcctgcccttgatgtaaaagaagaaacatttgagagcgtctccatcattgctgagctagcagggcactgcactgcaagagaaccaagccaacggccagatatgggtcatgccgtgaatgtgttggcaccgcttgtcgaaaaatggaaaccctttgatgatgacaccgaggagtattccggcattgattatagccttccccttaaccagatggtgaagggatggcaagaggcagaaggaaaggacttaagttatatggaccttgaagacagtaagagtagtatccctgcaaggcctactggatttgcagattcttttacttctgctgatggccggtgaaacaaattgtttggtgtacccgttttccttttgattttccaatagatgtagatagatagcatgctcttttctttctgtctgtcttaattggcaaagtgtctagtgccagtgttataatagtgtttgagtaaagagatttcacatgcacttgaaatctcagttgcatgctttgtattttcccccaagacatttaagtgttaatggttgtagatattgcgcc

SEQ ID NO: 9091 - DNA, 659 bp, Glycine max
  Clone ID: 700837669_FLI
aaacagaggatatatccacgacttgacccggtggtcattatgctagtaattgatcgggagaatgaccgtgcccttttgagcaaacaatcgagatttgtacctagaatgtggagctgcttagcaggttttatagagccaggagaaagcttggaggaggctgtaagaagagaaacgtgggaggagactggtattgaagtgggagaagttgtatatcatagctctcagccatggcctgttggaccgaatagcatgccatgtcagctgatggtggggttctttgcatatgcgaaatcccttgaaataaatgtggacaaagaagagttggaagatgctcagtggcacagtagagaatatgtaagaaaggctctgacatttgctgaatacaagaaagcccaacaaactgcggtagcgaaggtagaacaaatgtgtaagggagtagaaaaggctcacagcttgtctaccgatttcaatgtggaaagtggtgaacttgctccaatgtttgttcctggaccctttgcaatagctcatcaccttatttcctcctgggcattcccagatcaaaatgtaaatggcagtgaatgtcattcaaaacaggctagtggcttctatgtcaaatttgtaggagtgcaaattatttttttaaaggcacctttgatttt

SEQ ID NO: 9092 - DNA, 1033 bp, Glycine max
  Clone ID: 700837677_FLI
agtttaccgtatgttattatagtttccaaaggcacgcagcgagtttaggcgcggcgggatcatcacgagattgcaaaatgaagttcaacattgcaaatcccaccactgggtgccagaagaagctggaaatcgatgacgacctgaagcttcgggcattttgggacaagaggatctcccaggaggtccttggtgacgccctgggtgaggagtttaaaggatatgttttcaaaatcactggtgggtgtgacaaacaaggattcccaatgaagcagggagtgttgacccctggtcgtgttcgactcttgctccatagaggaactccttgtttccgtggatatggaaggcgcaatggagagcgtagaaggaaatctgttcgtgggtgcattgtcagcccagacctctctgttttgaacttggtaattgtgaaaaagggtgagagtgacttgcccggtctcactgatgttgagaagccaaggatgaggggtccaaagagagcatccaaaatccgtaagctgttcaacctgtccaaggaggacgatgtgagaaagtatgttaacacataccgtcgaacctttataacaaaagctgggaaaaaagtgagcaaagctccaaagattcaacgattggtcactcctttgacactccaaaggaaacgagcaaggattgccgacaagaagaagagaattgctaaggcaaaatcagaagcagcagagtattaaaaactccttgcttccagattgaaggagcagagagatcgccggagtgagagcttggctaaacggagatccaaactttccagtgctgcaaaaccaactgcctcagcataggttgctttctggtagagatatggcgaagtttaaacttcaccctagtttttggtagtcttgtttgagggtgattatgataaacatttatggtttttcactttaaatacatttgagttcatttaagtattttgcaaatttttgagagttcaatcgaatcgaattgatgtgttgttggcttctataaagttgcataatacttttcattt

SEQ ID NO: 9093 - DNA, 1446 bp, Glycine max
  Clone ID: 700838314_FLI
cttcgcgaaggtgtaccacgcgcgccacctgaagacgggaaagagcgtggcgatgaaggtggtgggcaaagagaaggtggtgaaggtaggcatgatggagcagatcaagagagagatctcagccatgaacatggtgaagcacccaaacatcgtgcagcttcacgaggtcatggcgagcaagtccaagatctacatcgccatggagctcgtccgcggcggcgagctcttcaacaagatcgccagaggccgtctccgggaggagatggccagactttacttccaacaactcatctctgctgtggacttctgccacagccgcggcgtctaccaccgtgacctcaagccagagaaccttctcctcgacgacgacggcaacctcaaggtcaccgacttcggcctcagcactttctccgagcacctccggcacgacggcctgctgcacactacgtgcggcacgccggcctatgtcgcgcccgaggtgattgggaaaagaggctacgacggcgccaaggccgatatttggtcttgtggcgtaatcctctacgtacttcttgctggttttttacccttccaggatgacaacctggtggccttgtacaagaaaatttaccgcggtgacttcaagtgtccgccgtggttctcctccgaggcgcggaggctcatcaccaagctcctcgaccccaacccgaacacgcgaatcacaatttcaaaaatcatggactcgtcgtggttcaagaaacccgtgccgaagaacttgatgggaaagaaaagagaggaattggatctggaggagaagattaaacagcatgagcaggaggtttctactacgatgaatgcttttcacatcatttcgctctcggaggggttcgatttgtcgccgttgttcgaggaaaagaagagagaagagaaagagttacggtttgcgaccacgcgccccgcgagcagcgtgatttcgagattggaagatttggcgaaggcggtgaagttcgacgtgaagaagagcgagactaaggtgaggttgcagggtcaagaaaaagggcgaaaaggtaaactcgctattgctgcggacttgtacgccgtgacgccgtcgtttttggtggtggaggttaagaaggacaacggtgacaccttggagtataaccagttctgtagcaaggagcttcgtccagctcttaaagatatcgtgtggaggacttctcctgcagagaatcctacactcgcttgaagaacaaccaagactcccatgctaattgtcgttcctttgtagttgtttttgttaattcttgtttcaggactgagatattttagttatttgcttgcttctttgttatgttttggcctctggggtgtgtcgtcttttacccagaaaggggaattgttgaaaaggcgaatgcagtaatgaaccgaaatggacatcgaggagttgttgtcgatgatgattcaggt

SEQ ID NO: 9094 - DNA, 1496 bp, Glycine max
  Clone ID: 700839991_FLI
tgcagaccgagctagctagctagcaagcaagcacagagatggaggcaaagcgaggccatgccctcatgtgcttggcacgtgtttcactcttcctctgcgctctaaccctatccgctgctcacggaagcaccacggttcaagacatcgcgagaaagttgaaactcggggacaacgagcttctgcgcacggagaagaagttcaaggttttcatggagaattacgggaggagctactccacagaggaggagtatttgcgccgtttggggattttcgcccagaacatggtcagagcggcggagcatcaggcgctggaccccaccgccgtccacggcgtcacgcagttctccgatctcaccgaggacgagtttgagaagctctacactggcgtcaatggcggcttcccgtcatcgaataatgccgccggcggtattgcgccgccgttggaggtggacgggctgccggagaattttgattggagagagaaaggagctgtcaccgaagttaagttacagggtagatgtggatcatgctgggctttcagcaccacaggatctatagaaggagccaattttcttgccaccggaaagctcgtcagtcttagtgaacaacagctccttgactgtgacaacaagtgtgacataacagaaaagacttcatgtgacaatgggtgtaatggaggtcttatgacaaatgcctacaattatttgctcgagtctggtgggttggaggaggagtcttcatatccctacactggggagagaggtgaatgcaagtttgatccagagaaaatagcagttaagatcacaaatttcaccaatatccctgctgatgagaaccaaattgccgcatatttagtaaaaaatggtccacttgctatgggcgtgaatgcaattttcatgcaaacatacattggtggtgtctcatgccctctcatatgtagcaagaaaaggctgaaccatggtgtgttacttgtgggatatggtgcaaaaggcttctcaattcttaggcttggcaacaaaccatactggatcatcaagaattcgtggggggagaaatggggagaagatggctattacaagctctgcagagggcatggcatgtgtggaataaacactatggtttctgctgcaatggtgcctcaaccacaaacaacacctacaaagaattatgcttcttattagctatgcacttaaggaaatctaaataaatatttttcattctaggtgatgtatcatgtatgtaccaaaatattttggtacgtaagtcttttaaaaagtttgcatctcctctttggttttccttagttctgaaagttatctcctaagaagacaatcatatgtactgtacgtagtgtgaagatatagtattgtatgctgcagaatatgattgtctaataaggtggactagctgtaataaaagatatttccaggttgaaaacagagcaaatcatgttaaagagctataacattttctgcaggttagaaaagaattttggt

SEQ ID NO: 9095 - DNA, 1325 bp, Glycine max
  Clone ID: 700840012_FLI
ggcagcgtcttcttcatcaacggtggcgtagggatcaatccgtttgatagaaaaaccatttccatttccaatggctaacgaaatccctcacgatgaggtagtgtgcgttaccggcgccaacggtttcatcggttcgtggctggtccgaaccctcttggagaaggagaacccacgctacaccatccacgccaccatcttccccggctccgacgcctcccacctcttcaacctccacccctccgccgccagccgcctcaccctcttccccgccgacctcctcgacgccgccgccctctcccgcgccatcaccgcctgctccggcgtcttccacgtggcctccccctgcaccctcgaggaccccacagacccccaaagagaccttctcgaacccgcggttcagggcaccctgaacgtcctaaccgccgcaaggcgcgtgggcgtgcggcgcgtggtgctcacctcctcgatctccgcgatggtgccgaacccggggtggccggcggggcgggccgcggacgaggcgtcgtggacggacgtggagtactgtaagggaagggggaagtggtacccggtggcgaagacggaggcggagagggcggcgtgggcgttcgacggcgtggaagttgtggcggttctcccggcgacgtgtttagggccgcttctgcagccggatctcaacgcgagctccgccgtgctgcgggagctgatgatggggtcgagggagacgcaggagtatcactggttgggtgcggtgcatgtgaaggacgttgctaaagctcatgttttgttatatgaaacccccactgctgctggtagatacctctgcaccaatggtatctaccagttttctagttttgctgccatggtctctgaattgtaccccgaattccctattcacaggttcccagaagaaacgcaacctggcctgacagcatgtaaagatgcagcaaagagactaatagacttgggtcttgtcctcacaccaattcaagatgctgtgagagaagcagtggagagcctcatagctaaaggcttcctgcaatgcacaccctcacagagttagtatttagatttcatttagtttttctcgtaggcataaataaccactggtttattttcttttccccctttgatacaaggtagaagtaataatgaatataaatatgccaagtttattgaggtagaagtagagtaattaatctcttcttttgttatatttatcggcttcgtttggaaagtaacattcattatcacttgtcaagttgtcctgacatggtattgttgtgactgctcattttatgtacaagagttatggttgagacttg

SEQ ID NO: 9096 - DNA, 1428 bp, Glycine max
  Clone ID: 700840078_FLI
gaccgagctagctagctagcaagcaagcacagagatggaggcaaagcgaggccatgccctcatgtgcttggcacgtgtttcactcttcctctgcgctctaaccctatccgctgctcacggaagcaccacggttcaagacatcgcgagaaagttgaaactcggggacaacgagcttctgcgcacggagaagaagttcaaggttttcatggagaattacgggaggagctactccacagaggaggagtatttgcgccgtttggggattttcgcccagaacatggtcagagcggcggagcatcaggcgctggaccccaccgccgtccacggcgtcacgcagttctccgatctcaccgaggacgagtttgagaagctctacactggcgtcaatggcggcttcccgtcatcgaataatgccgccggcggtattgcgccgccgttggaggtggacgggctgccggagaattttgattggagagagaaaggagctgtcaccgaagttaagttacagggtagatgtggatcatgctgggctttcagcaccacaggatctatagaaggagccaattttcttgccaccggaaagctcgtcagtcttagtgaacaacagctccttgactgtgacaacaagtgtgacataacagaaaagacttcatgtgacaatgggtgtaatggaggtcttatgacaaatgcctacaattatttgctcgagtctggtgggttggaggaggagtcttcatatccctacactggggagagaggtgaatgcaagtttgatccagagaaaatagcagttaagatcacaaatttcaccaatatccctgctgatgagaaccaaattgccgcatatttagtaaaaaatggtccacttgctatgggcgtgaatgcaattttcatgcaaacatacattggtggtgtctcatgccctctcatatgtagcaagaaaaggctgaaccatggtgtgttacttgtgggatatggtgcaaaaggcttctcaattcttaggcttggcaacaaaccatactggatcatcaagaattcgtggggggagaaatggggagaagatggctattacaagctctgcagagggcatggcatgtgtggaataaacactatggtttctgctgcaatggtgcctcaaccacaaacaacacctacaaagaattatgcttcttattagctatgcacttaaggaaatctaaataaatatttttcattctaggtgatgtatcatgtatgtaccaaaatattttggtacgtaagtcttttaaaaagtttgcatctcctctttggttttccttagttctgaaagttatctcctaagaagacaatcatatgtactgtacgtagtgtgaagatatagtattgtatgctgcagaatatgattgtctaataaggtggactagctgtaataaaagatatttccaggtt

SEQ ID NO: 9097 - DNA, 1034 bp, Glycine max
  Clone ID: 700833230_FLI
cacccatggagccacacgagtcccgttgtcatccctgtattactcacacacacacaactgctatctgctctctccacaccgtgcagcaattcctctcttccctctatccacccctcccatggcggaaccaatggctgtcgactccaatcccgaatccggtctcgacttcgagtcccctttcgcctgggggaagaagcgaggcatgggaggcaaaaagaaggacgtgcagttctacgagtcattctccttcgacggtgccgagtacgccataaacgacaccgtatgcctccagagcgggatcggcggtggcgagccccacatcgggaggctgatcaagatctgggagacccgcgacaagtccaggaaggtgaaggtgcagtggttcttccgccccgccgagatctgcaagtacttggttgggatcgaagtgaagccgaacgagttgttcctcgcgtgcggcggcgacggcgccaagggctttgccaatgtcaatcctttggaagctattgtagggaaatgcaatgttgtttgcatttctaaggacgttgggaatccgcaaccgtcaggtgaagcaaaggctgattatgtgtactatcgtttctttgatgttgtgcaattgaaagtagtggatcagatagatgtcaaggttgctgcgggaattgaagttaaaaatgtttccaacaaatgagatagtcaaaagcacgttggtgttgtgaaactcggtccaagacaagataaaagttagtgggaatggcaagtaaagtattgaagtagatatttcaggtaaaaaacagagttagcctgaaattgaaaaggtagccggcaaatatgttgatgtaattaagttattaagttctacctcccaccaaaaatcaaaagttataccgtagtagctactgtaattaagctattactactgcggctactgtaagtcatttactgctgcagatgctgctgcttagaattaggatttactttaatctgtagacatggatatggtgtgtggaaggaaaataatactaatatcctttttg

SEQ ID NO: 9098 - DNA, 1825 bp, Glycine max
  Clone ID: 700833238_FLI
caagatccaagagtttcagtacagtgacctcgaagctgccaccaatggcttctccgaccgcaagctcctcggcaaagggagccacggctacgtctacaaagccgtcgtccgcggccgtcccgtggcggtgaagcgtccatcgcggccacaccataatgttccccgaccggtctcttcttccgcaccctccgagatcacaaacgaggtcgacaacgagatcgacatcttgtccaaaatccagagcccgaggttggtcaatctggtcggtttcaccaataatgattcaagagacaggcttttggtggttgagttcatgagcaatggcaccctctacgatgttcttcatacctctccaaggcctcccaattggggtaggaggattcgtttggctttgcaaaccgcaaaagccattgacactcttcactcctcaacccctcccgtgattcaccgtgacatcaaatctgccaatgttctcatcgaccgcagctacaatgcaaggttaggtgattttggtttggccttaagaggccatgttgatgattacagactcaggtccactcctcctgctggcaccatgggatatcttgatccttgttatgtcactcctgataatttaagcaccaaaactgatgtttttagttttgggatattgctgttggagattataagtggaaggaaggccattgatatcacttattcacctccttctattgtggattgggctattcctcttattaagaaggggaagttgttggctgtttatgatcctagaatagcaccccccaaggatccgattgtgaggaagcagttagctgtgattgctgccaagtgtgtgaggtcttgcagggagagaaggccttctatgaaggaggttgttacttggctttgtgggttgtgtaaattggtgcctcttcattcgtggaatggttttaacaatccttgcatgatggttgagactgcggggcgcccggtcgaagcagcggcggcaaggaataatggtcaattcagttctaggctggaaggtgtggaggaaggaaagtttgatgctttggatggcaggttgtcaaagtctgcaatgaggtattctaggagggtgtattctgatttggggttcagccgcaacttgatggacttgatggctaccactgaggagcctgaatttcttagagatgctgatgggacggaacatagttctaaatcagctgaacaagtttctggtagctccagcaggtttggaagtggaagatattccataagagggaggaatctgtaccggccttgtgggagtgacaaggatgcatttggcttgagtaaaggccagattttaggtcagagtgagactacttcgaaacaggatggggtttctgttcgaattcgaagaatttgaattctgttgctgctgaggttatctagtttgaagttaattgctgagacatttgattggagtgatgatgcctaggcttgtgaactttccttgcttgcaaattatgtagatttgttgttagttcattatttgtggatttcagattcatttttagtaggtttttggattgaagggcacattcctgatgtccccttaacgttgttcaaaaagctttgccaaaagattttgtttccccctcaaaaacaaatgcaaaagccattgtatgaatgattcaggaacaattctaaaaactaatacatgaagctgctgcagaaaaattgtaaaaaatctaccattgcttgttggttgaataacctgtttgtatgtagctcaaataaaattttcaatacaaacactgctggtccttttttttgcaattctgttaccagcttttggtttttt

SEQ ID NO: 9099 - DNA, 1334 bp, Glycine max
  Clone ID: 700833279_FLI
taacaagatggcttcttttcatatccaatattcattccttgtgcttgtgcttgctatggtgatcacattgatgaaccctaccaatgcaaccctctctccccatttctatgataaagtttgccctcaggcattgccagttataaagtcagtggttcaacgagcaattatccgtgagcgacgcatcggagcatctcttctgcgcttgcatttccatgattgtttcgtaaatgggtgtgatggatcaatattgctagatgacacccgaaacttcactggcgagaagactgcattgccaaatcttaattcagtcagaggtttttctgtggttgatgaaatcaaagctgcggtggacaaagcctgcaaacgccatgtggtctcatgtgcagatatcttggccattgcagcccgtgattctatagccatatatgggggtccacactactggtaccaagtattgttgggcagaagagatgcaagaactgcaagcaaagctgctgcaaactccaatcttcctcctccaacattcagcttctcacagcttgtttccaacttcaaatctcacggcttaaacgtgagggaccttgtggccctctctggaggccacaccatagggtttgcaaggtgcaccaccttcagaaacagaatctacaacgtaagcaacaacataatagaccccacgtttgcagcatctgtgaggaagacatgtccgaaaagcggaggagacaacaacttgcatccacttgatgctacacccacaagagttgacaccacatactacacggatttgctgcacaaaaagggtcttctccattctgatcaagagctgttcaagggaaaaggcacagaaagtgacaaattggtgcaactatatagtagaatccctttggcttttgctagagattttaaagcttcaatgatcaagatggggaacatgaagcctctcactgggaggcagggagagatcagatgcaattgcagaagggtcaactagttggattgcaaggtctggattacaataatggcatatacagtggaaagaataagaaactgtattattttataaggttagtcatgtcagtttttatttttgctataaaaaagtttaagtgggttggattcggaaacttatcaagactcaatgagtttaagtgagttggattccgaaaaagtttaagccgttgggttgagatgctgagtttctatgttaagattcaattgtacgtttatgttgtatgtgttggtttcaatccaaaaggaattactcttttcaagtactaagcaacttcatatgtatcgtgaattgaactcaaatggttattacatcgttaacttct

SEQ ID NO: 9100 - DNA, 854 bp, Glycine max
  Clone ID: 700833285_FLI
gattactatgaccttcataagggaggatgatgatgatcaagttgatgatgatcatgatcatgatcatgtggatggtggtggatcacaaaacagtgccagcaacatcactgaaattgtgaccaccccagaaggggaaaacttaggagaatggctgagtctaggcctcaaaggagacatcaacatgccagcagaagaacaaaactcatcatcaaggcctctccacagcaacaacaacaaggtattctcatgcaacttctgcatgagaaagttttacagttcacaagccttagggggtcaccagaatgcacacaagagggagagagaagctgctagaagctaccaccaatctcatcatcacagaattgggttttcttacactacttctctggcaactaggtcactgggaattaagcctcactctcttgtgcacaggcctaacagagaaaggtctgctatggtggctagattcagtagtagtgatgccattaatgttggggttggatcagtggcatcatcatggacaccctttatgcttgaacaagctgtggatttctattggccaggtagctttcgtggggacttattgccaaagcaagaatcatcagatgttaagaagattgacttagatcttcggctctgatacattaatttggtccaacttctatgctcagagtcctggtttaaaccactactgctgctgctttttcttaatggtttccccctatgctatatatgatgccacttgtgctaataaaatgtcaaggatattgttgtaattcagtagttgtacttgtactaattggtttgagaatggaaacaattccatgtcaatgtgtattaattgcaagtttgct

SEQ ID NO: 9101 - DNA, 1397 bp, Glycine max
  Clone ID: 700833336_FLI
agaaaaggaaactcgtcaaacttagagagaaatactttcagcagaatggtggttccattttgctacagcaactctctacaagtgaaaactcctcccgaattactcaaattttcacagaagaagaactaaagaaagcaaccaacaacttcgacgagagcttaatcattggtagtggaggttttggaactgttttcaaaggatatcttgcagataacagagttgttgctgtcaaaaagtccaaaatagttgatgaaagccaaaaggaacaattcattaacgaggtgattgttctatcccaaatcaatcataggaatgtggtcaaactcttgggatgctgtttagagagagaagttcctttactggtttatgaatttgttaataatggtaccctttatgattttatacacactgaaagaaaggtaaataatgaaacttggaaaacccatctgaggatagcagcagagtcagctggagcactatcatatcttcactcagcagcctcaataccaattatccacagagatgtcaagactgctaacatactcttggataacacttatactgccaaagtgtctgattttggagcttcaagattggtaccaattgatcaaacagaaatagccacaatggtgcaaggaacttttggttacctggatccagagtacatgcgtacaagccaactaactgagaaaagtgatgtctatagctttggggtagtgcttgtagagttgctaacgggggagaaaccttattcttttggcaaaccagaggagaaaagaagtcttactaaccactttttgtcttgcttgaaagaggatcgcctgtttgatattgttcaaattggcattgtgaatgaagaaaataaaaaggagatcatggaggttgctattcttgctgcaaagtgcttgagactcaacggggaggaaaggcctagcatgaaggaagtggcaatggagttggagggaataaggataatggagaagcatccctggattaatacagaccaaaatgttgaggagactcaacaccttcttcacgaggcatcatctagcatttatgagcttggtgatagcagcagccatcaatatgctgggtatgatagcattagggatcatgtactgattgctttggatgatggaagatgatcaattatgcatggcagcatacagtctattttataacaacaccaattagttgattacatgagtgtacctgtcttggttcatcttaataaattccatttctgttggcttttcaagacaaaaaaagttgtttccatgagtgtgtagttgtatgtttgtatttattcaaatatgtttatgcagaaatttttaagtccttgattatatagaatgtactttggtagatgcaaaaaaatgcctaggaattcaaacttc

SEQ ID NO: 9102 - DNA, 1011 bp, Glycine max
  Clone ID: 700833337_FLI
cttttcttattttgtcttctttccatttccctcctcacttgttctgagatcttgaaaaaaaaaaaaaaaaaagtgtttgaaaactgaagacccttttaggaataggagaatgcaggatccaacgttgttccaacccatgaaaccccactttcccgaacaggaacaacttaaatgcccgcgctgtgactccaccaacaccaagttctgctactacaacaactacaacctctcgcagccacgccatttttgcaagaactgcagaaggtattggaccaaaggtggcgccttgagaaacatccccgttggttggaagcagaaagaacacaaagcgatcatcttcatccaacaacaacaccaaacacgcttctccatcacccccagtttcttctgcacccgctccagaaatcgacccgacccgaactgaccccaacccggttggtggtggtgggtctttccgttcccttttggcatcgagtggccatttgggcctagggaacctcttggagggtctgaattcaagtgggtctaatctcaaaagtgtgcaaatggaagagtttggggagaatgttagttcgggtactccagtggcggttccgggttcgggtcagaatcccgggttggagatgcaaagcaatgggaatgctgagagttttctgagtttgcaaaatggtgattcaggctgttgtaatggtactaatggctggtctaaccttgctattttcactcctgggtcaagctatcagtaatgacaaattaatgaatatgattaccctgatctgtatatttagacatgttgtgaaaatagttatatatataattatattactggcttaagtttaagcatatatgtcgtgctattatggaggattacaaaccagaaggccactgcaataggatcactaggtaaattaagtttcttttcttttggatttttatttttatgttttgtggttggtgttcttcacatatatcaatgatgcaagagaaatggaaagcaagtcattttttagg

SEQ ID NO: 9103 - DNA, 857 bp, Glycine max
  Clone ID: 700833392_FLI
gtgagaacaagaaaaagaggcgcaagatgagtggtagggtttctgggaaggtgaagtggttcaatgatcagaaggggtttggattcataagccctgacgatggcagcgacgatctcttcgttcaccaatctcagatcaaatctgacggtttccgaagcctcgccgaaggagagtccgttgagttcgccattgaatcggaatctgacggacgcgcgaaggctgttgatgtcactggccccgacggcgccagcgtccagggaaccagacgaggcggtgatggtggccgaagctatggcgggggacgaggaggtggtggaggtggctacggtggaggcggtggctacggtggtggtggtggctacggtggaggcggtggttacggtggtggtggaagaggcggtggaggcggtgcttgctacaactgtggtgaatcgggacatctggctagggattgcagtggaggcggtggtggggacaggtacggaggaggtggtggtggtggcagatatggagcggcggtggcgggaggtacgttggtggtggaggcggcggcggcggcggaggaagctgctacagctgtggagagtctgggcattttgccagagattgcccatcaagtgctcgttgaatttactgttagggttgtttatgttttgcggattgttttaagtttttactttaatatgtcttagggattttaatggtttctgtccaaactatgggttcttatgagtagatgtgtgggatttttcttttttggttatttaaatgaagggtttctgtgttatcgttacaatctgcaaactaaaatctgtttgaacttacattttgctataatgaatcgtatgattgctatc

SEQ ID NO: 9104 - DNA, 1501 bp, Glycine max
  Clone ID: 700833411_FLI
ggaatctcaaaaactactccttccagtttatctattccatcatacagtgaaaaaagcaatgcctcaagtcttcccacaccaaggtctgagggtgaaatcttgtcttctcccaatcttaagcccttcacattcaatgagctaaagaatgccacccgaaattttcggcccgatagtcttctcggtgaagggggatttggatatgtctacaagggatggattgatgaacacacatttacggcttcaaaacccggatcaggaatggttgttgctgtgaagaggctgaaacctgaaggttttcaaggtcacaaggagtggttgactgaggttaactaccttggacaactgtaccatcctaatctggttaaattaatcgggtactgcttggagggagagaaccggctattggtgtatgagtttatgcctaaagggagcttagagaaccatctatttagaagaggaccacaaccgctgtcttggtcggtgaggatgaaagtggctattggtgctgccagaggactctcctttcttcataacgccaaatcacaagtcatataccgtgattttaaagcttctaacatcctgctggatgctgagtttaattcgaaactttctgactttggtttagctaaggcgggtcctactggcgatagaactcatgtgtccactcaagtaatgggtactcaaggatatgcagcacctgaatatgttgcaactggtcgtttgacggccaaaagtgatgtctacagctttggagttgtgttgcttgaacttctatccggaagacgcgctgttgataaaaccataaccggcatggagcagaatctggtggactgggcaaaaccatatttgagcgataaacgaagactgttccggattatggataccaagttggagggccagtacccacaaaagggggccttcacggctgccacacttgctctacaatgccttaacagtgaggccaaggcaaggcctccaatgacagaggttttagcaactctggaacagatagaggcccccaaaactgcaggcagaaactcccattcagaacaccatagagttcagactcctgtgagaaagtctcctgcacgaaaccggtcaccgttaaatctaactcctactgcgtcccctctcccagctcaccggcaatcgcctcgtgttcactaagctgtgaacatagagcatctgcatgcatgtaaattccttaaatttatcaggttgtgttttggaccgcgtgcgttgaggcatgtgtacttgaatgcaattttgggtacttgaatgcaattttgggtcatgcacggtagaatagttaacaccacatttatccaaatgctatgcaagttattgcatcagtattctgcatgtatatttcctttttccccacgtagaatgtcttgttgataataacaaccagacacattgcttcccttctattatgggtgcctcataatttgggtttttggcctaaaacaattccaaaacatggagagggttgttatgt

SEQ ID NO: 9105 - DNA, 1584 bp, Glycine max
  Clone ID: 700833616_FLI
ctctaacctaatcaaatcctctcctctcaaaccaattcccacttttcctctcttcgcctcccctcagaaaccaatgtccataatcaccccacgccgtcatcctcaaacgacacccttccgctagcaaaacgactgcggtttggtcgtcgtcttccccgaggcatgctcttgggatattattattcatcatcgtaatcacaccctacagagacgttgactttgtgctttttctgggaggggaacaaatggaccaagctcttctggacgacataatcaatcgccttctcgaagttcgcagccggccggggaagcaggtgcagctgtcggagtcggagatccgccatctctgtgccgcttccagagagattttcttgcagcaacctaatttgttggagcttgaagcacccattaagatttgcggtgatgtacatggtcaatattctgatcttttaaggctttttgagtatggtggactacctcccgaggccaactacttatttttgggggattatgtagatcgagggaagcagagtttggaaacaatatgccttctcctagcatataaaataaaatatcccgagaattttttccttttgaggggtaaccatgaatgtgcttctattaaccgtatatatgggttttatgacgagtgtaaaagaaggttcaatgtaaggttatggaagacatttacagaatgcttcaattgccttcctgtggcagcactaattgatgaaaagattttgtgcatgcatgggggtctttctcctgacatacttaatctggatcagattagaaatctacagcggcccactgatgtgcctgatacaggtttgctttgtgatctcctctggtcagacccaagcaaagaggtccaaggttggggaatgaatgacaggggagtttcatatacatttggtgctgataaggtctcagagtttcttcagaaacatgatttggatcttatttgtcgtgctcatcaggtggtggaggatgggtacgagttctttgctaaccggcagcttgtaacaatattttcagcacctaattattgtggagagtttgacaatgctggcgctatgatgagtgttgatgagacactaatgtgctctttccaaatattaaagccagctgataaaaaagcaaagctcaactttggaagtactactactactaagccaggaaactctccagcaggcataaagtccttcctgggtacaaaagtatgaagttaattttggtgaaattgatgccacaaccgtcagcttggtcttgaagatgtaatagttgaagaaaaggaaagtagagttccatttaatcatgatattttggaattgtaaaaacaaagggaaacaccatcatgaactatgtagactgttgttttccactggtacaaatttgcattttgaggtagacagcctctccttgttttcttttgtacactagtagctggtatatgtcattctgacttataaggttctcaagcattgatggatacatctgcatgtgttctgcaaactaattaaaaatgctcgtacaattggtttatgaatggcagtgaagccagtaaaaatggatatggtcctc

SEQ ID NO: 9106 - DNA, 2431 bp, Glycine max
  Clone ID: 700833639_FLI
ctttcttcattctcctcggagctttgctcgttattcttctttttcttttctttttttcgtttcgttcggaaaacgcgtaggctgtgccgtcgtttttagtgggtggatgggaacgacgtcgtgtgagtacgtgagctgggaggaggtgtttatgtcgaacgacaaggggaggagggaggttcattacttgcttaaacgacgaggcggtggctcggatctggccgttttgggaaaagagaagagcctcaaacacatgtcgtatcgctacgccattcgaaacacgtcgtcgtttcggccttactttaagctcaggtcgcgcagagaggttgttaattggttggattcaattgtttcagattcgtcttctggggatgcggctatggtgggaaaacatggttatgaacctgaaattggagccttgaaggataatcaattgcagaggatgcgcaattgtacaaaagaattctcatggatagggttgccatgggcgtgtaagaaaagaagaaagcactatcaggcatataagagaaatggttttcagatatccgtgcatgattttatatttgttctggcagaagaggacaagcgtctagttgcctacttggaagacctttatgaggattccaaaggcaataagatggttgtggtgcgctggtttcacaaaattgatgagtcctgggcattacgaaaagtttcagaatgaggcccgttgtactcacttagagccattcatctgcaaccaccagttcgataatgatgatgtgaaaccctttgatataacacagattaagggttattggaaacaggaaattctcaggtacatgtatacccaattggactcgaagtctagtgggagttccaggcaatcagatgatgacctggaacttgatgaaaatcatatgactaccgtttttatcagacctaagaagaggctgcgccttaccaaagcagatgatgccaaagaagcagttgatttggttggccttaaaacagaaaatgtgaataacagtaagaataataccaaaatcaatactggaaacaattctgggaaactgattgggcacacaaacatgacagcaaccattaaagggacaaatgaacatgcttcacaccatttagttgtaggttccctagtcgaggtcctctctcaagacggtgggatgagaggatgctggttcagagcttctgtcattaagaagaataaagataaagtcaaggtgcaatatcaagatattcaggatgctgtcgatgaaaccaagaagcttgaggaatgggttttagcttccagaattgcagtgcctgacaacctgggtcttcgaatgcgtgggaggaccatggtccggccagctccaccatccaacaaacgagaactatcgtgggtcggcgatgttggttttgttgttgatgcttggtggcatgatggatggtgggaaggcattgttgttcaaaaggactcggaatctaattgtcatgtttatttcccaggggaaaaagtggtgtcggtatttggtcctggtaacttgagagagtctcaagattgggtggggaatgagtgggtatttgtgagggaaagacctgatcttgtggcttctgttttatctagcttgaaaacaaaacaaaactcatgcaaatccaattccaataacatccaatcaactggagcaatcaccagagatggaatacaatttgggcaatcggatacttgcttggattctgataaggatagaccaagaaaagctgaagtggttccagaccttttgaagaatgttttgtcatcccagttaaggtggaagaccaccagaaagaggaaacgtggaagaagcagcgcctcatatcagaagccacggtgcactgacacccatcagaaaaggtcaccgaatgttatgaaatcaaatgctcctgacagttttttgatcccggcatcattgaaagttgatcatgatgactgcaagtatgttggggatccttccatcttcagttcttcagttgtgccttctttaactaacatggttatgtgtaggtgactccatgattcatatcttagtttccgggttctttacttctctcactcctttgcttttaagtacatgtatttagcccctaaaccttagtgcatcttttcgatgcctgtcttgtccagatcttcacgtccagtatctattctcttcgtccatttcctttgataacagagaaatttatcttaggttagtctttttctttcccacctttcattagttttgtggtttgtggcatcgaagccaaggaggcaaggatgatgccatacaagttttggcataggaaaaagtgtaacgtagtggaataaccaagggtggctttgacttataggatagattgtgttcttttcatataaaatgatccaatgtaatttgtgtaaaactttctataagagtagcaattttcttgttctttt

SEQ ID NO: 9107 - DNA, 689 bp, Glycine max
  Clone ID: 700833677_FLI
ggaagacctgctgttgatccacaacttgcaagagaacaagtgaatttggcagaatggggacttgaatggctgcaaaagggcatggtggagcaaattgttgatcctcatcttgttggacagatccaacaaaactccttgaaaaaattttgtgagactgcagagaaatgtttggctgaatatggtgttgacaggcctgcaatgggtgatgtgttgtggaatttggaatatgcacttcagctccaagaaagtggtcaacaaagggagccacatgccaatagacatgctagtgaagaatttgtgagtgtgacaaatgcaattattcctggaaatccttctaccaacagaaggacagagagggatcattataactgttcttcagatgtaagtactagccaagtgttttcccagctaatgaacaatgaaggcagatagagataggtttatgccgcaaatataagcaagaaattaaagcagtacctaagctttcatacttcttttttttcctaccaagttttttttttgaagaaaattgcatcaaaaccgtattagcaagatttactcacggaaggctccatatagcactagttcattggtagcaagatttttgtagtataatttattcatttattttatacagcaattctgtacttattattctggagcttaatcagtcaaatttgtgatgagct

SEQ ID NO: 9108 - DNA, 1079 bp, Glycine max
  Clone ID: 700833729_FLI
ctagcatggcccataaaatgtctactcattagcccaatgacatgatccccatcttcctctcccctattcatttcacctagctagctttcaccctcccctttttaattccttccctttattattaatttacaaaatccaaacaaatctctggatcttgatcatctcatcattcagcaccacaatgtcttcttcaagtggcaaagatttgggagaaggatcaagctctccaacagaaaactaccaacagagtccagggacacttagccgctatgagtctcaaaagagaagggattggaacacttttggtcagtacttgaagaatcaaaggcccccagttcctctttctcagtgcaattgcaaccatgtgttggattttcttaggtatcttgaccagtttgggaagaccaaggttcaccttcaagggtgcatgttctatggccagccagaacctccagcaccttgcacatgcccccttagacaagcttgggggagccttgatgctctcatagggaggctcagggctgcttatgaggaaaatggtgggtccccagagactaacccttttgcaagtggctccatcagggtgtatctcaaagagattagggagtgccaagccaaggcaagaggtatcccttacaagaagaaaaagaaggcctcaaatccaagcaagggaaacgatgaatcatcctccaccatgcacttctcttgaacaacatcatcagtatcgatctctttggacctttcaagtcatggataatgtagcatacaatcaaattggagatcctttttacaaggcacagtctattggaggttcggtttctatttggattgataatttgttggcatgccactcgatctttttaaagttgctcttttgtttacccgggagtttgtatgatcctagctgaacagcatactcattaattatatgacggtcagttatgccttggtttatctttgcattaattcaaacttctcagttgcatatatacatatatagttagtttgtcatgtatttttcggattggttccattgaagtgtaaggtattttaataaattcgggttcacatactcttcc

SEQ ID NO: 9109 - DNA, 1428 bp, Glycine max
  Clone ID: 700833740_FLI
cactttcccaagttttctctctcacacccttcatttacaaacaacggaatcattctcctttctgctaacacttttactttttcttcatggctctctttctctttgctattttaatcttgatggtcccttctagtaatgcctattggccaccttcacctggctactggccaagttccaaattcaggtccatgagtttttacaaagggtttagaaacctctggggccctcagcaccaaagcctagaccaaaatgcattaacaatctggcttgatagaacctcaggaagtggattcaagtcagtaaggccatttcgatccgggtactttggtgcttccattaaggttcaacctggatacactgcaggtgttataacagctttttatctctcaaacaatgaggcacatcccggtttccatgatgaagtggacattgagtttctagggacaacatttggaaagccttacactttgcagaccaatgtttacataagagggagtggagatgggagaatcataggcagagagatgaagttccatctctggtttgatcctaccaaagattttcatcactatgctatactgtggagtcctaaggaaataatattcctagtggatgatgtgccaattaggaggtacccgaggaagagtggtgcaacatttcctctgaggccaatgtggctatatggttcaatatgggatgcatcatcatgggcaactgaggatggaaagtacaaagctgattataaataccaaccttttgtggcaaagtataccaatttcaaagctagtggttgctcagcctatgcccctcgttggtgccatccagtttcagcctcaccatataggtctggtgggttgagtaggcaacaacatagtgccatgagatgggtgcaaagataccacatggtttataactattgtcaagaccccaagagagatcacagcctaacacctgagtgttggggttgaattgaagaattgaagtattcaacatttggaaattggaacacttaggccaattgggtatattatgatgctgatttttggtccccaaaaccaaaacactgttctcttgtgatttgttttgtcttttttctttcagaaagtttcatttactttatgggggtcacttgagatggggggccccagcttggcagatacattatgcaagtgtacggggttgtgcatccaaggctctcaagacacgagaatatttggaagattgtgtgtgtgtgtgtgtgagttttctttttagacaaaggaaaaaaagaaaacaaagggaagagcgagggaaaaggaataatgatatctatgtccaatggaaaagcaaagtggccaaggtgtatgggttggtgaatgtggcaccattgagtgcgaatactaaaaagcacactcttcatttaataatgttattgtcattttaatgatg

SEQ ID NO: 9110 - DNA, 1483 bp, Glycine max
  Clone ID: 700833775_FLI
cttcttcactcttgattcttatctctcacactgaacactcttgtagttaatcgaatttctcattccgcagaaaccttcaacgatggccgctgaaacgattccctaccagaacggcgtcgttgccagctccaacgattccaccgccacgggcaagaaatcgcgggagaacgaccgccgccgccgccgccggaagcagaagaagaacaacaaggcatctgaggccccggttcctaactcttccgaagagagtgacgatgcgaaagagaacaacgattcaaaacagcttgttgaacaaattgaaattgagtacgtaccggagaaggcagagttagttgaaggcatggatgaagagtttagaaaaatctttgagaaatttactttcactgatgccactgctttggaggatactgataagaaggatggttcagaagaaaatgcagcaactaataagaaggctaattctgattctgaagaggaagaaaacgataatgagcaaaaagagaaaggcatctcaaacaagaagaaaaagcttcaacggaggatgaaaattgctgaactgaaacaaatttgcttgaggccagatgttgttgaggtgtgggatgctactgcatcagacccaaagttgctggtgttcttgaagtcttatcggaatactgtacctgtacctaggcattggtgtcagaagagaaaatttttacagggtaaacgaggtatagagaaaccaccctttcagcttcctgatttcattgctgccactggaattgagaaaatcagacaggcttatattgagaaagaggatagtaagaagctgaaacaaaagcaaagggagcgcatgcaaccaaaaatggggaaaatggatatagattatcaggttcttcatgatgcattctttaaataccaaacaaagcctaaactgacctctcttggagacctgtatcatgaaggaaaagagtttgaggtgaagttgagggagatgaaacctggcatgttatcacatgaattgaaagaagctcttggtatgcctgaaggttctcctcctccttggcttattaatatgcagagatatggtcctccaccatcatatcctcatctgaaaatccctggactgaatgctcctatcccccctggagctagctttggttatcatcctggtggatggggcaagcctcctgttgatgaatatgggcgtccactgtatggagatgtttttggtgttcaacaacaagatcagcctaactatgaggaagagccagttgataagaccaagcattggggagacttggaagaggaagaggaagaggaagaggaggaggaggaggaggaagaagaagaagaaatggaggaggaggaacttgaagctggtattcagtctgttgatagtctgtcaagcactcccactggagtggaaacacctgatgttattgacctccggaagcaacagaggaaggagcctgagaggcctctttatcaagtactcgaagag

SEQ ID NO: 9111 - DNA, 1141 bp, Glycine max
  Clone ID: 700833785_FLI
ctcagcttagggttttaccgttaaacgattctcttcgtctttctctgttctgaaaccactaccgtttcgtcgtcaccatgccgcaaggggattacatagagcgtcacagaagagactatggctaccgtcttgatcacttcgagcggaagcgcaagaaagaggcgcgtcaagttcacaaacgttcttcaattgcccagaaggctctgggtattaagggcaaaatgattgccaagaaaaattatgctgaaaaggcacagatgaagaagactttggctatgcatgaagaatcaacgtctaggcgcaagactgatgataatgttcaggatggagctgttcctgcttatctccttgatcgtgataacacaaccagagcaaaggttcttagcaacacaattaagcaaaagaggaaggagaaggcgggaaaatgggatgttcctctacctaaggtacgtccagtggctgaagatgaaatgttcaaagtggtccgtactggtaaaagaaagaccaagcaatggaagaggatggttacaaaagctacatttgttgggcctggttttaccagaaagcctccaaagtatgagcgattcattcgtcctacaggattgcgattcactaaagctcatgtcactcacccagaacttaaatgcacattcaatctagaattaattggagtgaagaaaaaccccaatggccccatgtacacctctcttggtgtcattaccaggggaactataattgaggtgaatgtcagtgaacttggtcttgtcacacctgctgggaaagttgtgtggggtaaatacgctcaggtcacaaataacccagaaaatgatggttgtataaatgccgttttgcttgtttaaggtcatagcaagcatcagggttccagcttgatttcaaaggcagtggtcaagtccctctcctatgatttttgtggtcttcaaccccaatcttgtagggaaaatcttacaaactttgttgctaccagagagaagattgtctgagaaaatagtgaagcatttttgtttcttgtttggatagtcaatactcaatgcaatgatctgatctagcacttgacatttaagataactattgtacaagagttaagacaaacaagtctcataaatttatgtagttcatttgc

SEQ ID NO: 9112 - DNA, 2261 bp, Glycine max
  Clone ID: 700833804_FLI
ctttcttccccccttttttctctaacccaacaaacatggatgattctggaagtaaaactaaactactgaatccatggatgctccactttcagaaactcgctctcgaactcaagtgccctctctgtttgagtttgttcaagaggccggtgttacttccatgcaaccacttgttctgcaattcatgtttggctgattgcataacggctgggtctgaatgcgctgtttgcaagacaacgtatgctcaaacagatgtaaggcacataccttttgtggaaaacgtggtggcaatatatagaagcttggatgccactttttgtgctagtttgtttcagtcgcgttcttctggtgatgggagggttttggagccgtgccaaacaattcttaattcaacttctagtagtttaaaaactggcaagcttcctcggaacttaactaatttgaatgaggttggggttggccaaactttcaaatccaagagtgtggtgcatgataaagctgaggagcttgagttgtcttgtgggagagggaagcccaatccaatgcaatcttccctgatgggacttgggggccgagaacagtgtggagttatggaaatggatgtgaatcaagtaacacaatcagcacctgatagcccgcccttttgtgataccaaaggttcagataatgactgcagtgatcaagatagtgagcatccattacctcctggcagattggaaaattcttcactaaacagagcaagcacaggaaatggaaatttgaaagaaagaatgggacagcttaggtctgaaagttcggcctctgaaactgagggtctggcaagggatctcaagagacagaagaatctggactttaaacctggaaaggaccctggtgcaccattgcccacaaatgcttcaatttacttgtgtccaattggaaggatctgctcattttgccaatcctctaaaatctcagaggttactggaccaatgctgcattatgcaaatgggaacttagttaccggagatgcagccatgaaaccaaatgttgtacctgtgcatagaatttgcattgactgggcaccacaagtgtactttgatggtgaagtggttaagaatttgaaggcagaggtggcaaggggagcaaaacttaaatgcagtaaatgtaatctaaagggagctgctcttggctgctatgtcaaatcctgtagaagaacttatcatgttccttgtgcaatggacatctcagattgccgttgggatcatgaggattttctcttgctctgtcctgtccattcaaatgtcaaatttccatgtgagaaaattaggtccaagaaacaggcaacacagaagcatcccactttgtctcatctgccatctcaccactcaaatcctattgaagcttcccatgatgatgatgaaaaattagtattttgtggatctgctctatcaaatgaagaaaaggtacttttgatcaattatgcaagcaaggttggtgctactgtgaccaagttttggacctcaaatgtcactcatgtaattgcagcaactgatgcacatggagcatgctccaggacattgaaagttctgatggcaattctaaatggacgatgggttctaaaaatggattggataaaagcatgcatggaagaggtaaatcctgtggaggaagaaccatatgaaattaatcttgacaaccaaggatgtcaaggtggcccaaaagctggcagacttagggcattggccaatgagccaaagctattcaatggcttaaagttttatttttctggggattatgtgtcaacttataaggaagatctcgaagaattaattgaagtgggaggaggtagtgttttgagaagcaaggaagaattggaatcacaaagacatgaatgcaaaggagattcttcacagttgctgattgtttacaacctggatcctcctcaaggatgcaaattgggggaggaagtttcaattctttggcaaaggctaaacgatgcagaggatttagctgctaacactttacaagtcattggtcacacatggattcttgaatcaattgctgcatgtaaattgcagccttttgttaactaaaatgcattaggtagctgatattttgcctatcacttgatagggtgttcgttctccagaagaattggtcaattgtgtacatgatatagcttgaatttattttgtcttactctggtcactggatgttagggtgtaatatttatgtaacattagttttgtctgctcttttactaacttggttttgtttgctct

SEQ ID NO: 9113 - DNA, 1382 bp, Glycine max
  Clone ID: 700833812_FLI
attcacttctctctctcaaaacaagttatggtagtatttgtcattcatttcacaaaaccggttcacctttggacccatggcttctaaaacccctaccttattccactctcgtttcttcctcttcggcttctattgctgggactgggaatttctcaccgctctcctcctctttagttcttcttcctaattaattaaattacatacaccttttcttttttttttttttacctaaatttctcattactacaacatcaacaaaagaggcataggttttttttttcttttcttcttttattaaaataataatagtttctgtgaggtaggtggagggtagatcgggaagaaaaaaaaatgtcacagcagcagcgttcgacgccggcgccgttcttgacgaagacgtatctgctggtggatgaccccgccaccgacgacgtcgtttcgtggagcgaaggtggcaataccttcgtcgtttggaaacacgccgatttcgctaaggacttgcttccgaagtacttcaagcataataatttctccagcttcgttcgccaactcaacacctatggattccgaaaaactgttcccgacaaatgggaatttgccaatgagtatttcaagcgaggacagacggatcttctcgccgagatcaggcggcggaaggtggtgtctccggtgaccggaaaatctaccggcggtggcgttaacatctcggcgtcccactccggcggcgacgacatggggtcgacatcgacgggatcgatggaggcggcaacggcggcgggcgctgatatatcgggcgagaacgagaaattgaagaaggacaacgagaaattgagcggcgagttagcgctggcgaagaaacaatgcgaggagttggtggcgtttcttagagactcgctgaacgtgagccccgatgtgatagagcgcatcattcggcaaggaacgtgtgtgtccagcaacaatgatgcggtgcgttttgatgctattattaataatgatcttgatgacgacgaaaatgcggtaggtgagtgtgaaccacaacaaccaccacccaaaggtgacaatggagaaagtttgaaactatttggggtttggttgaagggtcaaaatgggaaagagaattcaattggtaaatgccgcaagagagggcgccaagactaccctattgctgcccctgccaaggaattgaagaccctagtctagtacaacatatcatattcttgttaattaattaccttttaagaaacaactattgtagccagatctagaacacaaagaaaaatactctcttagtcatcatggaaaatgtatggctctttcatggtatttcgttgtttggtttgatggtgcaagggacctaataaaggatactaatgatgatgatt

SEQ ID NO: 9114 - DNA, 827 bp, Glycine max
  Clone ID: 700833817_FLI
gaattgaggctgctgccctcacttgatacactgaaggtgaaagataagaaggatcgaggaaccttaacagtaaaggtcatgtattatcagtttaacaaggaagagcagctggttgcactagaggcagaaaagaagatactagaagaaaggaagaaactgaaagaagctggaatgataggaagcacgatggatgcactagatggagcagtatcagtggtaggctctggtgttggactggttggtactggtgttgttgctggtgccggtcttgtgggaagtggtattggtgctggagccgggcttgttggaagcggcatcggtgctggagttggtattgttgggagtggtcttggagccgttggtagtggactgagcaaggcagggaagttcatgggaaggacaatcactggtcatagtggctccagaaagagtggttcttcaacaccagtcaacaatgcactggagaatggtggtggtgcaaagcctctttgattccttcctttgtattgtaagactaatgaatggacctttgcaggttcaagctttgctaatagatagatttcctgtgtatgtgttgctttctttttttaccataatgttttctccaaggctgtgttaatctactagattggcaaaatggtagcagaaatatcaagttagttctgttgcatcatctttgtaattatgcttaacctcaagttgtgataaaactcatcaaattgtaaacattccttatttaattcaggtgcatgatgcaacttgtatcatccttatttataattgtgtgagactttgagttggatttgtaataaaacatgaaaattgtt

SEQ ID NO: 9115 - DNA, 1314 bp, Glycine max
  Clone ID: 700833881_FLI
ctgccatcagatgcagattgtggtgtcatcttttgacatggttgctggctgtggagcagcagaaccatataccacacttgccttaagaacaatttctcgccactttcggtgtttgcgtgatgccatcagtggccaaattcaggtgacccaaagaagccttggggagcaagaaggaataccccgtctccgctatgtggatcagcaacttagacaacaaaaggcacttcagcaacttggtgtaatgagacaagcttggaggcctcagaggggtcttcctgaaagctctgtttcaatactccgtgcttggctctttgaacattttcttcatccttaccccaaggattctgagaaaattatgctggctaggcaaacaggcttgaccagaaaccaggtggccaattggttcatcaatgcaagggtgcgtctctggaagccaatggttgaggaaatgtacaaagaggagtttggagactccgagatgaactgcaacctttcatctgagaacaacacggtcaaatgtaaaaaagatgatcttgttcaagagtctgataacattaacaacaataataaatgggaagagacacaggacaatttagtaactgttgacagtgtccaagtccaacctcaagcagaactggatagaggggtcaatgtagaaaatgtggtgatggattctggaactgggaaattgcagggtgatcaaaaccaacaaaggcttggcatgaacaacaacaacaacttttattctatctcaaccaaccagaatgatggaggcctaatgggttgttctactcatgccacatatgatttatcagagttgggtaactttactgtgggtagccacgtttcccttgcattggagttgaggaactgtgaaagtgatgggtttgccatgtctgatgatgccatacgcaaacgacgtaatcaagcattggcctcttccccggagactgatttgctagattatcatttcacggattcaggaaagcaacaacacaggtttggcaatccccatttgctgcatgagtttgtcgtatgaaatctagcaaaaaaatatttgatgattttaatggatctctggagaggtgtacctcaacaaagctgaaagagaaaaaagcctatgctgtgctgctgctgctgctgctgattttgctactttttttcttcctcattcttgttgcccattgttcgtaaaaaagtgatgtaaatcacaaaaccgtacaaaatatacaggtagatatgtgtagatatattcgcttgtaatattttacagatgattggttgtatgtatgtgcaggcaatttttgtaaggat

SEQ ID NO: 9116 - DNA, 778 bp, Glycine max
  Clone ID: 700833923_FLI
ttcattctttatggatcaagaaacaacaagaagaaacaccatgcaagaatgtcatgtgatagccccaacaacaacaacggcaacatcatcgtatcgtggagttcgtcagcgaaaatggggcaaatgggtgtccgaaatccgtgagcctggaaagaagagcagaatatggttagggagctatgagtcaccagagatggctgcagcagcatatgacgtggcagcgttacaccttcggggacgagctgcaagactcaatttccccgaattagttgagacgctgccacgtccaacgagttcgaaacccgaagatgtccaagtggcagcacaacaagcggcggtgatgttcagaatatcaccaacaatgtcacctattaacaatcatcaaggatgtgtcaatgacaataacattattaagggtagtgtggttcctgtgagagtgggactctcacccacacaaattcaggccatcaatgagtccccattggactcaccaaagatgtggatggtgcaaatggcagaggcactcaggtttggtttcgatgatcactctatgatgatgctgccttctgatgatgatgattatgctttggagttgagtggatgggaagaaatacagcatgaatctttatgggactctccagaatatatgtaattaattacgtaactattaattaataatcaatgtacccttgatttagggcattatatattacatatgattaaagaatcatgtggttttagtgagactgattcaatgaagcaaaaggattaataaatt

SEQ ID NO: 9117 - DNA, 1424 bp, Glycine max
  Clone ID: 700833950_FLI
tggtcaaccgtcccccaccaccgcctcctttcatcagcagcagtggcggatctggatcaaacaattcaggcggtgaatttcttcctcctccttctccaggaatttcattggggttctctaagagcacattcacgtatgaggagttggcacgcgcaactgatggcttctctgatgccaacctccttggacaaggaggatttggatatgtgcacagaggaattcttcccaacggcaaggaggtggcagtgaagcaattgaaggctggaagcgggcaaggggagcgtgaattccaagctgaagttgagataattagccgtgtccatcacaagcatcttgtttctttggttggatactgcatcactgggtcccagaggctgcttgtttatgaatttgttcccaacaacacattggaattccatttgcatggaaaagggagacctaccatggattggcccacaagactaagaattgctttaggatctgctaagggactggcgtatcttcatgaagattgtcatcctaagatcatccatcgtgatatcaaatctgccaacatccttctggattttaagtttgaagcaaaggttgcagattttggtcttgcaaagttttcttctgatgtcaatacccatgtttctactcgagtgatggggacttttgggtatttggctccagaatatgcttctagtggaaaactcacagacaaatcagatgttttctcctatggaatcatgctccttgagttaataaccggacgacggccagttgataaaaatcaaacttacatggaggatagtttggtagattgggctaggcctttgctcacacgagctttggaagaggatgattttgattctattattgacccaaggctccagaatgactatgatcctcatgagatggcacgaatggtggcttctgctgcggcttgcatacgtcattcggcaaagcgtcgaccaaggatgagccaggttgtccgcgctctcgaaggagatgtctctctagcagatctgaatgaaggaataagacctggacacagcactatgtatagttctcatgaaagctcagattatgacactgcacagtacaaggaagacatgaaaaagttcaggaaaatggcattgggaactcaggagtatggtgcaagcagtgagtacagtgccgctacaagtgagtatggtttaaacccatcaggctcaagtagtgaagcacagagccgccaaaccacaagggaaatggaaatgagaaagatgaagaacaatcaaggtttcagtggaagttcttgatccttggccaactatttctgcctttatcttttgtataaagtctatatatccttgatttcttgccaatgtcacagttgattgctttactgacatctttggagagtcttaccgattactattattttttccctccttcac

SEQ ID NO: 9118 - DNA, 1371 bp, Glycine max
  Clone ID: 700833967_FLI
ctctccctctttcctatcacactttctagatagctagcctgtaagatatatatatagatatttcatatatatcctatggtccgtgagtgcccttgttctgtaccaaccctttcttccacatgttgagtttcagcatcgtcctctcttgagtccccatatcaaatacccaccgaattcaaccccccatataacaaatctcctcccatcccatttttcagcaccaaagtttgaaacttttctcaattgggttgaggagagtttgactcaaatttttatttttctaacgaagcagtagctattagaagtgcaaaaattaaatgtccaacatcttcttgttgatgtttgagattcatgtatccgattctcagtgaaatcttcttttccgggtgtatgatcaattccactgttaggcgcaggacccatttagttcaatccttctcagttgctttcctctattggttgtactacgtttcatgatttctaaaccttccttagtctaataatcatctactactagttattattatcatcatcatatataataaaatctatctgcaatattatttttctgagtttgtgtctagttagtgtctgggtcctggtcctgccaattgtgtcaattaattgtattgaatcataaaagatggcttcctcaagtggaacatcttcagggtcatctctgcttcagaactctggttctgaggaggatttgcaggcggtgatggatcagagaaagaggaagagaatgatatcaaaccgcgaatctgcacggcgatctcgcatgaggaagcagaagcacttggacgatcttgtttcccaagtggctcagctcagaaaagagaaccaacaaatactcacaagcgtcaacatcaccacgcaacagtacctgagcgttgaggctgagaactcggtgcttagggctcaggtgggtgagcttagtcacaggttagagtctctgaatgagatcgttgacgtgttgaatgccaccactgtggcgggttttggagcagcagcaacatcgagcaccttcgttgagccaattaataataatagcttcttcaacccgttgaatatggggtatctgaaccaccctattatggcttctgcggatatattgcagtattgagatccatggtctctgagtctgagatttgatgaggatttcttcttcttcttctaggtttgagtctgttgagaaattgtaatcactaccatatggtgataaggaataataataatgaatgtgtatcgtaaaacggatgggattgttgggtgctggttctgtaaatgtggcatgggccattactgtaatttgtcaccctcctttcctatattattataataataatattgacctacttctctgtcttg

SEQ ID NO: 9119 - DNA, 968 bp, Glycine max
  Clone ID: 700833986_FLI
gtaatgattgctttttgattcctgttgaatttggtgactcctttgctacaaaaagtgaaaaccaacatagatataaggtgggggatgatgggtttagtggggatgaagatgttgttttggattttgatataaattctggtgcagagtctgcacctgttattgagaattggcacacttccggggatactgtgtcactgttttcggatccagggtgtacaaaggtgttcaaggccaatggatttgagttaagaagtgaacatttggagcaaaactacctagatatgaaatttgctcaatcaactgaagactcaagcatcaatggtaatgttgaagcaaacatgaaaagaagagatgtggaattatgttcagttgtacctcaagtgtctgaaggtgtaacacaaatgaggggtgatgaattagaagcagaagtctcaactcaagatcaagatattcttgaggattcgagtcaacaaatacaagaagtcccaccttctagctctactacttttactatccaagatgatagtgatggaagaagaaacagttcctgatggctgatacacccacttatgcagagaatctgcatcagctacgcaagaggctacaactgcttggaaggaaagaatcaggaacagaagaatcattagaaggaagtgtcatgtgtgatatagaatgtggtgagttaacaattgagaagttgaaatcagcactgaaagctgaaagggaggccttaaatgttgtatatgcagaactagaagaagagaggagtgcatctgcaatagcagcaaatcaaacaatggcagtgataaataggcttcaggaagagaaagcagcaatgcagatggaagctttgcagtatgagagaatgatggaagaacaatctgagtatgaccaggaagctttgcagcttttgaatgaccttatggtaaagagggagaaagagaaacttgagctagaaaaggaggttg

SEQ ID NO: 9120 - DNA, 2604 bp, Glycine max
  Clone ID: 700834118_FLI
cgaagaagaagccacagagaaccagtctcctactctctctcacccacaagaaaaatggcatctcacatcgttggatacccccgcatgggtcccaagagagagctcaagttcgctctcgagtctttctgggatggcaagagcagcgccgaggatttgcagaaggtggctgctgatctcaggtcatccatctggaagcagatggctggtgctgggatcaagtacatccccagcaacactttctcgttctatgaccagctgctcgacgccaccgccaccctcggtgccgtcccccccaggtacggctggaccggcggcgagattggattcgacacctacttctccatggccagaggtaatgctaccgtgcctgctatggagatgaccaagtggttcgacaccaactaccactttattgtccctgaattgggccctgatgtgaacttcacctatgcttctcacaaggctgttgatgaatacaaggaggccaaggcgcttggagtggataccattcccgtactcgttggccctgttacatacttgttgctctccaagcctgccaagggagtcgagaaatccttttctctcctctctctccttcccaaggttcttgctgtctacaaggaagttattgctgaccttaaggcagctggtgcttcatggattcaatttgatgagcctacccttgtcttggaccttgaatctcacaagttgcaagctttcactgacgcatatgcagaacttgcacctgctttgtctgatctgaatgttcttgttgagacctactttgctgacatccctgctgaggcgtacaagaccctcacatctctgaatggcgtcactgcatatgggtttgatttggtccgtggaacccatactcttgatttgatcaagggtggatttcccagtggaaaatacctctttgctggagtggttgatggaaggaacatctgggccaatgaccttgctgcttctctcactacattgcagggtcttgagggcattgtgggcaaagataagcttgttgtgtccacctcctcctcccttcttcacactgctgttgatcttgttaacgagaccaagttggatgacgagatcaagtcatggctagcatttgctgcacaaaaaattgttgaagttaacgcattggctaaggcattgtctggcaacaaggatgtggccttcttctctgctaatgctgcagctcaggcttcaaggaagtcctctccaagagtgaccaacgaggctgttcagaaggctgctgctgcattgaagggttcagatcatcgccgtgcaacaaatgtcagtgccagactggatgctcaacaaaagaagctcaaccttccaatccttccaaccaccactattggatccttccctcagactgtagaactgaggagggtacgccgtgagttcaaggctaacaagatctccgaggaagagtatgttaagtcaattaaggaggaaattcgcaaagttgttgaacttcaagaagagcttgatattgatgttcttgttcatggagaaccagagagaaatgatatggttgagtacttcggtgagcaattgtcaggctttgccttcactgttaatgggtgggtgcaatcctatggttcccgttgtgtgaagccaccaatcatctatggtgatgtgagccgcccaaagccaatgactgtcttctggtcatctctggctcagagctttaccaagcgcccaatgaagggaatgcttaccggtcctgttaccattctcaactggtcctttgttagaaatgaccaacctagatctgagaccacctaccagattgctttggctatcaaggacgaagtggaggaccttgaaaaggctggcatcactgttatccaaattgatgaagctgctttgagagagggtctgccactgaggaaatcagaacaagctcactacttggactgggctgtccatgccttcagaatcaccaatgttggtgtgcaggataccactcagatccacacccacatgtgctactccaacttcaacgacatcatccactccatcatcgacatggacgctgatgttatcaccattgagaactctcgctccgatgagaagctcctgtcagtcttccgtgaaggtgtgaagtatggtgctggaattggccctggtgtctatgacatccactccccaagaataccaccaactgaagaaatcgctgacagaatcaataagatgcttgcagtgctcgagaagaacatcttgtgggtcaaccctgactgtggtctcaagacccgcaagtacactgaagtgaagccagccctcacaaacatggttgccgcagcaaaactcatccgtaacgaacttgccaagtgaatggtataagaaagtagaatctacaagttcattggttctgcttttataatacaccaaagaaaaattttctatattgggttgtttcaataaccgtgtgtggaatatttagatgttttagcatgctctgtgagcaattgattcttcctcaacccctctccccttatttttcccaactcctgttttccctaatgaatgttgtatctttgcggctttgccgcaatccttattgatatgaaatattaccagttttgtgcaaat

SEQ ID NO: 9121 - DNA, 802 bp, Glycine max
  Clone ID: 700834123_FLI
cttttattgcttcctttcccattcttcatcttcttctctctgaaccgtactcaaactcactttcccacttatttatacaatgtcggcttacaaagaccaggatccccgtcttcatggcatcaaaactaagattcgtgtcgtccccaatttccccaaatccggtcttatgttcctagacattactactctattgcttgatcccaaagcatttaaggactcaatagatttgttcgtggagcggtacaagggcaaaaacatttctgttgttgcaggaattgaagctcgaggttttatttttggtccccccattgcgctggctataggagcaaagtttgtaccattgaggaaaccaaagaagttgcctggaaaagttatttctcaagaatatattctggaatatggaagggactgtcttgagatgcatgttggagctgttgatgatttgattgcaactggcggaacactctgtgccgctatggacttgttagaacgtgtgggagcagaagtagtggagtgtgcatgtgtaattgaattaccagaattgaagggtcgtgaacgtttgaacgggaagcccttgtgcgtgttggtggaatatgtggatatatgattatgaagaagtgggcaaaagaatattaagatgtagatttgggagatgatgtgtctttcagtgggtgctttcccattctgattacaattctagcttgtagtaggaacgatcaaatcaaattaatgcatttgtatgacccactctttgggctcatcttctcatctctttttcgaataaaattatatctttggctac

SEQ ID NO: 9122 - DNA, 909 bp, Glycine max
  Clone ID: 700834165_FLI
tggaaacttactaaaagctcttgggacacaggttgcagagccattaagggcaatggtggtgggagctccattggaggatgctaggcatcttgctcaacgttatgacagaatgcgacaggaagcagaagcccaggctattgaagtttctaaacgccaggcaaaagtaagagaaatgccacccaatggagagaatgctatgaaattagaagcagctgaagctaagctgcaggatctgaagacaaacatgaccatactggggaaggaagcagctgcagctttggctgctgttgaagcacagcaacagaggttaactcttcagcgtcttatagctatggttgaagcagagcgttcctatcatcaaatagtcctacaaatacttgatcagcttgagggagaggtgacatcagagcgacaacgaattgaaacccccactactcctagtctggataacagcatgccaccacctccgtcatatgaagaagtgaatggtgtctttgcttctcaggcacacaatggatcaacagatagcatgggttacttcttaggagaggttttatttccatattctgctgtatctgaagtggagctaaatctatcagttggtgattacgttgttgttcgaaaggtgacaaacagcggatgggccgagggtgaatgcaaaggcagggcaggttggtttccgtttagttacattgaacggagggagcgggttcttgcgagcaaggtggctgaagtgttttaacttttaagattttcctgttgggttggtttcttaacctgcgaattttgtatgtatgttttgattttgtaaaacaaattgatttgagatatagatgccaacttttccttttgtgatcatcttgtagaatttataaatgaattttttgttatccatttttattttattcc

SEQ ID NO: 9123 - DNA, 1209 bp, Glycine max
  Clone ID: 700834313_FLI
caaaggagaaattgatggtggaacaaccaaggtagcaattaaacgtgggaatccactatctgagcagggggtgcatgagttccaaactgagattgaaatgctctcaaaacttcgtcaccgccaccttgtttcactgattggctactgtgaagaaaacactgaaatgatccttgtctatgactgtatggcctatggaacactcagggagcatctgtacaagacccagaaacctccacgtccatggaagcagaggcttgagatatgcattggagctgcccggggtttacactatctacacactggtgctaaacacactattatccaccgtgatgtgaagacaacaaacattttactagatgagaattgggtggctaaggtttctgattttggactgtcaaaaacaggtccaactttggataatacccatgtaagtactgtggtaaagggtagttttgggtacttggatccagaatacttcaggaggcagcaactgactgacaaatctgatgtttactcgtttggtgtggttctctttgaggtattatgcgctcgcccagctttgaaccccacccttgctaaggagcaggtgagtctggctgagtgggcagctcattgctacaagaaaggcattcttgactctatcattgatccttatctaaagggcaagatagcttcagaatgcttcaagaagtttgccgagactgcaatgaagtgcgtggctgaccagggcattgataggccatccatgggtgatgtcttgtggaaccttgaatttgctttgcagctgcaagaaagtgccgaggaaagtggcaacggctttggtgacattcactgtgaagtggagccattatacacagattctaaaggaaaggactccaatccgggttatgatggtaatgcgaccgactccagaagcagtggtatttcaatgagcattggaggtagaagcttggctagtgaagactctgatgggctaacccctagtgctgtgttctcccagataatgaatccaaaaggtcgttaaggttatgcagcagtaacaacactttcaatacatacacagtcaacccactcaagttctgtagtacaatctgctttcaccaaatttgaatgttactcgttattcattttcttaatattgctattcctttgtatgttgtttctaattttttatgattatgtaagttgtaatttgtgaccatgttatat

SEQ ID NO: 9124 - DNA, 2982 bp, Glycine max
  Clone ID: 700834346_FLI
cactgagagaagaaggaaaaactaaccaacaccacagcccctaatttcctttttctcacaatggcggcttcagtcgacaaccgtcaatacggcacccacataaacgccgtcgttcgcgcttgcggcccagacttcaatacccctctcccgtcggatttcgatctggactcatccagcgacgacgaagaccaaaacgacgacgcttcgtatctcaaggagttgatacaaaaagcgaacgcggaaaccgaggcgtcgctgttggacccgcgagacgagggaaccgcggaccagtggatcccgcggaacgcctccatggtgcggctcacagggaagcaccccttcaacgcggaggccccactcccccgccttatgcaccacggcttcatcaccccatcgccactccactacgtccgcaaccacggtccagttcccaagatcaaatgggatgaatggaccgtggaagtgactgggttggtcaaacgatcaacccacttcaccatggagaaacttatgagggaattccctcaccgcgagtttcccgccacactagtgtgtgcgggaaatcggcgcaaagagcataacatggtgaagcagagcatcggcttcaactggggtgccgccggggcctccacctccgtgtggcggggggtcccgctgcgtcatgtgctcaaacgctgtgggatcctcgcccgtatgaagggcgccatgtacgtgtccttcgagggcgccgaggatctccccgggggtggtgggtccaagtatggaaccagcgtcaagagggagatggccatggatccgtcgcgtgacatcattctcgcgttcatgcaaaacggcgagccgttggcgccggatcatggatttcccgtgcgcatgattattccggggttcatcggtggaagaatggtgaaatggctcaaacgcattgtcgttactgagcatgagtgcgatagtcattatcattataaggataatagagtactcccttcccatgttgatgcagaacttgctaatgacgaaggttggtggtacaagccagaatacatcatcaacgagttgaatataaactcagtgataactacgccttgtcacgaggagatcttgcccatcaactcatggactacacagaggccttacgtaatcagaggctatgcatattccggtggtggaaggaaagtgacacgtgtggaggtaacacttgatggtggagaaacatggcacgtgtgcacattggaccatactgagaaacctaacaaatatggcaagtattggtgctggtgcttctggtctttggaggtggaggtgcttgacctacttggggccaaggagattgcggttcgagcttgggatgaaggtctcaacactcagcctgaacacctcatttggaatgttatgggcatgatgaataactgctggttcagagtgaaaacaaatgtgtgcaagccccacaagggtgagattggcatagtgtttgagcatccaacccaaccaggcaaccaacccggtggctggatggcaaaggaaaaacatttggaaaaatcacaaaagccaaaaccaaccctaaaaaagagtgtctccacaccattcatgaacacttcctcaaaaatgttctccatctccgaagtgaaaaaacattccaaccctgactctgcttggatcattgtccacggtcacgtctatgattgcacccgcttcctcaaagatcaccccggtggtactgacagcatcctcatcaatgctggcaccgactgcaccgaagagtttgacgccatccattctgacaaagcaaaaaaattgcttgaagattaccgaatcggggagctcatcaccactggctacacctcagactcatcgcccaacaactccgtgcatggcaattccgaattcactcatttggcccctattaaggaaactacaacaccaccatcacgtagtgtggctctcaacccacgcgagaaaatcccatgcaagctcgtgtcaaagacctccatttctcatgacgcgaggctattccgttttgcattaccctcagaggaccaactcttgggattatccgtggggaaacacattttcttgtgtgccaccatcgacggcaagctatgcatgcgagcctacactccaacaagtagtgtggatgaagtgggtttctttgatctactcatcaaggtgtacttcaaaggtgtgcatcccaagtttccaaatggaggactcatgtctcaacatttggactctctacccattggatccatgttggacgtgaagggcccattaggtcacatagaatacaccggaagaggcaacttcatggttcatggaaaaccaagattcgccaagaggttggccatgttggctggtggaactgggatcacgcccatttaccaagtggcgcaagcgattttgaaggacccagaggaccacaccgaaatgcatgtagtgtatgcgaatcgcacagaggatgatatattactgagggaggagttggatgagtgggcgaagatacataatgaccggttcaagctatggtacgtggtggaaatcgcaaaggaagggtggaaatacagtgtagggttcatcacagagagtatcacgagggagcaccttccaaaagcgtcgagggattccttggctttgacatgtgggccaccacccatgattcagtttgcagtgcagcctaatttggagaaaatgggatatgatatcaagaacgatttgcttgtgttttagggcatggagaagtagctagattgctagattgtgttgtgtattgtatttgtttgtgtatcgggtgttattggagtattaatgtttgtttcattctttataagggtaaaaaaagaagtgaaaaattgtatatgaaccgagattgttgggaagtaactcttcatcccttctcacgctttaatgtagacaggtacgtcaagatttttttactactttagtgtaaataaattaatgttatatatgcctatctactctcttcaattc

SEQ ID NO: 9125 - DNA, 481 bp, Glycine max
  Clone ID: 700834391_FLI
aaggattaacatgacatgtgtcaatcaagaaactggagcggttgagccacatttgtttcctatgcttgctaattggaaacgtgagcatacaatggaagacgttttgattcaattgaagagagaaatgatgtctcctcaaaataggaagctaactcagcctcctgaaggcaatgaagaagccagggttgatcaaaagggcctggtggtgagatgttgtattgtgtaattccatggagaatccaagcataataataataataataataataataataataatgtaaataactatattcaatagatgatccaagttcacggacttatgcataatgcatttataatgtaattatggaccacttccgtatgttacctggagcaatccaagatatagtagttactatatgtcttatgaaatttttattgtactgaagctgtttttacagcggactctaatttcgaattttaagatcctttttaactg

SEQ ID NO: 9126 - DNA, 1809 bp, Glycine max
  Clone ID: 700834406_FLI
gagaaatggagcttggatcttatgcagaaactgcttccacgccatattgagataatagaaatgattgacgaggagctggttcggaccataattgcagaatatggcacagaaaattcagacttgctggagaaaaaattgaaggaaatgagaatactagaaaatgtcgaattgactgcagaatttgcagatatactggttaagtccaaagaggccattgatattcctagtgaggagcagcaaagttctgaacaagcagaagcagaagacgaaaaagatgatgatgaagtggaagcagttgctaaaaagaatggaacagatgaaagttccattgaggatgagaaagaagagttgcctgagccagtaccagaaccaccaaaattggttcgtatggcaaatttgtgtgttgtgggtggtcatgcagtgaatggggttgcagagatacatagtgaaattgtaaaagatgatgttttcaatgcattttataagttgtggcccgagaagttccaaaacaaaacaaatggtgtgacaccaaggagatggatcaggttctgcaatccagatctgagtaaaataataaccgagtggataggtactgaggattgggtcctaaatactggaaaattggccgagctacggaagtttgtagacaatgaggatctacaagtgcagtggagggaagcaaagaggagtaacaaagttaaagttgcagcattcatcagagaaaaaacagggtattctgtcagtcctgatgcaatgtttgacatccaggtcaagagaatccatgaatataagcgacaattaatgaacatatttggaattgtttaccgatacaagaagatgaaagaaatgagtgcggcagaaagggaagcaaattttgttcctagagtttgtatatttgggggaaaagcatttgctacatatgtgcaagccaagagaattgtgaaatttattacagatgttggggctacagtaaatcatgaccctgaaataggagatctacttaaggttgtttttgtccctgattataatgtcagtgttgccgagatgcttattccagcaagtgaattgtcacaacatatcagtactgctggaatggaggcaagtggaactagcaatatgaaatttgcaatgaatggctgcatattgattggaactttagatggggccaatgttgaaataagggaagaggttggtgcagacaacttcttcctctttggtgccaaggctcatgaaattgctgggctgaggaaagaaagagcagagggaaagtttgtgcctgatccacgatttgaagaagttaaagaatttgtcagaagtggcgtttttggatcttacaactatgacgaattgatgggatccttagaaggaaatgaaggttttggtcgagcagattatttccttgtagggaaagacttccccagctacatagaatgccaagagaaggttgatgaagcataccgtgaccaaactaaatggacaagaatgtcaatattgaacacagcaggttcatacaagtttagcagtgaccgcacgattcatgaatatgcccgagagatatggaacattgaaccagtccaattgccatagaggagtatagagaatcggtgccacgtggttgtgatgatcactgcatagcttaattcctcgtagcagagaataaaatataacttcgcgtagagacgcgctttaagggtgcgctcatagtcaaaataagcttgcagttctgtaatatatatgttttatgggtacttcgtcggtgtaaatcaaacctttgtcttataataataaatatcaaattgttttggcttc

SEQ ID NO: 9127 - DNA, 1287 bp, Glycine max
  Clone ID: 700834445_FLI
attgactccagtttctctgaggattgctgcacttgagacattggaatctcttattactgtggctggtgctttaaaatctgaaccatggagatcaaaagttgatagcctcttgttagtcacagcaatggactcttttaaggaaggatcagttagtgaagaaagaagtgtgtttcaacaaaaggaacctgctgcaactaccacagagttgcagcttgctgcattgcgtgctttattggtatctttactttcatttgctcgggtacgacctccatatttagcccagggtcttgaacttttccgtagagggaggcaacaaactggaactaaactagctgagttctgtgcccatgctctgttaaccttggaggtgcttatacatcctagggcacttccaatggtagattatgcctatgcaaataacagttcctttggtgaagctcatagtaatctccaacatggatattttggttggagccacaatacgccatatggcttaccgcaagttcctcctgactatgatgatgatctgtgtgcaagatggcttgaaaatgacaatgaagttggtgaatcattggataaaaatacaaaatacacccaggagccttctgaagcttgcagagctagtgatcctgaagtgcttttcgtgcatgtatcttccgacaccaatatacaggagaggattgagatggtgtctgagactgccacttgtgcagatgttgagatgaaaactgttgaggatgaaaccaatttcaagtcagatcaaccaggagaatctgtggtgcaatttcaagaaactgtttcttgcaccacaaacatccccgtggttgaaactcgcggtgatgtagctgatgataaagtgtctgagaagattgtttcagacaactccattcctcataatgaagccagtcatatggaatcaagacatggaagctcggttaataaagacttcaaattctcttctccgagtagtagtttatggcatagaacctcaggctctaatatttttgaggaatttgcttttcaattggaacatgataaggcactggcggatgaagatgattttcctgatattgtggatggagacccagattctgatactgaataaaggggagattttgtaatttatttttatccatagaagcataaggaacacttgtagttcaattttattctcttttttctatctgtctttcctaaattaaacatttgaagctttgactttgttttcaaaaaaatgaaaatgatagtcaagtagttttggaaatgatattcaagcttcatatagtc

SEQ ID NO: 9128 - DNA, 2194 bp, Glycine max
  Clone ID: 700834446_FLI
caatggctgagaaaatgaaaactcactactttcctctcttttcattctttttcttcttcttcttaatctccatcaacgccaaacttgatctctacccttcagactacaaggcactcctcactctgcagaaggacctccgagtcaacggtcaactcgcggcggcaactgaggcgtgcgaaacggagggcgtgctctgcgagcggaggcggctctccggcaaggaaacctacgcgctccgaatcaccagactcgtcttcaaatcgaacaacctaaatggtgttttgtctccttccatcggacgcctcacggagctcaaggaactctctctctccgacaaccaactcgttgaccgagtccctccccaaatcgttgactgccgaaagctcgaaatcctcgacctcgccaacaacatcttctccggcgaggtcccctccgagctctcctccctcacgcgcctccgcgtgctggacctctccaccaacaggctctccggcaaccttaattttctcaaatactttcccaatttggaaactctttcagtagccgacaacctcttcaccggaagagtccctccctcggtccgctccttccggaacctacgacactttaatttctccggcaaccgcttcctcgacccctctctacaatcatcctcaccagacacaattctctctagacgttttctatcagaagacggtgatggtgatgttcctgcacctgctcctgcacctaataactcacagaagaagaaatccaatgcttctactcatgctgctgctgctgcacctggtcctgcacctaaccataccaataagcacaagcacagtaagagaaaactcttggggtggattctggggtttgtagcaggggcactggggggaaccttatcaggattcgtgttttctttgatgttcaagctcgctctcgcgttgatcaaaggaagaggaaggaaagcggggcctgatatctatagtccattgatcaagaaagcagaagatttggccttcttggaaaaagaagaaggaatcgcgtcgttggagatcatcgggcgcggtggctgtggagaggtctacaaggcagagttaccgggaagcaacgggaaaatgatcgctataaagaaaatcgttcagcctccgaaagacggtgctgagttagcagaagaggacagcaaggttctgaacaagaaaatgaggcaaattcgatcggagatcaacaccgtgggacaaattagacacagaaaccttctgcctctgctggcgcacgtgtctagaccggaatgtcactaccttgtgtacgagttcatgaaaaatggaagcttgcaagacactctgagcaaggtcgagaggggcgagagcgagttggattggttgtcaaggcacaagatctccctcggtgtggctgctgggcttgaataccttcacatgaatcacaacccacgaatcattcatagagatctcaagcctgctaatatccttcttgacgatgacatggaggcaagaattgctgattttggactcgccaaggctatgcccgattacaagactcacataacaacctccaatgtggctggcactgtgggctatattgctcctgagtatcatcagatactcaagttcactgataagtgtgatatttacagttatggagtgattcttggtgtattggtcattggtaagcttccttctgatgatttctttcagcacactgaagagatgagtttggtcaagtggatgaggaagactttaagctccgagaatcccaaggaggcaattaattcaaagctgctggggaatgggtatgaggagcagatgcttcttgttttgaagattgcatgcttttgcactatggatgatcccaaggagaggcctaacagtaaggatgttaggtgcatgctgtcacagatcaaacactgaatctgctgtatgtttaagtatgtgaaatattgtgtaccatatttgtgccaaagtgtgcttgtttaagaatatagttgataactagaggatcaatgttggttcatagggtaaataatgaaccgatgtaatcttgtttcctttatcacggattgctgaatttctttggaaaaagaaaaattcagcactgcgatgatctatgtataatctagtctgtcacaactagtttccactttacatgtttatggatacaccctgaaaataaaatagttttacgttgtttc

SEQ ID NO: 9129 - DNA, 2425 bp, Glycine max
  Clone ID: 700834464_FLI
cccgctccaaacgagatccctcaaaacgacagggtccgaaagcgcgacccgaggctcacatgctccaacttcctcgctggtcgggtcccctgcgcctgccccgaactcgacgcgatactcgaggacgagggtttgcctggcaagaaacgcgcccgcaccgcgcgtgcatctgcatccgctcgctgccaggtccctgcctgcgaggtcgatatctcagagctgaaagggtatcaccgccgacacagggtttgcttgcgctgcgctaatgccgccaccgttatgctcaacggcgaggccaagagatactgccaacagtgtggaaagtttcacgttttgtcggatttcgacgagggtaaacggagctgtagaaggaagttagagcggcataacaccagaaggagaagaaagcctacggcggattctggaggggctactcatagtgaactacttcaacctgttgccgaaaacgaggaaaacaattatgatgtggaagctggaaaagattgttcgaatttgagtaccgatatcaacgacgttggagtgtctctggatcttgaagatgaaccggctcccattccgagctcggctcctgaagcccagaatattaatagtgatagtgttgtgtctttggctgtttctggtgaaacgcgagtgaatagtgggaacacttccaattcgccttcttattgtgacaataagagtgcctattcgtctatgtgccaaacaggtcggatttcttttaagctttatgattggaatcctgcggaatttcctagaaggctacgacatcaaatattccaatggttggcaagtatgcctgtggagttggagggatatatccgccctgggtgtacgatcctgacaatttttattgcaatgcctaacatcatgtggataaatttactgaaagaccctttggagtatgtgcatgatattgttgctcctggaaagatgctatctggaagaggcactgcactagttcatctgaatgacatgatcttccgtgttatgaaagatggaacttctgtgacgaatgtcaaggtaaacatgcatgcaccgaagcttcactatgttcatcccacatactttgaggctggcaaacctatggagtttgttgcttgtggaagtaacttactgcagcctaagtttcggcttcttgtatcgttttctggaaagtatctgaaatgtgagtattgtgtgccttctccacatagctggactgaagacaacatttcttgtgcttttgacaatcagttatacaagatatatgttcctcatacagaggaaagtctctttgggcctgcatttattgaggtggagaatgaatctggtttatcaaactttattcctgtactcattggggataaaaaaatttgtactgaaatgaagacactgcaacaaaaattagatgtatctctcctttctaaacaatttcggtctgcatctggtggttctatctgtagctcatgcgaaacttttgcacttagtcacacatcatcatcagacttacttgtagatatagcatggttgcttaaggacaccacttcagaaaattttgacagagtgatgacagcttcacaaattcaaagatattgccatttgttggactttctgatatgcaatgattcaacaatcattttgggaaaaatattaccaaatttgataatcttgacagaaagcatgaaatccaatgttgtaattaataggacaagtgatgttgacataatgcaactcctgaatcacatacataatgctagaaatgccgtatatcagaaacatccgaaaagtgaaagtataattgtgcactctgaaatgaaaggctttatacttgctcagggctgctcccaagataacaagctatcagttgcaattaacagccagggtatccagtcgagagcagatgagaagtggggagtactgaaagtgaaaagtccaacttctaatgagaaaatggaaagaataccacttttgaagagggatattataatgagtatggaagagttgcctgaaagatacgggcgtcgatgtttgggcaggggattcttgacctttcggccagctatttttgtgttggtttcggttgctgtatgtcttggggtatgtgttgccgtccttcatcctggtagggttagtgagttagcagtatccgttagaaggtgtttgtttaactattagtatttttttgtacttgtcttcgagttggtacatatttgttgtaacactaaataaactggtgttattgggatgattaggtagtttattacattggaaagcttaatccaaggttgctaatttgtgcattaccaattttatcggatgtccagagggacttgcagttgcaggtgctgtgactgcaacgagtctgatcattaatagttaaaatttgtaattcatgttaccattattacaattgggtgtttatgct

SEQ ID NO: 9130 - DNA, 1633 bp, Glycine max
  Clone ID: 700834515_FLI
tcatctggcgcgactaccgcggcgatgtctccgccctcgacgccgaacgcttcttcaccaaactcatcgaaaaacaggccgatccgcaagctcaagatccggttgtgcacgacaacggcgtgacctacatgttcatccaacacagcaacgtgtacctcatgatagccaccagacagaactgcaatgccgccagcctcctcttcttcctgcaccgaatcgtcgatgtgttcaagcactactttgaagaattggaagaggaatcgctcagggacaacttcgtcgtcgtgtatgagctacttgatgagattatggactttggctaccctcagtacactgaggcgcagattcttagtgagtttattaagaccgatgcttatagaatggaagttacgcagagacctcctatggctgtgactaatgctgtgtcgtggcgcagcgaagggataaactataagaaaaatgaggttttcttggatgtggtggagagtgttaatatacttgtcaatagcaatggacaaataattagatctgacgtcgttggggcgttgaagatgagaacgtatttgagtggtatgcctgagtgcaaacttggcttaaatgatagagtattgttagaggcacaaggtagaacaaccaagggaaaggctattgacttggaagacataaaatttcatcagtgcgtgcgtttggctcgatttgaaaacgatcgaacaatttcctttataccacctgatgggtcatttgatttgatgacatataggctcagtacacaggttaagcctttaatttgggtggaagcaagtgttgaaaagcattcaaagagtcggattgagattatggtaaaagctaggagtcaatttaaggaacgtagcactgccacaaacgttgagattgagttgcctgtgcctgttgatgcaaccaatcctaatgttcgaacttcaatgggatctgcatcatatgcacctgaaaaagatgcattaatctggaaaattagatccttccctggaggcaaggagtatatgttaagagcagagtttcgtcttcccagtataacggatgaggaagcaactcctgagagaaaagctcctatacgtgtaaaatttgaaataccatattttactgtatctggaatacaggtaagatatttgaaggttattgagaaaagtgggtatcaggctcttccatgggtgagatacataacgatggccggagagtatgaattaaggcttatttaagaacttgtatttttctttggtgctggaattccaccaaataacagggtcagcttccatgatcaatggttttaaagtggtggatgggagagggactcttgagagtgaaattagtatttggcctgatcatatctcctctggcgtcatgatagttttggcaacagatcgtaagttgctcattgtccataaagttcataacttcaagtctggaattggcaagtataaggttgtatcttctgtgtaagtccttttgttcgaatctgtttgttggcaaaatgtctgattttatttttcctcttgttttctattttatttacgatgatctgtcaatattttcccattgtcttcaatttgatttatttgtaagagaattattagcttttgtattactaagattgaat

SEQ ID NO: 9131 - DNA, 1956 bp, Glycine max
  Clone ID: 700834608_FLI
gaaaggtccagactcttctagacattaaatacctctccgaaggaagccaaccgaccaaacaacaataaaatgaagaaagaaaaaactctgcattcaattcgattgattcacaaattgcaactccttctcggcttttcctaatcagcacgaacacaacacaaacacaaacacagagagagacatggattttgaactgagaagagcgagagagaagctagagaaagagcagagggagaggaaggaaagagcaagactgaaacttcagaaggaaaagaaggccaaagaagaggctcagaagcaaaaggaagccatcgaagctgttcaaagatctcgtcgtattgatgccgctcaagctcaactcaaggctgcccaacagatgcaagaaaacctacttgctggcggaggaatagtgttttaccgactactagaggctttttttatgaagtcggtggagataagatcaagctacctccttcttgcttcgcagaactgtctgagcagggtacttttgataagagacagggacccttatactttcagttgtcgttagttcatgaagaaagcacttcaagcatccaaactactgataaagtgaaacaggggaggaccacccattctggagttttagaattcactgctgatgaaggttcagtgggtcttcctcctcatgtatggaataatttgttttctgaaggcactccaaaacctcccttagttgaaatccgctatgtttggcttccaaaagggacatatgcaaaacttcaacctgaaaatgtaggattttccgacttgcccaatcataaggctatcctcgaaacatgtcttcgtcagcatgctactctttctcaaggtgacattttaactgtaaactatggagaacttgcttatgaattaagggtccttgagttaaaaccttcttcaagtgtatctgttttagaaacggatattgaagttgacatagttgatcctgatacatcttcacaaaagacagatgggcatgttttaatgccacttgtattcggaatgccacaaattggaacaatagaagaaggaaagtttgtctattacaaattttccatagacaatgtcatttgggagcaactctctcctgggaattcttgtgttgaagtaaaattagaatcagagacagatgggggggacactgatattttcatctccagacatcctgtcatatttcctacacgacaccggcatgagtggtcttctcatgatattggctcaaagactttgattcttagctctaatgataaaaacatgggtgcagggacttacagcattggtgtatatggcttcaagggaattactaagtataaaatatcagtcatggtccaggataatttcaaccaaaatgttggtcagcaagcatcatcttccatgtcatctatggaactggataccgaacaatgtaggaactgcaagcattatatacccggcaggactattgcactacatgaagcttactgtagcaggcacaatgttgtctgtcagcatgcaggctgtggagtggttcttaggattgaggagtccaagaaccacattcactgtgacaggtgtggtcaggctttccagcaggcagaattagaaaagcacatgaaagtttttcacgagccacttcactgcccttgtggaataatccttgagaaagagcaaatggtggagcatcaagcttcagtttgccccctgcgtctaattacatgccggttctgtggtgatatggttcaagctgggaggtctgccatggacgtccgtgacagattaagaggattgtctgagcatgagagtatttgtggttctaggactgccccatgtgattcctgtgggcgttctgtgatgttgaaggacatggatattcaccagattgctgttcatcaaagtggctaattctgatatttttcatcataacagtaacttgtaaaggattgcatctagggtaac

SEQ ID NO: 9132 - DNA, 1439 bp, Glycine max
  Clone ID: 700834671_FLI
aaacaaacctcacaaggcaaatgacttgagatgggaagctatccaagcagttcgaagtagagatggggtgttgggtttaggtcactttagattactgaagaggctgggttgtggggatattggcagtgtttacctctctgagttgagtggaactaaatgttactttgcaatgaaggtaatggacaaagggtctctagcaagtcgtaaaaagctacttcgtgctcagacagaacgagaaattctgcagtctcttgatcacccttttctcccaactttgtacacccattttgagacagaaaaattctcatgcttggttatggaattctgcccaggtggtgacctccatactcttaggcagaagcaaccagggaagcattttcctgagcaggcagtaaaattttatgtggcagaggtcctactggctttggagtatcttcacatgcttgggattgtctaccgtgaccttaagccagaaaatgtccttgttcgggatgacggacatattatgctgtctgactttgacctctccctccgatgtgctgttagtccgacccttgttaaaacctcatccacggattccgagcctttaagaaaattctgcttactgtgtccaacctgcatgtattgagcccccttcctgcatccagccatcctgtgttgctcctactacgtgcttttcaccccggctcttctctagcaaatcaaagaaagaccggaagccgaaaactgaaattggtaaccaagtgagtccgttacctgagctcattgcagagcctacggatgctcggtccatgtcatttgttggaactcacgagtacttggcaccggagatcattaagggtgaaggtcacgggagtgcggttgattggtggactttcgggatctttctatacgagctgttgttcggtaaaacacctttcaagggatccggtaaccgagctacgttgtttaacgtggtcggtcagccactgcgatttccagaagcacccgttgtgagttttgcagcaagggatcttataagagggttgcttgtaaaggaacctcagcacagattggcttacaaaagaggcgctaccgagatcaagcaacaccctttttttgaaggtgtgaattgggcattgatcagatgtgccaccccacccgagatccccaaggctgtagagtttgagaagataccctcaccagcttcatcaagtggtggtgaaaaggctgctaaccatatctcaatagctaatcagaaaggttctgataattatctggagtttgatttcttctagagagagagagagagagagggtggagacaatatattgattgcaaatggtttctgttaaagagggggaggaactgtttttcaatgtttcaggaacagatatgatatgatgaggaattgtatgtttgtttttgttggctaatttacagtttcaaatttgtatggc

SEQ ID NO: 9133 - DNA, 1750 bp, Glycine max
  Clone ID: 700834677_FLI
gttagtacggacacaaactaagaagccatactcacatcacacaacacaaccatcctcaagccaacaacaccttctcagatcttacaatgatatttcaatcgtgttttatgatgactgcaactctgctattatttgttatagcacaatgtgttgtgggagttaattcactttcacaagctgataagataagcactttgccagggcagccaccagtcaaattccagcaatatgctggttacattacagtggacgacaagcagaagagagccttgttttactactttgttgaagctgaagtggaaccagcttcaaagccactagttctatggttaaatggagggcctggttgttcttctgttggagctggagcttttgttgagcatggccctttcaaaccaagtgaaaatggtcttttgaagaatgaacatagttggaacaaagaggcaaatatgttgtacttggaatcaccagctggtgttggtttctcctactctgccaataaatctttctatgactttgtgaatgatgaaatgacagcaagggacaatcttgttttcctacagcgttggttcactaaattcccagagttaaaaaacaatgatttctttatcacaggggagagctatgcaggtcattatgtaccccaacttgcacaactcattgttcaaaccaagaccaagttcaatctcaaggggatagcaatagggaatcctcttgtcgaattcaacacggatttcaactccagagctgagtttttctggtcccatggactaatatcagattcaacttacgaaatcttcaccaaagtatgcaactattcccaaattaggagacaacatcagggtgggacgcttacccccatttgttccggagtaaataggctagtgtcaacggaagttagtaggtatattgatacatatgatgttacacttgatgtgtgtctttcatcagcagatcaacaggcttatgtgccgaatcaactgactcaactgcaagagggtgccaagatagatgtttgtgtggaagatgaaactatcgcatatttgaataggaaagatgtgcaggaagctctccatgctaagctcgtagggatcacgtcatggtcaacttgcagcgatgttcttaaatatgacatgcagaatctagagattccaaccatttctattctaggtgcacttgctaagtcaggtatcagggttctggtatacagtggagatcaagattcagtcatcccattaactgggacaagatccctggtaaatggattagccaaggactttggactcaacacaacagtgtcctatagagcatggtttgagggaagacaggtggccggttggacacaagtatatggagacatcttatcatttgccaccataagaggagctgctcatgaagctccattttcccaaccagagaggtcactggtgctgctaaaagcatttttggaaggaaagccacttccagaaccattcctttaaaaatggaaatagataacagaggggttgttcctagcacagtaaaaatacacccattcaaacccctcacataaactgattattcctaatggatcacttttcaattgttataagcattccttctatctttccctacattattttttttttttctttttgagcactgagtgaatgttacatgtactggcattgacattattatatagttcaccaaaacaaagtgatcttccaaatgtacttactaataactaattcgttggttctgtgcctcg

SEQ ID NO: 9134 - DNA, 426 bp, Glycine max
  Clone ID: 700834730_FLI
aaaggttgcccttcccattgatctcaatgacaaagatgttcaagaatgctaaaactctaactagatagattatgcagagttgggactcgtatatgaatgattgaagagagatgatgaaagtattataactgaagagaccatagcgtctagcagcctactgcaacaattggactgctcttagactggtcgattttagtatcttttaactgtttgggcaaatttcttttgtttaggatagtggagtgtcctgcttacctgatcaattttgtaatctaatttcatccttcgggaatttcctgttactgaagttttaaggttttatgagttgaaatgtagagccaggagcagccattttccgaggaatatatgatatgtaaattcatggcgctgcctcttgttaaatgttaatagcttttgtgcaaagcc

SEQ ID NO: 9135 - DNA, 1155 bp, Glycine max
  Clone ID: 700834737_FLI
gctatttccttacaaagaatggtgggtagtacctgccaaagttgccttcgatcaaactgcatggtctgcactttggaacagcatatattatactgttgttgcattactgcgtcttgatcctcctatgagtattttaaatgaattgaaggcaacgtttttccccatgttgacggccggatggaagctatggccatttgcccatctcattacttatggtgtgataccggttgaacaaagactcctctgggtggataccattgagcttatttgggtgaccatactttccacgtatgtctatctggatttattttgaaacacatattagaatttgaacattaataacttcatagttggatgaaattaagattgggtgaccatactatgcttcttgaatttccatttgattctgttgcaaatttggatgaaattaagattggcctttacgtttcattttgtcttttccgtttgcttttgacttttgagagataaattctatatagaagtttccctctagtagaaattttgcataatgaaaagctaaacctgcctgctgcacattgttctctttggaaatacataagatggctctaacattatattgttttgagaatattttaatttattcttgttttttttttctggaggaagggaagggggggagattttgtattactgttaattagcaaattcacctgattctgtcaatgcttgttcagggaatgccgaggctgattaattttaattttagcagtctaaaacaataaaacatttccagcttctcttgcatgattattcatgtttcaaaattttgtattggttctaacgtaggcttttgtgatcattagattttcaaatgaaaaatcagaagcaagaaactctcagtctatggtgccttcagaggtgaaatccaccacatatgttcatcctcctgaggagtaacgagtggagatatgaccagaagcagtgggagaaaaatgactttgctaaatcaaattttgtccttgatatggacatagatttttgatgcggaatgtgaaaaagctaattatatatacgttgcatcccgcggaaattcatgtatgttaggtaacatcaactttccagtaaacagtacacataatgtaattaaatttaatgagtaaataatttatgtcc

SEQ ID NO: 9136 - DNA, 1359 bp, Glycine max
  Clone ID: 700834748_FLI
agaccattgctaggcgcttagggcagcaatcgctgaggccatcgacgtcgctcaagtccatctatccaatttccgatcaccattatggaatggatcacgagcgttacgtttctaccctcgccaccaagggagttggtcacctcgttcgtaagggcactggtggacgatcctccgtcagtggcattattgctacagtatttggggcaactggattcttaggtcgttatgttgtccaacaacttgctaaaatgggatctcaagtcctagttcctttccgaggctctgaagataatccccgacatctcaaattgatgggggatttgggacagattgtacccatgaaatacaatccaagggatgaaagttcagtaaaagctgtgatggctaaggccaatgttgttatcaaccttattggaagggattatgagacaagaaactacagctttgaagaagtgcactatcacatggctgagcaactagcaaagatttccaaagagcatggtggtatcctgagatttattcaagtttcttgtttaggtgcatctccttcatctccatctaggatgctcagaactaaatcagctgctgaggaaatgattttaagggaactacctgaggccacaatcttgaaacctgctgtaatgattggtacagaggatcggattttgaatccatgggctcattttgctaaaaagtatggctttcttccgttgtttggagatgggagcacaaagatccaacctgtttatgttattgatgttgctgctgcactcacttcactcttgaaggatgatggcactagcatgggaaaaatttatgaactgggtggtccagagatctttactgtgcatgaattggcagacgttatgtttgatacaattcgagaatggcctcgatatgtgaaggtgcctttccccattgcaaaggcattggcaacaccaagagaaatattactaaacaaggtcccctttccactacctgttcctgagatattaaatctggataagatccaggctttgactacagataccgttgtttcagaaaatgctttgactttcaatgatcttggaattgttcctcacaagctgaagggataccctattgagtttcttatctcatataggaaaggaggcccacaatttggttctactatcagtgaaagggtcactccagattcttggccgtaagattctttggatgtttgatcctgaatcatttttctgtcttgcttgtactaccaccatttaatttcactatttaaaaaaatctgaaatgcttttatatcttcctttcataatctgtagaatgtgtgatcatggttgatgatgataataaaatccagatacttgttgatttccg

SEQ ID NO: 9137 - DNA, 1507 bp, Glycine max
  Clone ID: 700834772_FLI
ggttggagcatccatttgtggatgtgaaggaataggaggttgttttggggtgaaatgagggatgctatcaaggttgatggactttctgactgcctgctggcggcgaagatccttctccgacggcaagggtggttccgaggttacggggcggaaggaagggctgctgtggtacaaggatgcggggcagcacttgtttggtgaatactcaatggctgttgtccaggccaacaacctgctcgaggaccagagccagattgagtctggtcctctcagcctgcttgacactggcccttatgggacctttgttggtgtatatgatggacacggtggacccgagacgtcgcgctacgtctgtgatcatctcttccaacatctaaaacgatttgcatctgagcagaagtccatgtctgaggaggttattcggaaggcataccaagccacagaagaaggttttttgtcagtggttaccaaacagtggcccatgaatccccaaattgctgctgtgggatcttgttgtttggttggtgtgatttgtggtggtatcctctacattgctaaccttggcgattcccgtgctgtgcttggccgggttgtcagagcaaccggggaggttttggcgatccagctttcgtcagagcataatgtggccagagaatctgtgagacaagagatgcattctttgcatccggatgactcaaaaattgtggttctaaagcacaatgtatggcgggtgaagggtctgatacagatttctagatccattggcgatgtttacctaaaaaaggctgaattcaacaaggaaccattgtatgctaagttccgtgtgcgggaaggttttaagaggcccattttgagctctgacccatcaatttccgttcatgaaattcaacagcatgatcaatttctcatatttgcttctgatggtctttgggaacaccttagcaatcaggatgctgttgatatagttcaaaacaacccacacaatggaattgctcggaggctcatcaaagctgctttgcaagaagcagcaaaaaaagagagagatgaggtactctgatttgaagaaaattgaccgtggtgtccgccggcatttccacgatgacatcacagttgtagttgtatttcttgactccaatcttgtcagcagagccagctcggtaagaggtcctcctttatcggtgagaggaggtggtattcccctaccttctagaactttggctccctgtgctgcacctatggaaacttagttcaggttgatgaagctggctgtataatctgttatgcttgtatttagtgttgtacacttagcagacattgagctctggtgatcccccagattgtatatccaatttaacagattgaaaaaatgtccggtccattagtacaatgtaacaagagacttggggtatgtagcttgcgtgagtataaagcatcatggaagtagagtaccaaagccaaaggtgacctttaatatttgatcattaagaggcaatcatgtttgcattgc

SEQ ID NO: 9138 - DNA, 1515 bp, Glycine max; identical to SEQ ID NO: 8286
  Clone ID: 700834821_FLI

SEQ ID NO: 9139 - DNA, 1063 bp, Glycine max
  Clone ID: 700834856_FLI
cacacacaaacccgtccctcacactctccaaaccctagcggcactacacactagttctatcgctatctccccaagatgtcgagcgccgatcccgagcacagagaagaggaggaggcacccgccgttggcgacgacgaggacaccggagctcacgtcgctccaatcgtcaagctcgaggaggttgctgtcaccaccggcgaggaggacgaagatgcaatcctggatctcaaatcgaagctttaccggttcgacaaggacgggaaccagtggaaggagcgtggcgccggcactgtgaagttcctgaagcataaggcttccggcaaggttaggcttctcatgaggcaatccaagacgctcaagatctgcgctaatcatctcattttgcctacgatgagtgtgcaagagcacgctgggaacgagaaatcctgcgtttggcatgctagggattttgctgatggtgaactcaaggacgagctcttctgcatccgttttccttctattgaaaattgcaaaagcttcatggaaacattccaagaagttgctgaaacacaaaaggcagaggatgagaaggaatcatctgatgcagctggtcttattgagaaattaagtgttgaagagaaggctgatgcagagaagaaagatgaagagaagtctgaggacaaaactgtggagaaagaatctgcatcaggaaaggaaagcaaggcagttgaagagcctgcgtcctcagcttgagtatttcttattcatattctatacttggctatctgacaaggttaggtggttgatgtttttgccgcccatatcttgggatattctcatacttgatggttgccggattgtgtcactgaattgagctgtttgtgtcctcttgagtttttgtcagcttgcaaagttagggttgggtttgaattttgaggcttgaatggttgagctttcggggtctgggagtctattattattgttattttcattctacatatgtatttgttgcgagtaatgggtcattttggttgggagggtgcagttcagaaatagtaaaaattatagacgaaggttttggtac

SEQ ID NO: 9140 - DNA, 2439 bp, Glycine max
  Clone ID: 700834861_FLI
gtgcagcctggtaatacgctgttatgcacgagggttaaggcccaattaaatgaggtaaacactctcttcccttcacttctacattatgtctttcgtatctaagtttgttcttaaatgtgaatttggtgaagagggcaacttagagggaaaattgtggatttataatcattgattggaaaattaacaattgagactttgatacatttggactctgtttggataaacttcttcatacgtacttatagagaagaaaatgaacttagcttatcctgtaagctaaaatcaactctgcaatctaatttctccaaaacctgagatgcataagttgattttagtttaatccattttacctttttaatttcttcctcaagtgtttttgaagaagttcatccaaacatcactagaatgtgtaaacttgttaaaatcttctcctttgacacacatattggtctcatctttttggcttcaacaaggttgcccttgatagttcctccaatgctacttctcctcctatgaaagccaaatcaaaggaggaaccacccgcaaagcctttagcagaaccatcttcttcagtgttggcaactcaagaatcggtctctcagtttattactcaagttgcaagtcttgtcaagtaagcagatgcttaagtcttgtttccttctattagtaatagcaaatgtataagctttttgctgcatgattggagtggagcaatcaactatgaaaaacttcatgtccaattttctcctgcaggcttgttgattcaagagacattgtggagttgaagctgaagcagcatgacgttgaagtaacaatcaggaaaaaggaggctatgcctcagccaccacctgctcctcaaccttctgtggtgtattcaccccctccaccagcgttgccatcatcaccaccaccaaccccctcaacaccacccgcgaaatcgccaagcagatcgccgattccaagcctctcctcgccttcacgatctctgatttactccccaaaatcaccgcagctgcaccctctctaccaatcgttctcatggacaacgacggcgccaataataacaataacaataataatatcgtggccactcttgatgagatggcgaagaaggaaccggtggctcagcgcgtgaaagagcgcgtggagcaggacgacacggccacgctgctctactcctccggcaccacggggcccagcaagggcgtggtatcgtcccaccgcaacctcatagcaatggtccagatcgtgctgggtcggttccacatggaggagaacgaaaccttcatatgcacggtccccatgtttcacatatacggcctggtcgccttcgccacggggcttctggcttccggctccaccatcgtcgtgctctccaagttcgagatgcacgacatgctctcctcgatcgagaggttccgcgccacttacctcccgctcgtgccgcccattctggtggccatgctcaacaacgccgccgctatcaagggcaagtacgatatcacgtcgctgcattcggtgctctccggtggggctccgttgagcaaggaggtcatagagggctttgtggccaagtatcccaacgtcaccatccttcagggttatggtttgacggaatccaccggcgttggggcctccaccgactccttggaggagagtcgaaggtacggcacggcggggctcttgtctccggccacccaggctatgatcgtcgatcctgaatccggccaatcgcttccggttaaccgcaccggggagctctggctcaggggtcccaccatcatgaaaggttatttcagtaacgaagaagcaaccacatcaacccttgattcaaaaggatggttaagaacaggggatatttgttacattgacaatgatggattcatatttattgtggatcggttaaaggagctcatcaaatacaagggatatcaggttcctccagcagaactagaggccttgctactgactcatcctgctattttagatgccgctgttatcccgtatccagataaggaagctgggcagcatccaatggcatacgtggtgaggaaggctggaagtagcttatcagaaactcaagttatggattttgttgcaggacaggtggctccgtacaagcggattcgaaaagtggcatttatttcctccatacccaaaaatccatctggcaaaattcttcggaaggatctcatcaaactcgcaacgtctaaactctgaatagatgagctttttcgtaatatattttttctatcggagttggacaagtgaggaaataatctttagctccttttttgctgtaattttctggcttgtttacttttgctgctttcatattatctgttctttgttcaacagtctattgtaatttgtagagaacaaagtgctgtgagtacaccttataggcaataaaattgtctctttgtaatttcttttttc

SEQ ID NO: 9141 - DNA, 1130 bp, Glycine max
  Clone ID: 700834874_FLI
caacaaatgacttcgatgaggctctacttataggcactggtggatttggaagtgtttacaagggtagctttgatggtggggcaacttctgtggccataaaacgtgccaatccaatgtcacaccaaggtgtttcagaattcgagacagagatcctttggctctcacagcttaggcatgccaacctagtctcacttttgggttactgcaatgaagatggggagatgatattggtctatgacttcatggacaatggaactctatatgaacatcttcatttgaggcagagagatcaaccccctttgtcttggattcaacgtcttgagatatgcattggagttgcaaggggtttacactacctacacactggcacaaagcacaggatcatccaccgtgacataaagacaaccaacatactcttagatcataattgggtgccaaaaatttcagattttggtttgtcaaaggcaggttacccttccatactcatcaccaatgtcaagggtagtattggttacctagatcctgagtgttttcaaagccacaagttgactgagaaatctgatctatactcacttggggtggtgttactcgagattctaagcacaaggcctgcggtaattgtaggtgaagatgatgagcatgtaaacttggccgaatgggctatgttgtgctttgagaatggcaacttggagcaaatagttgaccccaacttgaaaggaaacatagttgaagagtgctttgagttatatttaggatttgcaatgaaatgtttggctgaaagaggggtggagaggccatccattggtgaagtgctacagaaccttgttttagcgatgcatcttcagaaaaagggtggtgttgtccccgatggaaatgttcaaagaaatgataattctggtttacagggttattcagatttgacacctggggtcgagttctctgaaatcatgatgcctgttggtcggtgaatgtgatctactcgaaacaaatagccttaatgttttagatattaagacatttccatttcaaataatttgattagtaattcctattttatgaaaatgttacggaggttagatactaaccagaaatcattgtgtactgaattattagtaatttttttaattggt

SEQ ID NO: 9142 - DNA, 914 bp, Glycine max
  Clone ID: 700834896_FLI
ggcagaaatccaaggacgtggcgcagaggattctcaattcggtggactacgagatggggaggtgcacctacaccttaggtttaggagaggcgaatatcgcgggaaagaagatatttctcttcgacgcggtttgcaggccgagggagattcactcgttggagacgacgccgtttgatgattacgtggggaaccacgagaacaagacgctgcacgccacgcagcagatcgccgagtgttggacgcgctcggtgaagaagctgctggagagagtaacggagtcggtggagaaaaaggcgttggagaaggccgcgagtgagtgccatgcggtggagcggatctggaagttgttaacggaggttggggacatgaacctcatgatggatccagaggatttcttgaggctgaagaaggagttagggatgtgagaactgcgggcgaaacggtggcgttttgcttcaggtcgagggagcttgtggaggtggcgagggtgtgtaggaatctgagggagaaggtgccggagatattggaggtggaggtggaccccaagggtgggcccgggatgatggaggcggcgatgaaggtttactcggagaaagagaaagggaaggttcatgttttgcaggggatgcaggggattgaggtggcgatgaagaagttcttctacgcgtataagcaggttgtgacggttatgatggggagctccgaggccgataatgggttcaccaagatattccttgaacccacttatttccctagcttggatgctgccaagacctttcttggttattacaaccaaaattaattcttttattcacttcaattccatcttactcacacaaagaaacaaaaaggattgaattttgtaaacaaatctttgtctgtaaaaatatatttatttgacttctttttggatc

SEQ ID NO: 9143 - DNA, 1997 bp, Glycine max
  Clone ID: 700834905_FLI
aacaaattctcagggcatattagtgcaatctcatcatattccttggagagcttgtctttatcccacaacaagttacaaggcaatattccagaatcaatttttagccttctaaaccttacttacttaggtctatcatcaaacaatctaagtggatctgtcaaatttcatcgtttctccaagcttcaaaatttggaagaacttcacctttcacagaatgatcagttatcactaaatttcaaatccaatgtcaattatagtttctctaatttaaagttcttgaacttatcttctatggttttaactgaatttccaaaattatcgggaaaagtcccaattttagaatcactctctttgtccaataacaaacttaaaggtagagtgccaaattggttgcatgaaatatcgttatatgaattggacctctctcataacctattgacacaatcattgcacctattctcgtggaaccaacaactcggttaccttgatcttagttttaactcaatcactggtggcttctcttcctcaatttgcaatgcaagtgcaattgagattctcaacttgtctcacaacaagttgacaggaaccattccacaatgccttgcaaactcatcatcccttcaagttttggatctacaactgaacaagcttcatggccctttgccaagtacctttacaaagaactgtcagctcataactctggatctctatggcaaccaattattagaaggtcttttgccagaatctttgtccaattgcattaatctggaggttctaaatcttggaaacaatcaaataaaggatgtgtttccccattggcttcaaactctaccagaattggaagtattggttttgagagccaacaagttgtacggtcccattgagggttcaaagaccaagcatggattccccagtttagtcatttttgatgtctcttccaacaacttcagcggcccaataccaaatgcctacataaaaaaatttcaaggcatgatgaagaacattgttctagatgtcgatcggcaatacatggaatttatttcttttcatgaagccaactatgctgattctgtgactataacaacaaaagcaattactgtgacaatgggcagaattcgaaatgactttgtaagcattgatttatcgcaaaatagatttgaaggagagattccaaatgccattggagagcttcattcactcagaggactcaacctttcccataacagacttattggtcctattccccaatccatgggaaatttgacaaacttagaatcattggatctctcctcaaatatgctcactggtgggatacctacagaattaagcaatttgaactttcttgaagtcctaaatctttccaataaccatcttgtgggagaaatacctcaaggaaaacagttcaatactttttccaatgattcctatgagggaaactcagggttatgtggactcccactgacaatcaaatgcagcaaggaccctgaacaacattctccaacttcaactaccttgaggagagaaggaggatttggatttggttggaaaccagtggctataggatatggatgtggaatggtctttggagtgggaatgggatgttgtgtattgttaataggaaagcctcaatggcttgtgagaatggtcggaggtaaacccaataaaaaggtgaaaaggaagacaaggatgagatctaatgaaaatggtagcagaatgaattagttgatatatggcatgactggagaatgtcttgttacatacctgccatctttgaaaacaaaacttaagggcaagaactttatcacactgcattgcatgggagatctggttcaaagttttgctgtaatatgaatgtgttgaacttttgcttttttgtgtgttctgtttcgttttttatgtgtagaagagtgcgatgtattgagttgcagttttgatttatttaatacgtataactgtggcattaattggttgtataataatagatgttgtatattttt

SEQ ID NO: 9144 - DNA, 1479 bp, Glycine max
  Clone ID: 700834955_FLI
tctggatccttgaatgatgcaataaccaaatggacaaacctcaggtatttgtctcttgctcagaacaagttcagtggaaatctgcctagttggttgttcacatttaacgcaatagaaatgatggatttctcgcataacaagtttactggcttcatacctgatattaattttaagggtagcttaatatttaacaccaggaatgtcactgttaaagagccattggttgcagcaagaaaggttcaactgagagtttcggcggttgtttctgatagcaatcagctcagtttcacttatgatctttcctcaatggttggaattgatctatccagcaattcgcttcatggggaaattccaaggggcttatttggtctagctggcctagaatatctgaacttgtcatgcaactttctttacggacagcttccggggttgcagaaaatgcatagtttgaaagccttggatttgtcacataattccttgtctggacatatcccaggaaacatttctagccttcaagatctgtccattttgaatctttcctacaactgtttttctggatatgttccccagaagcaagggtatgggagatttcccggtgcatttgctggaaatccagatctgtgcatggaaacttccagtggagtatgtgatgatggaaggactcaatctgcgcaaggaagttctttcagtgaagataggatggatggcccaatttctgtggggattttctttatcagtgcctttgttagttttgattttggtgttgtggttctcttctgttctgcccgggcaagaaattacattctccaaacaaaagtttgatttgatgcttgtgacagttacaaatctcctgtaaattccattttgtaatttggtacctgtgttctcagtttcaagtaaaacatacacttatgtgactaggaatactatccggccatcaacttcacaagtgttttcttgtgattcctgatcaagtgtctcagatttacaggatcaaaatgccatgacatgagtaacacaaggtttaaagaacactcaacactggctttatctatctgagtgaagactagcctggcatcattcagccaagaaaagaatggatgattatgatgaaaatttgatccgagtaaagacgagtccctcatcattctgatggttgttctcttttgctggaatttggttgcatcaagtttagaatgcatcatcacatgtattattcataatcagtggtgggtgaagggtcagtagggaacatgtctgatatctggtctagttatggtgaaattttgatcttgggcatcaaattgcagatttgcaagcatgtttacgtgaagagaacttgtataattcttgattaacctagttctttcttgaggtggggaaccaagttttccctgtaagtggggagtaggttctcataagtctaagatttgtatttgtattactatcttcacaccttcatcatagtgctgtgatttt

SEQ ID NO: 9145 - DNA, 1002 bp, Glycine max
  Clone ID: 700835016_FLI
gcgctttgtctgttataatcaacgcgctcctcacgagtgaatttctggttcggaaggatctgattgttagggtttggtatggggagaggtaagatcgtgataaggaggatcgacaattccacgagcaggcaagtgacgttctcgaagcgaaggaacggtttgctgaagaaggcgaaggagcttgcgatcttgtgcgatgctgaagtcggagttatgatcttctccagcaccggaaaactctacgatttcgccagctccagcatgaaatcagtaatggaccgatacagcaaatcaaaagaagaaccttgtcaacttgggagttcagcctctgaaattaagttttggcaaagggaggcagcaatgttaaggcaacaattacacaatttgcaagaaagtcaccgcaggaaaatgatgggggaagaactgtcaggcttgacagtcaaagaattacaaaatttggagaaccaattagaaattagccttcatggtgtccgaatgaaaaaggatcaacttttaatgggtgaaatacaagagctaaatcgaaagggaaacctcatacaccaagaaaatgtggaactgtataagaaggtctatggaacacaagatgataacgaaacaaacagagattctgttctgacaaatggtctaggcataggagaggatttgcaagtgcctgtgaatctccagctaagccagccacagcaacagcaacaacactacaaggcatcttcaggaactacaaaattgggattgcaattgcattgatccatatacaggatgtgtgtgtttcacaattgctatcaagaaaaatggactcagatttaaacctcgatgtcttcgtataaatgttgtggcatatagaccacagactaattggcttaaagattttaatttgaaattattagaaaaagtaaaagcaaccctagcatgtatgtaagaaacaatgaagcatcttatgagaaactaagactcaaatcaaggaagaaattcttcaaaccgcac

SEQ ID NO: 9146 - DNA, 1366 bp, Glycine max
  Clone ID: 700835120_FLI
gtctctcgaagcctctttctctctcttctaggttcgtttctctctcctcctcgttcttgtttcttcggtgattttatgtgtgtgtttgtgtataacggtggtcgtgtgttttgagtagcttgaaacacgtttgacgaacgatgttttactacgttgttgtgtcttgtttattttaaatcatagtcttgtaagttcgtagatcgtgaatttgcttatgatttatttcttagatataaaaaattatggggttttgttggggattttatcatgataaaataaaagctttctcttttcttgaatgaaattggctttttttgtaacttttgttctgttttgttatgatttattgtttagcaccttcctattgattcctgattccgggagtttgatgattggccttcattaggtattataatttgtggatttgattataaatatgatgaacttagataccgtttatattcttaggtgcttttttggtactgttttttcaatcataattggtgttcacacactggtaatctagataattagggttgcaaaattaattttgataccgagttgaaactctaattctgatcagagaacaatacttgaagaattgtttcttagttttgttcatgtgtttcaagtttgatgcatgattcattggttccccaatatggtggatgactatagccaatttatgaactctttgatttcttcttgtattgtaaaattgacatggaattttggtggtttgttcctttgcagaagctatctgtgtttggtgttactaagtctccaacaagcaaagtacatggttgatttggaaatccaggtccccaccccattcgacccgtttgccgaggcgagagaatcggatgcccccggagcaaaggagtatgtgcatattcgaattcagcagaggaatgggaagaagagtctgaccacagtgcaagggctgaagaaggagttcagctacgagaagatcctcaaggacctcaagaaggagttctgctgcaacggaaccgtggtgcaggacaaggagcttggcaagatcatccaactccaaggcgaccagcgtaagaacgtctcccacttcctcgttcaggctggccttgtcaggaaggaccagatcaagattcatggtttttgaccaattggtcttgtttttgttagtagtaatttcaagttgttcttgagtttgtgagttttgaaagtttggattgtttttctgtttgatgagtggtgttgcaataagtttggtttggtttggtttggtttggttttccaatttttaatgattggatttcatggatgttgttagtgaacttgaattgttccaaagcaagttacagttaataaatgataattcggttttcag

SEQ ID NO: 9147 - DNA, 811 bp, Glycine max
  Clone ID: 700835168_FLI
cttggtggtagtagcaaaaacaggaaatgaggctgccaccagaatcttagctcgtcaacttgttaggttacgtcaacagataaccaatttgcagggaagtcgtgctcagatcaggggtgtagcaactcacacacaggcattatatgcaagcacttcaatctctacaggaatgaagggtgcaactaaagcaatggtgacaatgaataagcaaatggcaccggcaaaacaggttaaagtgatcaaagaattccaaaagcaatcagcgcagttggacatgacgattgagatgatgtcagaatctattgatgaaactctagacaaagatgaagctgaggaagaaacagaagagctcactaaccaggttcttgatgagattggagtggatattgcatcccagttatcttctgctcccaaagggcgtattgcttcaaggaatactgaaaatgttgctccaagaccagcagaatcccaagatgtcgaagaacttgaaaagagattggcttctcttcgaagaatttaaatctctgctacagcctgtactcatatatatgttgcttaatgtacaaatcattatatatagcaatggagagattgtactattggcacctcttttaattaccaattttatgctgtgatgtgtgtttggatataaagaactagtaaaaatagttttagactggaatatatattactatcccaaacatttatgtcgaagaacttgaaaagagattggcttctcttcgaagaatttaaatctctgctacagcctgtactcatatatatgtttcttaatgtacaaatcattatatat

SEQ ID NO: 9148 - DNA, 1031 bp, Glycine max
  Clone ID: 700835579_FLI
gcgaagacgacaccaccttcgtcgtttggcgtcctcctgaattcgccagagaccttcttcctaactacttcaaacacaacaacttctccagcttcgttcgccaactcaacacctatggttttagaaagattgtgccagaccgatgggagttcgcgaacgaattcttcaagaagggagagaaacacttgctgtgcgagatccatagaagaaaaacggctcagcctcaacaaggaatcatgaaccaccatcaccaccatgctcattctccgttgggagtcaacgttaacgttccaactttctttcccttctccagcagagtcagcatctctacttccaacgactccgacgaccaatccaactggtgcgactcgccgccacgtggagccacctcattggtgaacggtgcagcagcagccaactacaacacttccgtcacggcgctttcggaggacaacgagagactcagaagaagcaacaacatgctcatgtcggaactcgcgcacatgaagaagctctacaatgacatcatctacttcgttcagaaccatgtcaagccagtggctccaagcaattcttactcttcttctttgctactatgcaatacaccttctgccactccaataagtagtgccaataatgtttcaatgatgcaaaggccaatgaaccagcttctggggtattattctactaaccctaaacaaggagctacacaaattactcaacctcagacctatgttgtgaactctcccaccaacacatcaaggagttctataaccatttttgaagggcctgccagcagtaacattaatagctgcaagaccaagctttttggggtgtcgctgcagtccaagaaaagggtgcacccggattgtggatctaatccagagaccaacagggctcgtttggttttggaaaaagatgacttgggcttgaatctcatgcctccatccacttgttagttccactactgatgattaattctaagaaaaagtatgatatcccaagctagctagctacttatattaattttc

SEQ ID NO: 9149 - DNA, 681 bp, Glycine max
  Clone ID: 700835610_FLI
gcagcacctgaagcacatcctcttctggttgctaaagaggaaactaacgcgctaaaacaagaaatccaaacattgcaaaagggtatcagttatttgtttgaaggaggaaataagactatggcaattgatgaattacaactgctagagaagaatctcgaaacttggatatatcatattcgttcaatgaagatgaacattatgttacaagaaattcaagctttgaaagataaggagggaacacttaaagcggcaaataaatatctccatgacaagattgtggagaatactgcgatttctaactttgctgaatttgctactgatacttcttacccactaattgtacaagatgggggttttcaactctattaaatgggttgtttctacaatgttttgtttacatgctttaataaaggaaataatggcgactgggctgtgtttcataacattaaatagtgaagtatgaagcatgaacgttgcacaagcctaatttacaataatttgtaacattaatattgtgttattctaatatttttatagataagcttgtaatgtaaaagtcagaaaagtgtgatttctgaccattaaattttctcttgtcattaaccaataatgtaaaatattgtgcgagtaacaatgactcaatgatgaggatattatgtattgtatgtaatatgtttgtat

SEQ ID NO: 9150 - DNA, 1053 bp, Glycine max
  Clone ID: 700835631_FLI
gcaagaatggcacttcgttgcttggtgatgtccctttctgttctcttcactcttggtcttgcgagagaaagccatgccagagacgaagatttttggcatgctgtttggccaaacactcccattccaagttcattgcgagatcttctaaagcctggccctgcaagtgttgaaatcgatgatcaccctatgcaaattgaagaaacacagtacccgaaaaccttcttctataaagaagaccttcatccaggcaaaacaatgaaagtacaattcagcaagcctccctttcaacaaccatggggtgttggtacatggttaaaggaaattaaagacactactaaagaaggatatagttttgaagagctatgcatcaagaaagaagccattgagggagaagagaagttttgtgcaaaatccttgggaacagtaattggttttgccatttcaaagctgggaaagaacattcaagtactttcaagttcctttgtcaataagcaagaccaatacactgtggaaggagtgcagaatcttggagacaaagcagtgatgtgtcataggctaaatttcagaactgcagtattttactgccatgaagtccgtgaaacaacagctttcatggttccattggtggctggtgatggaaccaaaactcaggcacttgctatttgccactcaaatacttctggaatgaatcatcaaatgcttcatcaacttatgggagttgatcctggaactaaccctgtttgccatttccttggaagcaaggccattttatgggtacccaatttatctgtggacactgcctatcagaccaacattgttgcttaattagtccatgcatcttgagcaccatgagaatgagattgtgtataaaataaattatcatgtgctgtgtgttgtgcaagtactaccttctctagctagattgctagagctagaatttcaacctacctatgtgtactgataagatctgcttccctacttaaagagagcatcatcctgtgatcagtgtgcttcgtattctctctctctatatatatatggtaaaaagtggtt

SEQ ID NO: 9151 - DNA, 1047 bp, Glycine max
  Clone ID: 700835640_FLI
gctagccaatcctaattcctattcctatccttattactacataactctaaagtaagtaagaaaaatagagcaatttcacaacacaacacaactcttataattgtgtgagttattaattgagtatgggaaggtccccttgctgtgagaaagctcacacaaacaaaggtgcatggactaaagaagaagatgacagactcatatcttatattcgagctcacggcgaaggctgctggcgttcactccccaaagccgccggtcttctccggtgcggcaaaagctgccgtctccggtggatcaactacctccgccccgaccttaaaagaggtaactttaccgaagaagaagacgagctcatcatcaaactccacagtctcctcggtaacaagtggtctttgatagctggaagattgccggggagaacagacaatgaaataaagaactattggaatacgcacataagaaggaagcttttgaacagaggaatcgaccctgcaactcataggccactcaacgaagctgcaactgctgcaactgttacaactaatatatcttttggcaaacaagaacaacaagagacaagttcgagtaacggaagcgttgttaaaggttccatcttggaacgctgccctgacttgaaccttgagttaaccattagtcctcctcgccaacaacaacagactcagaagaatctttgtttcgtttgcagtttgggtttgcacaacagcaaagattgcagctgcaacgtttccaacgctgtcactgtcaacaacaccactccttcttctgctgctgctgctgctgcttatgatttcttgggcatgaaaaccagcggtgtttgggattgcacccgcttggaaatgaaatgaaaattcaaccaaattatatcaattagttagtgttgttggagagaagtgagagaatgaaattcgtttatttttgaattttctctcctattttttcttttttttcttctcttatttgtataaataattagtcgctgatatgcataatttttagtaacggtacagttgaacatttttgcccccc

SEQ ID NO: 9152 - DNA, 1358 bp, Glycine max
  Clone ID: 700835672_FLI
tttatgtgtctgatttgaggttggagcgtagttagcttctcttttctgccgaaagctgcagaattgtgttgttttctctcctttgggggtcaaacaagcggttctcttcatgatgccaagtgttaaccctgacaaagattccgagccatttgttgagaccgatccaaccggtcgctatggtagatacagtgagttgctcggatgtggtgctgtgaagaaagtgtaccgtgcatttgatcaagaagaaggaatagaggtggcatggaaccaggttaagctgaggaacttctgtgatgaccctgccatgttggataggctttactctgaagtgaggttgctcagaagcttgaccaacaagaacatcattgcactttacaatgtgtggagggatgagcagagaaacactttgaatttcatcactgaggtttgcaccagtgggaatttgagggagtacaggaagaagcacagacatgtttccataaaggccctaaagaagtggtctaagcagattttgaaagggttgaattatttgcacttgcacgatccctgcatcatccacagagatctcaattgcagcaatgtgtttgtcaatgggaatactggccaggttaagattggtgacttgggtttggcagcaattgtgggcaagaaccattgtgcacacacgattcttggcacaccagaatttatggctccagagttatacgatgaagactacacagaattggtggacatatactcatttgggatgtgtgtgttagagatggtgacagtagagattccttatagtgaatgtgacaatgttgctaagatatacaagaaggtgtcttctggagttagacctgctgccttgaacaaggtcaaagatcctgaggttaaggctttcattgagaagtgccttgctcagccaagggctaggccttctgcagctgagcttctaagagatcctttctttgatgagattgttgatgatgatgacgaaaatgatgactgttcttgttcatatcaatagaataatatttcttacagtgttggttttttaatttgattcacctaccttttcagtatgcaatgtcaatttgggcagcctagatagaagtgtgaaaattaaattgtttttattttccatttggcgagttgtgaaattggataaggtttggttgatgaatatgggggttaccaggggagggcttgattggggttggtgtcattttgtacataggaaattttactgactgttgtgcagcatacattgaatgatgatttgatttggcaatatatgttaaaaaaaagtatattagatgtaatcagcagtcaatgaatgcatgatggaatataaatactatatcttgaaaaat

SEQ ID NO: 9153 - DNA, 1003 bp, Glycine max
  Clone ID: 700835718_FLI
gtagttatttcaagaattatgtcaagacaattttgacaaggaagaatactataactggaattgaatatagaaatgaccccaccatttttggttgggaattgattaacgaacctcggtgcctaactgatccttctggtgatactctccaagattggatagaggaaatgtcagcttttgtcaaattgattgacaagcgccatcttgtgactgttggacttgaaggtttctatggtcctaatgatccgaaaagattgactgtgaaccctgaggattgggcatctagacttggatctgactttataaggaactccaaaatctcaaatattgacttcacctctgtccatatctatcctgatcactggtttcatcatcaggtatttgaagactacatgaagtttgtctccaagtggatgctttcccacatcgaagatggtgataagatattgaacaagccagtcttgttctcggagtatggattgtcagacataaattttacgatgcctgaacgaaaaacaatgtacaaaacaattttagacataagctacaaatctgcaaagagaaacaggtctggagcaggtgctctagtatggcaattcttagttggaggaatgcaggagtttactgatgattttgggatcatcccatgggaaaagacacctatcccttcactatttgttgaacaatcatgcagattgaccaaggtcaagggatggcctcacaaggacacaagttttaaacaattttgttaggaaaagatgtggaaataaaaagcccttgatttgaatggggggagatatatgggttcttttgtggtttaagactgctgaataggtgcatgactagttttgtacaatatgctcttgttttcatcaccaatgataaagttggttagaggcgtatatatagtgtggtaacatagattagatattactataaacagttattttgaatttaaagattgtaatccacatgaacaaaatcaaccatgaagtcttttaagatg

SEQ ID NO: 9154 - DNA, 918 bp, Glycine max
  Clone ID: 700835753_FLI
aaacagagaatgcccctaatctatgtgaaattatatacatatcaaatctttaggggactggcgtatatccatactgtaccaggaatctgccatagggatttgaagcctcaaaatcttttggttgatcgactcacacaccaagtcaagctctgtgattttgggagtgcaaaagttctggtggagggtgaatcaaacatttcatacatatgttcacggtactatcgtgccccagagctaatatttggtgcggcagaatacacaacttctgttgatatttggtccgctggttgtgtccttgcggaacttcttctaggccagcctttgttcccaggagaaaatcaggttgaccaactcgtggaaattatcaagattcttggcactcctactcgagaagaaattcgatgcatgaatcctaattatacagatttcagattcccccatatcaaagctcatccttggcataaggtttttcacaagcgaatgcctcctgaagcaattgaccttgcatcaaggcttctccaatattccccaaaacttcgttacagtgcagtggaagcaatggcacatcctttctttgacgagcttcgcgagcccaatgcccggctacctaatggtcgtccactgcctccacttttcaactttaaacaggaattagatggagcgccccctgaactgcttcctaagctcatcccagagcatgtcaggcggcaaacccaaatgtaaagagatagtaaaacatagagtgaactgttctagtggattagtgtgaaatacatgagagcttgcttgtggtcaatagaacaggggttaggcccaaatatgcagtttttctcccccttgtgaagatgtatacatgtgctggaaaactcagtgtaacccggaaatgtagattatgtctaatgtctaatatttcattct

SEQ ID NO: 9155 - DNA, 800 bp, Glycine max
  Clone ID: 700835771_FLI
cgacccgagaccgtacatcaacaaacgcgagtggacccgacgcgtcgagtctctcgccacggcccaaatccagatcatagccatgttatgcgaagacgaagaagaaaaccccgagacacgtggcaaggcacccgtgactgacattaacggctttaccggtcaaagcagaagctacagcgaggaaagcctgctcccgcgcctcgccacgtggcagaaatccaaggacgtggcgcagaggattctcaattcggtggactacgagatggggaggtgcacctacaccttaggtttaggagaggcgaatatcgcgggaaagaagatatttctcttcgacgcggtttgcaggccgagggagattcactcgttggagacgacgccgtttgatgattacgtggggaaccacgagaacaagacgctgcacgccacgcagcagatcgccgagtgttggacgcgctcggtgaagaagctgctggagagagtaacggagtcggtggagaaaaaggcgttggagaaggccgcgagtgagtgccatgcggtggagcggatctggaagttgttaacggaggttggggacatgaacctcatgatggatccagaggatttcttgaggctgaagaaggagttagggatgatgagaactgcgggcgaaacggtggcgttttgcttcaggtcgagggagcttgtggaggtggcgagggtgtgtaggaatctgagggagaaggtgccggagatattggaggtggaggtggaccccaagggtgggcccgggatgatggaggcggcgatgaaggtttactcgg

SEQ ID NO: 9156 - DNA, 1538 bp, Glycine max
  Clone ID: 700835781_FLI
gctctggcacggttacagtgtacaagcaatcttcttcataccctataacagctccttcacctctatctggccttccagaattctctcacttgggttggggtcactggtttaccttgagggatcttgaacttgctacgaaccgtttttccaaagaaaatgtcctcggtgaaggcggctatggagtggtttataggggacagttgatcaatggaactccagtggcagttaaaaagatacttaataacacaggtcaagcagagaaagaatttagagtagaagttgaagctattggccatgtccgacacaaaaacttggttcgacttttggggtactgcattgagggaactcacaggatgttagtttatgagtatgtcaataatggaaacttagagcaatggcttcatggagctatgcgtcaccatggataccttacgtgggaagcacgtatcaagattctccttggcacagccaaagcgctagcgtatttgcatgaagcaattgagccaaaggtggtgcaccgtgatgtaaagtcaagcaacatattaattgatgatgatttcaatgccaaggtttctgattttggcctggccaaattattgggtgctgggaagagttatgtcacaacaagagttatgggaacttttggatatgtggctcctgaatatgcaaatactggccttctaaatgagaagagtgatgtttatagctttggtgttttgctattggaaggaattactggtagagatccagttgactatggtcgaccagcaaatgaagtgaaccttgttgattggctgaaaatgatggttggaaacaggagatcagaagaagtggtggaccccaacattgaggtgaagccatccaccagagctttaaaacgggctctcttaactgctttaagatgtgtagatccagattctgagaaaaggcccaagatgggccaagttgtacgaatgttggagtcagaggaataccctttaccaagagaggaccgaagacaccgaagaagaaatcgagagggtagtggagaaattgagtcccagaaggaatattctgacacagacaggagtgagattcaggattcaagagaagaaagaagagggtgaacaacagacatgaccccaagaattcggtgggttggtgggatttataaagtggtagcttttgttttcctccatagctttttagattcttggatttttgcctacctcagatgggcatggcaaaggggctggcacagctggagatatttttattttttatttttttcccatgcattggttcttggtgtccttttgtttgtatataggatagatattgtttgtgtatgaaggtggatggtatttctaagataagaacccataatattggggtgtgtacagaatttgatatcttaattccaaaatatgttccataaatctgtgagaaggatcaattaatgattttgagaaacccctcatgaaacttttcagttcaactcattctgaagtccatagatctcactttcatgaaataaatattttgtttggccggttgct

SEQ ID NO: 9157 - DNA, 2179 bp, Glycine max
  Clone ID: 700835853_FLI
caaattgcaggtcctctcttctttcttcctcctttggttttttgtatgtatattacaggaaatcttgaatcagtatttccagaagaacatcgcaaagaaattcttcgttacacatattatcaccagaatgaagacggaggatggggactacacatagagggtcatagcactatgttttgtactgcactgaactatatatgcatgcgaatgcttggagaaggacctaatggaggtcatgacaatgcttgtgctagagcaagaaagtggattcgagatcatggtggtgtaacacatataccttcatggggaaaaacttggctttcgatactcggtgtatttgattggtgcggaagcaacccaatgcccccagagttttggatccttccatcttttcttcctatgcatccagctaagatgtggtgttactgtcgattggtatacatgcctatgtcttacttatatgggaagaggtttgtgggtccaatcacaccactcatcttacaattaagagaagagttgtttactcaaccttatgaaaaagttaattggaagaaagcgcgtcaccaatgtgcaaaggaagatctttactatccccatcctttgatacaagacctaatatgggatagtttatacatattcactgaaccgctacttactcgttggcctttcaacaagttgattagagaaaaggcccttcaagtaactatgaaacatattcattatgaagatgagactagtcgatacataaccattggttgtgtggaaaaggttttatgtatgcttgcttgttgggtggaagatccaaacggagatgctttcaagaagcatcttgcaagggtcccagattacttatgggtttctgaagatggaatgaccatgcagagttttggtagccaagaatgggatgctggctttgctgttcaagctttgcttgccactaacataattgaagaaattggtcctacgtttgcaaaaggacatgatttcatcaagaagtctcaggtgaaggataatccttttggagattttaaaagtatgcatcgtcatatttctaaagggtcttggacattctctgatcaagaccatggatggcaagtttctgattgcactgcagaaggtttaaagtgttgtctacttctatcaatgttgccaccagagattgtgggagaaaagatggaacctgaaagattatacgattcagtcaatgtcttgttgtcgcttcagagtaaaaaaggtggtttagcagcatgggagcctgcaggagctcaagagtggttagaattactcaatcccacagaattttttgcggacattgtagttgaacatgaatatgttgagtgcactggatctgcaatccaagctttagttttgttcaagaagctatatccaggacataggaagaaagagatagaaaatttcattaccaatgcagttcgattccttgaagatacacaaacagctgatggttcatggtatggaaattggggagtttgcttcacttatggctcttggtttgcacttggaggtctagcagctgctggtaagacttacaccaattgtgctgccattcgcaaagccgttaaatttctacttacaacacaaagagaggacggtggatggggagagagttatctttcaagcccaaaaaagatatatgtacctctagaaggaagccgatcaaatgttgtacatacagcatgggctcttatgggactaattcatgctggacaggcggatagagaccccatgcctcttcaccgtgctgcaaagttgctcattaattctcagttggaagagggtgattggccccaacaggaaatcacgggagtattcatgaaaaattgcatgttgcattatccaatgtacagagatatttatccaatgtgggctctagctgaatatcgaaggcgggttccattgccttccactgaagtttaatttagaatggtttgagcacgaaaaggcaaaggcattttcattaagattgaggcaaataaagcaaataagttgtgtgtaatcaagcttaatcaattttttcatattcctatgtttatttcctacatatattggtagaaaaattatttcatgtcggcttgtatagatgttcttaatgttcgtgttacgatacaaagataagtctagtaaaatactacgcacgtaacattagagggctgtgaag

SEQ ID NO: 9158 - DNA, 1094 bp, Glycine max
  Clone ID: 700835878_FLI
aaagattccatttccagaagtagcactgcactagtactctcttttgtttagaaaaaaaaaaatggttcaacaggaagtgcgtaaaggtccttggacagaacaggaagacttcaaattggtgtcctttgttggcttgtttggggaccgtagatgggactttatagctaaggtatcaggtttgaatagaacaggtaagagttgcagattacggtgggttaattacctacatcctggcctcaaacgtggaaagatgaccccccaggaagaacgccttgtcttggagcttcactcaaaatggggaaataggtggtcaagaattgctcgaaagttaccagggcgcactgacaatgagatcaagaactactggaggactctgatgaggaaaaaggctcaggacaaaaagcgaggagaagctgcatcatcatcatcatctagtgttgattcctcaatatcctcaaacaaccatgcggtggatccacatgcttccaagaaagcaggagaagagagcttttatgacactggaggtcatggtgtgacagcctcaacccaagatcagggtcaaaaaggtgaacaagggttgttctctatggatgatatatggaaggatattgacaatatgtcagaagagaacaacactcttcagccagtttatgaagggaacagtgaagagggttgcaacttctcttgcccaccacaagtgccttctccatcatcatgggaatattcttctgaccctctatgggtgatggatgaggaaagtttgttttgccctttgagtgaaccatatttttcctgctatgcacaaggcagcgtttttttaaccggctaatattattctttttttccaaatcaatattttgttcatagcatatcatgtgtgccaccttataattaaagtctaacctgtatagcattgcatcctttaagcttttggaagggttcaccctagctagtgtgacccagctgtaataatttcaggcataactgtagtctatgttcgttgtttcagtagtgcttttactttcgaaaaacatccaataggatagcgagttggtatgttctgaatgtaaaatatcaagcactggtttgcatct

SEQ ID NO: 9159 - DNA, 1845 bp, Glycine max
  Clone ID: 700835937_FLI
gagaggaaaaaaggatgggaaataacatggcaacatacaacaaatacaaaagtttcttgttctttatcagaaagttcaaggtcaccgagccagtttcacctcaggaccttgaggaggcgttttcaaagttcaccggaggaggttcccacatgtctgcggacgagctccaccgtttcctggtggagcaccagggtgaagaagactacacgttattgaattcggagaaagttgttgagaaggttctgaaagagagaaagagatgtcaagaaagtgttaaggttgatcaaaatagagaacatgagatcacccttgatgagctcttccgttttttgcttcatgatgattccaacggtcccttgaaagccgaggtacatcatgatatgggtgctccattgtcacattatttcatatatacaggccataactcctatttgacaggcaatcagctcagcagtgactgcagtgaagaaccaatcataaaggctttgaaaagaggcgtgcgtgttattgaacttgatttatggccaacttacaataagcatgatattaaagtagatcatggatggactcttacaaaccctgcttcagttatcaaatgtctagagtccataaaggaatatggttttgttgcatctcaatacccagtgatcataactatagaagaccatcttacaacagatcttcgagctaaatttgcagaaatggcaactcaaatatttggggaaatgcttttttaccctgggacagattgctcttgcttaacagaattcccttccccggaatcactaaaaaatcgagttattatatcaacgaaacctccgaaagaacgttttaagtccaaccgtatcaaggacaatcctatgctgaatgaaagtgattcatctgaagaagaaacatggggaaatgaatctccagactccaacaagaacgaagtggagactgaggacacgaatggaagcgatcgtgatgagggaaatgtaagtgcatgtgaatgtgaccataaaccatatcaggagtgttcacctgattacaaacacataattactatccataatacgaagctcaagggatgcatgaaggataaattgaaaacagacggtgaagttagacgcctaagttggagtgagaagacccttgaaaaggcttcagaatctcatggaacagatattcttaggttcacacagaaaaatatcctcagggtttacccaagtgcaatgcgtgtcaaatcctcaaatttcaagccacatattgggtggatgtacggggctcaaatggttgcatgcaatatgcaggggcttggcaaatcgctctggttgatgcagggtatgttcagggcaaatggaggctgtggctatgtaaagaagcctcaatttctaatgcagaagcatcaatgtgacaatgagtttgatcctacaaggatacagtcagtgaagaagaagacattaaaggtaaaagtatacatgggacacggttggagctcagatttcagtcctacacactttgacaaatgctccccgccggacttttacactaaggtccgtattgttggaatgccagctgatgttgcaaagaagaaaacaaaggttatgatggatgattggtttcctgtttgggatgaagaatttgaattctctttaactgttccagagcttgcattgcttctgatacaagtaaaggacaaagatcctggaaaggatgactttgctggacagacatgtttgccagtgtcagagctaaaacatggatttcgttcagtccctttatataacaaaaagggtgagaaatttaaatctgtaaagctgttgatgcggtttcagtttgaatgaattgtagcatgctgtctcc

SEQ ID NO: 9160 - DNA, 760 bp, Glycine max
  Clone ID: 700835986_FLI
cttatgagcgagaagatcagaactacattgtatcaactcgtcattatagggctcctgaagttatccttggacttggctggagctatccatgtgatatatggagtgtgggatgtatattggttgaattatgcacaggtgaagctttgtttcagactcatgaaaatttagagcatcttgcaatgatggaaagggtacttggttcattaccacagaccatgatgaagagagtcgaccgacatgctgagaagtatgttagaaggggtagattagactggcctgagggtgcaacctcgagggagagtatcaaagctgtaatgaagcttcctaggcttcagaaccttgtaatgcagcatgtagatcattcagctggcgatctcatacatctcttgcaggggttacttagatatgacccctctgaaagacttacagccaaggaagctcttagacattccttctttatgagagaacactttagaagatgattcactttcttaactgctgcatcattgaccttcctaaggatttgaagatgtgggcaaatgaactcacctgtgtgatggctagtttttctgcagctgtcctctccccaatgctatgctgaaaaatccttatgtaggaatttttgaatggatctggattcgatgtacagaagaaaaaaaaaaatgctaatgttatggtgaaaattgtagattttacgggcatgattcatatggcatcctgagctttgtgtgcacgagtataagtctccattcgaggtttg

SEQ ID NO: 9161 - DNA, 863 bp, Glycine max
  Clone ID: 700836155_FLI
ctctcttcattccaattttggcaccacaccatgccaaccctcaaccatgtcctcacattcacattcttccttctcctctcttgccattgccacctcctcaatggccaagaggacacctcatttggccgtgccatagacagaaaattgttaggcctaaagagaaaagaaaagctcagccacttcaaattttattggcatgacatagtgagtggccgcaaccccacttcggtggcggttgttccgccaccgccgaaggtgaacacgaccacagcatttggcttggtgaacatgattgacaaccctttgacgttggggccggaattgagctccaagcttgtgggaaaatctcagggtttctacgcgtcggcctcgcagactgagattgatcttctaatggctatgaactttgctttcattgaaggtaagtacaatggcagcaccatcaccatcttggggaggaactgcgtcttccacaaggtgagggagatgcctgtgattggaggaagtggactcttcaggtttgctagagggtatgctgaggctaggactcattggcttgatctcaagggtggggatgctattgttgagtacaatgtttatgttatgcattattgattgatgatttaataattatgttatatagaagagattatacttttagcttttgctttagcaattggcaattggcactctttgtttcttttttttttctttttttctttccatttgttgcttttgattcttaattagctttgccttttctagaggtggggtttgttcttgtaagcccatcttaaaatttgttccctatttaattatgtatttgtggctggtgtgataattggaataataatgttggatgc

SEQ ID NO: 9162 - DNA, 2069 bp, Glycine max
  Clone ID: 700836189_FLI
ggcagaagtgatgagactgtttctatgatagaatcctacttacgagcaaataagatgtttgtggattacagcgagccccaagtggagagagtgtactcatcgtatttggaactcaatcttgaggatgtagaaccctgtgtctcaggtccaaaaaggcctcatgaccgtgtccctttgagagaaatgaaggtagactggcatgcctgcctcaacaataaagttggattcaagggttttgctgtaccaaaagaatctcagaataaggttgcagagttcacattccaagggacaccagcacatcttaggcacggtgatgttgttatagctgctatcaccagttgtacaaatacttcaaatcctagcgtaatgcttggagctgcattggttgcaaagaaagcatgtgaattgggattgcaggtgaagccatggattaaaacaagccttgccccaggttctggtgttgtgactaagtatttgcagaggagtggcttgcagaagtatttgaatgagctagggtttaatatagttgggtatggatgcaccacatgcattggaaattcaggggatattaatgaagctgttgcatctgcaattactgaaaatgatatagtagctgcagctgtactgtctggaaataggaactttgagggccgagttcacccattaacaagagctaattatcttgcttctcctcctcttgttgttgcctatgcccttgctggcacagtggacattgactttgacactgaacccattgggatagggaaggatggcacaaagatcttcttcaaggatatttggccatccagtgaagaaatagcaaatgttgtacaatcaagtgtgctgcctgctatgtttagggacacatataatgcgatcacccaagggaatcccatgtggaataatttatctgttccaactggcactctttatgcttgggaccctacatcaacttatattcatgagccaccttattttagagatatgagcatgtctcccccaggctctcatggagtgaaagatgcttactgtttgctcaactttggagacagtatcacaactgaccacatctctccagctggcagcatacataaggacagtcctgcagccagataccttatagaacgtggggttgatagacgggacttcaactcctatggaagtcgccgtggtaatgatgaggtgatggcccgaggaacttttgccaatattcgcattgtcaacaaatttttgaatggagaagttggacctaaaactattcatattccttctggggagaagttatcagtctttgatgctgcagagaaatacaagagtgaggggcatgatatgattatcttggctggtgctgagtatgggagtggaagctctcgtgattgggctgcaaaggggccaatgctactgggcgtgaaagctgtcatagcaaaaagttttgaaaggattcaccgaagtaatttggtgggaatgggtatcattccattgtgttttaagcccggggatgatgctgattctcttggattaactggccaagaacgttacaccattgatctaccaagcaatgtgaatgaaatacgacctggccaagatgtcacagtggtgacagatgccgggaaatcatttgtatctacactgagatttgatacagaggttgaactagcttacttcaaccatggaggcatcttacaatatgtcatcagaaacatggtcaatgctaaacattaaatcagatataaaccaagtttgcaggttgaattgatagcactcactggcgctgattcttaactttggtcttaataatctagtatggcctgctacaaggaaatccattgctattcagctattgtatcaataaaccaaggaactagatggctactacgaggaagagttatgactgtcgtttgttgaagaaatgtgattttctttttcaaaaattctattggtcattgaggatgaaaattccttgttacatttttactggttttacagttgagtttttaggaaacatttaccttctattgctgcctcccgactcttgagaattaaggaaatcaggaacattttttgaaatt

SEQ ID NO: 9163 - DNA, 1774 bp, Glycine max
  Clone ID: 700836194_FLI
cctctctcgctcttgttccgattttagggtttttctaatgggtctcggtaacgatgaagaagaggacaataacaacaacaataataataataagaataacaatgataaggttgtggatgacggagatgctggaggaggaaagtctttcggttcagtgtcgtgttccatttgcctcgaggttgttgccgataatggggatagatcctggtctaagcttcaatgcggtcatcaatttcatctcgattgcattggttcggcattcaacataaaaggagcaatgcagtgccctaattgtcggaagattgagaaaggtcaatggctatatgctaatggttgtcggtcatatcctgaatttagcatggatgagtggactcacgatgaggacctttatgatcttagctactctgagatgtcctttggagttcattggtgcccttttggcaacctggcacgacttccatcatcctttgaggaaggggagttttcgtcatctgcatatcatgatgtattgggacaacatgctatatttgctgaacatacagctgtgtcatctgccagtcatccttgcccgtatattgcttactttggaccaatacatccatcctcctcgaattcgggtggaactgtatcagaagcttcaaacttcaaccattggaatggttcatctgtgcccagtgacatgccaacttcctacacatttcctgctgtggatcttcattatcacagttgggaacaccactcccctcctttctctacagcaagtagtcgtctagttgctgctgatcagccatcagtatcccctggtagtcaaaggccagccaggggtggttcggatgtaccaagatcaggatcttttatgcatcccttccttgttggtcacagagtggggagctcggttgcttcctcaatgatccctccttatcctggtagcaatgctcggacccgtgatagagtccaggctcttcaggcgtactatcaaccacagcaacctcctaattcaaccacaatgcggacacctattgcttctggcacccgaagatccagtagtcataatggatctcctcaattagccccaataaccacatcgtcagaccaaagtggtggcttctttcttatcccatcaagttcatcaggacacaattttcaagaagaaaatcatcatctaccaaatcacttccatgcttgggaaagagaccacttgccttcgttgtcattgagccatgtcgatagagattcaggttggagagcgtaccaccaggccaccagccggtcagacccaggtaccaggtccagcagctttcgtttgaggcatggatcggatagaacgccttcacaaaatcggtaatacacttgtatcctgttcactgtgaagcaaactaccattactatggaaaattatgtatgctttgaaaaatgttacatattgctttggcactttggcctttgggtctgtcctgttatgacagtatatactctggctggccttggaattgatttttccatagccaccagtgtgatggacatttgcttcctctagttttatttgccctggtgggcataaaataagatggtgtatctagttggggaaatcaggttttggaagaaatactggggcgttgtgatttcaagtgatgatgaatcaagtggatgaaagcagctgtggttggatttgtagtgggtcaactatttatgtttgataatgacactcatgcaattgctgtgtatttgagaatacaagtacttttacttctaccccatggcaagagtgatttgt

SEQ ID NO: 9164 - DNA, 719 bp, Glycine max
  Clone ID: 700836236_FLI
aaaccaatgaaaaaataccatctgatgatgaagaaatatcagatcatcaaaggcttctagacagattgcagttatatgatctgattgaatgcaaggttcaaggagatggtaactgccagttccgttctttatcagatcaactctatcgttctccggaccaccacaaatttgtgcggcagcaaattgttcaacagctcaaatcttaccccgatctatatgctggttatgttcccatggcttatattgactatttgaaaaacatgagcaagagtggcgaatggggtgatcatgtcacgttgcaggctgctgcagattggtatggtgtcaaaatttttgttattacgtcttttaaggacacatgttacatcgagattcttccacagatacagaagtctggaagagtgatatttctgagcttttgggcagaagttcattacaactcaatttatccggaaggagaactgccctcatctcatacaaagaaaaagaagaaatggtggaatttcggtggctaggttcagtgtcagtcatatgggatggaactaatcactcatcagtccctgattatgatcgatccatcggctttgtgattattgagcctttaatgtttgagtgttgctaacactaactctgcctccattattttgtatatattaacattttctttttctgtatagtattcttttgtatatattattttatttatcctattttttacc

SEQ ID NO: 9165 - DNA, 1396 bp, Glycine max
  Clone ID: 700836315_FLI
tcttatcacaacagttccattgtaattaagtactaagtataaactctctcccaatagatgaatattcttttttcttgttgccgccaccactcttctaatgtctagttctgagagcacaaacgcgagaactagaacagcgtcatggttttctaccccattctttgttatcgttctcccggtggccgtggctgcgcttctctaccggctcgaaccattcaagccggttcttttgccggtccagctgggccggtccaccgtggcggttccggctcgtaacggccacatgcaagatggatcggaacgtgtgggtgagggacacttggagggcccggaagacttggcctacgacgctgcggcacgtgtcgtttataccgggtgtgaggatgggtggatcaagcgagtcacggtgaatgactcggtggttgactcggcggttgaagattgggtcaacacaggaggaaggccacttggactagttttgaagccgaatggagaactcatagttgctgatgcggaaaagggactgctgagagtgtcaagtgagaaggagattgagttgctggtagatgagtttgaggggttaaaattcaaactcacagatggtgttgatatagcagatgatggtacaatttatttcacagatgcatcacacaaataccccgtgaaggatgctgtgtttgacgtcttagaagggaagccaaatggaagattcttcagctataatccagcaacaaagaagacaaccctgcttgcccaagacctctactttgccaatggggttgcagtttcagcagatcaacaatttgtggtcttctgtgaatctgtcttgatgagatgcaataaatatttcgtcctgggccctaaaacaggaaccatagagaagttctgtgacctgcctggcatgcctgataacattcattatgatggacaagggcactatttgattgcaatgttcacggccctttctcccgaattggaattggcatatagataccctttcattaggaaggcttttgcaatgtttacaaagtatgtagggagtctatctatctcgaagaatggaggagttctagtcgtggatttagaaggaaaaccaactgcacattattatgatcccaaattagcattgactagtgcgattaaaattgggaatcatatatatgctggttccattttctacccctttgtaacacgttttgatgttgagaaatatcctgctctccccacagtttgagcaacagtgaacatcttgtaaggttaatgatgtacaagaaaatgtttagtttctggagtgtcatgatgtgaaaatgtttagtttctggagtgtcatgatgtgaaaattccattcatgaatctgttatatatatttttatataataaaaatggaatttctttt

SEQ ID NO: 9166 - DNA, 990 bp, Glycine max
  Clone ID: 700836344_FLI
ctttgctggagacactgaccttggactccaatatgttctacaaggatgtcctaatctgcagaagcttgaaatcagggacagtccatttggggatggagctttgcattctggcttgcatcacttttacaacatgaggttcctctggatgtcctcatgtaagttgacgcgccaagcttgccaagaagttgcgcagacattgccccatctggtgttggaagtcattaatagtgaagaggacaaagctgatggtatagagattctgtacatgtatcggtctctggacgggccacgggatgatgctccaaaagttgttaccatcctttgctgattctttgaaacttaactagtttttagataaacctgccacaagattgatgatttgtactgtcaatgtcagaaaaagttgagctaagaactcagctgtttttggccaacactgttgtgatggcaggccatagaggactatagattctattatgtggcaaagcatttcaaattctgcattcttgtttatgggacagagcttggggaatatcaacgggagagggtgtgctgagaatgatgcagatgataaaaattcctgtaggtatcggaccatccaatgttgtatcactatagctaaaatttattatgtcctcttttttattcattttatcatgaagaacttcactatcatagttgaggaagttagagattgctgaagctgctttgaggatttgttaataagcattatttgtctccaacttcaccgtaccagtagaaaagggaaagcattcgctttttgaaggacttagtctgtgtatgctgactcagatgatagttagtttaagctgtgggtggtgagaaccctatcaccagactgatataagcgaatatgcgtcccccttatgttttctcagatgtgtttctgtagctcctgacttttgaattttttttttagttagcaattgctacatggttaataaatgccagaatatgcatggaccatat

SEQ ID NO: 9167 - DNA, 928 bp, Glycine max
  Clone ID: 700836372_FLI
cacacacgccatccaatttctgtctttgatatttttaattagagagagaaaaagaaaaagaaaaaacaaagagagaaagagagaagagagagggtgtgtttctgggttttggaaatttcagccaatatcgaaaaacaagaagccccatcaataataatcatcgaaggaatttgaaaggtcgaaacttgagcatctgggatcgcgaaattggggtttttggttaaaagggtattatcttcggaactgattgatggcaaacctgtacgtgaaggcggtgccaccggcggatctgaacaggaacacggagtggttcacgtaccctggcgtttggaccacatacatcctcatccttttcttttcttggatcctcgtactctccgtcttcggttgttcccctggcatcgcttggaccatcgttaatctcgcacactttgctgtaacatatcacttttttcactggaagaaaggaactccatttgcggaggaccaagggatctacaatagattgacttggtgggagcaggtagacaatggaaagcagcttactcggaacaggaagtttctcacagttgttcctttggtgctgtacttgatagcctcacacacaacagactatcagaatccaatgttcttattcaacactgttgcagtgattgtgctggttgttgcaaagttcccccacatgcacaaggtcaggatatttggaatcaatgctgataagtgaaatgttgctgtggccatgacacttggttaccactccttacctgctcaagagcctcttgtccttttgttctggaaaaaaaggtcacacctttgtatagaaggcagaactggaaggatactcaagtaatgttttgttgccaactgctttttaagctgcttctaaaagtattattaaacaaataaatatgttgagttatttctgtac

SEQ ID NO: 9168 - DNA, 1236 bp, Glycine max
  Clone ID: 700836404_FLI
gatggcacaagttgttaagccacatgaacctaagacacagtcatttaaacttttgagtggtcataccataccggctgttggattgggcacatggaagtctggttcacaagctgccaattctgtgatcaccgccattgttgaggctggttacagacacatagacactgcttcgcagtatggagttcaagaggaagttggacatgcactccaatctgccatgcaagcaggagtggaaaggaaggatctatttgtcacctccaaactttggtgcacagacttgacccctgaaagagttagacctgctatcaacaatactcttcaagaactccaacttgactaccttgatctttacttgattcattggccatttagattgaaagatggtgccagcagaccccccaaagaaggagaagtgttggagcttgacatggaaggggtgtggagagaaatggagaagcttgtcaaggaaaaccttgtcagagacattggaatatgcaatttcactcttacaaagctagataagctgatgagcattgctcaaattatgccttctgtctgccagatggaaatgcatcctggatggagaaatgacaagatgcttcaggcttgcaagaagaatgccatccatgttactgcttactctccactgggctcatcagacggtggaagggatctgatcaatgatcaaaaggttgataggatagccaataagatgaacaagaatccagggcaggtgttggtgaagtgggccatccagagagggacaagtgtcatccccaaatcaaccaagccagataggatcatggagaatgtcagtgttttcaattgggaacttccagaaagagactttaagacccttagcaacatgcccgatcagaggcgagttctggatggtgaagacctctttgtgaacaagagcgctgggccattcagaagtgttgaagatatttgggaccatgaagattagtccacacttcacacatgcacctaaccacactttgtttatctctttttcaaggcactatgtaataacttgcatttctcgaatgttctgtatgtgatttgatacattagaaggttttttgagtctaaagttattatgtaagtggacaaaatttaagagaaatgtttttgaaaccaccacaattaaccaggatggacactagtgcacactgaccaagggcattagacacttcaagaaaaagcaatgaaatgaagccaaggtgtgttcctatg

SEQ ID NO: 9169 - DNA, 1306 bp, Glycine max
  Clone ID: 700836407_FLI
attctgcccttccctcgcgtttcaacaccgataacccgcaaaaatctccattgatctgcgcctcctgttccatggcaaagctgcctgtggaatacaacggcgactgcgccaccaccgcctcagcatccgcctccgcagccgcggagtctcagagatccattcccacgccgtttctcaccaaaacctttcaactcgtcgacgaccaatccatcgacgatgttatttcctggaacgacgacggatcaacgtttatcgtctggaaccctaccgtcttcgccagagacttgcttcctaaatatttcaaacacaacaatttctctagcttcgttcgccagctcaacacttacggattcagaaaagttgtacctgatcggtgggagttctcgaacgagtatttccgccgaggcgagaagcggcttctgtgcgaaattcagcggcggaagatctcctcgccggcgtcgtctccgacggcgccggcgacggtttcggtcactgcgccgatgccgttgactgcgataccgatcatatcgccgtcgaactccggcgaggagcaggtgacgtcgtcgaactcatcgccggcggagcttctcgacgagaacgagcgactgaggaaagagaacgttcagttaacgaaagagctcgcggagatgagatcgctctgcaacaatatttattctctcatgtcaaattatgcaaacgccaacggaaaaggaaacagcaacggcagttacaaaactaaaggcggcgccggtgtcgcgcacggaagtttagagtccggcatgacggcggtgaagctgctggatttgatgccggtgatgcgaagctccgatgaggacgcggcggagatggcgccggaggagatgaatccgaagctgtttggtgtggcgattggagcgaagcgagcgagagagggaggaggtggtggagattgtggaggtggaggagaggaagatacgctgctgcgcctgcatcacgcgggttctgcggacgtgaaatctgagccgttggatttccagaaccatcgcgagaatcagaaaacgccgtggttgagtccgtgttacaggacaaatcaaagagtgtgcaactgacacgcggcgacggttaagcaaaggaaacattttagattagattacgtagtggcgtagggaatccgagaccggcacgcggagacgtcacgtgcgtcgtttaaccgtttgggaccgattcccagaagtttctcagaagtcggaggaaaacgatactttgtagtccttttttcttctctctctcttttttttttatataaatatattttttttgttgcatg

SEQ ID NO: 9170 - DNA, 1465 bp, Glycine max
  Clone ID: 700836435_FLI
ctcttcaccagctatagtttttctgaactaactgcactgccactgaacacacagcaatggcagcttcttcttctcttttctcctcttcaatgcatatggagatgtttgctccaaagacatcaaagtgtccccaaaattttgtatgctgtcatagcaaaatctcctatatagaacctaattatttaaaaccagtatgctgtcctaattcaagatctttaagtatgaatatgtcatcaaaatgggaacaaacggatcgaagagatgcattgcattgccgcgctttgaaaattgagcctgcaccttccttttcggtggggcagaaatttcaatttgatgatattatagaagctcaacagtttgatagagatattctcagtgccatttttgaagttgcacggaatatggagaacgttgaaaaggattctcctggtagccagattttaaagggttttcttatggccaccctattttatgagccttctactagaactagactttcatttgagtctgccatgagaagactaggcggagaggttttaactactgaaaatgcgagagaattttcgtctgcggctaaaggagagacacttgaagatacaatcagaacaattgagggttactctgatataattgtgatgcgacattttgaaagtggtgctgccagaagagctgcagctatagctgacattccaataatcaatgcaggggatggtcctggacaacatccaactcaggcacttttagatgtctatacaattcaaagagagattggaaagattgacgacataaaagttgggcttgtgggagaccttgctaatggcaggactgttcgttcattggcatacttgcttgctaagttcaaggatgtgaagatttattttgtttctcctgatgtggtaaaaatgaaggatgatataaaagactatttgacatcaaagggagtggaatgggaagaatgtgctgatttagtagaagtggcctcagagtgtgatgtggtttatcaaactcgtattcaaaaagaaagatttggagaaaaaattgacctttatgaaaaggctagaggcaagtacattgtgaatcagggtattctcaatgtgatgcagagacatgctgtggttatgcaccctcttccaagacttgatgaaatcaccttggaagttgatgctgatccaagggcagcttactttagacaagccaaatatggtctatatattcggatggcacttttgaaactcttgcttgttgggtggtagaactgcattcatcttcaaaacgtatggaagatgctgcacatcaaaacttcttttgcttttctttgtcttttcatgctgaacatcaaaacttctttttgcttttggtttccctttcctctcttttaaattttctctttttgttttttattgcactctctaatcttataaaagattgtcttcaacttactaattaattcaactctgccttacat

SEQ ID NO: 9171 - DNA, 553 bp, Glycine max
  Clone ID: 700836446_FLI
gctgagtatgaggagctgaggaagaatccccagaaggcttacttgaagactattacaccaaagtttcagacccttattgacctttctgttatagaaatcttgtcaaggcatgcatctgatgaggtgtaccttggggagagggacaatccaaattggacatctgatacaagagcattagaggcttttaaaaggtttggaaataaactggcacaaattgagaataaactctcagagagaaacaacgatgagaaactgagaaaccgttgtggaccagttcaaatgccttatactctgcttttgccttctagtaaggaaggattaactttcagaggaattcccaacagtatctctatctgaagaggtttgtggttccttaagttttgtggctttgaataaaagatagaagagaaggaatctgaatttcttcatccaacctgcacatggtaatctagtgtgtttgagtgctttcatgtttggctttaataaaataaaagcagttgttttgtaaaatgttcagaatcaataaaagcatttactgctttgctttgtgcgc

SEQ ID NO: 9172 - DNA, 1433 bp, Glycine max
  Clone ID: 700836546_FLI
tgcagaccgagctagctagctagcaagcaagcacagagatggaggcaaagcgaggccatgccctcatgtgcttggcacgtgtttcactcttcctctgcgctctaaccctatccgctgctcacggaagcaccacggttcaagacatcgcgagaaagttgaaactcggggacaacgagcttctgcgcacggagaagaagttcaaggttttcatggagaattacgggaggagctactccacagaggaggagtatttgcgccgtttggggattttcgcccagaacatggtcagagcggcggagcatcaggcgctggaccccaccgccgtccacggcgtcacgcagttctccgatctcaccgaggacgagtttgagaagctctacactggcgtcaatggcggcttcccgtcatcgaataatgccgccggcggtattgcgccgccgttggaggtggacgggccgccggagaattttgattggagagagaaaggagctgtcaccgaagttaagttacagggtagatgtggatcatgctgggctttcagcaccacaggatctatagaaggagccaattttcttgccaccggaaagctcgtcagtcttagtgaacaacagctccttgactgtgacaacaagtgtgacataacagaaaagacttcatgtgacaatgggtgtaatggaggtcttatgacaaatgcctacaattatttgctcgagtctggtgggttggaggaggagtcttcatatccctacactggggagagaggtgaatgcaagtttgatccagagaaaatagcagttaagatcacaaatttcaccaatatccctgctgatgagaaccaaattgccgcatatttagtaaaaaatggtccacttgctatgggcgtgaatgcaattttcatgcaaacatacattggtggtgtctcatgccctctcatatgtagcaagaaaaggctgaaccatggtgtgttacttgtgggatatggtgcaaaaggcttctcaattcttaggcttggcaacaaaccatactggatcatcaagaattcgtggggggagaaatggggagaagatggctattacaagctctgcagagggcatggcatgtgtggaataaacactatggtttctgctgcaatggtgcctcaaccacaaacaacacctacaaagaattatgcttcttattagctatgcacttaaggaaatctaaataaatatttttcattctaggtgatgtatcatgtatgtaccaaaatattttggtacgtaagtcttttaaaaagtttgcatctcctctttggttttccttagttctgaaagttatctcctaagaagacaatcatatgtactgtacgtagtgtgaagatatagtattgtatgctgcagaatatgattgtctaataaggtggactagctgtaataaaagatatttccaggttg

SEQ ID NO: 9173 - DNA, 1438 bp, Glycine max; identical to SEQ ID NO: 8079
  Clone ID: 700836572_FLI

SEQ ID NO: 9174 - DNA, 744 bp, Glycine max
  Clone ID: 700836619_FLI
gtacatctctctacactgatcccatccagaagcgatgatgcaatcagccttgtgacgtcactttgttcatgggatccctgcaagagaccaactgcagcagaggttcttcaacatcctttttttcagagttgcttttacatccctccatcccttcgcaccagagctgtaaccagaactccaccatctgctgggaccaggggatcactggatcggctgggcctcaagagatactctggtgctttgcctaatacaaaaatcaccaacaattttacttccccaaaagtacaagcttctatagcttcaggtgtgcaaaggaagctggatatggcaaatgaggatggaattaagagcaagaaatcattgaagactactcaacaatcaaaatatcgattaccaggaaaaggcagcccaacttctataaacaaggggaggactgcacgtggggtttcagaaacagctgagaagttggtcaatatgtcaatcggtactcgaagactgtccttgggacaaacccgtccgcctcccatgaaggctggagtcaattggatttctgaatctggaaacttgctcaggtccggacaacaaattccaactgaaagaactttgacaagaaaagttgccgggtgagatgatgatgagaagaagtatttgctgactttggactttggggaattcttatatgatctatattttcagtgtgctaatacgaagcttctaatgatgaatgatatatgggtttgcacc

SEQ ID NO: 9175 - DNA, 1872 bp, Glycine max
  Clone ID: 700836661_FLI
ccaaaatgttcctgcttccgctgggggtgagaccagggttgaagagaagaaaccaacacgtgaggatgtcacagatgagaggaaatcagaatcaacttctgctataattaatgcatcagaacttccacctcatgtccttcttgaaatgccagctttgtcaccgacaatgaaccaaggaaacattgctaaatggaggaaacaagaaggagacaagattgaagtgggcgatatattatgtgagatcgagacagacaaagctacacttgaatttgaaactcttgaagaggggtacctggctaagatacttgctccagaaggttcaaaagaagtggcagttggacatcctattgcaataacagttgaagatgcaagtgatattgaagctataatgaactctgttagcagaagttcaacaaaccaacagaaggctccccaacgtgacactaaaagcgaggccaaagctcagaaaaacaatataatacgaattagtccagctgcaaagttgctaattacagagtatggattggatgcgtcaacattgaatgcaactggtccttatggcaccctactgaaaggggatgttctttctgcaattaagtcaggaaaattatctccaaaacctgcttcatctaaagaaaaggtatcatcatttcaaagtcatcaacaagttgcagcttcccaagagtcaaaatctgacttaaagctgtcagatgcttatgaagattttcctaatagtcaaattcgcaaggtgatcgccaagagattattggactcaaaacaaaatacaccacacttgtatttatcatcagatgtcgtactggatcctcttctttcccttcgaaaggatcttaaagagcagtatgatgttaaagtttctgtgaatgacattattgtcaaagttgtagctgctgctctcagaaatgtaccagaagcaaacgcatactggaatgttgagacgggtgaggtggttttaaatgattctattgacatatgcatagcagttgccactgagaaggtaattgatggtgtttaactgtcggtatgatagtatcattatacaaaatactcaaaccttttgtttgactatagggcttgatgactccaataataaaaaatgctgatcagaagacaatatctgctatctcctcagaggtcaaggaactagctgcaaaggcacgtgctggcaaattgaagccacatgaattccaagggggaacttttagcatttcaaacttaggaatgtttcctgtggataaattttgtgctattataaacccccctcaggcttgcattcttgctgtagggagaggcaacaaagttgtggaaccagtaattggaactgatggaattgagaagccatcaattgccactaagttgagcttaacattgtctgctgatcatcgtgtttttgatggcaaagttggaggtgcatttctctctgctttgcaatcaaacttcagtgatataagacgactgcttttataatgacacaacacaaattttcacgttacttgattggacttctcacgaccaattatgtggatccaccacaaccaggatcaaacttgcatagcatccccatttttgtctttttcacttttatctcatcatctgaaacagttttcgattgttgtgcctcattagtttttgtataataatgtcttgggtctaattactaaatatcctgagaaaatacccaccaaggtaccatctaacattaggttttcaacaattgagattcaagcacgttggaatttttgttcattaggcactttgctgctctttgatgggtagttttgtatgaagagctttgtatagacagtcattcaaataccaacatttggatgaataaatattcttttcatgtgctgc

SEQ ID NO: 9176 - DNA, 1437 bp, Glycine max
  Clone ID: 700836727_FLI
gcagaccgagctagctagctagcaagcaagcacagagatggaggcaaagcgaggccatgccctcatgtgcttggcacgtgtttcactcttcctctgcgctctaaccctatccgctgctcacggaagcaccacggttcaagacatcgcgagaaagttgaaactcggggacaacgagcttctgcgcacggagaagaagttcaaggttttcatggagaattacgggaggagctactccacagaggaggagtatttgcgccgtttggggattttcgcccagaacatggtcagagcggcggagcatcaggcgctggaccccaccgccgtccacggcgtcacgcagttctccgatctcaccgaggacgagtttgagaagctctacactggcgtcaatggcggcttcccgtcatcgaataatgccgccggcggtattgcgccgccgttggaggtggacgggctgccggagaattttgattggagagagaaaggagctgtcaccgaagttaagttacagggtagatgtggatcatgctgggctttcagcaccacaggatctatagaaggagccaattttcttgccaccggaaagctcgtcagtcttagtgaacaacagctccttgactgtgacaacaagtgtgacataacagaaaagacttcatgtgacaatgggtgtaatggaggtcttatgacaaatgcctacaattatttgctcgagtctggtgggttggaggaggagtcttcatatccctacactggggagagaggtgaatgcaagtttgatccagagaaaatagcagttaagatcacaaatttcaccaatatccctgctgatgagaaccaaattgccgcatatttagtaaaaaatggtccacttgctatgggcgtgaatgcaattttcatgcaaacatacattggtggtgtctcatgccctctcatatgtagcaagaaaaggctgaaccatggtgtgttacttgtgggatatggtgcaaaaggcttctcaattcttaggcttggcaacaaaccatactggatcatcaagaattcgtggggggagaaatggggagaagatggctattacaagctctgcagagggcatggcatgtgtggaataaacactatggtttctgctgcaatggtgcctcaaccacaaacaacacctacaaagaattatgcttcttattagctatgcacttaaggaaatctaaataaatatttttcattctaggtgatgtatcatgtatgtaccaaaatattttggtacgtaagtcttttaaaaagtttgcatctcctctttggttttccttagttctgaaagttatctcctaagaagacaatcatatgtactgtacgtagtgtgaagatatagtattgtatgctgcagaatatgattgtctaataaggtggactagctgtaataaaagatatttccaggttgaaaac

SEQ ID NO: 9177 - DNA, 1443 bp, Glycine max; identical to SEQ ID NO: 8138
  Clone ID: 700836729_FLI

SEQ ID NO: 9178 - DNA, 1081 bp, Glycine max
  Clone ID: 700836730_FLI
ccaacttccattacaaaaccaaaacactcaagttaacttcaacacctttaattttctgaacgaaattcagccacagaatatcaaagggagcgaagatgagtcaggagcagccaaggcgcccccaaggccaagaccccatcaaatacggcgacgtttttgacgtctacggtgaccttgcacagatgcccattgcaccggaagatgctgccatgatgcaaagcgcggaagctcgagtactcggaaaaacccaacccggcggagcttcttccgtcatgcaatccgccgccacaaggaatgaacaggctggtcttgtcggtcaccaggacgtcaccgacatcaccggcgaccatggcgtcacagtcacagaaactacattccatggaagacgcataataaccgaggctgttggtggccaggtagtggaacagtatgtggagccaaatccagttgaggctggacgaaccagtgcaattaaggagagtgctataacaataggagaggcattggaggccacggcacagacggtgggtcacaagccggtggatcagagtgatgcctcagcgattcaggcggcggaggttagagcaacgggaagtaacgttataacgccgggaggacttgcggctatggctcaatcagctgctgcttataatgctgactgcaagcatgaccaggacaaggtcaagcttgccgacgttctgaccggagcaaccgccaaattgcccgcggacaaggccgcgacgctgcaagatgctgaaggggtggcgagtgctgaggccaggaacaaccccgatgccaccgccactcccggtggggtagccgcttctgttgcggctgctgctaggctcaatgaaaatgttaagtaaaaagtagtgttatgtatgttgataatcatacctgtgtttcatgatgtgtgaggagtggcctgttgatatatgtgttgtataactgtaagtggtgctgcaacatgttgtttctttcttttaagcttgtgagatatgttactacttttctggtatcttttaaggactctacttaaaggtgatgtatactatgctatggatgatgtctgtgccacctt

SEQ ID NO: 9179 - DNA, 967 bp, Glycine max
  Clone ID: 700836732_FLI
ctgaagcaaagcaatggctacttcaaagttgaaaacccagaatgtggttgtatctctctccctaaccttaaccttggtactggtgctactgaccagcaaggcaaactcagcggaaactgtttctttcagctggaacaagttcgtgccgaagcaaccaaacatgatcctccaaggagacgctattgtgacctcctcgggaaagttacaactcaataaggttgacgaaaacggcaccccaaaaccctcgtctcttggtcgcgccctctactccacccccatccacatttgggacaaagaaaccggtagcgttgccagcttcgccgcttccttcaacttcaccttctatgcccctgacacaaaaaggcttgcagatgggcttgccttctttctcgcaccaattgacactaagccacaaacacatgcaggttatcttggtcttttcaacgaaaacgagtctggtgatcaagtcgtcgctgttgagtttgacactttccggaactcttgggatccaccaaatccacacatcggaattaacgtcaattctatcagatccatcaaaacgacgtcttgggatttggccaacaataaagtagccaaggttctcattacctatgatgcctccaccagcctcttggttgcttctttggtctacccttcacagagaaccagcaatatcctctccgatgtggtcgatttgaagacttctcttcccgagtgggtgaggatagggttctctgctgccacgggactcgacatacctggggaatcgcatgacgtgctttcttggtcttttgcttccaatttgccacacgctagcagtaacattgatcctttggatcttacaagctttgtgttgcatgaggccatctaaatgtgacagatcgaaggaagaaagtgtaataagacgactctcactactcgatcgctagtgattgtcattgttatatataataatgttatctttcac

SEQ ID NO: 9180 - DNA, 1268 bp, Glycine max
  Clone ID: 700836738_FLI
cagaccgagctagctagctagcaagcaagcacagagatggaggcaaagcgaggccatgccctcatgtgcttggcacgtgtttcactcttcctctgcgctctaaccctatccgctgctcacggaagcaccacggttcaagacatcgcgagaaagttgaaactcggggacaacgagcttctgcgcacggagaagaagttcaaggttttcatggagaattacgggaggagctactccacagaggaggagtatttgcgccgtttggggattttcgcccagaacatggtcagagcggcggagcatcaggcgctggaccccaccgccgtccacggcgtcacgcagttctccgatctcaccgaggacgagtttgagaagctctacactggcgtcaatggcggcttcccgtcatcgaataatgccgccggcggtattgcgccgccgttggaggtggacgggctgccggagaattttgattggagagagaaaggagctgtcaccgaagttaagttacagggtagatgtggatcatgctgggctttcagcaccacaggatctatagaaggagccaattttcttgccaccggaaagctcgtcagtcttagtgaacaacagctccttgactgtgacaacaagtgtgacataacagaaaagacttcatgtgacaatgggtgtaatggaggtcttatgacaaatgcctacaattatttgctcgagtctggtgggttggaggaggagtcttcatatccctacactggggagagaggtgaatgcaagtttgatccagagaaaatagcagttaagatcacaaatttcaccaatatccctgctgatgagaaccaaattgccgcatatttagtaaaaaatggtccacttgctatgggcgtgaatgcaattttcatgcaaacatacattggtggtgtctcatgccctctcatatgtagcaagaaaaggctgaaccatggtgtgttacttgtgggatatggtgcaaaaggcttctcaattcttaggcttggcaacaaaccatactggatcatcaagaattcgtggggggagaaatggggagaagatggctattacaagctctgcagagggcatggcatgtgtggaataaacactatggtttctgctgcaatggtgcctcaaccacaaacaacacctacaaagaattatgcttcttattagctatgcacttaaggaaatctaaataaatatttttcattctaggtgatgtatcatgtatgtaccaaaatattttggtacgtaagtctttt

SEQ ID NO: 9181 - DNA, 911 bp, Glycine max
  Clone ID: 700836744_FLI
agggaatcaatgttttttgttattcctgcttttggtggcattgtttcctgggagggagaaggggcaccttttggggaatctgaccagagcatttctcatcagattgttgacagggaagcacaaggacatcggttcctctcaagagaatatgttcaaccacagtgggtatatgactgtgtgaatgcacggattattttgccaactgagaattatttggtgggaaggactcctccaccacacttgtcaccttttattaactacgatgaagaaggagcatacattcctgattatgcaaagaccattaaacacttgcaagctgctgccagaaaggaaatccttccacttcctggtgttgggaaggaagatctggaagatcctcaaaatcttctggttgaaggtatcattgatcgagcagaggctaatgatgcagctcagagaaagcagaagatgatgattttggagcagcaataccgtgatgatttgaaaaaagaacttcaaggtgttacatatacttcagcaggttctaaagaaacatctactggagtggtacagactggtgaatcaactgccagtgttcaagaaaatgttgatgatgacatgagtaaagttatgatgtcacgtaaaaaaaggaagctagctgaagccatgaagatatctaagaaactgaaggaagctcagactgatcgcattaaacaacggaaaaagaaaatagatgaagctcaaaggcaaaggagttgaagagatgctgcattctcaaggattccagcacgacttcattgtgtcatagctgatgatttgaaaggttaagtcatttttgttcggagtataggcagttgaacttattctagtcttgttctctatgttttgtaaccgatatgtttctaggccaaaaagaaaaaatattttgattt

SEQ ID NO: 9182 - DNA, 1220 bp, Glycine max
  Clone ID: 700836747_FLI
ttttcatttctcggtgttgttgttcttcatccatggcttttcctcagcaccacttccaacagcactaccaaacccaacagcaacaacagccacaaaacaaatccttcagaaatctgcaaacaatcgatggtcagatgtcacagcaggtggcgttttacaaccctactgatttgcaagatcaatcccaacatccatcctacattcctccatttcatgttgttgggtttgctccgggtcctgttcctcctgctgatggcagtgatggtggagttgatttgcaattgcaatggaattatggtttggagccagagaggaagagactaaaagaacaggattttttggagaacaattctcagatatcttctgttgatttccttcaaccacgatcagtgtcgactgggttgggcttgtcactagacaatactcgcctgacatccactggagactcagctttgttgtcactcatcggtgatgacatcgagcgtgagttgcagcagcaggacgcagagatagatagatttctcaaagtgcagggtggacgtttgcggcaagcagtcttggagaaggttcaggcaacacagcttcagagtgtctcactaattgaagacaaaatccttcagaaacttcgcgagaaagaagctatggtagaaagcatcaacaagaggaacattgaactcgaagatcaaatggagcagttgactgtggaagctggttcgtggcaacagcgagcaagatataatgaaaatatgattgctgctctcaagttcaaccttcagcaagcgtatgtccaaagcagagatagtaaagaaggatgtggtgacagtgaggtcgacgatacagcttcttgctgcaatggccgttccctcgattttcatctgctttcaagggagaacaccgacatgaaagagatgatgacatgcaaggcttgcagagtcaatgaagtgaccatggttttgttaccttgtaagcatctttgcctctgtaaagattgtgaaagtaagcttagtttctgtcctctatgtcaatcctccaaatttatcggcatggaggtctacatgtaactgcaaagtatacttctacttgtgaaatctctaatttcatgtttttattatgtgtcctttcatgtagcttgtgtctcaaggaccatgacaccttgtaactagtttttaagatgtatttgaccataatgaatttcacttgcttgagaacagtgaattttg

SEQ ID NO: 9183 - DNA, 591 bp, Glycine max
  Clone ID: 700836776_FLI
gagagtcttcggaaccaacatcttttctcagttctttttggtcaagcatgctctgaagcacatgaaagaagggagctgcatcataaactctacttcagttaatgcatacaatgggaatccagaagcgttggactacactgctaccaagggagcaattgtggccttcaccagaggtctttctcagcagctagcgagtaggggaattagggtgaatggtgtggcacctggcccagtttggacgccaatacaaccagcttcaaagcctgctgagatgattcagaacttggggtgtgaggtgccaatgaaccgcgtggctcagccttgtgagattgcaccatgttatttgttcttggcaacttgtcaggactcttcctactttactggccaagtcctccatccaaatggtgggatggtcgtcaacgcttaagctatagtgtgccttcacctatttcctattgaactggtttttctagcttacccctcctgaataagcagtgttacgttcggatgcatattttacgttgaaatacattgtgtttgtagcatatatgccttgagatgaataaacctttacgtgagttatttatcttc

SEQ ID NO: 9184 - DNA, 1787 bp, Glycine max
  Clone ID: 700836872_FLI
ctggtttagacgctgaagatattgctctattatttgaagcaataaagccagcattgcaggatgctgaaggtgtcatgcagaagaaggcatacaaagtactttcgatcattctgaggagctcctccaatgattttgtttcatcaaagtttgaggagttgcgtcaaactatggttgaagttcttccgtgtcatttttctgccaaacgccatagacttgattgcctttacttcttaatagttcatgtctcaaagtccaaggctgatatggagcactggcgagacattttccttactgaaattatacttgctcttaaagaggctaataaaaaaaccaggaacagagcttatgatattcttgtcgaaattgcccgtgcatttgtggatgaagagagaggtgggaacagagaaagcttgaataatttttttcagatggttgctggacactttactggggaaactccacatctgataagtgcagcagccaaaggtttagcccgtttggcttatgagttctctgatcttgttttaactgccttcaaattgctcccaggcacacttactctcctgaggagtgataataaagagataatcaaggccaatcttggttttttgaaggtattagtagccaaatcacaagcagaaggcttgcagatgcacttgaaaagcatggtggagggtttgttgaagtggcaagacaactcaagaaatcattttaaggctaaggttaaacttcttttgggaatgcttgtcacaaagtgtgggcttgaggctgttaaagccgtcatgcctgaagaacacatgaaacttctttccaacatacgcaagatcaaggagcgaaaagagaggaatcgaagtgctaaatcggaagaaactagatctcatttttcaaaagcaaccacatccagacaaagcttgtggaatcatacaaagattttttcggattttgatggggatagtggcaatagcaatgcagaatacatgatttctagagggagcaaggctttcttacatccaaaatcagcagcatcttcatttaggtccaatatcagactgaagaagaatttgcctgagcacttgtctgaccaatcagatgatgagccacttgatttgcttgatcggaagaaaacaaggtcagctcttaaaacgtctgagcatcttaaaagaaagtcaaggttagatgatgaggtggaggtagattcagaaggacgtctgattatccatgaggaaggggaatggaagaaggaaaaacatgcagatgatgattttgattctaggagtgaacgtgatagtcacatatctgccaagtctggaactacaggccagaagcggagaaaaacatctgattccggttgggcatacacagggaaggaatatgctagcaaaaaggcaggtggagatgtgaagaggaaggacaaacttgaaccgtatgcatattggccactggatcgaaaaatgatgagtcggcgaccacaacagcgggctgctgcaagaaaaggtatggctagtgttgtaaagatgaccaaaaaacttgaaggaaaaagtgcctctggtgtgctgtccataaacagcttgaaaccaagaaggactcacaagaaaggcagcaaggaaaataaaaaagcagcgcgagcgtaggttatttcccctgatatgcaggtatatttgataatcataatgcattcgcattatgccaattttgaaactaccctgtgctgtatatcgaagttaaattaaatcaaattctgttttttttattctattgtttatttgatgagaaataaacgattgttt

SEQ ID NO: 9185 - DNA, 1302 bp, Glycine max
  Clone ID: 700836884_FLI
tgcagaccgagctagctagctagcaagcaagcacagagatggaggcaaagcgaggccatgccctcatgtgcttggcacgtgtttcactcttcctctgcgctctaaccctatccgctgctcacggaagcaccacggttcaagacatcgcgagaaagttgaaactcggggacaacgagcttctgcgcacggagaagaagttcaaggttttcatggagaattacgggaggagctactccacagaggaggagtatttgcgccgtttggggattttcgcccagaacatggtcagagcggcggagcatcaggcgctggaccccaccgccgtccacggcgtcacgcagttctccgatctcaccgaggacgagtttgagaagctctacactggcgtcaatggcggcttcccgtcatcgaataatgccgccggcggtattgcgccgccgttggaggtggacgggctgccggagaattttgattggagagagaaaggagctgtcaccgaagttaagttacagggtagatgtggatcatgctgggctttcagcaccacaggatctatagaaggagccaattttcttgccaccggaaagctcgtcagtcttagtgaacaacagctccttgactgtgacaacaagtgtgacataacagaaaagacttcatgtgacaatgggtgtaatggaggtcttatgacaaatgcctacaattatttgctcgagtctggtgggttggaggaggagtcttcatatccctacactggggagagaggtgaatgcaagtttgatccagagaaaatagcagttaagatcacaaatttcaccaatatccctgctgatgagaaccaaattgccgcatatttagtaaaaaatggtccacttgctatgggcgtgaatgcaattttcatgcaaacatacattggtggtgtctcatgccctctcatatgtagcaagaaaaggctgaaccatggtgtgttacttgtgggatatggtgcaaaaggcttctcaattcttaggcttggcaacaaaccatactggatcatcaagaattcgtggggggagaaatggggagaagatggctattacaagctctgcagagggcatggcatgtgtggaataaacactatggtttctgctgcaatggtgcctcaaccacaaacaacacctacaaagaattatgcttcttattagctatgcacttaaggaaatctaaataaatatttttcattctaggtgatgtatcatgtatgtaccaaaatattttggtacgtaagtcttttaaaaagtttgcatctcctctttggttttcctt

SEQ ID NO: 9186 - DNA, 1776 bp, Glycine max
  Clone ID: 700836945_FLI
cgagtagtggtggctctgtggagttgggtgctgtggcggctattcgcatgccgttacttcatgtgtcaaatttcaaaggagggacgccggagttggttgagacgtgttatgctatacttgttttggttctgccaagttcaagcactagggtttggacctaccatgagatggagatagttgaagtggttgctgatcaggtggctgttgccctgtctcatgcatctgttcttgaagagtctcagctgatgagacagaagctggaagagcggaaccgagcactgcaacaggctaaaaagaatgcaatgatggccagccaggcacggaagtcgtttcagaaggtgatgagccatggaatgcggaggcctatgcattctgttctggggatgctgtcattgtttcaagaggataatttgaggtctgagcagaagattattggtgatacaatgttgaaagttggacatgtgctctccagtttgattaatgatgtaatggagatttcagaaaatgaaaagggaggcttccggttagagatgaaacctttccttctgcattcaatggtgagggaagctgcttccattgccaagtgcttgtgtgtttatgaaggctttggttttgaaattgatgtccagaagtctttgcctgaaacagttatgggtgatgaggcaaggacttttcaagtaattttacacatgattggctatttattgaacatgaatgacaaagggactctcaattttcgagtttttcttgaaagcgatggtggagacagggatgataaaaatattggaatatggaggtcaagcaatcaaaatgaatatgtacatataaaatttgattttcagattactgagagttctcagtcagatgaagcaatttcaacaatacattatactggtaggaggcagtactacaacaatgaacctaaggggggcctgagcttcagcatgtgcaaaaagttggtacagatgatgcaaggtaatatatggatatcaccgaactcccttggtttggtgcatggcatgacacttcttctcaagtttcagataggaccatcacttgaaaaatccatatttgcacctaaagattattcaagctcacagttcagaggccttaaggttgtgttagccgaggacgatggtgtaaacaggaccgtgaccaagaagctacttgagaagcttggttgtcaagtaattgctgtttcatcagggtttgagtgcctgagtgctgtaagtggtgctggtaactcattcagaattatcctgttggatcttcacatgcccgaaatggatggctttgaattggcaaagagaatccggaagttccatagccgtagttggcccttgattatagctcttataacaagtgcagaagaacatgtgagggagaaatgcctacttgcaggaatgaatggattgatccaaaaacctatcgtacttcatcagatagcagatgaacttagaacagtcctacaaagagcaggtgaaaaactgtgagaacagttttaaaagcatgcttcggtttaagaaaatatgatttcattagtaattacaaaaaggtcatgttattttagttctgtttcctattttcaagcattgcgggctatgcttttattattttgtgaacaaattcttgaaaataagaaacaaaataaaataatgtgtcttttataattactaatgaaagagtgactcaattttctgaagttgctcaaaacggcattgtgaacttgggggatttctaacaatatcaaataataaaaaaagtagccttttgtcc

SEQ ID NO: 9187 - DNA, 614 bp, Glycine max
  Clone ID: 700836954_FLI
ggcattcttcttgaggccagacaaggattccaagtatcgaaacatttggaatttgtatcacagttggtttggaagaatggcacttttctttgcagcattgaatatagtcctggggatgcgagctgcgggagcagggaatgattggaaggcaggctatgggttccttcttagcattgtacttgtcgcagttatcgttctggaagtcttggcgtatttgaaaaggtcagaaaagcgttctcttcctcagactttccaaatggacccagttggagatgctaacttcccaaccaatctagctaaagggtgaatgtgttggctcctagttttgtttgcacttgtacaagctgtgtcaattgtctcattcagccacttcagactaaacctcattcatcctacactactgcatgtgaactgagttgtggagctttcttgatgtagatagatatgtagccacctagaagtttgccaagatggacaatcctgacgtttggcttcctcacctgaacttgagattgaaccttttttgctttcttcattggttgtttttttgcatccgcatggtcagaaatggaatgctactacatttacatctatatatattttgttattcttct

SEQ ID NO: 9188 - DNA, 595 bp, Glycine max
  Clone ID: 700836955_FLI
cagaaacccatttgccagagctggaggcaagagatggaatttccataacaatggaagacattggaacttcacgtgtttggaacatgcgctatagatactggccgaacaacaaaagcagaatgtatttgctcgagaacactggtgactttgtgagagccaatggactccaagagggagatttcatagtgatatactcagatgtgaagtgtggcaaatatatgataagaggagtgaaagtgagacaacaaggtgtgaaaccagagaccaagaaagtaggaaaatcgcagaaaaaccagcatgggacagggacaaatgcatcaactacagcttgtactgctgctaataatggcacgccatcgtcaccgaaaaccaaagctgaaaaaagtagtaaattaatataatacatagaatatgtatgtacaatatatattatattatattatatataataaaataagagactctgaagtctgaacacggtgctcacataatgttgaggagttttagcatgccctgcaatggaggctgtcaaggatttgtataacagtattttgggtatatttcttttcataatttattttgcgaatgttatgtg

SEQ ID NO: 9189 - DNA, 883 bp, Glycine max
  Clone ID: 700836967_FLI
aatttggattcaagaactgggaaatgttccacttctggaaagcagtcatcaaaagaagagcttagtagatgtaaaaatatctgtgcctacccgtcttataagatttccaaagcattctggccccactgggcgtatcggatgtttgactcttattcgcttgcacaaagggctgcagatatgtggaagcgaatagttgggatgcctgacatggatagtctcattaagaagcctgatattttatcatttcacatagccagtaaaatacctgtgtctgagtctacaaggcaggagcttttggatattgatggcattgcatataggctgcgcagggaaattgaattactagagagcattgatcttatccggtgtaaaagctgcgagactataattgcaaaaagaagtgatatgttggtgatgtcaagtgagggtcctcttagtgcatatgtgaatccaggtggttatgtgcatgagataatgactctttacaaggcaaatggtttagctctcgttggatcagcagcaacagattacagttggtttcctgggtatgcatggacaatcgcaacttgtgcaacatgtaaaacacaaatgggatggctttttacagccaggaacaaacaactgaaacccagctatttctgggggattcggagctgtcaacttgcagaggaaatacgccaaaacctttagtttgatatgtatgcagtcatctatccaaagcttagtgaaagccatgttcaagtaacactgcatggttatgtatataatgcaactttcttgtagcacttcgcatgttggtatacttatattagtaaaatatgttgcaacagcttggaagaaataaagtcacacctgaagatatttttagatgcgaatttttgcg

SEQ ID NO: 9190 - DNA, 647 bp, Glycine max
  Clone ID: 700837002_FLI
ggcagttacaaaactaaaggcggcgccggtgtcgcgcacggaagtttagagtccggcatgacggcggtgaagctgctggatttgatgccggtgatgcgaagctccgatgaggacgcggcggagatggcgccggaggagatgaatccgaagctgtttggtgtggcgattggagcgaagcgagcgagagagggaggaggtggtggagattgtggaggtggaggagaggaagatacgctgctgcgcctgcatcacgcgggttctgcggacgtgaaatctgagccgttggatttccagaaccatcgcgagaatcagaaaacgccgtggttgagtccgtgttacaggacaaatcaaagagtgtgcaactgacacgcggcgacggttaagcaaaggaaacattttagattagattacgtagtggcgtagggaatccgagaccggcacgcggagacgtcacgtgcgtcgtttaaccgtttgggaccgattcccagaagtttctcagaagtcggaggaaaacgatactttgtagtccttttttcttctctctctcttttttttttatataaatatattttttttgttgcatgaaattggacttggactgtagctatgcctttgagggtagtgttaaatatttcatttagttctat

SEQ ID NO: 9191 - DNA, 627 bp, Glycine max
  Clone ID: 700837058_FLI
catttatattttcaactgctgcactagttccagttgctgctgctggtcatgctgcgattaaagtggcaaaacttgagaaatggcgtagagaggctatttggaaccgggtgaaagactttcatttgcttacaggaatacccgttacaagtcacattatatccctagtagtaggcagtgaagacaaagcacttcaagcaagccggcatttattgcaatctggcttccacgtgactgcaatcagaccacctactgtgcctcctaactcatgcaggctgcgagtggccctaagtgcagtccatacaagggaagatctggaaaaccttgcagctgcactctcacgttgcatcaatttccaagatacccgcatatatgattccaatgcctatgcaagactgtagctagctcttgatttttcaggatgaattgcgtcatcaacgattttgtgactatacaggtaataagtacacctttagttcctcattagcaagttcaagtcaattacattccaattagagtggtagcttatattccctcatgttatatcaaaatgacaagctattttgtcaacatctagataaatattgttaaatattgatatttatattttatatgtatttaattttgatt

SEQ ID NO: 9192 - DNA, 1193 bp, Glycine max
  Clone ID: 700837068_FLI
gcgccgctacttccagcagctcgtttcggcgttgcggttctgccaccgcaacggcgtggcccaccgcgacctgaagccgcagaacctcctcctcgacggcgacggaaacctcaaggtctccgacttcgggctctccgcactgccggagcagctcaagaacggcctcctccacaccgcctgcggcacgccggcgtacaccgcgccggagatactccgccggagcggcggctacgacgggtccaaggccgacgcctggtcctgcggcctcatcctcttcgtcttccttgccggacacctcccgttcgacgacaccaacattccggcgatgtgcaaaaaaaatttcccgacgagattaccagttcccggagtggatttcaaaaccagcccgttttgttatccacaaattactcgacccgaatccggaaacccgaattagcctggagtccctgtttgggaacgcgtggtttaagaaatcactaaacccggaaacggcggaagaaaacgcgttggggctgagttatgtgaagagtagttataattacgaagggagtaaaaaaagttcgggagtgacagcgtttgacataatatcgatgtcttcgggtttggatttgacgaggttgttcgaaacgacgtcggatttggggagtaaaagagagaagaggtttagttcgagtgcgagagttgaggtggtggaagagaaagttaaggaagtgggtggggtattggggtttaagattgaggttgggaagagtaacggtgcaattgctttggtgtaagggaaggtggctttggtgtttgaggtgcttgagattgtgcctcatgaacttctttttgtggcggttaaggtggtggagggtgcgttggagtttgaggaacatcattggggggattggaaagatgcgttgcaagatctcgtgctctcttggcacaaccaagaatcgtgatcatcagttaatgataggtatagttagttcttctcaagtgaaggatctacatgaggtttgatgttgaaggactaattgcagaacatgacatgcacactcacatcgtgctcgtcctgatgagaagaaacaaacaaggttgatgatgcttgttttgtgatttgattttgattttgtgttgaagcttagttataggtgtattaatttatatatgatggtttgaaaaataaaagttgttgttatgtatacatg

SEQ ID NO: 9193 - DNA, 1567 bp, Glycine max
  Clone ID: 700837087_FLI
gagtgccagatccaaaagctgaatgccctcaaaccggataaccgtatagagtcggaaggtgggttcattgagacctggaaccctaacaacaagccattccagtgtgccggtgttgccctctctcgctgcacccttaaccgcaatgcccttcgtagaccttcctacaccaacggtccccaggaaatctacatacaacaaggtaatggtatttttggcatgatattcccgggttgtcctagcacttatcaagagccgcaagaatctcagcaacgaggacgaagccagaggccccaagaccgtcaccaaaaggtacatcgcttcagagagggtgatttgatcgcagtgcctactggtgttgcatggtggatgtacaacaatgaagacactcctgttgttgccgtttctattattgacaccaacagcttggagaaccagctcgaccagatgcctaggagattctatcttgctgggaaccaagagcaagagtttctaaaatatcagcagcagcagcaaggaggttcccaaagccagaaaggaaagcaacaagaagaagaaaacgaaggaagcaacatattgagtggcttcgcccctgaattcttgaaagaagcgttcggcgtgaacatgcagatagtgagaaacctacaaggtgagaacgaagaggaggatagtggagccattgtgacagtgaaaggaggtctaagagtcacagctccagccatgaggaagccacagcaagaagaagatgatgatgatgaggaagagcagccacagtgcgtggagacagacaaaggttgccaacgccaaagcaaaaggagcagaaatggcattgatgagaccatttgcacaatgagacttcgccaaaacattggtcagaattcatcacctgacatctacaaccctcaagctggtagcatcacaaccgccaccagccttgacttcccagccctctggcttctcaaactcagtgcccagtatggatcactccgcaagaatgctatgttcgtgccacactacaccctgaacgcgaacagcataatatacgcattgaatgggcgggcattggtacaagtggtgaattgcaatggtgagagagtgtttgatggagagctgcaagagggaggggtgctgatcgttccacaaaactttgcggtggctgcaaaatcccagagcgataactttgagtatgtgtcattcaagaccaatgatagaccctcgatcggaaaccttgcaggggcaaactcattgttgaacgcattgccagaggaagtgattcagcacacttttaacctaaagagccagcaggccaggcaggtgaagaacaacaaccctttcagcttcctggttccacctcaggagtctcagaggagagctgtggcttagagagccctttttgcatgtgctaccacacttttgtccttttgggctctagctagtgctggtagcagtaaataagaatgaataaaagaaacaaaggcttagatgccctttgttaagtgtagaataacgggtatagtaactatgtacccttgtgtaatgagtcactcaagtacctatgcgggaaaagcat

SEQ ID NO: 9194 - DNA, 1512 bp, Glycine max
  Clone ID: 700837152_FLI
cactcctcgcccctccaggcgccggagtttggacatcttacctttaaaatatatcgccgacatgcccatgccgccgccggaggctttacggaagcgtcccaagctcaacctcagggactgcgataacgcaattgaaaattgcgacgaatccactggacacaaggtgacgaagaaggaatccaaagtagactacgacgacgacgtcgtttcggaaactaagaacgtaactgtttcggaagttgaagaagaatctcccaagttcggcgtgacgtccgtttgcggcaggagaagagacatggaagattccgtctcggtgcggccttgcttcacccaaggcttccactacttcggcgtcttcgacggtcacggttgctctcatgttgcgactatgtgtaaggagcggctacacgagatcgtgaatgaagaaattgaaagcgcgcgcgagaatttggagtggaaactgacgatggagaacggattcgctcgcatggacgacgaggttcatcgccggagccagagcaaccagaccttcacctgcaggtgtgagctccagactcctcactgcgacgccgtcggatccaccgccgtcgtcgccgtcgtcacgccggacaaaatcgtcgtctctaactgcggcgactcccgcgccgtcctctgccgcaacggcgtcgccatccctctctcctccgatcacaagccggatcgacccgacgaattactccgagtccaatccaagggagggcgcgtgatttactgggacggtccgagagtgcttggtgtgttagcaatgtctcgagccataggtgacaattatctgaagccgtacgtgatttcagaaccggaggtgatggtgacggagcggacggaggaggacgagtgtttgatactggcgagtgatgggttgtgggatgtggtatcgaatgagaccgcatgtggggtggtgaggatgtgcctcaaggcgcagaagccgccggggtctccggggagtgacgtggcggctgacggttccgaccgtgcttgctccgatgcgtcgattctgttgaccaagttggcgctggcaaggcatagttcggataatgtgagcgtggtggtggttgatttgaggagggatcaacgacaatcatcaaactacaacgacgttaattaattgattgattaacggagacgagaaaccaaaccaaactaaggaatcacaaatgaatgagatcgcccttttaaccataatgggcacaccctttgttttcaggacttcgttaaggacgggaagaccaaatcagagggaggaggggcgtgtggcttttgcttaatcaaatgttgattgtaatgtaatgggattttaggtttaaaaaaaaaaaaaaagaaagaggaaggacattgttaactttggaaaatgaaaaaaaaaatataggaaaattttactgtagggaaaatttgtgtcgacaaaggtatcaatcggccggtcgacaccccttttctttttgtccataatcgaatctataaattggattttccttt

SEQ ID NO: 9195 - DNA, 1200 bp, Glycine max
  Clone ID: 700837183_FLI
tctgcacaagaactcgccggagaaaaaaaaaaaagaatgatcgacagagggaaaacgtcggtcgccgtcgtgtactccgacggaaaccgcgagatcaatgtcggcacggtcgtggtggaccccacgctcaactttaagagcctcgtcacgctcctcagccagcagatcgggatctcgccgcaccagttatccgtctacctcgcctccgtcggcaccgaccgcaagattccggtcacgtccaagctcaacctcgccgccgtgcgccgcgacggcgccgcgcactacttcttcgtgaagcgctccaagcgcaacaagaaggcgaacggaagcggaaacggaaaggacgccatgaagaagaattaccctcgtcctccgccggagaaggtcatgctcctccgccgtgccgatgccggagctccgcctttcatgccgccggttctgaatcgggcgcagtacgagcgaaggctgatgaatctgcacatcgagagacagtcttatctgatgaatatgagcctcggagtcaacggcggaagagaatcaccgaataactccgccgccgtcaccgccgccttccccgccgtgtgcgatgaatgtttaaaggcaaaagtcagcggaaataaccgcgattttcatccatgcgtgaacgacgcagttattgtagggttccggtcacgggagggaccgattacacggccggtgaagaacgccgacaaagccggcacctgaattctggagttggttgttttttgtttcgtttcgtttcttttctctcttcaaggaagagaaaaattgtgcataagaaaaaacataaacaagaaggaagggggtagtgatcacgtgcggaggggtatacgataagcgaaagagaggtatacctttacagttatgtgtttgacatttgattaattagttcttaggtgactataagcaattacgcataataatatatagacgatcttgccctaaggggaagaaggggcttttaattattgagcttttgtagagagggttgttttggaaatttcacttatcagttggattgctttggtccaacgtcaaaattggggtgcattgtattgtgtagaaccttaacaagagaggttgaagtgtttgctcatgcaataaatgcttcctcttcttttggcattgcataatgcatgttcattttgtagtacctcgtaaaagaatgcaaatttatat

SEQ ID NO: 9196 - DNA, 1498 bp, Glycine max
  Clone ID: 700837254_FLI
tcaaaccttgctctatactacacagtacacacactagaagaataatggcttccatcctccactactttttagccctctctctttcttgctcttttcttttcttcttatccgactcagtcacccctacaaaaccaataaaccttgttgttctacccgttcaaaatgatggttccacagggctccattgggccaacctccaaaaaagaacccctctaatgcaagtaccagtcctggtggacctcaatggaaatcacttgtgggttaactgtgagcagcagtactcatccaaaacgtaccaagcacccttctgccactccacccaatgctctagagccaacacccaccaatgcctcagttgccccgcggcatcaaggccagggtgccacaaaaacacgtgtggcctcatgtccactaatcccatcacccaacaaaccggtttaggtgaactaggagaagacgttcttgcaatccacgccacacaagggtcgacccaacaacttggcccattggtcacagtcccacaattcctcttttcttgtgcaccttccttccttgttcaaaagggtcttcctagaaacactcaaggtgtggctgggttaggccatgcaccaatttctcttccaaaccaactcgcttcccactttggcctacaacgccaattcaccacttgcctttctcgctaccctacttcaaagggtgctataatattcggggatgcacctaacaacatgcgacagtttcaaaaccaagatattttccacgatttggccttcaccccattaaccatcaccctgcagggagagtacaacgtgagagtcaactcaataagaatcaaccagcacagtgtgttcccactgaacaagatatcatccaccatcgtagggtcgacctctggaggaaccatgattagcacctcaactcctcacatggttctccagcaatccgtgtaccaggctttcactcaggtgtttgctcagcagctaccaaagcaagcacaggtgaaatctgtggcaccatttgggttatgcttcaactccaacaagatcaatgcatatcctagcgtggaccttgtgatggacaagcccaatggtcctgtttggagaatctctggtgaggacttgatggtgcaggcacaacctggggtcacgtgtttgggtgttatgaatggaggaatgcaacctagagctgaaattaccttaggggcacgtcagttggaagagaacctggtggtgttcgatcttgcaaggtcaagggttgggtttagcacctcatcactgcactcgcatggagtcaaatgtgctgacctcttcaactttgccaatgcatgatgagccaagatcgcgagactttttataatatgcttatttataattaagcaagcatctactacatgttatggttaataaaagtaataatgtaagaataaagactttgaactaaataataatatgaacgattctctttcgttgttcaatgagaaattaatgttgttgctgtt

SEQ ID NO: 9197 - DNA, 1067 bp, Glycine max
  Clone ID: 700837258_FLI
ctacactggcgtcaatggcggcttcccgtcatcgaataatgccgccggcggtattgcgccgccgttggaggtggacgggctgccggagaattttgattggagagagaaaggagctgtcaccgaagttaagttacagggtagatgtggatcatgctgggctttcagcaccacaggatctatagaaggagccaattttcttgccaccggaaagctcgtcagtcttagtgaacaacagctccttgactgtgacaacaagtgtgacataacagaaaagacttcatgtgacaatgggtgtaatggaggtcttatgacaaatgcctacaattatttgctcgagtctggtgggttggaggaggagtcttcatatccctacactggggagagaggtgaatgcaagtttgatccagagaaaatagcagttaagatcacaaatttcaccaatatccctgctgatgagaaccaaattgccgcatatttagtaaaaaatggtccacttgctatgggcgtgaatgcaattttcatgcaaacatacattggtggtgtctcatgccctctcatatgtagcaagaaaaggctgaaccatggtgtgttacttgtgggatatggtgcaaaaggcttctcaattcttaggcttggcaacaaaccatactggatcatcaagaattcgtggggggagaaatggggagaagatggctattacaagctctgcagagggcatggcatgtgtggaataaacactatggtttctgctgcaatggtgcctcaaccacaaacaacacctacaaagaattatgcttcttattagctatgcacttaaggaaatctaaataaatatttttcattctaggtgatgtatcatgtatgtaccaaaatattttggtacgtaagtcttttaaaaagtttgcatctcctctttggttttccttagttctgaaagttatctcctaagaagacaatcatatgtactgtacgtagtgtgaagatatagtattgtatgctgcagaatatgattgtctaataaggtggactagctgtaataaaagatatttccaggttgaaaacagagc

SEQ ID NO: 9198 - DNA, 2501 bp, Glycine max
  Clone ID: 700837309_FLI
gaatagaagtaactttttctctcttctctgcagtggtggtaatttattttccaatggcttcagcaagcggagcggcgaattcctccgttccgccgccgcaaatccacacctcacgaacaaagctgagccaccacagcagcaacaacaacaacaacatcgactccatgagcaaggccatcgcgcagtacacggaggacgcgcggctccacgccgtcttcgagcagtccggcgagtccgggaggtccttcaactactccgaatcaatccgcatcgcatcggaatccgtccccgagcagcagataacggcttaccttgtcaaaatccagcgcggcggcttcatccagcccttcggctccatgatcgccgtcgacgagccctccttccgcatcctcggttactccgacaacgcccgcgacatgctcggcattactccgcagtccgtcccttcgctcgacgacaagaacgacgccgccttcgctctcggcaccgatgtccgagccctcttcactcactccagcgccttactcctcgaaaaggccttctccgcacgcgaaattagcctcatgaaccctatctggatccactccagaacctccgggaagcctttctatggaatcctccaccgaattgacgtcggaattgtcatcgatttggagcctgcgcgtacggaggatcctgccctctctatcgctggagctgtccagtcgcagaagctcgcggttcgcgcgatttcgcagcttcaatctctccccggcggtgatgttaagcttctctgtgacactgttgtggaaagtgttagggaattgacgggttatgatagggttatggtttataagtttcatgaggatgagcatggagaggttgtttctgagagtaagaggcctgatttggagccttacattggattgcattatcctgctactgatattcctcaggcttctaggtttttgtttaagcaaaatagagttaggatgattgtggattgtcatgcttctgctgtgagggtggtgcaggatgaggctcttgtgcagcctttgtgtttggttgggtccacccttagggcacctcacggttgtcatgctcagtatatggctaacatgggctcgattgcgtctttggtgatggcagttattatcaatgggaatgacgaggaaggcgttggtggtcgcagttcgatgaggctgtgggggcttgttgtctgccaccatacctctgccaggtgtattccttttcccttgaggtatgcttgtgagtttctgatgcaggcgtttgggctgcagttgaacatggagcttcagttggccgcgcagtcgttggagaagcgggttttgaggacacagactctgttgtgtgatatgcttcttagggactcgcctactggcattgttactcagagtcctagtataatggacttggtgaagtgtgatggggctgccctttatttccaagggaactattatccgttgggtgtgactccaactgaagctcagattagggatattattgagtggttgttggccttccatggagattcgaccggtttgagtactgatagtctgggtgatgctggatatcccggggctgcctcgcttggggatgcagtttgtgggatggcggttgcttatattacagagaaggattttcttttctggttcaggtcgcacacggccaaagagatcaaatggggtggtgcaaagcatcatcctgaggacaaggatgatgggcagagaatgcatccccgttcttccttcaaggcgtttttagaagtggtgaaaagccgtagcttgccgtgggagaatgcggaaatggatgcaattcactctttgcagcttattctgcgtgactcgtttaaagatgctgagcatagaaattctaaggctgttgtggatccccatgtgtcagaacaagagttgcaaggggtggatgaactaagttctgtggccagagagatggttagattgatagaaacagccactgctccaatatttgctgttgatgtcgatggccacgtaaatgggtggaatgcaaaggtttcagaattaacaggactcccagttgaggaggctatggggaagtccttggttcacgatcttgtgtttaaggagtctgaagaaactatgaacaagcttctttctcgtgctttaaaaggtatcctttctaacactctggcattctggtcaattcattgagtatatttggtaggagaaccctgtgccttctggaagagcatgccaatctggctatttttgtttggcaaaactatacttgtaaacatgatggctagatgtttagtaggtgcacaggatacttaatggtattggagtcaactggacagtaataatagttcatagcacgataaataactgccttttccaaattatccgatgttgtaaacaactatgcacataatggttcagtcattagtaattcaataaaaacctcaacataggcataaaattcaactttgtaacaatgcaaagcttgtaaaagggaaaaagacg

SEQ ID NO: 9199 - DNA, 568 bp, Glycine max
  Clone ID: 700837418_FLI
aacttcttaatgctttcatttcgcaaaccccccttggacggattggagaagcagaggaagtgtcttcattggtggcattcctctgcttacctgcagcctcttacataacaggacagaccatttgtgttgatggtggattaacagtgaatggtctctatataaattagagaagtactaccaacacactctctaacacacttctcttgacacatattctaccataagttacaaataataaaaaattacaaaatcatgaaaataagatctaggacccatatatttttgtgatatctaaaaaatttcaagcaataaaaaaaatgtattgaaaagagtgtataagataatgtgttgttagcatttttatataaactatgttaagagcaaggtctgatgcatacgttgctagtttttatattagtattgagaataaatagctgaaagtcccttggttcaatctatatcatttgggagggggaatttgttgggaataaatttgtatgtccacgatccaatcatcatgtaatcaattttaattttaataataaagtattattttattttcattgtc

SEQ ID NO: 9200 - DNA, 930 bp, Glycine max
  Clone ID: 700837458_FLI
gagaatttaccgaaaggctttcagagctgaatatgaattcccagaatggatttctccgcaggccaagaatcttatttcgaatctcctcgttgctgatcctggcaagaggtattccattcctgatataatgagggatccttggtttcaagttgggttcatgaggccaatcgcgttttctattaaggagtcttacgttgaagacaacattgatttcgacgatgtggagaacaaccaggaggaggaggttacaatgaggaaacctgccaggccgttttacaacgcgttcgagataatatcgtccttgtcgcacggctttgatcttaggagtttgtttgagacgaggaagcggtcgccgtcgatgttcatatgcaagttttcggcttcggcggtgttggcgaaggtggaggcggtggcgaagaagctgaactttagggtgacggggaagaaggagtttgtggtgaggatgcaggggacggaggaggggaggaaggggaagctggcgatgacggtggaggttttcgaggtggcgccggaggtggcggtggcggagtttactaagtctgccggagatacgttggagtatgttaagttctgtgaggagcaagtgaggccttccctcaaagacattgtttggagctggcagggtgattgatactaataataactccaacagtagttactaagtcatttctcatttctgtgtctttttttttttatagtactagtactttctatgatccatcatggtcgtggtttaatttagtttgtctttgatttgcttaatttgatttcatacatactatgtaaatttggactgtggagtttgtgacggtgtttgatttgaatatactacactacagtagtatatatatatactagcaaaaataatcccgcaaatcatggaaaagtgaaaacattgttgttcacttt

SEQ ID NO: 9201 - DNA, 1434 bp, Glycine max
  Clone ID: 700837525_FLI
gaccgagctagctagctagcaagcaagcacagagatggaggcaaagcgaggccatgccctcatgtgcttggcacgtgtttcactcttcctctgcgctctaaccctatccgctgctcacggaagcaccacggttcaagacatcgcgagaaagttgaaactcggggacaacgagcttctgcgcacggagaagaagttcaaggttttcatggagaattacgggaggagctactccacagaggaggagtatttgcgccgtttggggattttcgcccagaacatggtcagagcggcggagcatcaggcgctggaccccaccgccgtccacggcgtcacgcagttctccgatctcaccgaggacgagtttgagaagctctacactggcgtcaatggcggcttcccgtcatcgaataatgccgccggcggtattgcgccgccgttggaggtggacgggctgccggagaattttgattggagaaagaaaggagctgtcaccgaagttaagttacagggtagatgtggatcatgctgggctttcagcaccacaggatctatagaaggagccaattttcttgccaccggaaagctcgtcagtcttagtgaacaacagctccttgactgtgacaacaagtgtgacataacagaaaagacttcatgtgacaatgggtgtaatggaggtcttatgacaaatgcctacaattatttgctcgagtctggtgggttggaggaggagtcttcatatccctacactggggagagaggtgaatgcaagtttgatccagagaaaatagcagttaagatcacaaatttcaccaatatccctgctgatgagaaccaaattgccgcatatttagtaaaaaatggtccacttgctatgggcgtgaatgcaattttcatgcaaacatacattggtggtgtctcatgccctctcatatgtagtaagaaaaggctgaaccatggtgtgttacttgtgggatatggtgcaaaaggcttctcaattcttaggcttggcaacaaaccatactggatcatcaagaattcgtggggggagaaatggggagaagatggctattacaagctctgcagagggcatggcatgtgtggaataaacactatggtttctgctgcaatggtgcctcaaccacaaacaacacctacaaagaattatgcttcttattagctatgcacttaaggaaatctaaataaatatttttcattctaggtgatgtatcatgtatgtaccaaaatattttggtacgtaagtcttttaaaaagtttgcatctcctctttggttttccttagttctgaaagttatctcctaagaagacaatcatatgtactgtacgtagtgtgaagatatagtattgtatgctgcagaatatgattgtctaataaggtggactagctgtaataaaagatatttccaggttgaaaac

SEQ ID NO: 9202 - DNA, 1732 bp, Glycine max
  Clone ID: 700837545_FLI
aaaaccgcacaaaacaaaaacaaaacaaaacagtgtctttgattacgagagagagagaacaaaacaatcaacacaatggcttctgagcaaatgcctcgcagagagaacaacagcaatagggtgatagagagagaggttcacgttgagacacacagaaaagagtccctccctgataagggaagggttgtgatagagagtgagaagaaggagaaagagagagagttggcttctgatagagccaggtctggaaatatagttaaggaggacaaagaggttgaagaaggaagaagaggaaaagaaagtggtggtggtggtggtgttcagcatgagaggaagtttgaaacgaaagttgaagagaagaagggttttggggaaaaggctgaactcgagggaataacaagagtggtggtgggaagagagtgcagcaaagaggagaaacaaggaagaacaagagagaaagtagaggcagagaaagcaagatcaatggagaaaactagagatgaagctaaaggaagagaacaagctgaaaccaaaggtcaaaccaagaagggtggtggtgaggaacagggaagaagaagagaagaaataggagaagaaaataaacaatccagcctcgaagagatttctaaatgcagagctgaagctgaagagaaagttaaggagagaaaggagagatcaaaacaagcagcaagtaatgaagctgccaaagagagaaacaagcaggcaaataaggaggcaacaaaggcaaaagatgtcacaagagagaagggtcaacaaggcaatcttaaaacaggaaatgagacacaagacattggccaaaagggttatggtggagcaaaggataccattggtagagtggacaacattactacaccacttgctaaaaaggctcaagttgctggtagcaccactgttcagtatgctggagagaaatcagcacaagccaaagatgctacggtaggatcaatggagaaaactacaaaggatgctaaaggaagagaaaaagcaggaaccaaaggtcaaacaaagaagggtggtggtgaggaacaaggaaaaagaagagaagaaacaggagaagaaaaacaatccagcctggaggagatttctaagcacagagctgaagctcaacaaaaagcaatgagttcaattgaaggtgctaaggagagatacgagagagcaaaacaagaagcaagtaaagcttccaaagagagaaacattcaagcaaataagagggctgaagaagaaagaagaaaagcagaaagtggtaggggtgttcatgtggataagtttgaagagaagaaggattcagtgctgaaagcagaactcgagagaagaacaagagaggtagagggaagagagtggaacaaagaggagaaacaaagaagttgtccaagagggaaagtagaggcagagaaagcaagaccaatggaagaaacaaaactggaagctaaaggaagagaaaaagctgaaaccaaagagggtggtggtgaggaaaaaggaatgagaagagaagaaataggagaagaaaataaacaatccagcctggaagagatttttaagtacagagctgaagctcaacagaaagttaaggagagaaacgagagagcaaaacaagcagcagaagctgccaaagagagaaacaagcaggcaaataaagggaatgaagaaggcagaagagaaagagaaagtggtgggggtgttcatcatgaggctaagtttgaaactaaaggtg

SEQ ID NO: 9203 - DNA, 1500 bp, Glycine max
  Clone ID: 700837682_FLI
taaggatataacatacaattgttagtagttgttctgtttttaaagaaggcattaatttcctgctcatttataacaataccttctgccactcatgtataaaatataaagtatttattgatttcttctatgaattattttcccccttatttccctttttatatatacttgcagattggttgttatgcagggaaatattctgtataggtttccatctttgcagaggacagcttctcaaaagagtaagagaaaagaatatgttggaaggagatgggcagattgggttggaattgagaagtttttcaaggagaaaaaatggcaattcaggttctttattgtatttttcctgacctagtcgtagttatccatctatgtttattaaaccataacattagtgtttgttctattttagtaaaactggcacgccagagagagcaatggtcattggcctgggtggcctcaatctgtttggagttattattcttggaaccatgttgaagtatgctcttcacatgatgcattagaacattagtttttcacttgtgttatttcagtgccctaactttgtttttttgttgatccaaagagatatggcagttgcacccagtagcttcattaaatttgtagccgacatatttcctcttcttcaggtaatgatcggtatttctattttcaaacaactaagttgttcaaatttttagagaacaatatttggaaaagctggagtgtttctctcactcagctgagactttatataatgcaacaagtacacgaaaaggcattacagcagagaagagtgtttaacaaggaagaaacaaaagataaaatgtaatatctatctaagaattggaaaaggagttgcaaattatctttttgaaggagcatttgatagaggataatgatattgctaattttgagaattgaaggcaatttgttgctgcaaatttaagatgataagttcatgattagtatttgggtttaacttatgttttctttaatgatatacttcctatgcacattaatgtggttgttgatatctatgtaatttacgaaggaagaaaaaattagaaagatggagaaaacttatgaagacatgataaataaaagggtttacttaccctcttggtccttatagttgcaacaactttcctctttagtacttatagtttaaaacatcctattttggtccccctatagttgccatttttttatccttttagtccttgccgtcaagtttcgactatgctttttgaaattaatgtgatgtgattcattaaatccatgttcatctcgaacggcattaggcgactttagatgacaaagactaaaagggtaaaaaaatgacaactatagggactaaaaggaaaactttttacagccaggcagcaaatgggtaattaaagagaccaataaaatgcatttaccttgagtgcttgtatctgtttcactcagtacctctggtactgtatggtttatatattaataatactatttttgccttcc

SEQ ID NO: 9204 - DNA, 1570 bp, Glycine max
  Clone ID: 700837684_FLI
tgccattttcctttgagtgcaagattaattaatgtctgattttatgtattggtgtgttgctgcagacataccctaatcctttgcaagacaaccctgcttattcagttgttaagcagtattttgtgcatgttgatgacagcgttcctcaaaaggtcgttgttcacaaagatggtgcaagaggggtacattttaggcgtgctgggcctcgtcaaaagatgaagttcaggctgctattgttacttgtgggggtctgtgtcctgggctcaacactgtcattagggaattagtgtgtggcttacaccatatgtatggggtgaagaaagttcttggaatcaatggaggatataggggtttctatgctcgcaatacaatcactttaacccctaaaagtgtgaatgatatacataagcgtgggggaactgtcctcggaacatcacgaggtggacatgacaccaaaaagatagttgacagtattcaagatcggggaatcaatcaggtttatataattggaggagatggaactcagaagggtgcatctgcaatttttgaggaagtcagaaagcgtggtctcaaagtttcagttgtaggtatccccaaaaccatagataatgatattccagttattgataagtcttttggctttgacactgctgttgaggaggctcaacgagctataaatgcagcacatgttgaagctgaaagtgtagaaaatggcataggtgttgtcaagttgatgggtagaaacagcggatttattgcaatgtatgctactcttgcgagtcgagacgtggattgttgcttaattccagagtcacccttttaccttgaaggtcctggtggactctatgaatatatagagaaaagactaaaagaaaatgggcacatggttattgttattgctgaaggagcaggacaggaacttgtttctgagagtgtgcagtccatgagcaaacaagatgcttctggaaacaagctttttcaagatgttggcctatggatatcccaaaagattagggatcattttgctgcacagaagacactgcccataactctcaaatacatagatccaacctatatgatccgagctattccaagcaatgcctctgacaacgtgtactgcacacttcttgctcaaagtgcagttcatggagcaatggcaggttacactggctatacaagtggacttgtgaatggaagacaaacttatatacccttctatagaatcactgagagacagaaccacgtagtgataactgatagaatgtgggctaggcttttatcttcaacaaatcaacccagctttttggatgccaagggtgacaatgaagagaaggaggaagaagaagcattgaatcagttaccggatggacattgtgccaaagacacttctttggctagcaaagaaatcaacagcagcatttatccaacagcttgctagttattattgttattatttgtcattacgtgagatcctctatcatgcgttacacgtaatagtacataagagctgtcttttttgcccttgtttgtcaatcaataatatggctgtggaacacagccttacacaatg

SEQ ID NO: 9205 - DNA, 893 bp, Glycine max
  Clone ID: 700837701_FLI
cttcattttctttcaggaactggctaaacaatcgtctacaatatttggatgaatgatagtgagataattcagtctcccagcaagtttacaatcgtctgcaatatttccctgccctctgggtttggtaaggatttgagaagattttgtggaacctggaggattcggccctacagggacagttaatgaacctacataggaatacaacgtgaatctattaatacaaggttttatcttcaatggagaacaaaccagataaaatgcttcatgataatgaggagtgcattgacagcacatcaactaacaccaatcatccagagattggtgtgggcaaaggtgttttgaagaattttacaagatcttcgggggatgttgcagagacaaagatagcagctgattggaaaggtggagaaaattgcccaaagggtacacgtcctgaggaaattgatgcatctggggatgtaaacatggaggcatcaataacacctgatgatgttattcgggctggaggatttggtgccagggatgatatcagtagctttcttcctgttgcaagtgattctaccgacttcgaagcttcaatccgagatgcacgagattatgaagaaccacagggtcaagtaagcaggcccggccttggttggactggtgctactaagggggaatgaatgttgttgctgttatgtgctccagtattagcaacttttgtttttagctgggaggaccatgtgtttgtggctaatattttttaaaatcaaagtcatatatgatgccaaagaaaattttgttagtaatatcactaaatgatttacttgtataaatagttgatccgttgcctagtgtttggtttgtctttgttaagtgggatgtcatatgtaaaaatttcgtttcctgag

SEQ ID NO: 9206 - DNA, 1253 bp, Glycine max
  Clone ID: 700837706_FLI
cccaactcgtgcatttgaagaaagacaaaaaggggttggtttttggttttggttttggtttggttaactccctcttcctcttctactctcacccatggtctccgaatccgaactcatcggccgcctccgcgagtttctccggagctccgacctcaacaccaccacaaccgccaccgtccgccgccagttggaggccgatttcggaatcgatttatccgaccgaaaggcattcattagggaacaggtcgacttgttcctccagaccgaacacaaccaaccacaacaagaggaacgccaaaacgacgacgtcgaggaacaagaagaggatgcgcctaataatcccgaacaaagccaaccctccgattccaaagaagaaaccgatgaagaagaagaaggcgaagaggaagaagataaacctgaacaggccaaaaatgccaagaagaataaaggacgatctaacaagttaggtgatgaggtagtaaagaaaagaggtggtggtttttgcaaattatgtagcctgtctccgcaacttcaggaattcatggaagctccagaaatggccagaactgaggttgttaagcaattatgggtctatattagggagaaaaatttgcaagacccgaacaacagacggaatataatttgcgatgagcgattgcgttccctttttaatgtcaattccatcaacatgttccaaatgaataaagcattgtcaaagcatatctggccattggaatcagatgatgttgtccaggtgaagtccacaccaaaggaaaagcagaagaagcaagagagagatgatgattcagatgaagcaaaaaaaaaggaaaaacggcagaagggaggagggaaatcaggttttcttgctcctcttcagctatctgatgcccttgtaaacttccttggtactggagaaagcgagttagcgagaactgatgtcataaaaagaatgtgggattacattaaaggaaacaaccttcaggatccttctgacaagaggaaaataatatgtgacgagaagctgaaagaactctttgatgtcgactccttcactggcttcaccgttacaaaactgctggctcctcattttataaagacagagcagtgagttgcttgtacattttattaaggttttctttttgtgtcctgttggcaaggtctggcaacaggaggaatagaaattagtaaaatgacagattttctgtaattttttcttgaagattttaatgttatgtgaccgtttattttgtttt

SEQ ID NO: 9207 - DNA, 2982 bp, Glycine max
  Clone ID: 700837723_FLI
ctctctctctaacccaagacagtctctttctcttcgaagcaagacggtagctttccgacccggaaaacgccctctcctcctgggactcctctgccgccaacccatgccggtggcgcggcgtcacctgtgaccctctcaccgccaccattactgccgtgagcctcccctccgcctccctctccggcccctttcccgccatcctctgccgcatcgtctccctaaccaccctcaacctcaccaccaacctcatcagctccaccctctccgccgtcgttgctgcggtgtgccgcaacctcgtcgtcctcgatctctcccagaacaacctcgtgggccccattccgccacgctccaacacctcgacctctccggcaacattccgccgagcctcgccgccctctcccgcctcaaaacgctcaacctcgtcagcaacctcctcaccgaagcaataccctcttcccttcgcaacctcacttcattaaaacaccttcaactcacttacaagctgttcttgccgagtcgcataccgatcaactcggtaacctccggaacctcgaaacgcttttcctctctggctgcaacctcgtgggtcccatccctgacaccctcagtaacctctctcacttaacgaacttagattttttgaagaacggaatcaccgctcacattccgcagtggttcacgcgcttgaagcgcgtgacacaaattcaactatttaaaaacaaacactccagggagttacccaaaggaatatggaacatgagagtttgagattcttcgacgcgtccgtgaacgagttggctgggacgattttgacggagttatgcgagttgccactagcatcgttgaatttatacaataacaagctcgaaggggttttaccaccgattcttgcgcattctcccaacctctatgagcttaaattgttcagtaacaaacttattggaacgtagccgagggattcggggagtaacttgccgttgaaccacattgatatttggtttgaccattttccagcgagattctggcgatcatttgccagcggggggagtttgaggagttaattttgatgtgcaattatttttccgggaaaattctggcgagtcttggggactgcaggagtttaaagagggttcggttaaagagcaataacctttctgggagtgttcctgatggggtgtggggtttgccccatttgaatttgcttgagctttcggaaaattctctttctgggaaaatttctaaggcgatttctggcgcttacaatctatcaaatttgttgctttcgaataacatgttctctgggtcgattcctgaggaaattgggatgttggataatcttgtggagtttgctgctagtaataataatctctcgggtctggattccagagagtgtgatgaagttgagtcaactggttaatgttgatcttagttataatcaactttctggagaacttaatttaggtggaattggggaattgagtaaagtcactgaccttaatttgtcacataataggtttgatggaagtgttccaagcgaattaggaaaatttcctgtgcttaataatcttgatctttcttggaacaaattttctggggagattccaatgatgttgcagaatttgaagctcactgggctgaatttgtcttacaatcagctttctggggatattcctccttttttcgccaatgacaagtataagacgagttttatagggaatcctgggctctgtggtcatcaacttgggctttgtgattgtcattgtcatggtaagagtaagaatcggaggtatgtgtggattttgtggtccatatttgcgcttgctggagttgtgttcattattggggtggcatggttttactttaggtacaggaaggcgaagaaattgaaggtgttaagcgtttcgcggtggaagtcgtttcacaagcttgggtttagcaagtttgaggtatctaagttgctgagtgaggacaatgtgataggaagtggagcatcagggaaggtctacaaggtggtgctcagcaatggtgaggtggtggcagtaaagagattgtgtggagcacctatgaatgtagatggaaatgttggtgctaggaaagatgaatttgatgctgaagttgagacccaggggaggatcaggcacaagaatattatgaggtggttgtggtgttgttgcaacagtgaggatcagaggctcttggtttatgaatatatgccaaatgggagtttggctgatttgttgaagggtaacaacaaaagtcttttggatttgcccactaggtataaaattgctgtggatgctgctgaggggctttcttatttgcatcatgattgtgtccctcccattgtccaggatgtgaaatccaacaacatattggttgatgcagagtttgtggcataaattgcagattttggagttgccaaaatggttactggagtcagccaaaggacatgatcaatgtctgtgattgcaggatcctatggctacattgcaccagaatacgcgtacactcagggtgaatgagaagtgtgacatatatagctttggcgtggtccttttggagttagtaactggaagacccccaattgatccagagtatggtgaaagtgatttggtgaaatgggtttcctccatgttggaacatgaaggactggatcatgtgattgatcctacattggactccaaatacagggaagaaatcagcaaggtattgagcgtagggcttcattgtaccagctccatcccaataactcgccctacaatgagaaatgtggttaaaatgcttcaggaggtaacaacaattccaaaatgtagaagtgtaaacgatggaaacgttccatgtttccatgaaggggcatctcataatatcagtgaaatgaaatgtagtttgagcaataatgtgctcaaagttaatatattagacagcttaactttttctattgcattgtgagaagggtgaaatatttgaagacatcaacggctc

SEQ ID NO: 9208 - DNA, 1480 bp, Glycine max; identical to SEQ ID NO: 8583
  Clone ID: 700837726_FLI

SEQ ID NO: 9209 - DNA, 709 bp, Glycine max
  Clone ID: 700837816_FLI
gggaaatgcttgatatcaggccaggagaggccttggctgtgaacttccccttgcaactccatcacacagctgatgagagtgttcatgtgagcaacccaagggatggacttttgagattggtaaggtcactttctcccaaggtgaccacattggtggagcaggaatcaaacacaaacacaacccctttcttcaacaggttcattgaaaccttggattactacttggcaatctttgagtccattgatgtcaccctcccaagagacagcaaggagaggattaatgtggagcaacattgtctggccagggatattgtcaatatcattgcttgtgaaggcaaggaaagggttgagagacatgaactgttcggcaagtggaagtcaaggttaaagatggccggcttccagcaatgtcctttgagttcttatgtgaattctgtgataagaagccttctgaggtgctattcagaacactatacactggtggagaaggatggagccatgttgttagggtggaaggacagaaatttgatatcagcttcagcctggcattgctaaaacatagactgtgtagtagtagaaatattatgatgatgggggaagctgaccacggtttatgtttcattgccagtgctatctcatctcatgtactagtgtagtagtacattgattcttttataaaatgtcacgtatgttaactgttcttgttctat

SEQ ID NO: 9210 - DNA, 744 bp, Glycine max
  Clone ID: 700837882_FLI
gagaaacaaagaaaggaaataattgatctttgaaaatgcagggaggaaagaaagctggagagtccatcaaggaaacagctgcaaacattggtgcttctgccaaggctggcatggagaaaaccaaggccactgtccaggagaaggcagaaagaatgacggcacgtgatccgatgcaaaaggagttggcaacccagaagaaagaggcaaagatgagccaggcagagctggacaagcaggcggcgcgtcagcataacacggcggcgaagcaggctgccacggcagggcacatgggacaacccatggggacccatcagacgtcagctatgcccggtcatggaaccggacagcccacgggccatgtcaccgagggagtggtgggctcacaccctattggaaccaacagaggcccgggtgggactgctacggcccataatacccgtgcggggggaaacccaaatgattatgggtatggaactgggggtacttacaattaaataatgatgatttagaaaaggaaagctacgacccataagaaggtttagttaagagtatgacttttgttgtggttatcttcttgtttggttatctttttgtttgtgtctccttttctctccatttttgttgtggagaattgggtgtggttacacgacagtgttttcacttctactaggtgcaagcattctgtgtcgtgatgttgtattccttcgtttcaatgaataaataaaatcgtggttgtgcaaaaac

SEQ ID NO: 9211 - DNA, 1972 bp, Glycine max
  Clone ID: 700837911_FLI
tttcaggaagaaagaagtgcaatggacatcggaacctatggctatcctacaccagcagtgaaaaagattgagtcttactatgatgtgccagagggagtggatattcggggaagatatgatgcagagtttgcaaaaatcctcacaaaagatgctttgaaattcgttgctgacttgcaacgtgagttcaggaaccatatcaagtatgcattagagtgcagaagagaagcaaagaagaagtacaatgaaggggctcttccagagtttgatcctgccacaaggtacatcagagagcaagagtgggtgtgtgcacctgttccaccagcagttgctgatagaaaagttgaaatcactggccctgtggatagaaagatggtcatcaatgctctcaactctggagctaaagtctttatggctgattttgaagatgcactgtcaccaggctgggaaaatcttatgagaggccaagtgaacttaaaggatgctgtggctgggaccataagcttgcatgacaaagcaagaaacagggtttacaagctcaatgatcaaacagcaaagctttttgtgcgaccaagaggttggcacctaccggaggcacatattctgattgatggtgaacctgcaactggttgccttgttgattttggcctctatttctaccacagctactcagcattccggcgcactcaaggtgctggctttggccctttcttttatcttcccaagatggagcattcaagggaagctaagatttggaacaatgtgtttgagaaagctgagaaggtagcaggcatcgaaagaggaagcataagggcaactgttctgatagaaacacttcctgcagtgtttcaaatgaatgaaattttgtatgaactgaaggaccattcagtgggtttgaactgtgggcgttgggattacattttcagttatgttaagaccttccaagctcatccagatcgcctcttaccagatagggtcctagttggcatgactcaacacttcatgaaaagttattctgatcttctcatcaggacgtgccacaggcgcggcgtgcatgctatgggaggaatggcagcgcagattccaatcaaagaagatccagtggctaacgaggtagcactggaacttgtaaggaaggacaagcttagagaagtgaaggcagggcacgatggaacttgggctgcgcaccctggtctcattccagcctgcatggagattttcaacaacaacatgggcaatgcttccaaccagatagacacagtgaaacgcgaagatggggcaaacatcaccgagcaagacctcttgcagataccaagaggagcccgcaccatggaaggtctcagattgaacacaagggtgggaattcagtacgtggcggcgtggctcaccggaagcggttcggtgcctctatacaacctcatggaggatgctgccactgctgagatcagcagggtgcagaattggcagtggctcaagtatggagtggagctcaatggggatggtcttggagtgaaagtgaacaaagaactttttggtagggttgttgaagaagagatggctaggattgaaaaggaagtggggacagagaagttcaagaagggaatgtacaaggaggcttgcaagatcttcactcgccaatgcacgtcaccaatgcttgatgattttctcactctggatgcttataattacattgtcgtgcatcacccgagggaaacatcaaagctttgaagtttgaactaaggaagtggttctttattatgcataataattgggtcctttagattctgtcttgtttgttctcctaagttgtctttgtctttttaccatcacttcatcgtttcatgaagggcctgggacgtcatataattgtgcgtggaagagaagaataaagttcgtcattgtagctatattttgaatgatataacttgccttatgtttactagcaatgaaaacaattatactagaaatttgatat

SEQ ID NO: 9212 - DNA, 957 bp, Glycine max
  Clone ID: 700837912_FLI
gcggctgaataccaagcggagaagatgagtcaggagcagccacggcgtcccaaaggccaaaaccccatcaaatacggcgacgtttttgtcgtctccggcgaccttgcacagaagcccgtcgcaccggaagatgctgccatgatgcaaagcgcggaaactcgagtgctcggacaaacccaacccggcggagcagcttccgtcatgcaatctgccgccaccaggaatgaacaggctggccttgtcggtcaccgggacgtcaccgacgttaccggcgaccgtggcgtcacagtcacagaaactaaagtccctggaagacgcattataaccgaggctgttggtggccaggttgtggagcagtatgtggaggcaactccggttgaggcagggcgaagcagtgcaattaaggagaatgccataacaataggagaggcattggaggcgacggcacagactgtgggtcagaaagcggtggatcagagtgacgcctccgcgattcaggcggcggaggtgagagcaacgggaagtaacgttataacgccgggtggacttgcggctatggctcaatcagctgctgcttataatgctgactgcaagcttgaccaggacaaggtcaagctcgccgacattttggccggagccacagccaagttgcccgcggacaaggccgccacactgcaagatgctgaaggtgtagcgtgtgctgaggtgaggaacaaccctgatgccaccgccactcccggtggcgtagccgcttctgttgcggctgctgctaggctcaatgaaaatgttaagtaacgagtcatgttatgtgtcttgataatcatacttttgtttcatgatgtgtggtgttgatgtgttatagtctatagtgtattaataagtgtaagtggtgcaacatcttgtttttctttcttgtactctttgtgagttatattaattactggttttaaggactct

SEQ ID NO: 9213 - DNA, 744 bp, Glycine max
  Clone ID: 700837950_FLI
attcaatctgcctcgatcatggagaggaaaacatttgggtttttgttcttgctcctccttgtcttagcttctggtaagatacatatttatagttccgtgttattcatttggggcacataattaaattatttttcacgtatggtatttgattttttaacttaatattaattgtttttttattaatactttaattaatttttttaatctaatattgatattattttttcatttatttaataattattttggggggaagataggaatatcttgaccatatatgtgacaagttgatataatgaacttttaatttctcttgtgactaatctgatggtgtgaaaatagatgtgacggtgaagagagcagaggcgaaagattgcttgacaaggaggcacgggttccagggtagatgcttattcgacaggcaatgtgcacatgtgtgcaggagcgatggtttcatcggtggtcagtgccgaggccctcttcgcaaatgcttttgcagcaggccatgttgatcgaaattactactgccaaagaggccatgaaataaacaaacaaacaaataaataaatagctctaaccgacacatatgtacgtagtgtcggggttctagctagctaggtaggtacgtgtgtcttttgttatcgatcctagtttggtggagcaagtgtggcatcatgatctagttatatatatatgtcgtgatcatcttgctctgttcagcaataaattataatggaaattaat

SEQ ID NO: 9214 - DNA, 1310 bp, Glycine max
  Clone ID: 700837971_FLI
tcttccaccaagttatgggtttccttgtgttgcttcttttctccctcttaggtctctcttctagttccagcatatcaactcatcgttccatattggaccttgacctaaccaagtttaccacacagaaacaggtgtcttcactgttccaactatggaagagtgagcatggacgtgtctaccataaccacgaagaagaggcaaagagacttgagattttcaagaataacttgaactatatcagggacatgaatgcaaacagaaaatcaccccattctcatcgtttaggattgaacaagtttgctgacatcactcctcaagagttcagcaaaaagtacttgcaagctcccaaggatgtgtcgcagcaaatcaaaatggccaacaagaaaatgaagaaggaacaatattcttgtgaccatccacctgcatcatgggattggaggaaaaaaggtgtcatcacccaagtaaagtaccaagggggctgtggaagcggttgggcgttttctgccacggagccatagaagcagcacatgcaatagcaacaggagaccttgttagcctttctgaacaagaactcgtagactgtgtggaagaaagcgaaggttgttacaatggatggcactatcaatcgttcgaatgggttttagaacatggtgggattgccactgatgatgattatccttacagagctaaagagggtagatgcaaagccaataagatacaagacaaggttacaattgacggatatgaaactctaataatgtcagatgagagtacagaatcagagacagagcaagcgttcttaagcgccatccttgagcaaccaattagtgtctccattgatgcaaaagattttcatttatacaccgggggaatttatgatggagaaaactgtacaagtccgtatgggattaatcactttgttttacttgtgggttatggttcagcggatggtgtagattactggatagcgaaaaattcatggggagaagattggggagaagatggttacatttggatccaaagaaacacgggtaatttattaggagtgtgtgggatgaattatttcgcttcatacccaaccaaagaggaatcagaaacactggtgtctgctcgcgttaaaggtcatcgaagagttgatcactctcctctttgagccgtaaaggttcaatacaacgagtgcttgttttcttagggacaagcattgtacttatgtatgattctgtgtaaccatgagtcttccacgttgtactaatgtgaagggcaaaaataaaacacagaacaagttcgtttttctcaaataatgtgaaggt

SEQ ID NO: 9215 - DNA, 974 bp, Glycine max
  Clone ID: 700837984_FLI
gaccccatcaaatacggcgacgtttttgacgtctacggtgaccttgcacagatgcccattgcaccggaagatgctgccatgatgcaaagcgcggaagctcgagtactcggaaaaacccaacccggcggagcttcttccgtcatgcaatccgccgccacaaggaatgaacaggctggtcttgtcggtcaccaggacgtcaccgacatcaccggcgaccatggcgtcacagtcacagaaactacattccatggaagacgcataataaccgaggctgttggtggccaggtagtggaacagtatgtggagccaaatccagttgaggctggacgaaccagtgcaattaaggagagtgctataacaataggagaggcattggaggccacggcacagacggtgggtcacaagccggtggatcagagtgatgcctcagcgattcaggcggcggaggttagagcaacgggaagtaacgttataacgccgggaggacttgcggctatggctcaatcagctgctgcttataatgctgactgcaagcatgaccaggacaaggtcaagcttgccgacgttctgaccggagcaaccgccaaattgcccgcggacaaggccgcgacgctgcaagatgctgaaggggtggcgagtgctgaggccaggaacaaccccgatgccaccgccactcccggtggggtagccgcttctgttgcggctgctgctaggctcaatgaaaatgttaagtaaaaagtagtgttatgtatgttgataatcatacctgtgtttcatgatgtgtgaggagtggcctgttgatatatgtgttgtataactgtaagtggtgctgcaacatgttgtttctttcttttaagcttgtgagatatgttactacttttctggtatcttttaaggactctacttaaaggtgatgtatactatgctatggatgatgtctgtgcagttagttgttaataatgtgtgttctagct

SEQ ID NO: 9216 - DNA, 1421 bp, Glycine max
  Clone ID: 700838011_FLI
cggcatttgattccaagagttttagaccagcatggattgagttctgagtttcttcagattcctgaggcaatggtgaagcttgttattcagagatatactagggaagctggtgtgcgaaacttggagaggaatctagctgccttggctcgagctgctgcagtaagagttttagagcaagaacaagtagttccattaaacaaagggatgcaaggacttgctacaccacttgtggaaaacagacttgctgatggaactgaagttgaaatggaagtgataccaatgggtgtcaatagtcgggacatctctaacacgtttaggattgcctctccatttgttgttgatgaaactatgcttgaaaaagtgcttgggcccccaagatttgatggcagagaagctgcagaacgtgtggctacccctggggtcactgttgggctagtttggactgcttttggtggagaagttcagtttgtggaggctacagctatggttgggaagggtgaactgcatctcactggacaacttggtgatgtaataaaagaatcagctcagattgcactaacatgggtaagggcaaggacaactgatcttaggcttggtgctacagagggatttaatattttggagggccgtgatgtacacatacattttcctgcaggcgctgtacctaaagatgggccctcagctggtgtgactttggtcacagcattggtatcacttttcagtcagcaaagggtgagatcagacacggctatgactggagagatgacattgaggggtcttgttctacctgttggtggtgtcaaggataagatattagctgcacatcgttacggtattaagagagttattctacctgaaaggaacttgaaggacttggttgaagtaccatcgtctgtgctatccaatttggagatcctgcttgctaaacgagtggaagatgtgttagaacatgcttttgatggtgggtgcccttggaggcaacactcgaagttatagcagcatccttgatttgcaggacgagttagtaaacctttgtctttcaatcagtaatggcttctatatcaattcaacatacataccgtcccctcctgatctatcattgtcatcgtgatatcgggtccgagtacttcgacttcaactgatcgtaattaagcaaaactcaagaaaccaacaatttggatgggagctgagctgacatctacatttatcaatgggaatccactccacctcaattatagtgtgtaaatgctttagcttgagaccaactattgtggaaggtgagcaactgcatcctttgagtgctctccatacaacatctccgggtcacacttttgtaaattatttaccctgtcaccacatatatacacttttaacatattgcgcatagatcataacaagagagggcttcctctctttaatgt

SEQ ID NO: 9217 - DNA, 662 bp, Glycine max
  Clone ID: 700838125_FLI
caagaaaagaaaaaaagaagagttgagattccctttgaagaaaagatggcatcccataggcaaagctatgaagctggtcaaactaagggccgaactgaggaaaagacgaaccagacgatgggcaatattggagagaaggctcaagctgcaaaggagaagacccaggaaatggcccaagctgcaaaggagaagacccaacaaacagcccaagctgccaaggacaagacttgcgacacttcccaagcggcaaaggagaagacccaacagaatacaggagctgctcaacaaaagacctcagagatgggccagtccacgaaggaatcggcccagtcagggaaggacaacacccaagggttcctgcagcagacaggggagaaggtgaagggcgcagcccaaggtgctacagaggctgtgaagcaaacccttggcttgggcgagcatgatcaagacaaccgcagaaattactaatactataatttgaagtgctttcttgtagtagtggtttacgcagcatggctttttaaataagctgctattccctacactcctacctaaggagtgtactattatccgcagtttctattctctctagctactttcatgtatgttcaatgctatatatagccttgaattaatgtcaactatgttctaattaatgctat

SEQ ID NO: 9218 - DNA, 1576 bp, Glycine max
  Clone ID: 700838201_FLI
cctctctctccttggcggcagctggggcaaccaagctctgtgtgcaacgacgccgtttcgacctcctttcttcactctttggcgagcaagcaagcaagtaacaatggcgactcgcgacggcggcatgaagtcgacgtcaataaacggcgttaagatgtacacgatagcgtcgcagcaaccctcactcgcttcctggctcccctcctccaagaagcagaactctcatcgcaacgtcaaaagttacacgcagaacctgcaacttctcgaagacttgcgcttcgccaccgccgccaccaaaatcaaggccactcccgacggcgagtacatcattgcttccggcatctatccgccgcaagtcaaagtctacgaggtcagggagctaggcttgaagttcgaacgccacttggattccgagatcgttgattttcaggttctgtcagacgactattcaaaacttgcatttttatgtgctgatcgctctgtttatttgcatgcgaaatatggaaagcactacagtttgcggattccgaggatggggagagatatttcttatgactgctggtcttgtgacttgctttgtgctgcgtcatccccggatctgtacagaattaacttagagcaggggcgattcctctcctcccttaacacacaatcccctgcattgaatgtagtttctcgaagcaagcttcatggattagttgcctgtggtggtgaagatggtgctgtggaatgctttgacatgcgagtgagatcttcagttggtagaattgatgctgttggacctagtggtgatgttgaccaggaggtcactgcattggaatttgatgaagatggtggtttcttaatggctgttggaagtagtgctggaaaggttctcatctatgatctgcgctcgtctaatcctgtacgaatacaggatcatatgtatggcagttcaatattggatattaagtggcatcatactcttaactatgaacaaccaatgttgattaccagtgataatcatgttgttaggatatgggatcctgaaacgggagaaggcttgaccagcattgaaccgacaacgggaacaataaatgacgtgtgtacatttcctggcagtggtttgatcttgctggccttagattgtagtcaaataccatcttacttcataccatcgcttggacctgctcccaagtggtgttcttcgctagagaatttcactgaggagttagacatgggtggacaaacaactatttatgatcattacaaatttttgacaaaggaagagcttgagaggttaaatttgaccaacctgattggcaccaatctacttagagcctacatgcatggcttctttattaatcatgcattatacaaaaaggcaaaagcactggtggatccttttgaatatgaagcttatattgaacagcagaaacgagaaaagatggaagctgagcgcgcctcacgaatcacggtcaggaaaaagttacccaaagttaatcgggcccttgcagctcgcctcctagaaactgaagaagctgaaaatgagaagagggatgaagatgctgatgatggtgaaactaaaaaggcatcc

SEQ ID NO: 9219 - DNA, 2044 bp, Glycine max
  Clone ID: 700838292_FLI
ttcagatttttccggtgtcactcctaagaaaaaggagattcagactccaaacccaatgctgactccttctgcaactcctggagctgcaggtctcactcctagaattggcatgacaccaacaagagatggtttttcttttagcatgacaccaaagggaactcctcttagggatgagctacatattaatgaggacatgaatatgcatgacagcactaaacttgagctacagagacaggctgatatgagaagaagtttgcgttctggtttaggaagccttccacagcccaaaaatgagtaccagatagtgatgccacctgttctagaagatgccgaagagcctgaggagaaaattgaagaggatatgtctgatagaatagctagagaaaaagcggaagaagaggcaaggcagcaggcattgcttagaaagcgatcgaaagttcttcaacgggaacttcctaggcctcctacagcatcattggagcttataagaaattccttgatgcgaactgacggggacaagagttcctttgttccaccaacctctattgagcaagctgacgagatgattagaagggagcttctaactttgctggagcatgacaatggtaagtatccacttgatgataaagtgattaaggagaaaaagaaaggagccaagcgtgctgtaaatgggtctgctgtccctgtgatagaagattttcaggaagatgaaatgaaagaggctgataagttgataaaggaagaggccctgtatctttgtgcagcaatgggtcatgaagatgaaccccttgatgaatttattgaagcacacagaacctgtctcaatgatcttatgtactttcctacccgtaatgcatatggtctctctagtgttgctggaaacatggaaaaactagcagctttgcagaatgagtttgagaatgtgagaaacaaattggatgatggtaaggagaagatggtacggcttgagaagaaggtgatggttctcacgcaaggttatgagatgagagtaaagaaaagcctgtggccacaaattgaggccactttcaagcagatggatgtagctgcaactgagttagaatgctttaaagctttgcaaaagcaggaacaattggcagcatcacataggataaacaatctgtggggtgaagtacagaagcaaaaagaacttgagaaaactttgcaaaataggtatgggagtctaattgaagagctggaaaagatgcaaaatgtcatggaccaatgcagattactagcacaacagcaagaagaaattgaagcaaacaaccatgctcgtgagtcaactgagatcattgagagcaaggctggtgaaactgatgtacagagtacagaaaattgtgaaactgtacctgactcagtagagcatggacatgctctagcagttgagtcatctgatgatggaactgctgaccagcaagtagatattgtgcatgaccaggctacttctagcgttagccatgacatggatgtagattctgataaattggctaatcctacaccagctgcagagaatgtcgatggaaaactggaagttactgctactgccagctatactgatgatgggaagaccatgctagaaatgggtgctgcagtggaagtaagtagcagccccaatcatgatgtagttgcggatgctgtaaactcacatgataacagcatggaagaaaccaatgctgttggggaggagacaaattaggccggacactgcatagcctgttctgattaagtatggggacgttagactggatgctttaactgaataaaatgcatggatagtgagtcctccgttgttggaaggtagctaaagagcttagttgatgccaagattttgtaatgatccctactcgaagtttggaacatattatgaactgataaattgcatgagcattgagatggttgaccgtatttttttttttctgaatttttgtcctcttccatatgatggatgttgataatgtgctctttacattttaagaatgatacatgattttatatcaatgaattagagctcggtaactattgt

SEQ ID NO: 9220 - DNA, 2654 bp, Glycine max
  Clone ID: 700838355_FLI
gtcggatgagaagggtgatggactggtgtttggaagcactgaggctgccaataagttcctggaggatttggaattacatcaatcgcgtgatgctgagaggattgttactgactcggacgaagaagaggagtctgacgatgaaggagaaggcaaggagctgtttgatactgctacattggcagctcttttgaaagcggcatcgggtgcggaccaagatggcggcagcatcacaataacctctcaagatgggtccaggcttttctctgttgagcgccctgctggcttgggatcaccgctccagtcaggtaaacctgccgtgaggcaaactcgtccgagtctttttactccttccatgagtagacctagtgccatttctgatagcaatttgagccaagaggagaaaaataaactggagaaattgcatgaaattagggtcaaatacttgagactagttcataggctgggttttactacagaagaatcaatagcagcacaggtgctgtatcggatgacacttgttgcaggcaggcaaagtggtcaaatgtttagcgtagagtctgcaaaggagactgcttcgcgtcttgaagctgagggaagagatgattttgatttttctgtaaatattctggttcttgggaaagcaggtgtgggcaagagtgctacaataaattcaattttcggcgagacaaagaccagcattaatgcttgtggtcctgctactacttctgtgaaagaaattgttggggtggttgatggagtgaagttaaggatttttgacacaccaggcctcaaatcttctgcattggaacaaaatttcaatatgaaagtcctgtctgcggtgaagaaattgactaaatctccccctgatattgtcctctatgtggatcgcctggacctgcaaactagagatatgaatgacctgcctatgttaagatcaattactagtgtcctgggttcatcaatatggcgaaatgtcatagtcactctgacccatgctgcctctgctcctccagacgggccatcaggtgccccattgagttatgaagtatttgttgctcaaagatctcatacagttcaacaaaccattggacaagctgttggggacctacgtcttatgaatccgagcttaatgaatccagtttctcttgttgaaaaccatccttcttgtcgaaaaaatagagatggccagaaggtgcttcctaatggtcaaagttggagacctctcttgttgctcttatgcttctcaatgaagattctctctgatgctagtaactctacaaaaactcaagaatcatttgaccaccgcaggctgtttggttttcgtccccgctccccaccacttccatacttgttatcttcgttattgcagacacatacatacccaaaactccctgcagatcaaagtgggcctgacaatggtgattctgatgttgaaatggctgatttatctgattctgatctagatgaagatgaggatgagtatgaccagctcccaccatttaagcctatgaagaaatctcaggttgctaagcttactaaagaacagcagaaagcatattttgatgagtacgattatcgggtgaaacttctacagaaaaagcaatggagagaggagttgagaaggatgagagagatgaagaaaaaaggtaacacaaaagaaaatgactatggttacatggaagaagatgatcaagagaatggaagtccagcagcagtgccagttccattgcctgatatggccatgccaccatcctttgacagtgacaatccagcctatagataccgtttcttagagccaacttcacaactcctgacaaggccagtcttagacaaccatggatgggatcacgattgtggttatgatggtgtaaacattgaacagagtctagctatcatcaataaattcccagcagctgtcactgttcacgtaacaaaggataagaaagacttcaccatccagttggattcctcagttgctgcaaaacttggagagaatggatcagccatggcaggctttgacattcaaagcgttggaaagcagctatcttacagtgttagaggagagacaaaattgaaaaatttcaaaagaaataaaacttctgctggggtgtctgtgacatatttgggtgaaaatgtgtgtactgggctgaaagttgaggatcagattgctgtggggaaacgcttggtattagtgggtagcacaggggttgtgaagtctaaaactgattctgcttatggtgccaacgttgaagtgaggcttagagaggcagattttccaattggccaggaccagtcttcactgagcctttctcttgtgaagtggaggggagaccttgctttaggggccaatcttcagtcccaaatttctgttggacgaggttataaggtggctgttcgtgctggattgaacaacaagctcagtggacagatcactgtgagaacaagtagctcagaccagcttcagattgcccttgttgctatccttccgattgccaaggctatctacaaaaacttctggcctggggctagtgagaattattctatctactagattgtgtcttttgtttgcgttgctagcaaggaaaagtagactacgagtttatcatatcgtgttgcttcttttcatgactgtcttaaataatgagttttttttt

SEQ ID NO: 9221 - DNA, 854 bp, Glycine max
  Clone ID: 700838356_FLI
aaagaacaagggattctcttcatccaagttcgctagtaggacatattgtaatggcaacagtggaagcatcccatgaagctatggctacggtggccaacaaggcaccaatcactgctgagagaaaggtccctgaggacttggacagcaaactccccaaaccatatttgcctagagctttgagtgcccctgacacagagaatgtgaatggcacgtggggccacaaacacaacgacatgtccgttcttcagcagcatgtatccttcttcgaccttaacaatgatggtgtcgtctacccattggacacatatatgggattccgtgcactcggtttcaatgtgattctttccttcatattttcgattggtattcatgtaactctcagttatcctactcttcctacatggctaccttcaccttttttcccaatttacataaaaaacatacatagggcaaagcatggaagtgacactggtacctatgacacagagggaaggttcatgccagcaaatttggaattcatgttcagcaagtatgcacgtgaggtgcctgataaattgacattgaaggagctgtggcacatgactgaaggaaacagggttgcatatgacttctttggctgggctgccagtaagtttgagtggggagttttgtatgtcctggcaagagatgaacaagggtatctatcaaaagaagctgtgaggcgttgctttgatgggagcttatttgattattgtgctaaaaacagcaaaggtgctgctggaaagatggcttgacagttattgttttgttccctacttggtgctctgctgtattttaagttcaacaaaatttgcaaaacagaactgttatttagt

SEQ ID NO: 9222 - DNA, 1742 bp, Glycine max
  Clone ID: 700838396_FLI
ctcacattcaccacagcagcacacacagacaaagacaaccttgtttgtctccaatcaaaacctttcaagctggcgttcgaaaaccaagacaaccctgtccgagaaatcaagcccaagaataggagaatcatgggtgctggaggccctgatgatgaggacaacaacaggtggccaccgtggctgaagcctctgctaaaagaaagtttctttgttcaatgcaagcttcacgctgattcgcacaagagcgagtgcaacatgtactgcttggattgtatgaacggtgctctctgctctctctgcctcgcttaccataaagatcatcgtgctattcagataaggaggtcctcataccatgatgtgattagggtgaatgagattcagaaggtgttggacatcacaggggtccaaacctacattatcaacagcgcgagggttgttttcttgaatgagaggccgcagccaaggcctggtaaaggtgtcaccaacacttgtgaagtctgcgagcgtagccttcttgattcctaccgattctgttctctaggttgtaagattgttgggacttcaaggaacttcctgaagaaaaagtcagcggcaatggtatcagactcagaggattcttacagcagcaacagcagccatgggaagaagaacagcttcacaccttccacaccgccaccaacttttgttaattacagaacggccaagagaagaaagggaattccacaccgtgccccaatgggagggctagtcatagaatactagaaagttagtaacttttggttatttgctataatgcccctgatatattttacctcaaaatgcaactttctccgtgcagtttcacccgttccaacatacgtgagctttttgctgaaaaaggccggtgctggaagtgtttccttctctgttccttacttgttaatagcgtttgtctatatgggaaaattccaatagaagtgggaaaaaaggttgagaaagtagaaaaaaataagacatctgtgaaatagtttgagaaaaagaatggtgtagcaaaataagcaaagttcctttcaaccaaagtacaagaagatgaggaacattataggtttggtttctagagctattatacctaagttttgggtggtgggtgtaaatagtggcttggggaagaagacagtgacaatgtactctttacaaataggtggattgtctatatatggaatggtgaaataataaatagtactaatagtttttcttaaatcttgtgcctacattcattcagtgcaattacaattttaatacgttaaattaatgagttatagttcattgaattgttgaaattattgaaaaggtattattttaatctttgaattgttcaatgatgattatttttagattttggtatcattagatgacgataaattaaacttcaaaattataaaactaaagattgaaataaaaaatactccggattttcttaattttaagaattaatctagtgtattgttccaggtttggtatgcaattatttcctctcctttttctttatattatttttcttagaagtgaattttcttattttagcttgtgattttggtattggtgatggctaaaagcttccggggcccacttgagccggtttatgagggagctggtcaaagttttggtcgtagtcgggtccacgtgtcgaatcctggttggactgaaggaaagcggaacgtattggttgtcgaaacaaacattaggtcagccgcccttgttag

SEQ ID NO: 9223 - DNA, 1242 bp, Glycine max
  Clone ID: 700838409_FLI
cgtggtcacaagaaacgcggcaatgccagcttatgcgtcctctgccttaccgcattcgcagttaggacattctggtgaacctcatggttggttttattgtttgcctcgctttcgccagggatttaccacgcctgctcaaaccttcaatgcagaggaaaaactccctgctggccatgccaatggtttaggggtggaagttgcgccgaatagggaatcgggtttccctcagaagcaattgctggttattgatcaaacgggtgatcaaacaactcttgtttatagttcaaggtttgggggtcccgttgattgtcatgtgtcctgggattcaaagctccatggttctatcaatttgaacaatgggaatgaattgcttaatttaaggagagatgtgaatcatgtggttggacttggacctactttggatgataaagttcatgaaaatacaggaactgatgatgacattgaaagcgagatgcatgaggacacagaggaaatcaatgcattgctttactctgacagtgatggttattccactgaggatgatgatgatgatgaagttactagcacaggacattcacccagtacaatgaccacgcacgatgataaccaggaagaaccccataggagaaccgccgaagaagttgctagctccgtcggagaaacaaagaagcgaaagctattggacggtgcttatgatgatgacaacttgcagttcatggacactgctagttctctgaatgggaaaaaaagaccctttgaagtcgaagatgatgccgaatcaagatgctctagtggtggcaacagtagtagtagagggtcaggtggaatgggttccttgtcaggcaataaaaagatgagaaaggagaagattcaagatgttctgagcatcctgcaatgcatagttcctggtggaaaggacaaggacccaatcgagcttcttgatgaagccattcgttgcttgaaatcattgaaactcaaggccatagaacttggacttgatgctactatataagttgtggacaattggaaatcagcatcacctatcacttatttagtacgttatctttgtgttttggtttgtagaataaacaaggtatgagtgtgaaacgaatcctttgaagcccttgctcaattataaagttggaagaaaatagagaaatcaggtgggctttgagtaatggtagtagtttgtgtgtgaagaaagagggtgaggtatttcagcgtattatgccgcaataaagg

SEQ ID NO: 9224 - DNA, 600 bp, Glycine max
  Clone ID: 700838468_FLI
gtataattggttccagaacaggcgtgctcgctccaaaagaaagcagcagaatgtggcacctagtgctaatgctgaatcggaagtggagactgaggttgattctaaggataagaagacaaagccggacgaatttcagtcccctcctagcgtttctgctgtgcctgctgatgataatttaggcttccagaaccatggcagtttgcagtacttgaatccagagtccaacaaaccagattctgtgttcccatctgatgcaagtttaagatctacaagaaatttcaatcatgtgcctgtttttgatgggctgctatcgaactcaacgagtgactatcttactggaaaaatggaagcacctgagaactacgacttataccagccagcaggcgacttcaacatggcaggttgacgtccaatgtaatttctgaagactgtgattagctgtaaagaattgctggtgtggttttgggcttgtgttgatgtgaaaagttgaaccaattgaagcatgaaacttatagtttatagtatatagataaaatgatcttttataatggtaggcggacattttacttgataattgaatataattatgagttaatattg

SEQ ID NO: 9225 - DNA, 663 bp, Glycine max
  Clone ID: 700838540_FLI
gctacttgccatggtggtccggctgagatcattgagcatggtatatcaggattccacattgatccttatcaccctgatcaagcttcacagctattagttgaatttttccaaaagagcaaggaggacccaagccattggaagaaaatatctgatggtggtcttcaaagaatttatgaaaggtacacgtggaagatttattccgaaaggcttatgactttggcgggagtttatagtttctggaaatacgtttccaaattagagaggcgtgaaactcgacgatatcttgagatgttctatatcctcaagttccgtgatttggcaaattctgttccgctagctaaggatgatgcaagttaactagctatataatttcaccaaaggcttgacagcagacataataagagttatttatgtaaatataatagtctgcttctcgtgttttgaaatctagtgaggcgacctagaggagtttcatggaagacttgtcttgtctatgttaacttcgattatgtaagagatggcgagcactggttgttgaatttggatgtctcttgttttcgtttgattagtagtcatcaatgatatagacctggaaattacctgtgactgaggattgttatccttactgatgggtaagaataaagcattatgaatcaatggcct

SEQ ID NO: 9226 - DNA, 1269 bp, Glycine max
  Clone ID: 700838556_FLI
gcagaccgagctagctagctagcaagcaagcacagagatggaggcaaagcgaggccatgccctcatgtgcttggcacgtgtttcactcttcctctgcgctctaaccctatccgctgctcacggaagcaccacggttcaagacatcgcgagaaagttgaaactcggggacaacgagcttctgcgcacggagaagaagttcaaggttttcatggagaattacgggaggagctactccacagaggaggagtatttgcgccgtttggggattttcgcccagaacatggtcagagcggcggagcatcaggcgctggaccccaccgccgtccacggcgtcacgcagttctccgatctcaccgaggacgagtttgagaagctctacactggcgtcaatggcggcttcccgtcatcgaataatgccgccggcggtattgcgccgccgttggaggtggacgggctgccggagaattttgattggagagagaaaggagctgtcaccgaagttaagttacagggtagatgtggatcatgctgggctttcagcaccacaggatctatagaaggagccaattttcttgccaccggaaagctcgtcagtcttagtgaacaacagctccttgactgtgacaacaagtgtgacataacagaaaagacttcatgtgacaatgggtgtaatggaggtcttatgacaaatgcctacaattatttgctcgagtctggtgggttggaggaggagtcttcatatccctacactggggagagaggtgaatgcaagtttgatccagagaaaatagcagttaagatcacaaatttcaccaatatccctgctgatgagaaccaaattgccgcatatttagtaaaaaatggtccacttgctatgggcgtgaatgcaattttcatgcaaacatacattggtggtgtctcatgccctctcatatgtagcaagaaaaggctgaaccatggtgtgttacttgtgggatatggtgcaaaaggcttctcaattcttaggcttggcaacaaaccatactggatcatcaagaattcgtggggggagaaatggggagaagatggctattacaagctctgcagagggcatggcatgtgtggaataaacactatggtttctgctgcaatggtgcctcaaccacaaacaacacctacaaagaattatgcttcttattagctatgcacttaaggaaatctaaataaatatttttcattctaggtgatgtatcatgtatgtaccaaaatattttggtacgtaagtctttt

SEQ ID NO: 9227 - DNA, 578 bp, Glycine max
  Clone ID: 700838570_FLI
ctaaggaaaatcggctacagaaattcaagcttccagaacctgtgctttgtattgggggcttcttgcagattgagcttttgggaaggatacaaagacaagaaatggatggtttattatacatttgtgtttctcatgttcaagttctgggaggttcattgtcacctccattcaatgtggatattctgcagccctctggaatgtttgtgttgaagagggaccagctggctgaccatcaacctgtagtgacatctggaaatgaatctcaagaaatttcggccgagcaaagagaagtgagagatttccagcatattgtgactatattgagtggacaagcattaggaatagtagaagatgagtgggatgaggaagaatttgatgttgatgattttgatccagaatatgccctctgatctttgctggtataaagtaaatttgtaaaatcctctcccaaataaagagaagggaaaaaaaaatagaatctccccagttgaggaatgattgcattcaaaccagttttcctgttttctgtgtaatggttacccttaaaaaaattctggtctttctgtgctttggctact

SEQ ID NO: 9228 - DNA, 1781 bp, Glycine max
  Clone ID: 700838611_FLI
atcaaagcatccatactgcttatgtgagagcaataagatccgctgagcactttgtatatattgagaatcagtattttttgggctcctcctatcattggccttcatataaaaacaatgcaggtagataaacttaattttccaatatcttcaactttataaggcattgctagtttttgcgttgttacaaaatcaaattctggcctttaggtaatgtacctatatatatgccacagacccagaagatataattgtgtatctatgaaggaacaaacatggcaggttagtgggaggcgcatgaatatacaacaaatcatttgcatattaatcctgttaagtgtcactatccaagataaagacttggcattagagggagttttggatgttaatagaggaagttgaaaattgaaagaaggatacacttgtttttttcagtacaagtcaataaagtctatggttcgtgcgagagataaaaggaggatataaagacacaagtttacaaccttgcattcgtttccatgttagatttcttaatcttaagagtttattaggtaaatatggtgtgcaccaaaaggtgtttgaagggtttattattgctttattttttctttttgtaatattgttttcaaatgcctgcatacattatacaaattcatatttattgctaacatttaagggaaatataccactctcctgatcctaagtttcagtagcatttgaatattaagtcaatttgagaggtacacattgctgtagtttttacaaatacactgcaagtgtaaggtttttatttcttatcttaacaggtgctaaccacttggttcccatggagttggctttgaaaattgctggtaagatcggtgcaaatgaacgtttttgtgtatatatagttataccaatgtggccagagggtgttccaacaagtgctgctgttcaagaaatattgttctggcaggtcacattagctgaaccacaataatatatggacagacaatgtctatgatgtacaagattgtagctgatgcccttgaaaaagcaggactttcttatcagtatcatccacaagattatctcaatttttactgccttggaaagagagaaccacaatccacaaatatttcaccaacaccaaatccatctgaaaaccgcgctttggtatcagttaaaaaattcagacgttttatgatttatgttcatgccaaaggaatggtagttgatgacgaatacgtaattattggatcagcaaacattaaccagagatccttagatggttcaagggacacagaaatagctatgggtgcctatcaaccaaaatatacatggacagaaaagaatgctcatccacgtggccaggtgtatggatacagaatgtcactgtgggctgagcaccttggcagtcttgatcattgttttgctgaacctcacaacctggaatgtgtcagacatgtcaacaaaattgccaaacgaaactgggacatatatgtgtctgaggaagagaatcggatgaggggacacttgatgcaatatccagttaagatcagcagggatggaaaagtcagtgcacttgatgattatgaatcctttcctgatgttggtggcaaaattcttggatcaccaaattcacttccggatgcattaaccacctgattaaccaaagtcttagaatattcgcctacagatatatatagccgctaagaattgcagctcaaaaaattggtaatgatggtaaagccaatttatatacacttaaaattaccttttgtatgtaaatttctgtatttgat

SEQ ID NO: 9229 - DNA, 1099 bp, Glycine max
  Clone ID: 700838612_FLI
tagagttaagaattggatgacgtttaacgaacctcgtgtggtggctgctcttggctatgataatggtttctttgcccctggaagatgctcaaaagaatatgggaattgtactgctggcaactcaggcactgagccttacattgttgcccacaatttgatattgtcgcatgcagcagctgttcaaagataccgagcgaagtaccaagaaaagcaaaagggaaggattgggatcctcttggattttgtttggtatgagcctcttacaagatcaaaggctgacaattttgcagctcaaagagccagagactttcatattggatggttcattcatccccttgtttatggagagtatccaaaaaccattcaaaatattgttgggaatagactccccaaattcactagtgaagaagttaaaatcgtgaagggttcgattgattttgttggaatcaaccagtatactacgttcttcatttatgatcctcatcaatcaaaacctaaagtcccaggctatcaaatggactggaatgcaggatttgcttatgcaaagaatggagtgcctattggtcctagagctaattcttattggctttacaatgtaccatggggcatgtacaaatcattgatatacataaaggaacgttatggaaacccaactgttatcttatctgaaaatggcatggatgatccgggtaatgtgactcttcccaagggtttgcatgacaccacaaggataaactattacaaaggctatttgactcaactaaagaaagcagttgatgatggagcaaatgtggttgggtactttgcatggtcattgctggataactttgaatggaggttgggttacacatcaaggtttggcattgtctatgttgattttaaaaccctcaagagataccccaagatgtcggcatactggttcaagcaactcattaccaaaaagaagtattaatagctgggctgaacatctattttctaagcttctagttgcttcagagaatcatgttttaatggttttggttgagtttaacgtgcttctgtaactgtaattatgtgacttgcttaatgcaagtcttagaataaaatgatctttcatggc

SEQ ID NO: 9230 - DNA, 1535 bp, Glycine max
  Clone ID: 700838658_FLI
ttcgagcctctcgaatccaaactcaacagaacattcatttccctataaattcgacgtcgtttcgttccgctctcactccaagaaaacgttttgcagaagattccaatcggagctcagaaaaaaaagaaacctaatcgccgatcgcgtcgaaagtccctaagcttacatcctgcttctagatagttggtaatcttatctgagggtagtagctagtaccatgggagaagtggcagtaatgcactctgagcctctgcagtttgagtgcaatgacattagtgtgaatatgactgagaaggaagtgtatcctccagaatcaaatgtggagcgcttacctggagaagaatcgagtcaatcaacagaccacaaaaatatcaatgacttgcaagagagaggatatatggagtatggatgtcagcattaccggagaagatgccgtatcagggccccatgttgcaatgagatttttgattgccgccattgtcataatgaggcaaaaaatgatatcaacattgatcagaagcatagacatgatattccacgacaccaagtcaaacaggtgatttgttcactttgtgggactgaacaagaggttcagcaaaactgtataaattgtggtgtttgtatgggcaagtacttctgtggaacatgcaagctttttgatgatgatatatctaagcagcagtaccattgcagtggctgtggaatttgcagaactggaggaagcgaaaatttcttccattgctacaagtgtggttgttgctactcaactcttctgaaaaacagtcacccttgtgtagaaggagcaatgcatcatgattgcccggtttgttttgagtatttgtttgaatcaagaaatgatgtcactgttatgccttgtggacatacaatccataagagctgcctgaatgaaatgagagaacatttccagtattcgtgccctctctgcttgaaatcagtctgtgacatgtcaaaggtttgggagaaatttgatatagagattgctgctacaccaatgcctgagcaatatcaaaataaaatggtttggatcctgtgcaacgattgtggtaaaacttctcacgttcagttccattttgtggctcaaaagtgtccgaactgcaaatcctacaatacacgacaaacatgaggctgagcaagtggccacgattattcattggtttcgtcaaaagccttcacttgagttctcttgatgttgttgtgattcgtgaaggctgtgaaaatgcatgtgtgtccattgggtacgtggatgtgcacgtgggaatttgaatttggagtgcacgatgagccacattcaaagggatagaataatggttctttttcttatatgttgatttggagtggggtagtgtaatttgttggggcgccactagttggaatagggcccccgagtgttagagttcgtgtttgttttagcttagcaatttggctaaaagtgtttctatttttttgggtctcaattgataagtattcctagttaaattactattaagtgaaattccatgcttctaattattttt

SEQ ID NO: 9231 - DNA, 1456 bp, Glycine max
  Clone ID: 700838676_FLI
aattctgttaaacttgttttattatactgctactatggagcaccttcctgttgaagtgattggtaacacattatctcttctcggttctgcccgagatgttgtggttgcttctgtaacttgtaaaaaatggagggaagcatggcgcaatcacctccacagtctttcattcaactactgtgattggcccctctttcatgactttacctctgctaggttggaaatactcatcactcagacaatcttccaaaccaaggcactgcaatccctgaccatattcttggatgacgagcacaagttctcggctgccccggtcattgcttggcttatgtatactagggattcgttgcgccaattgctttacaatgtgaggacaaccccttgtttcaacatcattgagaaatgcagcaggcagaggttggaggtgttggccttggctcgcaatccgatcaccggtgttgacccaagctacttgaagtttccttgcttgaagtcgctttcgttgagttttattagcatctcggcgttggatttgacccttcttctctctgcgtgtccgaagcttgaaaccttggctatggttggtgtggagattgcaatgtcagattcgcaggcttccgtggagcttagcagcgtttctttgaagttttttgaccttgaattgtttagttcggataagtttatattggaggcggatttacttgagaagcttcatttgaaagattgtagctttgaggcttttgagctgattggaaaggggacattgaaggttttgaaaattgatgatgtgaatattatccatcttgatattggggatagtacagaaaaccttgagattatagatgtctgtaacttcacagtcatgtggccaaaattttatcatatgatctcaaaagcatcaaagttatataagcttcggctgtggggtgttgtttttgatgatgaggacgaggttgttgatatagagacaatttctgtttgctttcctcagttgacacatttgtccttaagttatgatttaagagatggagttcttcattatggtttgcagggtttgtcttgtttgatgaatgtggtggtgctggaacttggatggactgtaattagtgatctcttctcagtatgggtagctggacttttggaaggttgtcccaatttgaaaaaattggtcatttatggttttgtttcagaggtcaaaacacatgaagagtgtcaaattcttgccagattctcagaattcattcttcaacttggaagaaaatatgggcatgtaaagtttgagtttgaatatgagtagtgggttctgtcgtgctcatctaatccttgccaaagtgaaagaagatacttgcatgccccatgagtttcttttgtccatttcttctgtcgtgaatcacaagaattcttcaaatgtaaagttatagattctttgtgtataagagtgaatttcagtttctatcac

SEQ ID NO: 9232 - DNA, 1773 bp, Glycine max
  Clone ID: 700838706_FLI
caccaatggaaaactctactccatctccatgcatcaccatgaatttcacatttgctgtgtcaatcaaccctaaggctttatcatcagataatatttcttaagaactcagtatgcatgcacaactccacgataaatcgtcgaattaaacaacattcaacgacaactctgattgaggccttgttcgtggagaaattaagatggagataatttaccagtctcacatcgacagggagattgaatcgctcatagaaagaatccatccacccagggtctgtatagacaacgattccagcagagactgcacagtggtgaagattgatagcgcgaacaggcatgggatattattggagatggtccaggtgttgacagatcttgatcccgtcatttccaaatcatacatttcttccgacggtggatggttaatggatgtgttccacgtgacggaccatgatggaaacaagcttaccgacagaggactcgtccattacattcaacagacactgtgcgaggctagaagcaacagcaaagaaatttcaagtgacatagagctaacaagctgcaatgaaccaccacgactggtgaacttagcaatagagttgaccacagcgaaccagcatggcctgttctcggagatgtcagcggttctattgggcctgggcttcaacgtcacctccgccacggcctggacccacaacgacagggtggcctgcataatccacctggaggacgcaaagaaacttgggcccattaacgcagaacgtctggcccaggtccagcccgagctgcggaacgtagtgaaggcccgtgataggaacggggaagaagagagagtgaggttgaggctgaggagcttcggcgccgggcgcaatcacaccgagcggcggctccaccagatgatgtatgccgacggggactacgagaggtgccgtgcgtgccatgtcggagacagaaacggtgagaagaagaaggggtgtgaggagacccaggttactgtgggcagatacgaagagaaagggtactgggttgtgaacgtcaggagcagggatcgtcctaagcttttgtttgatactgtgtgtgtgctcaccgacatgcagtacgaggtgtttcatgcggctgttagctccaatggctccatggctgaccaggagtacttcgtaagacccaaaggtagttcaaatttggacaatgaaagcgagaagcaaaagctcagcctatgtttaatcgcagccatagagcgcagagtctcacatggattgaaggtagacattcgcgctgaaaacacaacggggctactatcaaaagtcactcgtgtgattcgtgagaatggactatccataacaaaggttcagataggagtagagagtgatgagatggcagtaggatcattctgtgttgcaaattcttcaggtcaagaagtgaacccaaacatagcagagttggtgagaagagaaactggtgggtctgtagttgcaaattacaattcgccttacagggtccctaaatccttgtcatcgagtaaaaccatgcatgaaaccaagagtagcacagaggttggacaaaggttttccattggaagcatgctatggtctcagcttgagtgcctttccaataatttccgtcccattagatctcataagctttaattaacaagccatagttatttattcctcaagaaataagcactctacatatgattctcgatatcgccttaaaattgcataccacttgatgtgagatgatatttgcagatcaattgtaaatatttatgataag

SEQ ID NO: 9233 - DNA, 1828 bp, Glycine max
  Clone ID: 700838708_FLI
gttagatccttcgttcatcacggcggtggacagatcacaaccacgagatatccacttccgctgatgatggtaatgattctctgaatggtcacatcatatctactacagttggaggaaaaaatgggaagcccaaacagactaaaagttatatagcagaacgcattgtggggactgggtcatttggaattgtcttcctggctaaatgcttggaaactggcgagccagtggccattaagaaggttttacaggacaaagatataaaaatcgtgagctacagttaatgcgcttgatggaccatccaaatgtgatctctctgaagcatcgtttcttttccactacaagtgcagatgaactttttcttaatttggtgatggaatatgttccagagtctatgtatcgagtctcaaagttctatagtaatactaatcagagcatgccacttatctatgtaaaactttacatgcaccagattttcagtgggctggcttatatccacactgttcctggagtttgccacagagatttgaagcctcaaaatatactggttgaccctcttacacaccaggttaagatatgtgattttgggagtgcaaaagtgctggtcaaaggaaaagctaatatatcacacatatgttcacttttctatcgggcaccggaacttatgtttggtgccactgagtatactacttcaattgatatttggtcagctggctgtgtccttgctgagctgcttttgggccagtggaccagcttgtagagattatcaaggttcttggcacacccgctcaggaggaagtttcctgtacgaatccaaactacaatgatttcaagtttccacagatattccatgaaaaaatgcctccagaagcaatagatcttgcttcccggcttctgcagtattccccaagtcttcgatgtactgcgctagaagcatgtgctcacccattctttgatgaactccgtgaacccaatgctcacttgccagatggtcgtccatttccccctctattcaacttaaaacaagagttatctggagcatctccagaacttattgataagttgatacctgaccatgtgaagcggcagatagggctacaacatgcccatttggctggatttctggaacatgatgttaagctcggcaaattgtagtctaatggagatgagttaaaagaggggtaccatcttattgtctaaattacaagtcattataccatggcagtgtaattctgtgcttgactaggaccaagacttgggttctggattgctgcagttgatccatcactccagcaagcatctatatagcttgggtactacaaaattaaagccatagacatactgggtatgtactcgtaactgggtacatacctgtacctagtacatgttgggtatccatgggtgcataccatacttatttttcaaaaataaattaagtactgaatatgggtacaccttggtactctttgggtatgtacgtcctgtatttatggtggatcatgtatggtgctacaattcccaaacatcttctatccattccatgaaaaggaaataggctcaaccctaagagtgtgatttgctttttatacttacaaatccttcgtctcctctcaggaattaagaattataatgaagatggaagcaaaaatgtaagaagggctcgatgttcttgaagttgttactttttctgtcttgatgaaaccaggtttagaggttgctctatgaacaaaaaaataataagtttaacattgttaaagtgagatattcatagttacgtttaagttttatcatgttgattgttgaacaatataatcctattacgagttgtctc

SEQ ID NO: 9234 - DNA, 1071 bp, Glycine max
  Clone ID: 700838722_FLI
atttgaaagaaattttcagtaactttggtgaggttataagtgtggagttggcaatggatcgaactgtcaatcttccaaaagggtatggatatgtgcagttcaagacaagaggggaggctgaaaaagcattattgtacatggatggtgcccaaatagatggcaatgtcatcaaggcaagatttactctacctccaaggcagaaagtttcaccacccccaaagacttctgctgttgctccaaagagagagatccccaggactgataatgctagcgcagatgttgacaaggatggaccaaaacggcaaagagaatcttctcctcgtagaaaacctcctccctcaccacggaggagatctcctgtacctagaagagctggatctccaagacgaccagattctccacgccgtcgtgcagattctcctgtccgtcgccgagtagactctccttatcgtcgtggaggagacacacctcctaggaggcggcctgtgtctcctggaagaggtcgttctccatctccacctagacgccttagatcccctgcaaggctgtcacctagaaggatgcgtggaagcccaggtcgaagacgttcacctccacctcctcccaggcgccgatcaccacctagacgaccacgtagtcctcctagaaggtctccaattggtcgtagacgtactcgctctccaatacgtaggtctgcgcgctcacgctcaaggtcattctcacctcgcagaggtagaccaccggttagacggggaaggtcatcatcctactctgattccccaagtccacgcaaggtatcccgtagatcaaagagtcggagcccaagaaggcctttgagaggaagaggcagtagcaacagcagcagcagcagttcaccaccaccaccaccaccacctccacctcgcaagccatagataattcttgtaaatctgttgtctttttccgtttatgtatttaccaagattctgtgccggctgagttctagcttgatgtgcttgggggtatatgttgcttttcattgttgtctattaacacttttttcttttcttattagcacttaatgttgtttgg

SEQ ID NO: 9235 - DNA, 1527 bp, Glycine max
  Clone ID: 700838745_FLI
ctcaaagggtgtcctgagaaggaatcacacaagagaaattttgggtggatcttggcaatttaaatttggtccaaaaatagtaagaaagaaaaccatagtttatatagttttcatgtccttgctaacggtggcgcaccaaagggggtcaggtgagtttatgcggttcacggaaagtcatggcggcggtggtggcggtgacggcgatggtgaatatggttatggacatgatgatggtagaggtggtgggggtggtggttcactagggttgaattttaaccaagtgatgcaacaaggtgaggttacaacgcaaggaggtactttggtttcagggtataacaggggtgatccagatttgagagaaatggtttccgctttgacacatgtggtggtgtcttcagggtcaggccagaggagcaccgaatggatccagcaaagtggttttcctatgatgtctgcatcttctctttcatgtttgtcttctttctcttctccttcttcttctggagcctcttgggttggccacaaaagaggcagagaagaagaagagagtagctcttcccataacatgatccaacaacaacaacaaagtgctccaagactcttcagaaacattggtgacttcatggtgccttctcaaggagactcatcttcagcgacagaagaagcccccacctccacaactacaagtgtaaccgctgtggcaacaacggttactgaaaccccacccccaccgggaggtggggaaaggaggagaaagtacaggggagtgaggcagaggccatggggaaaatgggcagcagaaattcgtgatccacacaaagcagcaagagtttggcttggaacattcgacacagaagaagcagcagcaagagcatatgatgaagctgcattgaggttcagaggcaacagagcaaagcttaacttccctgaaaatgtaagagcagttccacccattcaaccttttcaagccaccactaggctaaccgtttctgattccaccacctctcaattccggccactcgtcacggagacgccgcccttcattcagcagccacagattcagggctcctctgacttgatcagagattacttgcaatactctcagcttctacagagtgattttcaacagcaacaaatacaacaacaatcaccttctagtttgcttcagcagttgtactataatgcacaattggcttcacttcaatcaccttcagtgctatcatcatctccttcattttcttcttccgtgtcaccaacaccattcccattgttctcaacctctgctcagttttcctctgcttctttccccatgttttcaagtcaacaaatgggctatttccagctgccggaaagctgccctcccgctggcggcgtgccagagtttccgccgtccacatggtcgggtaccagtggccagccaccaccttctggttgatacagtgtctcagtttccttcatattttccttttttctctttctttcatacttacgataaaaaaatgatttgttttacttatttcctttttt

SEQ ID NO: 9236 - DNA, 762 bp, Glycine max
  Clone ID: 700838767_FLI
atcgcgaacatcccaatgaccaaaaatcctccaatatatatatataacttccccgttctctcatactcaacagaaaattgaaaaccaacataacaatgtcgttgattccaagtttcttcggcaccgggcgaagaaccaacgtcttcgaccccttctccctcgacgtgtgggacccattccatggcttccccggcaccaccgccctctccgctccgcgctccgagacggcggccttcgccaacacgcgcatcgactggaaggagacggcggaggcgcacgtgttcaaggcagacctgccggggctgaagaaggaagaggtgaaggtggagatcgaggaggagggaagggtgctgcagataagcggacagagaacaaaggagaaggaggacaagaacgacacgtggcaccgcctcgaacgctccagcggcagctttctccgccgcttccgcctgccggagaacgcgaaactcgatcaggtgaaggccggcatggagaacggagtgctcactgtcactgttcccaaggtggatgtcaagaagcccgatgtcaagcccgttcagatcactgaaggctaagttgtgttctcaatcaatcaaaattcatgtgtctcaataattgagtttgaggtgtgttgtgtgagatattattaccatgtattgttatagtgtggtgttatagtgtggtgaattgttggtcgtgttgtgtaactttttttaataataaagaatattgatatatgaatatttttattttaaatactct

SEQ ID NO: 9237 - DNA, 1204 bp, Glycine max
  Clone ID: 700838837_FLI
caattttactttgccataacggtgagtttagagagggaataatggatggaagaggaggctgttgcatcgccaggtatgtacccggtgcatcccacgggtccaccgtcgacaaaataatgcttaggtttcgtccaatcgctcccaaacccgccgccgcggccaccgcttccgacggctcttcgtccgagagcagtgacgcttttctcaaaaacggaaccactaaaagaaagtacgtaagagataacaactacaccagcaaacgaagaatccgccggagaaagaacacttcctcgccggagaaaaagcagaagccggtggtgactcttccgttgcttccggaaactcccgatcggaaggattctcgggcaaaggatctaactccatcaccagctaaaccagtacgaaacaacaacaacaacaacaacaagagcaagaacttgaatattattaacaagaacgtgccggtgtgggtgagttttgagaatcgaagccttacgatgatgggagggtggtgttcgtgtgtgacggtggagggcgtgacggacacgtgcttggagagcgagtggctggggagtacagacgaggaacggagactgaacctcagcaatgacacgtgtccagggttcatatcagacggttacgggagggtgacgtggacgaacgaggcgtacgggaagatgatgatgatgaagggcgagggtgatgagggacagggaccagtgttgctggtgaataaggtgaatacggtggttccgcacgcgtcgttcacgtgcttggtgagggtggtgcaatactcgtgtgggaaggagagaaactcgctcacggtgccctgcgatgtgtggagaatggactgtggtgggtttgcatggagattagacgttaaaactgcgcttagcttgagattgggttattagttcacaaaggtatcacgaactcgaaatacaaaacggcgtcgctccatggtcgtagaactataacactatttcttctcttttaagagcttagaatcgtgaatatatatatctatatatctatatatatatatatataactactgacgctaagctagcttgtttcactgtaaattcatatatgcatgtagcttgtcttttgttctcttagatggttttttctgatttgagtttgagcttggaacagtagctgtgagctaattatgaataactcgctacgtaccgttatggtt

SEQ ID NO: 9238 - DNA, 205 bp, Glycine max
  Clone ID: 700838895_FLI
ggttgagctcagtgaggatccagatgttgatgttaggtttttcgcctcacaagcactacaatcttgtgatcaagtcaagatgtctagctagatcagtttgcatgtggtctttagttttttttttttttcttataagatttacattttcttctgtaattgacatgacgccaacttgcccaatcctttgtatcacataattgttgtg

SEQ ID NO: 9239 - DNA, 3029 bp, Glycine max
  Clone ID: 700838909_FLI
agaaatgctaatgtgcggtcacgattgagagatggttttggcccatcagtagctcacgtttgtgcctatcatggtcaaccagattgtatgcgggaattactattagctggagctgatcccaatgcagtggatgatgaaggtgaatctgttctgcatagagcaattgccaagaagtacacagactgtgctcttgtgatattggagaatggaggctgtagatcaatggccatcttgaattcaaagaatctgacaccgttgcaccattgtgtggcaatatggaatgttgctgttgtgaagagatgggtggaagttgctacttctgatgagattgctgaagcaattgacataccaagccctattggcactgccttgtgcatggcagctgcttctaagaaagaccatgaaaatgaggggagagaactggtgcggatattgcttgcagcaggagctgatccatctgctcaagattcccagaatgggaggacagctttgcatacagctgctatgactaatgacgtggacttggttaaggatgatgatggtgacaatgctttccatatagcagcagagacagcaaaaatgattcgtgaaaatcttgactggcttattgttatgctaatgaagcctgatgctgacattgaagttagaaaccacagtggcaagacactacgtgacattttagaggctctcccccgagaatggttatctgaagatctgatggaagcactcgtgaataagggagttcatttgtttcctacaatatttaaagtgggagactgggtgaagtttaaaagatctgtcacaactccaacacatggatggcaaggtgctaaaccaaagagtgttggttttgtgcaaagtgttccagacagagataatctcattgtttcattttgttctggagaggttcatgttcttgcaaatgaagtcataaaagttgttccattggataggggacaacatgtacacctgaaagaagatgtaaaagagcctagatttggttggcgtgggcagtcacgtgacagcattgggacagtattatgtgttgacgatgatggaatcctccgtgttggatttcctggagcatccagaggatggaaagctgacccagctgagatggaacgtgttgaggaattcaaggttggagactgggttcgtattcgtccgactcttacatctgcaaagcatggactaggatctgtgacaccaggaagcattggcattgtatattgtatccgaccagacagtagtctgttaatagaactgagctatcttccaaatccatggcattgtgaaccagaggaggttgagcacgttgctccttttaggattggggaccaggtatgtgttaaacgatctgttgcagaacctagatatgcttggggtggtgagacacatcatagtgttggaagaataagcgagattgagaatgacggtctcttaataatagagataccaaatagacccataccatggcaagctgatccatcagatatggagaaggtggaagatttcaaggttggagattgggtaagagtgaaagcttcggtgtcttctccaaaatatggatgggaggatgttaccaggactagtattggggtaattcatagcttggaggaggatggcgatatgggtgttgctttttgtttcagaagtaagcccttttcttgctcagtcactgatatggagaaggttcctccatttgaggtgggccaagaaattcatgtgatgccatctgttactcagccacggcttgggtggtcaaatgaatcaccagctactgttggaaaaatattgaaaattgacatggatggtgctctcaatgtgagggtcactggtaggcagaacttgtggaaagtttctcctggagatgcagaacgggttccgggatttgaagttggggattgggtacggtcaaaaccaagcctgggaaccagaccaagctatgactggaatagtgttgggagagaaagtttagctgttgtgcatagtgtacaggattctggatacttggagttggcttgctgttttcgcaaagggaagtggatcactcattatacagatgttgaaaaggttcctagctttaaagttgggcaatatgttaggttccgaactggtttggttgagccaaggtggggttggagaggagctgagcctgaatctcatggggttataactagtattcatgctgatggagaagtcaggttcgcattttttggtctgccaggattgtggaggggagatccttcagaccttgagattgaacaaatgtttgaagtgggagagtgggtgaggttgaactacaatgcaaataattggaaatcaattgggccaggtagtgttggtgttgttcaaggaatagggtatgaaggagatgaattggacagaagcatttttgttggattttgtggggagcaagaaaagtgggtaggaccaagttcccatcttgaaagatttgacaaactctttgttggacagaaggttagagtaaaacaatatgtaaagcaaccaagatttggatggtcagggcatacacatgctagtattgggactatacaagcaattgatgctgatggaaagctccggatatatacaccagcaggatccaaaacatgggtcttggacccatcagaagtggaggtggtagaagagaaggagctctgtattggagactgggttagggttaaagcatcaatttcaaccccaacccaccattggggggccatacatgtattgatgttaataaacagaaggggtggaagaatggaagctgtggagataggaaaactgtcttgctgaccgagtggtggagatttaaaggcagctaaaataaatatattggcagttggcccatttatatattcattactcacaagtttgtagtcccagattttgaggtttatatcgtatgtatgtttatttcatattgtacaaattgtattcaactgtcaacttaatgcatttttttgactcgattatgcagttgcataattcttgaaatagaattgattccattatacagcttgtgc

SEQ ID NO: 9240 - DNA, 830 bp, Glycine max
  Clone ID: 700838943_FLI
ccgtttcgaaccgccgcgttatgaagccggcgtcaaagcgccctccatttaccattccgagagaggtccaacgacttcccaggtcctcgccgtcctcgccggcctcccggtcggtggcatcctgctcctcctggcgggattgaccctggcaggaaccctcaccggactggcagttgccacgccgctcttcgtcctcttcagcccggtgctggttccagccacggtcgccatcggcctggccgtggccgggttcctgacgtcgggggccttcgggctcacggcgctgtcttccttctcctggatcctgaactacatccgggagacccagccagcctcggagaacctcgccgccgccgcgaagcatcacctcgccgaggcggcggagtacgtggggcagaagacgaaggaagtggggcagaagaccaaggaggttgggcaggatattcagagcaaggcacaggatacaagggaggcagctgcaagggatgcaagggaggcagctgcaagggatgcaagggaagctgctgcaagggatgcaaaggtggaggcaagggatgtaaagagaacaacagtgacagcaacaaccgcaaccgcatgatgagtaattctgatattagagggagcattaatgtgttgttgtgatgtggtttatatggggaaattaaataaatgatgtatgtacctcttgcctatgtaggtttgtgtgttttgttttgttgtctagctttggttattaagtagtagggacgttcgttcgtgtctcaaaaaaggggtactaccactctgtagtgtatatggatgctggaaatcaatgtgttttgtatttgttc

SEQ ID NO: 9241 - DNA, 814 bp, Glycine max
  Clone ID: 700839035_FLI
ctctagataggtaaaaatggctactccgccggtggtaaggtttccgatcttcacggcggtgagggcggtcggcgttgccgttactgttcttctgctgacgtgggccgtccatttcagaggaggcctcgctctcgtctctgataacaaagatctcatctttaatgtccatccagtgttgatggtgattgggcttgttctaatcaatggtgaagggatgcttgcatacaagactctatctggaactaaaaacttcaaaaaatcagttcatcttgcgttacagtttgccgctctcattttgagcttgattggtgtctgggctgcttggaagtttcacattgacaagggcattgacaatttctacagcctgcattcatggctaggccttgcatgccttttcctattcaccatccagtggggtgctggctttgcaacattttggtacccaggagggtcaagaaatagtagagctgccttattgccatggcatgtgttctttggtatctatatctattgcttggctatagccacaactgctactggtattctagaaaaagctacattccttcaggtcaacaacatcatatcacgctattccaatgaggcacttctggtcaattccttaggcattctgatagtcattttaggtggctttgtgattcttggaattgttactccagtttatggtaaagctgatgtcataaggggaaacgagtgaccatcatctatatgattcaaaattgaggaacattaacatttgtatcatctttaatacaaggttacatggatgtatgaaaacaaaaaaatataaacgtgt

SEQ ID NO: 9242 - DNA, 685 bp, Glycine max
  Clone ID: 700839140_FLI
gcagggagagtacaacgtgagagtcaactcaataagaatcaaccagcacagtgtgttcccactgaacaagatatcatccaccatcgtagggtcgacctctggaggaaccatgattagcacctcaactcctcacatggttctccagcaatccgtgtaccaggctttcactcaggtgtttgctcagcagctaccaaagcaagcacaggtgaaatctgtggcaccatttgggttatgcttcaactccaacaagatcaatgcatatcctagcgtggaccttgtgatggacaagcccaatggtcctgtttggagaatctctggtgaggacttgatggtgcaggcacaacctggggtcacgtgtttgggtgttatgaatggaggaatgcaacctagagctgaaattaccttaggggcacgtcagttggaagagaacctggtggtgttcgatcttgcaaggtcaagggttgggtttagcacctcatcactgcactcgcatggagtcaaatgtgctgacctcttcaactttgccaatgcatgatgagccaagatcgcgagactttttataatatgcttatttataattaagcaagcatctactacatgttatggttaataaaagtaataatgtaagaataaagactttgaactaaataataatatgaacgattctctttcgttgttcaatgag

SEQ ID NO: 9243 - DNA, 1478 bp, Glycine max
  Clone ID: 700839152_FLI
ccttctcagcgaagacgaccccagcttccctcacctcaaatctggcctcctcatcctcaccacgcaccgcctactctggctcccggactccgccgcatccgccggcggcaccgccggcgccatccccctcgccgccgtctcccacattttctcccccaagatgtccctgcggaaggtgttcgcctcgccgcgggtccggttccaggtgtcactgtcgccggagggaagggtctccgcggcgggttcgcgatcggtggtggcgacggcggtggtgagagggaagggggattgcgacgcgtttttggcgaagtttacggagaattgccgcgccagggcgtggcaggaggcggagagtgggtccagttcggggtcgaattcggcagtgatggcggcaacagcgacatcatcatcgtcgggcgggatttattcgagcgacggaacggtgaggatggtgggagtgtctgggatactgaggaaggagcaggaaatgtgggagagtactgataggagcttgcaggaggcttttcaggatttgaatgctctcatgagcaaggctaaagagatggtgatgctagcagagaaaatgaggctaaaacttttgtctggctcaaattctcaaaccaatgcaactaatgatgaggagatgggttcgaaggaagaaatgcaagattggttattgagtgttggtattatatcccctgttacgaaagagtctgcgggtgctttgtatcatcaacaactttctcgtcagttggcagattttgttaaagttccacttgagaaagctgggggaattatcaatcttattgatatatattgtctcttcaaccgtgctcgtggcacagaattgatctcacctgatgatttgttgcaagcatgttctctgtgggagaagtttgatgtccaagtggttctgcgcaagtttgatagtggagtcatggtaatacagacgaagtcccacagtgatgaggaggttttcaataaagtcaagatgcttgttttgaaacctgacgcccttcgagctggaataagtgctagtgatgctgcaaggacactaggggttgctccagcaatggcaaaggagcatctcttgtctgcagagagcaaaggtttactatgcagagatatcagccctgatggatttcgcttttatattaacttgtttgtggaaattgaccgagattatatgtatttagtgaaagatcagggaatttatgcctcgtgggtacaggctaacgatactcatgcttgagagtcccaagcatgtttaattcaaggtatgcataaattttaaattgataaagcgatgataagcaggaagggaaaaatgtacacacacacgcatacagttttactgtgcttcaatcaatgtgagattttcattgtagaggacacttcacataatcattctgtagaaggattataaatacttgaaaagactcgaagcaaaacttatatgtatcatgtcatatcattcc

SEQ ID NO: 9244 - DNA, 510 bp, Glycine max
  Clone ID: 700839172_FLI
ctcactaccaccaaagactgagaagaggggttgaattaactgcttgcaagcatggcgaagagcaaggaagacataacctatgcaacatcacaagcaaggctttcagaagatgaagcagtgagagtggcctacgagcatggctcaccccttgaaggaggaaagattgctgactctcaaccagttgacttgttttcaagtgcacacaatatgccaaagagtggccaaacaacaatggattcaaacactagtgatcaatctcagatgcaacgtgatacacaagaagggggttctaaagaattcaccactggagctcctggatagccccaaaaggggctcctccagcaatgggtcataaattttgaaggcaataatatagacaaccttataaaatatgtttacttttgtgtgttttgttctgccctttgtttcttttttatggcatatcatcaatcatgtatggggatgactccctaagtttttcttcgtctaataaagttgaatattttttgt

SEQ ID NO: 9245 - DNA, 1045 bp, Glycine max
  Clone ID: 700839183_FLI
aagtaattcagcggctgaataccaagcggagaagatgagtcaggagcagccacggcgtcccaaaggccaaaaccccatcaaatacggcgacgtttttgtcgtctccggcgaccttgcacagaagcccgtcgcaccggaagatgctgccatgatgcaaagcgcggaaactcgagtgctcggacaaacccaacccggcggagcagcttccgtcatgcaatctgccgccaccaggaatgaacaggctggccttgtcggtcaccgggacgtcaccgacgttaccggcgaccgtggcgtcacagtcacagaaactaaagtccctggaagacgcattataaccgaggctgttggtggccaggttgtggagcagtatgtggaggcaactccggttgaggcagggcgaagcagtgcaattaaggagaatgccataacaataggagaggcattggaggcgacggcacagactgtgggtcagaaagcggtggatcagagtgacgcctccgcgattcaggcggcggaggtgagagcaacgggaagtaacgttataacgccgggtggacttgcggctatggctcaatcagctgctgcttataatgctgactgcaagcttgaccaggacaaggtcaagctcgccgacattttggccggagccacagccaagttgcccgcggacaaggccgccacactgcaagatgctgaaggtgtagcgtgtgctgaggtgaggaacaaccctgatgccaccgccactcccggtggcgtagccgcttctgttgcggctgctgctaggctcaatgaaaatgttaagtaacgagtcatgttatgtgtcttgataatcatacttttgtttcatgatgtgtggtgttgatgtgttatagtctatagtgtattaataagtgtaagtggtgcaacatcttgtttttctttcttgtactctttgtgagttatattaattactggttttaaggactctacttaaggtgatgtatgtatactatgcgctatatgcatttctgtggttatcagttaataatatgtgctccaatcttgt

SEQ ID NO: 9246 - DNA, 1820 bp, Glycine max
  Clone ID: 700839184_FLI
tgctccgtaatttctattctaccaaattttttctcaacagagaaaaaccacattggaactatacgcatagtgtttccaaccagcttcaattgcaaaggtcaagagcagacaaggtagaagataagctaaaagaagagcaagaaacacaacggatttctttcaaatcagaagtgaagaaggcggatggaaatgatgggattagcaaatactgttctgatgatgaagattcctcagatagtaagtggaagttggagctggcttggcttacaaaggcacttgaaccagctctgcaattttgtaggaaatgaaattggaaacaaacccccaccaagcattcgatcccttacggaaataattgcctgcatccaacgaagtaagattggaatccaggattggagcttgagtgaccttacaattggcttgtatctgatctatcttcgtcaagcttctactcatccatttgaagatatcaaaggcattccgatattgtcagaatccattgttcaagatctcatttatcatattgagttggctaaaggtgcttatagggataacccttgtagtatttcaaggaacagcatgctacgagaaagtaatgtcaaaaagtttgttaaaaactccagtgtaatgaggcctgcatactatataggggttgatacccgtaaaaagcttgtaattttgggcattcgaggcacacatactttttatgatcttatcactgatattctttcctcaagtgatggtgaagtcacctatgaaggctattcaacccactttggcactgctgaatctgcacgttggtttctccgtcatgagattgaaatcataagaaaatgcttggagaaacatgagggatttaagttaagacttgtgggtcattctctgggaggggctatagcttctttattggcaataatgatccatagaaaatcatcaaaggagctgggttttagtcctgacattgtatctgctgttggatatggaactccaccatgtgtatctagagaacttgctgaaagctgctctggctatgtatcaacagttgtgatgcaggatgatattatacctagattgagtgtagcttccctagcaaggctccgaaatgaaattgttcaaactgattggatgagtgtaattgagaaagaagactggaaaagcatcacagatttggttacaaatgcaaaggaggttgtgtcttcagtgcaagatgttgctcgcaaacttgctgattatacaaatttcaggggaaacaaaagtttagctgttggtactactgataaggagttgccagttgttaccgaagcacctctgccctccgaagctgcaaaggagacttctggtgtcacgaaagttgcgggaactaaaactgcagtgatcgaggagttatttatacctgggactgtttactatcttaagaggaacttgggatcccaaattgatgctggaaaggattttttcaccctttacaagagggagcctggtgagcatttccagaaggtaatcttttcggggaattttatcacagaccacagatgtgatagccattattatgctttgagagatgtccttaaaggtgtgccatggtgtgggaaggaaggtatatttaaatagaaaatgttgttaattattttaatttaattttcccgtatcatttgattgtaataaaactgaacattgtgtagctgattttctgtgcttagggggtgccttacagttcttcagtctgtgcggaggtgttagcaatagcacagtagattagaagtttggcaatttaggctataaaatacataaaaaaattgtggatagtttggttctatcat

SEQ ID NO: 9247 - DNA, 1792 bp, Glycine max
  Clone ID: 700839193_FLI
atagcacaacacagcagttacgcaaggtctttatttgttcttcctcaagcaccggcaacgcaaacggatgcattacaaaaaataaaatgagataagaaattaaaagaagacgacgttctctctcggttttgattcccaatggcaacgcgaaagctgattcgtgatttgttactctccaaacgatcccttcttcaccaccagggttggagtaggagtagaaggttacctttggtttgggaagataggcgtagatacagtgtcttcaatgagttctctaagaacattaaaggccaagctgttagaaaccaagaattccaacagtctgtcaaggagctgaaagaaaaagcagatgaacttaaaggggtaaaagaagagctgaaagaaagaacaaagcaaaaaactgagaagctgtacaaacaagtggatgaagcgtggacagaagctgaagctgctgcaaagaaggtttcttacaatgttaaagagaagatttcagctgcatcagaggaggtgaaggaaacttttgggataggaaagcaggattcttcaggatcaactgattcttcaacaaaacagggtgctgatgcaaatggaggaaatcagacatcacgtgaggaagagaaaaatcagcaatctgggtctagtaaggatgctgattcgttgtttggcaaatttaaatcaactatttcccctccaaatgtttctgctgccttccaaaaattaaaggatgcaaagttagttgacataaccaaaaaaggttatgacatagtaaaagaggagttaagtagtaccccgactaagagaaagcgagttccttttgcatcaagtggtgaaacaagtacaagaacagatcttgttgttatgccatctaaacaatcttggtggagtaagaagtttgatgagttcagggagaaggtgaaaggccatccagtatccaagcgattccttaagtatagtgacccagtgaagacaaagggccaggagatagtagaggacttgcgggaaagatatgagaccagtgacagccccattattcacaaaatacaggatatcaatgacagtatgtttcaagagacagatgctgcaatttcttacaaggaaatacgtcaacgggatccttatttttcattaccagaatttgttggggaagtacaggaggcaataaaaccagtgcttaatgcttacatcaagggagacgttgaaacattaaagaagtattgtagccctgagctgattgaacgttgtaaagcagagcataatgcttaccaaagtcatggtatattctttgataacaagattctgcatgtatctgatctggaaataagagagaccaagatgatgggctcatctccagtaattattgtaatgtttcaaactcagcaaatctattgtgtacgtgataggaatggggcaattacagaaggaggcaaggatacaatccacactgtattctatttttgggcattacaacaaatggaccaagaagatcgtggagaagatggtatttacctaatgtggagactcagagagatgcaacagcaaggcatccaagctctcatctagattttgtcatgattttcagggatttgtataattgaacctttatgtcatatactacatttactgatttcatttcttggggcaaagttgtatcccgatgatacatcctttaattttttttattactaactagaaaaataatttgcacttgagttcattgatgtatgttagatgagctagacaacgtttttattctgctctcaagccagaaatgacaaattgttaatatagtcac

SEQ ID NO: 9248 - DNA, 1226 bp, Glycine max
  Clone ID: 700839353_FLI
cgaaaccaaaacctccttcaaccacgctagttcaactcaaccaattacttcatattcatatatatggattcccctgcagtttcctctatccactttcacaacgcccatgtcttacccgaaccagacctttttatgcacactcccggtggtaaccgcattccagcgcacgcaaccattctggcttcggcatccccagttttagaaaacgtcattgcgtccaaccgagtcgtcaaaatccacggcgttcccgacggcgccgtcacggccttcgtagcgttcctctactcctccaggtgcacggaggaggacatggacaagtacggaatccaccttctagcattgtcgcacgtgtattcggtgccgcagctgaagcagaggtgcatcaagggactggcccagcgcttgagcacggagaacgtggtggacgtgttgcaactctctcggctctgcgacgcaccggatctctacctcaagtgcgtgaagctcctcaggaaccgtttcaaagccgtgaaggaaacagagggctggaaattcctcgagagccacgacccctggctcgaactcgacgttctccgcctcatgggcgaactcgaaaagaggaagaggagggtgaggaagtggagggaggaggagaggttgtacgtgcagctgagcgaggcgatggagtgtttggagcacatatgcacggaggggtgtacggaggtggggccatacgaggtggaggttggacgacagaaaacgccgtgctcaaagttcgccacgtgtcagggtttgcaggtgttgatacgacacttgggaacttgcaacaggaagctcaaaggagggtgtttgcggtgtaagcgtatgtggcagctcttcaggctccactcctccatttgcctatgccagaattcatgcaaggttcctctttgcaggcaaattcgattaaaaatggagcaagagaacatgaaagatgacgcaaggtggaaactactggtgaggaaggtggcctcggccaaagccttgtcttccttggcgctgccaaagaggaaattagatcagagctagggaccatatatataaataaataatggcaagttgtgcctacatgtttcggggggattacaaaatgatcgagaaataatggcaagttgtagtgttaacatgtcattagtatttcttttctcacgggttatagccttattggtacctattttatatgaaaggtataatatactcattgagat

SEQ ID NO: 9249 - DNA, 842 bp, Glycine max
  Clone ID: 700839356_FLI
actttgttatggaatatgctaaaggtggagagttgtttaagaaggtggccaaaggaaagctcaaagaagaagttgcacacaagtattttaggcagctagtgagtgcagtggatttttgtcacagtcgaggtgtataccatagagatataaagccagagaacattctgttggatgaaaatgagaatttgaaggtctcggatttcgggttaagtgcgttggccgagtccaaacggcaagatggcttgttgcacacaacttgtggaacaccagcctatgttgctcctgaggtcatcaaaaggaaaggttacgatggtgccaaagctgatatttggtcatgtggggtagttttgtttgtcttactggctggttactttccttttcatgaccctaatatgatggagatgtataggaagataagcaaggcagagtttaaatttcctagttggttcccgcaaggtgttcagcggctattgcgcaagatgttggatccgaatccggaaactaggatttccatagataaggttaagcaatgttcttggtttaggaaggggccaaatggtagacagaaaacacaagaaggggaaaacctgtgtgtctctccttcagttacaaatcattctgaacaatgtggtgatgaaagtgatgatttagcagcagaagcaagggaagagcaagttgtgccagtaagtataaatgcctttgatataatctccctttcaccaggttttaatctttgtggattctttgaagacagtattcagaaaagggaagcaaggtttacttcaagacaaccggcatcagtcatcatctccaggctggaagaaatcgcgaagcagatgagg

SEQ ID NO: 9250 - DNA, 1634 bp, Glycine max
  Clone ID: 700839369_FLI
tttggacagcgtgacggcggggaacgcggtgaaccggaaaaaggcgatgaacgcggcgatggctgcgctgaagagcgcgggggtggagggggtgatgatggacgtgtggtggggtttggtggagagagagaagcctggggagtataattggggagggtacgtggaactcatggaaatggcgaagaagcatggcctcaaggtgcaggctgttatgtcatttcaccaatgtggcggtaacgtcggagactcttgcactattcctttgcccaaatgggttgtggaggagattgataatgaccacgatcttgcatatactgatcaatggggaagaagaaactatgaatatatatcacttggatgtgatactttgccggtgctcaagggacgatccccagttcaatgttatgctgatttcatgcgtgctttcagagacactttcaagcacctccttggtgataccattgtggaaatccaagttgggatgggaccagcaggtgagttgcgttacccttcgtacccagagcaaaatgggacatggaaattcccaggaattggtgctttccaatgctatgacaagtatatgttgagtagcttaaaagctgctgctgaagctcacggtaagcctgaatggggaagcacaggccctactgatgctggccactataacaactggccagaagacactcaatttttccgcaaagaaggtggtggatgggatggtccatatggtgagtttttcctcacttggtactctcagatgctgttggaacatggtgacaggattctctcatcagccacgtcgatctttgacaacactggagttaagatctcagtgaaggttgccggcattcactggcactatggtacaaggtctcacgccccagaactcactgcagggtattacaacacccgattccgtgatggctacctccccattgctcaaatgctggcgcgccacggtgccatctttaacttcacctgtatcgagatgcgcgatcacgagcagccacaagaggccctttgtgcacctgagaagctggtgaagcaagtggctctggcaacgcagaaggcacaggttccacttgccggcgaaaacgcgctgccacggtacgacgagtatgcacatgagcagatcataagggcatcacaattggatgttgatggtgagtctggtgatagagagatgtgtgccttcacatacctgaggatgaatccgcatttgtttgaaccaaataactggaggaagtttgtggggtttgtgaagaagatgaaagaagggaagagtgcacacaagtgttgggaagaggtggagagggaagctgagcattttgtgcatgttacacagcctcttgtgcaagaggctgcagtgctgatgcactgagaattgttgaacatccttgtggtaatagggcttaggaataagtcacaaggaggctgtgtgaaagttttagtgaaccaacagcccaggtttgtggctttgaagatgtaaaattttgtattatattgttttgtattgtatgcacctaaaacttctatttgtgacccttttacattgtgtacgtaatcatagactttggggtactgtttccttaaaagttactctactttgtacaagtagttacttaatctggttt

SEQ ID NO: 9251 - DNA, 967 bp, Glycine max
  Clone ID: 700839380_FLI
agatgatcagaggcttcttgtttacgagtttatgacccgtggaagtctagaaaatcatctattcagaagaactgtacctcttccgtggtccaacaggattaagattgcccttggtgcagcaaaaggattggccttcctccataatggtcccgaaccagtcatttatagagattttaaaacatctaacatcttgcttgatacgggcctcaaggagacaaaacacatgtttctaccagggtagttggaacttatggttatgctgctccagaatatgtcatgacaggacacttgacagctaaaagtgatgtttatagctttggagttgtgttacttgagatattaacaggaagaagatcaatggacaagaagcgcccgagtggggaacaaaatcttgttacatgggctaggccatacttagctgacaagcgaaaactgttccaactcgtggatcctcgccttgaactaaattattctctaaaaggagtgcagaagatttcccagttagcttataattgccttactagagaccccaaatcccgtcctaacgtggatgaagttgtgaaggctctgactccattgcaggatcttaatgaccttgcaatcttgtcttatcactctcgcttgtctcaacaaggtagacggaagaagaaagatggaactccacagttcacatacacacaatccaagagcatgagggcttctcccttgaataccggcaagcagcgtcaatgatgggaagtgatcctcttctctattgctggctcaatcattgattgaaaccaagggccagaacaatgagggaagagtgatgatgatacattgattttatttgggctcttttattagagagctaaccatcattatggaaagaaacttgccatttgcatttgctattgctgtaattgagaattcccctatatgtatatgaaaggcctcacatctcagaaagtcttttgcagtaaacctc

SEQ ID NO: 9252 - DNA, 805 bp, Glycine max
  Clone ID: 700839445_FLI
gggaaaagcttgggtaggcctggtggtattgctgtgtttgattgtcacggccatcgccgaacaatgcggtcgtcaagctggcgggcagacatgtcccaacaacctatgctgcagccagtacggttggtgtggaaacaccgaagaatactgttccccttctaagaactgccagagcaactgctggggaggcggcggcggtggcggtggcggcggcggcggtgaaagtgcttctaatgtccgcgccacatatcattactatgagccagagcaacacgggtgggacttgaacgccgtgagtgcttattgctcaacttgggacgctagcaaaccttactcatggcgcagtaaatatggctggaccgctttctgtggtcccgttggtcctcgtggccgtgattcttgtggaaagtgcttgcgggtgacaaatacaggaacaggagcaaacacaattgtgagaatcgtagatcagtgcagcaacggagggttggatttggacgtgggagtgttcaatcggatagacacagatggaagaggatatcaacaggggcatctcattgttaactatcagtttgtggattgtgggaatgagctcgacctcaccaaacctttactctccatcctcgatgctccctaattaatactagctctctgtaataaacaataaagtgaatgtgtgagttgcagatctagagtctttctattcggaaagacctatatatagaattcatactcacgtgctctgaataattaatattttgttgtctccatcactatttttcagaatctatatatcaaagattgcagg

SEQ ID NO: 9253 - DNA, 1693 bp, Glycine max
  Clone ID: 700839502_FLI
aaagcctccatcaacaaagtgatcaaagttcctcttttgagtcttcgtgcttccttccacgatccttctcatcaaacccctcatcatagaaatttggaaaaagggttctgaaatcttagctactgagtgcgtaatcactgagatctgccttcatcctgggttggttttgttgatgggtgcttgctggagtaataggattaagtctgtgagtccttccaatacagggatcacttctagaagtgtcagcaggagtggccatgacgtcagctcaaatagcaggagctcatcagcctccatatccgtcgcttctcggagtgagggtgagatcttgcaatcttccaacttgaaaagcttcagctataatgagctaagagcagccacaagaaatttccgcccggatagcgtcttgggggagggtgggtttggttcagtttttaagggctggattgatgagcattcacttgctgctaccaaaccaggaataggcatgattgttgctgttaagaggcttaaccaagacgggttccagggtcacagagagtggttggctgaaatcaactatctcgggaaactacagcatcctaaccttgttaggttaataggatactgctttgaggatgagcatcggcttctggtttatgaatttatgcccaagggtagcatggaaaatcatctattcagaagaggttcttactttcagccattctcttggagtttgcgaatgaagatagcacttggggctgcaaagggccttgcttttcttcatagtacagaacctaaagtcatataccgtgactttaaaacttcaaatatcttactcgatacaaactacagtgccaaactttctgattttggcttggccagagatggtcctactggtgataaaagccatgtctctactagggtcatgggaacccatggatatgcagcaccagagtatttagcaacaggtcatctcactaccaagagtgatgtgtatagttttggagtagttcttttggaaatgatatcgggaagacgagctatagacaagaatcagccaactggagaacataaccttgttgattgggccaagccttacctatctaataaacgaagagttttccgtgtgatagatccccgtctcgaaggtcaatatttacagagtcgagctcaagccgcagctgcgcttgctattcaatgtctctccatagaggctaggtgcaggccgaatatggatgaggtggtaaaagcgttagagcagcttcaggaatcaaagaacatgcagagaaaaggcgctgatcataaacagcatcatgtacgcaattccggtcctggccgttccaacggtggcaatggtggttcagatgtccctagaaaggcttctgcttatcctagaccttctgcttctctcctccgcggttgagagaattttgtgacgcagcaagtggtaaagcagataacaaacgattcagaggtttaggtggggctggcatgaaccatgtttatgtaagcagtgtatagtttgctttatttccatgttacattttgtgctatatataatttttttttcgtgttgtggtcctgattgttagacattcaagagtctaatgtgggtccttaaggtgttcattaattttgaaccctgtaaacaactgcaacactacccatgtggttgatgctctacatttttatcttttgctttttaatatgt

SEQ ID NO: 9254 - DNA, 1344 bp, Glycine max
  Clone ID: 700839572_FLI
gctaggtcgtgtgctggggcacggaagcttcgccaaggtctaccacgcgcggaacctgaagacggggcagcacgtggctatgaaggtcgttggaaaagaaaaggtgatcaaggtcggaatgatggagcaggtcaagagggagatctcggtcatgaagatggtcaagcacccaaacatcgtcgagctccacgaagtcatggccagtaagtccaagatctacatctccatcgaactcgtccgcggcggagagctcttcaacaaggtctccaagggacgcttgaaggaggacctggccagactctacttccagcagttaatctctgccgtcgatttctgccacagccgcggcgtctaccaccgtgacctcaagccggagaatctcctcctggacgaacacggcaacctcaaggtctccgacttcggactcaccgccttctccgaccaccttaaagaggacgggctgttacacaccacgtgcggcacgcctgcgtacgtgtcaccggaagttattgcaaagaaaggctatgacggtgccaaggctgatatatggtcatgcggagtaatcctctacgttctcctagctgggtttttaccctttcaggatgataatttggttgccatgtataaaaaaatccatagaggggacttcaagtgcccaccgtggttctctctcgatgcgagaaagcttgttacgaaactgcttgatccgaatccgaatacgaggattagtatttctaaagtgatggagtcttcttggtttaagaaacaggtgccgaggaaggtggaggaggtggttgagaaggtcgatttggaggagaagattgagaatcaggagacgatgaatgctttccacataatctccttgtcggaggggttcaatttgtcgccgttgttcgaggagaagaggaaggaggagatgaggttcgccaccgcggggacgccgagcagcgtcatttcgcgcctggaggaggtggccaaggcggggaagtttgacgtgaagagtagcgagacgaaagtgaggcttcagggacaggagcgtgggaggaaggggaagctagcgattgcggcggatatctacgccgtgacgccgtcgtttatggtggtggaggtcaagaaggacaatggggatacgttggagtataaccagttctgcagcaaacaacttcgtcctgcgcttaaggatatcttctggaattctgcacctgccagtgcttgaatggtatattatatatatgatgtctgattattgttttacaacaccatttgtcgaccttgttattttattttatttttgtttaggaactttgagttttgttgataagatctgtttgtgttttgttgttt

SEQ ID NO: 9255 - DNA, 1148 bp, Glycine max
  Clone ID: 700839576_FLI
aggccatgcacgcgcccgtctacttcgagaagttcgaggtccacggcaacatgaaggccgtgccgccggaggtcctcgattcgattcggaagaacaaggtctgtctcaagggaggactcgttacccccatgggcggtggcgtcagctccctcaatgttcagctccggaaagagcttgatctctatgcttctcttgttaattgtttcaatctccctggccttcccacgcgccatgataatgtggatatcgttgtcatcagggagaacaccgaaggcgaatactctggcctcgaacacgaggtcgttcccggcgttgttgaaagccttaaggtaataacgaagttctgttcagagcgaattgctaaatatgcattcgagtatgcttacctgaataacagaaagaaggtgactgccgtgcacaaagcaaatattatgaagcttgcagatggtttattcttggaatcttgtcgagaggttgctacaaagtaccctggaataaagtataacgaaattattgtggataactgctgtatgcagcttgtttcaaagcctgaacagtttgatgtcatggttaccccaaatctttatggaaatctagttgcaaatactgcagcaggcattgctggaggcactggagtcatgccaggaggtaacgttggggctgagcacgctgtgtttgagcaaggtgcgtcagcaggaaatgttggtagtgataaaataagggaacaaaagaaagccaatccagtggcccttcttctctcgtcagctatgatgcttaggcatctccagtttcctgcatttgctgaccgtttggaaactgctgtggaaaaagtcattttggagggcaaatgccgaacaaaggatcttggagggacaagcaccacccaagaggttgtggatgcagtgatagatgctttagattgagtcattttattagttgctgatttcccaaatgaagtcagtctcgtatattcttttctaaccagttttaccaattgttttgcacacaccaaatgcaaaatagcaatttttggaataaagtttatgcaacacagaaaacgatgtatcttttattttgtgtgaagaatttgtagagaatgtgataattgtttctctcctatttaaaagccgtgatttggcgttattact

SEQ ID NO: 9256 - DNA, 739 bp, Glycine max
  Clone ID: 700839582_FLI
ggcaaaagcaaataactattaccaacaaactctactttcggcaaccttcaatttttttgaaagtcatggatttcagagtgatgggtttggagcctccgttgttccacacgctgcaacacatgatggacatgtcagaggacgctgcaggggaaaacaagacgtacagtgctccgacacggtcatacgttcgagacgccaaagcaatggctgcaacacctgcggatgtgaaggaatatcccaactcctacgtgttcgagatcgacatgccgggtttgaaatctggggacataaaggttcaggttgaagacgacaacgtgcttctgattagtggggagagaaagagggatgaagaaaaagaaggggtgaagtatctgagaatggagagaagggttgggaagttcatgcgcaagtttgtgttacctgagaatgccaacactgatgcaatctctgcagtgtgtcaagatggggtgcttagtgtcactgtgcagaaattgcctcctcctgagcccaagaaacccagaaccattgaggttaaggttttctgaggtttcaatcgaatgctcacgaaccaattatctttgttcgaataaatgtaacgggaacaatattagctttagtgaggaccaactattggtgttcctctgtgtttgtattgcagtggttctgtttcttaggttggcttgtcacttgtgtatggaaatatgatactactactataatgagattttattgaatgctt

SEQ ID NO: 9257 - DNA, 770 bp, Glycine max
  Clone ID: 700839615_FLI
gcgacgcagcagatcgcggagtgttggacgcgcgcggtgaggaagctgctggagagagtggtggagtcggtggagagaaaaacgttggagaaggcggcgagggagtgtcacgcggtggagcggatctggaagttgttaacggaggttgaggacgtgcacgtgatgatggatccggaggatttcttgaggttgaagaaggagttggggatgatgagaaattgcggggaaatggtggcgttttgcttcaggtcgagggagctcgtggaggtggcgaggatgtgtagggatctgaggcagaaggtgccggagatattggaggtggaggtggaccccacgggtgggcccgggatgatggaggcggcgatgaaggtttactcggagaaagagaaaaggaacgggttcgagaaggttcatgttttgcaggggatgcaggcgattgaggtggcgatgaagaggttcttctacgcctataagcaggttgtggcggttatgatggggagctccgaggccgataatgggttcactcagatattccttgaacccacttatttccctagcttagatgctgccaagacctttctcgcttattattgggaaaataataatcaaaatggggttccctgctagttaattaaaaaattaatcaattaattcctagtcatatatacttactcacacaaacgggaaaacaaagagaaaaaaaaaaaggactaaatttttgtaataggttggtgtaaacaaatctttgtctgtaaaataatatttatttg

SEQ ID NO: 9258 - DNA, 1141 bp, Glycine max
  Clone ID: 700839629_FLI
gctgaagatgctggaacaaagcttgaggcagcaaagagcgtttcatcaaatggggatgatggaacaggaggcttggaggccccagagagggttgccagaacgatctgtcaacattttgagagcctggcttttcgagcatttccttcatccgtacccaagcgatgcagataagcatctgttggcacgacagactgggctatcgagaaatcaggtatcaaactggttcattaatgcgagggttcgtttgtggaaacccatggtggaagacatgtaccaacaagaactcaaagaggccgaaggggcagaagaagagagggaggggaaccaaagcagtagcaacaacagtggccaccaattggcacaaactccaacaccctcaaccacagcatcgacggcaacagcgccaccaccaccaacaacgacaccaccaaccggaaaaagatccgattctgaaagcgacccttcacttgcaccaataaataacaccaccagcactgccgccatgaccgtcaccgcctctgaggtgacgcaactgtcggagctaccccgaacaatggtggccgatgaatcttgtaggcatggtagccttgttgcaacggagtttgggaccgcttctgctgcttctgaaattggttccactctgatcaggtttgggaccaccgccggtgacgtgtcactcacgctagggcttcgccacgccgggaacatgccggagaaaactccgttctccgttagggactttggaggcatttaaaacttaatcaattccccctatattacttcacatgatcataaaagataagaatgatacgtataggaggttgctttattattactattattataattataataatatgattattatgatatgatatatcaaaagaaaccatttttccacccttgtaacttctctttgatgttagttcctcctctcagattaagttgcattttatggaaggaaaggaagaagggaatacgaaatgagaaaggtaggcttatatgtgattatcagctggcgataggtaggctctgtggtgatctgtgcaactgtatagtaggttgttttctacgtttttttatttatttatcacgtgtatgtacttaaggtttcatatcttaatttgataggactttatct

SEQ ID NO: 9259 - DNA, 1292 bp, Glycine max
  Clone ID: 700839666_FLI
cagtaaagctaacttcaacacctttaattttctaaaagtaattcagcggctgaataccaagcggagaagatgagtcaggagcagccacggcgtcccaaaggccaaaaccccatcaaatacggcgacgtttttgtcgtctccggcgaccttgcacagaagcccgtcgcaccggaagatgctgccatgatgcaaagcgcggaaactcgagtgctcggacaaacccaacccggcggagcagcttccgtcatgcaatctgccgccaccaggaatgaacaggctggccttgtcggtcaccgggacgtcaccgacgttaccggcgaccgtggcgtcacagtcacagaaactaaagtccctggaagacgcattataaccgaggctgttggtggccaggttgtggagcagtatgtggaggcaactccggttgaggcagggcgaagcagtgcaattaaggagaatgccataacaataggagaggcattggaggcgacggcacagactgtgggtcagaaagcggtggatcagagtgacgcctccgcgattcaggcggcggaggtgagagcaacgggaagtaacgttataacgccgggtggacttgcggctatggctcaatcagctgctgcttataatgctgactgcaagcttgaccaggacaaggtcaagctcgccgacattttggccggagccacagccaagttgcccgcggacaaggccgccacactgcaagatgctgaaggtgtagcgtgtgctgaggtgaggaacaaccctgatgccaccgccactcccggtggcgtagccgcttctgttgcggctgctgctaggctcaatgaaaatgttaagtaacgagtcatgttatgtgtcttgataatcatacttttgtttcatgatgtgtggtgttgatgtgttatagtctatagtgtattaataagtgtaagtggtgcaacatcttgtttttctttcttgtactctttgtgagttatattaattactggttttaaggactctacttaaggtgatgtatgtatactatgcgctatatgcatttctgtggttatcagttaataatatgtgctccaatcttgtaatttcttgtttgcaaccattctagatcccaaaatgcttgtcaagaggatttattacgtacccttttcctttagtcataatattttattctttagaaaactgtatttgtagttgtatgtattgtttggggataatatatactgcaattgttataggatagccaaaaaaacagcattctataagatattatagttgtgtttgtttatgatagg

SEQ ID NO: 9260 - DNA, 1662 bp, Glycine max
  Clone ID: 700839723_FLI
gcctattcctcaccacaattttattccttcctcttctcttcttcgctcactatataattcattcatctctctcttttctcttttcagctactttaggcagccggctattcaggaatcatggctagggttttggctcagtctattaatgtccctggtctattggctgagcataggcatggtcagcaaaaggaatcaggaaaattaaaaagatcgaccaaaatgatgagtgctttacgaacaaatggattaagaatgtcaggtttctcagggcttcgtactttcaatcctttggatactatgttgagacctggaatagattttcattctaaggtatccattgcaacttcttcacggcgagcaagagctaccagatgcgtgcccaaagccatgtttgagcgtttcactgagaaagcaatcaaagtaattatgctagcccaggaggaagcaagacgtcttggtcacaattttgttggaacagagcaaattctattgggtcttatcggcgaaggaactggtattgctgctaaggtgctaaagtcaatggggatcaacctcaaagatgcacgagtggaagtagaaaaaataattggaaggggtagtggatttgtggctgttgaaattccgtttactccccgggcaaagcgtgttttagaactttcactggaggaagctcgccaacttggtcacaattatattggatctgagcacctgcttctgggtcttcttcgagagggcgagggtgtagcagcacgtgttctggaaaatctgggtgctgatcctactaatattcgcacacaggttattcgcatggtgggtgagagtgctgacagtgttactgctactgttggctcaggaagtagtggtaataagatgccaactttggaggagtatggtaccaatttgaccaagctagcagaagagggaaagttggatcctgttgtgggaaggcagccgcaaattgaacgcgtgactcaaattttaggtcgtcgaaccaaaaataatccttgtcttattggagaacctggtgttgggaagacagcaattgctgaaggtcttgctcagcggattgctaatggtgatgtacctgaaaccatagagggaaaaaaggtcataacccttgacatgggtctgcttgttgccggaactaaatatcgtggtgagtttgaggagaggttgaagaaactgatggaagaaatcaaacaaagtgatgagataatactttttatcgatgaagtgcacactttgattggagcaggagcagcggaaggggcaattgatgctgctaacatactaaagccagctcttgcaagaggtgaactacagtgtattggagccacaacattagacgagtataggaagcacattgaaaaagatcctgctttggagagacgattccagccagttaaagtgccagagccaactgtagatgaaaccatacaaatactgaagggacttagagagcgatatgaaattcaccacaagctccgctatactgatgaggctcttgtagctgctgcacagctgtcgtaccagtatatcagtgatcgatttttgcccgacaaagctatagatttgattgatgaagctggttcacgagtccggcttcaacatgcacagttacctgaagaagcaagagaacttgacaaggaggtcaggcagatt

SEQ ID NO: 9261 - DNA, 1298 bp, Glycine max
  Clone ID: 700839738_FLI
ctcttctttccctctttcactctctctctccaacaccaacaataagaacagaacaagagttaagaaacagagcatagagtgatttggtgggtggagagaggaacagaacagagcaacatgaagccaccaacgaaacccatttcgagccctggtcgaaccgagaagtttccaccaccgttgatgagattcttgagaaacaatgcctcaagcagaagcagaggaaggtcaagaaccaccaccgccatgtttctgagaaagaagaacaccaacaatattgaaacacaagaaccctcttcccccaaagtcacttgcatggggcaagtccgcgttaaacgctccgcctccaaaagggtgccctccgccggcgccggaactccgaccaagtttcggtgctgctcatgggtcccacatgctctgttttttcaccgtttaataaaacccgaagtttgtttcccctttcagtgcaaacaagtttggcccaattggaggttcttacaaagaaagaaaagggattccaaagtcacggaaacttcttcgccgaaaacagagttgaatttcaggggaaggtttaaccctaattacgacgactcagagcataaagatagagttattgttaaccctcccgcttttgtttccaacacttcaagtactccaccgaggaacgctttgttattgacacgctgcagatccgcgccggggaggaggttcttgaacgaagagacagaggtggttgaaaaaaatagagtaaacagagaacactctgagaataacagagaccggaagttggaggcgaagttacggttcttcaaagagcttgaagagtcactgagggagagaataataatggagtcagaaaaagcaagggaagaatctgactctgttcatcctctggttctgacgaggtgcaaatctgaacccgcgagaaccgcacaaaaactcgatcctgaaatgaacgggctttcgaagaagacaacgttggggttcgctcatgcttggttttcacatggtttgtgattattctattcttacctctgtaactctgttacctgttctgttttagtgtttttttttttttggtttagtttattatcttattttattcttattattactgagttcgatatatagttatataatataaagaattttataggcaaattgtggtgacgtattttcttctttttgacatctggagctgtcgagagaatctctatgctctatgtattaaaaagataccttggaattaaatagaagaaacatggaaacttgtcccgagttaatgtattattcactgtctc

SEQ ID NO: 9262 - DNA, 1364 bp, Glycine max
  Clone ID: 700839826_FLI
acagacttgacccctgaaagagttagacctgctatcaacaatactcttcaagaactccaacttgactaccttgatctttacttgattcattggccatttagattgaaagatggtgccagcagaccccccaaagaaggagaagtgttggagcttgacatggaaggggtgtggagagaaatggagaagcttgtcaaggaaaaccttgtcagagacattggaatatgcaatttcactcttacaaagctagataagctgatgagcattgctcaaattatgccttctgtctgccagatggaaatgcatcctggatggagaaatgacaagatgcttcaggcttgcaagaagaatgccatccatgttactgcttactctccactgggctcatcagacggtggaagggatctgatcaatgatcaaaaggttgataggatagccaataagatgaacaagaatccagggcaggtgttggtgaagtgggccatccagagagggacaagtgtcatccccaaatcaaccaagccagataggatcatggagaatgtcagtgttttcaattgggaacttccagaaagagactttaagacccttagcaacatgcccgatcagaggcgagttctggatggtgaagacctctttgtgaacaagagcgctgggccattcagaagtgttgaagatatttgggaccatgaagattagtccacacttcacacatgcacctaaccacactttgtttatctctttttcaaggcactatgtaataacttgcatttctcgaatgttctgtatgtgatttgatacattagaaggttttttgagtctaaagttattatgtaagtggacaaaatttaagagaaatgtttttgaaaccaccacaattaaccaggatggacactagtgcacactgaccaagggcattagacacttcaagaaaaagcaatgaaatgaagccaaggtgtgttcctatgactcataggcgtaggcaaaaataccaaaaaagggtcacttttacattttatttaccaaataggggctattttgcaattatttacttgggggtttgttttttttattacaaagcgtctcccagacaggcgcttccatggagtacgcgaccggtggcgccctgcaccaagcgcctagggaacaagggcctgccccacccccacaccctagcctcttcccacaccccgtctctttcttgtcacaccccccggcctcttccccccaaaattgtatatttttttttaatttgtttatcaaaaatttaaattttgtttcatttttgttattaatattatttgttattttttatattcccacacccccaccccaaaatttcaataagattattttttatacactct

SEQ ID NO: 9263 - DNA, 937 bp, Glycine max
  Clone ID: 700839890_FLI
gagaagtacaaggctgaggatgaggagcatcttctcaatctcctccttagaaagccttcctttgtcgttggtaattgtaatcttgatcttctgttgttggatgttactcctctctcccttgggttggagaccgcgggaggagtcatgactgtgttgattcccagaaacacaaccattcccaccaagaaggagcaggtattttcgacctattccgacaaccagcctggtgtgttgattcaggtctatgaaggtgaacgtacgaggactcgtgataacaatttgcttggcaaatttgagttatctggaattcctcctgctccgagaggtgttcctcagatcaccgtttgctttgacattgacgccaacggtatattgaacgtgtctgcggaggacaaaaccactggacagaagaacaagattacaattaccaacgacaaaggaaggctttctaaggaggagattgagaagatggtgcaggaagctgagaagtacaaggctgaggatgaggagcataagaagaaagtggaggccaaaaatacattggagaattacgcctataacatgaggaacacaattaaagatgataagattgcttccaagctgtctgctgatgataagaagaaaattgaggatgcaattgagcaggctatccaatggctcgatggaaaccaacttgctgaagctgacgaattcgaggacaagatgaaggagttggagagcatttgtaaccccatcatagcaaagatgtaccaaggagctggtggtgatgcgggtggagccatggatgaggatggtcctgctgctggcagtggaagcggtgctggacccaaaattgaggaagtcgattaagcagaccaattgtcatgggttgttcttgattttgcgaagacccttttgaagtttagataataacctgtcttgtcattatctaaacttc

SEQ ID NO: 9264 - DNA, 1263 bp, Glycine max
  Clone ID: 700839958_FLI
catctctctgctctaaacgacaccgttttagtcttctcctcaagtcatggccacactcaagagcctctgcttcagaggaactgcctttcccgtttgcccctccaatgtcaccaacaatagaaactccaggagctcatattggaggcctgcacaagcagccgtgaagcccaatttccatctcccaatgcgcagttttgagttaaaaaataggacttctccagaggacataaaggctctgagattgataactgccattaaaactccatacctacctgatggtcgatttgatcttgaagcatatgatgacttggtgaatatgcagattggacaaggggccgaaggtattattgttggtgggacaactggtgaaggccaattaatgagctgggaagagcacataatgcttattgctcacacagtcaactgttttggtgggaaaattaaggttattggaaatactggaagcaactccaccagggaagcaattcatgccaccgagcaaggttttgctgttggaatgcatgctgcccttcacataaacccttactatggcaaaacctccttggatggtatgcttgctcactttcaaagtgtgctttccatgggtcccacaataatctacaatgtgcctgcacggactggtcaagacattcccccgcatgtaattcaaaccttagctgaaagtgctaacctggctggtgtcaaggagtgtgtgggaaatgaccggatcaagcagtatacagatgatggaattgttgtgtggagtgggaatgatgatcaatgccatgatgctagatggggttatggggctactggtgtgatatctgttgtaagcaacctggttcctggtttaatgcgagaactcatgtttggcggcgtaaaccctacactaaattctaagcttttgcctctgattgactggcttttccacatgccaaaccccattggtttgaacactgctcttgctcaacttggagttgtcagacccgtttttaggctaccgtttgtacctctccctgtggacaaaaggatagagtttgccaatttggtgaaggaaattggtcgagagcattttgttggaaataaagatgttgaggttcttgatgacgatgactttttcttggttagtcgttattaagttaccatgtaggttcgttgtatcctttcttggggtttgccaaatttaaaatccagatgagagtctattgtagtgaactagttaatgatcatctagtttctttttactggctactttgtagttgc

SEQ ID NO: 9265 - DNA, 1290 bp, Glycine max
  Clone ID: 700839974_FLI
gttggattgagttaccccactctacctaattggttcccttctctcctttttcctatctacatacacaacatacacaaagccgtttggggattttcgcccagaacatggtcagagcggcggagcatcaggcgctggaccccaccgccgtccacggcgtcacgcagttctccgatctcaccgaggacgagtttgagaagctctacactggcgtcaatggcggcttcccgtcatcgaataatgccgccggcggtattgcgccgccgttggaggtggacgggctgccggagaattttgattggagagagaaaggagctgtcaccgaagttaagttacagatacagggtagatgtggatcatgctgggctttcagcaccacaggatctatagaaggagccaattttcttgccaccggaaagctcgtcagtcttagtgaacaacagctccttgactgtgacaacaagtgtgacataacagaaaagacttcatgtgacaatgggtgtaatggaggtcttatgacaaatgcctacaattatttgctcgagtctggtgggttggaggaggagtcttcatatccctacactggggagagaggtgaatgcaagtttgatccagagaaaatagcagttaagatcacaaatttcaccaatatccctgctgatgagaaccaaattgccgcatatttagtaaaaaatggtccacttgctatgggcgtgaatgcaattttcatgcaaacatacattggtggtgtctcatgccctctcatatgtagcaagaaaaggctgaaccatggtgtgttacttgtgggatatggtgcaaaaggcttctcaattcttaggcttggcaacaaaccatactggatcatcaagaattcgtggggggagaaatggggagaagatggctattacaagctctgcagagggcatggcatgtgtggaataaacactatggtttctgctgcaatggtgcctcaaccacaaacaacacctacaaagaattatgcttcttattagctatgcacttaaggaaatctaaataaatatttttcattctaggtgatgtatcatgtatgtaccaaaatattttggtacgtaagtcttttaaaaagtttgcatctcctctttggttttccttagttctgaaagttatctcctaagaagacaatcatatgtactgtacgtagtgtgaagatatagtattgtatgctgcagaatatgattgtctaataaggtggactagctgtaataaaagatatttccaggttgaaaacagagcaaatcatgttaaagagct

SEQ ID NO: 9266 - DNA, 1437 bp, Glycine max
  Clone ID: 700840103_FLI
caccagcttcactgtccatctttgacaccctcagtgtcatattttgggtcccagtgtatgacaggatcattgtgccaattgctacaaagttcactgggaacaaaaatggcctaactcagctccagagaatgggaattggcctcttcatatccatattttccatggtagctgcagcaatattggagctcatacggcttagaatggtgaggaggcacaactactatcaacttgaggagataccaatgacaatattttggcaggttcctcaatatttcatcataggctgtgcagaagtcttctatttcattggtcagttggagttcttctatgagcaagcccctgatgctatgcgaagcttttgttctgctctctcacttaccactgttgcgtttggacagtacttgagctctctgcttgtgacaattgtgacaaagatcagcactaggaatggaagtccagggtggatacctgataatctaaactttggtcacatagattatttcttctggctattggcattgctaagtgtagtgaacttgatagcattccttgtggtgtctatgttgtatacatataagagacctgtgggaactctgcgctgaaaagtgggttaagttgtacattggaagtagtttcattatacatcacattggaagtttccttcacttgtagtcttgtttttcacctacactaatgtgtgcctaccgtgcatccaaaaaaagtcttgacattgtagatgctgtcagcactgttttgagcaatgccacctttgataagcaagccaaacaacaagttctgattcaatcagatgatagctcagttctatccaagtttaaggacatcccatcttacaaagggttatgttattgaatgattaagtgagtgatgtaccaagacaaacagtggaagaaataaagaagcatgtggaggcaatgaatcttccaaaaaccctcagctatcaaagtatctgcttccttcttagtaggaatgacaaatgtttttcaaaagttgaaagatgcaaacctcacagtagtagtccataatctcaaaaatgaatacacaaccctggcatttgactattggtctgatcctgatgtcaagattgcaacttatatccaaactgccaaggttgatggaatcgtgacggattttctagccactgcaagtagattcatgaggagtcccatgatcctgcctggtgatctattaaacaccattcctactgaacttcagccaccagcacttcctcctcttaaggttgcaaaggttgttaacagaggcctttctatagtagctattttagtgtttgctatgctattcgctggtcattaattattaatgtgattaacccctagcacaatctagagatcgctaactttcctctaacatcgtgtcgtgttttaatttgtattatagaatgcacacattggttctcag

SEQ ID NO: 9267 - DNA, 1815 bp, Glycine max
  Clone ID: 700840104_FLI
atcctttgatcaaccaaggtgcatggacgaatgaagaggacaaatctcttttacttattgtccaagatattggcatcaggaactggtttgatattgccacatcattgggcacaagcaggactccatttcaatgcttagcacgattccaaaggagcttaaatccttccatgctaaatagtgaatggactgaggaagaagattctcaactctgttctgctgtggcaagttttggtgctagggattggcaatctgtggcttctgttttagaacggcggacaggaacccagtgctcaaatagatggaaaaaatccctttgtcctgagaagaaagggagctttacacgagaggaagatatacgcataacagtagcggttatgctttttggacgaaaatggaatcaaatagctaactatgttcctggccggatccaatctcagtgtagggacagatacctcaattgtcttgatccttctttgaaatggggtggatggactgaggaagaggatttaagattagaagctgcagttgtcaagcatggatactgctggtctaagattgctgaagaagtgccacctcgtactgattctcaatgccggaagagatggaaggtgttatgtcctgaatatgttcctttgcttcaagaagcaagaaagaagcaaaggtctattattggttgtaactttgttgatcgagaatctgaacgcccagccattacactgaatgactttctacctttacccgtgccagctccaaaatctgatgttggtgcttcaaatctccgcaagaaggccaagtcaagcaatgttcccaagaaaatgagtaagaaacttgcaaaaagagctcgacttcataccaaggaagtacaagatacagaggtatatagtgatgatgggatcaagacttatggtgaagtctctgcatgcagcaatgttcccaagaagatgaggtccaagagacatacaaaaaaaactcgaaattgtcccaaggaagtagtggatatatattgtagtgagaaggtcaagacttgtattgagagttcagaaagtcaatctacctgtattgcgagttctggaaatcaagattcagacaacataactattgcatgctttttacgcgataaatcaaaggagatgctatctagatttaccaaagatttgagtcaggcttccttctcctctaggagtatagatgtttctaataagcagaatgttgcttctgatagacgagtgggaaaaccagaggatgcaaacactttgacaggtggtgatcatgaggaaatgacccttgcatgctttctgggaaacaaatcaaagaaaggaagtcaagctgctaacggacgtggtgcatgctcttcgaccatcatcatacctgatgatagtggactgtcaatgtcaaagcatgttgaaaaggagactgttttgcatggtggtgttgctgaaccaatggacatcgttgtggaagaaaaggatgatgagcttcttacttccttcttgcaaaacaggccaacgaggcagcgaaaacgacccagtaggtttttataaaggtgatgctaattatccaaattttggcctggtatacttttttttttttccattcctaggtatgaatagaagacaattaattaaaacctgtgccgtgaaattgggtagtggctaatccatatacaaaattgttgaagtaattgaaagccaactttgccatgatcttgaatttgaagttggtttaggtacagtgagtttcgagttccttatgctgagcttgggcctgtgtacagattttcggcctggcgcaatttgtataccaaccgattgccat

SEQ ID NO: 9268 - DNA, 1291 bp, Glycine max
  Clone ID: 700840105_FLI
caagattgctgattttggcctagccagagagatcagttcactaccaccctatactgagtatgtctccacacggtggtatcgtgctcctgaagtcctgcttcagtcccatctatatagctctaaagttgatatgtgggcaatgggtgctataatggctgagttgttcactctccgtcctctattccccggttccagtgaagcagatgagatttacaaaatatgcagtgtgctaggtagtccaaccactgaatcttgggcagatggactcaaacttgccagggatatcaactatcagtttccacagcttgctggtgtacatctctctacactgatcccatccagaagcgatgatgcaatcagccttgtgacgtcactttgttcatgggatccctgcaagagaccaactgcagcagaggttcttcaacatcctttttttcagagttgcttttacatccctccatcccttcgcaccagagctgtaaccagaactccaccatctgctgggaccaggggatcactggatcggctgggcctcaagagatactctggtgctttgcctaatacaaaaatcaccaacaattttacttccccaaaagtacaagcttctatagcttcaggtgtgcaaaggaagctggatatggcaaatgaggatggaattaagagcaagaaatcattgaagactactcaacaatcaaaatatcgattaccaggaaaaggcagcccaacttctataaacaaggggaggactgcacgtggggtttcagaaacagctgagaagttggtcaatatgtcaatcggtactcgaagactgtccttgggacaaacccgtccgcctcccatgaaggctggagtcaattggatttctgaatctggaaacttgctcaggtccggacaacaaattccaactgaaagaactttgacaagaaaagttgccggtgtgctaatacgaagcttctaatgatgaatgatatatgggtttgcacctgccctgatgagtttggtgatgatttttgtttctattacgggtttgatatatttttgtggaacatacgtcagttttacatttggctacacagttgtgcggatgcgtttgtctcgtatatagtagtttcattaatgtggagtgctcagcaggttgtaatgacataaagggaaaaatgacatgtttttaattctaactttgccacccttgcagactaaaatgactaaagtactccctactactattgtttaatgtattctaaatatggaatagtatttattaatgtaaatagtatttttttcagttttt

SEQ ID NO: 9269 - DNA, 1000 bp, Glycine max
  Clone ID: 700840115_FLI
caagtttcctctcaattgtccaccacttactaggatttattttttatttttgtttcaggaaatagtttcaatataccctgttctttcaccaccaaatcttactcctgcacaatcgaaccgagtatgcaatgctcttgctcttcttcagtgtgtagcatctcaccctgatacaaggatgctattcctcaatgctcatatacctctatatctgtatcccttccttaatacaacaagcaagtcaagaccatttgagtacttgaggcttaccagccttggtgtcattggtgcattggtgaaggttgatgatacagaagttataagtttccttctttcaacagagataattcctctatgcttgcgaaccatggaaatgggcagtgagctatccaaaacagttgcaacatttattgttcaaaaaattctgttggacgatgtgggcttggactacatttgtactacagcggagcgcttttttgcggtaggtcgagttctggggaacatggtggcagctctagctgagcaaccttcatctcgtctattgaagcatatcattcgatgctatcttcgcctgtcagataatccaagggcttgtgatgcattaagaagctgtctgccagacatgttaagagatgctactttcagcacttgccttcgtgaagaccccacaactaggaggtggctacaacaattgcttcacaatgttggagtgaatcgggttcctgcactacaagctggaggaggtttcgatcacatgattgtgacctgagtataaaccaagatcttgcttcattggtgctatcagcattttagggtccgttatatctatatttcatggaacttggtttttcagaggaaaaggttgtaaattattggtgcgtggaaaccaagttagaagacattttctttctttatacccctcccctccttgtgcggttaagcttatatcaagacattgaggcagtttttactccttaaatgaactttgagtaggtacattatg

SEQ ID NO: 9270 - DNA, 248 bp, Glycine max
  Clone ID: 700840271_FLI
caagccaccactagatgtttttgtgcaattccgtgggagagaaccaacaccagatgcattgcttaggcacaatggcctattacaagttgcagcttcgtgatagatcgatagagttggccacttttatagtcaataaatgggactcgtacttacctaagaatatggggcctcatacttttttttcatatgtagttttttgtcatgttttttaacttaatttttccatatttaaaggaatctaaattttg

SEQ ID NO: 9271 - DNA, 565 bp, Glycine max
  Clone ID: 700840385_FLI
gtgaagagctatgatatgccctgcactatcgaatcagtttctctggaacctaagtatgggaacaagtttgttgccgggggagaagatatgtgggttcacgtgtttgatttccatacagggaatgagattgcatgcaacaaggggcaccatggtcctgtccactgtgttcgtttttctcctggtggagaatcctatgcctcaggatctgaggatggaaccatcagaatatggcagactggccccttgaccctggatggctcggagactgtgtctgcaaatggttcagttgataaggtgaaggttactgcagatgaggtttcgcataagattgagggttttcaaattgcagatgaagggaaatctaaagaaaaagacgaggctgtggaggaatcaagctaatagtcgtgcattttgtctggcagagtgttagaattaactagatcaagtgccttatgtacgtgattagtaaactaaattttgtaaattttagtttgtgtttgagattttactgaattgaacgagcttgttgcagctggctgaaataagttctgtttgcttttatttc

SEQ ID NO: 9272 - DNA, 935 bp, Glycine max
  Clone ID: 700840396_FLI
gccccagctgctcctgcttctgctgcagctcctgctcctatatcttcaggctctgctgtgccagagtctgatatatatgggcaggcagcatctaatcttgttgctggaagtaacttggagggaaccattcagcaaatccttgacatgggtggaggaagctgggacagggatactgttgttcgtgctcttcgtgctgcttataacaaccctgagagagctgttgaatatttgtattccggcataccagagcaagctgaagctccacctgttacccgagagcctgcaagtgctcaacctgcaaatcctccagctgctgctccacaggcagcacaaccagcatctgttccttctagtggacctaatgccaatcctttagatctctttccccagggccttccaaatgttgggtctggtgctgctggtgctggctctttagactttcttcgcaacagtcaacagttccaagccttacgcgctatggtacaggctaatccacaaatattgcagcctatgctacaagagcttggcaaacaaaatcctcatcttatgcgattgattcaagagcatcaagttgacttccttcgcctaattaatgaacccgttgaagggggtgagggaaatatactgggacagctagctagtgccatgccgcaagcagtgacagtcacccctgaggaacggcaagcaattgaacgtctcgaagcaatgggatttgatcgtgcaactgtattggaggtgtacttcgcttgtaacaaaaatgaggagctggctgccaactaccttttagatcacatgcacgagtttgatgaataattagatctcctttccaatttgtcaaaatagttgttttatgtttccttttgaacagtctttgttatgtaatgaggtaatatttgataatgacaagtctcgaatggacaagagatattttaatc

SEQ ID NO: 9273 - DNA, 497 bp, Glycine max
  Clone ID: 700840436_FLI
gtccattgtagattgtcatatatagagaagcagaattagaaagaagggtagctaggagactttctgaattgaagccttttttttcattgagtgattgagagcatggagaacatgaagatgaacaaagatgaaaggtttgcacaaaagggtgtcccaatacatagccaggttatgaagatcaggcaagagtcagagaaaattgttgattggtccccgggcaagccagagataagacccgttctccgtgaaataagccggcagatttcccggtcgccgttggggatctccggcagaccgatttccgttggtgagtcataggttaagaacatggttaagggttttggattagtgtgttgatgtacacaggtggaagagggaggatttgtgtgcttcccctgctcctgttctgttttcctctgttttttggtcagagaatatttaggcatatttagctatattctccacttttttgtaaataataataatagtgttattgg

SEQ ID NO: 9274 - DNA, 944 bp, Glycine max
  Clone ID: 700840639_FLI
ctatgacaaggcttcggaaacgagttgctacacggctgaaagattcccaaaacacatttgctatgctgactaccttcaatgaagttgatatgactaatttgatgaagctccgttctgattataaggatgcttttgttgaaaagcatggagtcaaattggggcttatgtctggctttgtcaaagtatgttttctaattactgaaatataaactagctgggctttctcctttgatttcctcatactttttatggtctccatgttaggctgctgtcaatgcactccaacatcagccgattgtcaatgcagtcattgatggtgatgatattatatacagagattatatagatatcagcatagctgttggtactccaaagggccttgttgtaccggttatccgcaatgctgataccatgaactttgctgatatagaaaagcagattaatacttttgcaaagaaggcaaatgatggatctttatcaattgatgagatggctggaggcactcttacaatatccaatggtggtgtttatggaagccttttgagtacccctattatcaaccctcctcagtctgcaatcttgggtatgcattccatagtgagccgtccaacggttgttggaggaaatattgtcccaagaccaatgatgtacgtggctctaacatatgaccacagaattattgatggaagagaggccgtgttctttctgcgacgcatcaaagatattgtggaggatcctcgcaggcttctgcttgacatatgaagtgaacctctaattttaaatggagtaaattaaacctcaaaattcaaataccataatgggtaccctttggtttggattttgaattgcggctgtccgtaatttataatctgtaatgagcaaactctttaggatcatatcccaatttccgttcgatattaattcagcatgtttgtgttttttct

SEQ ID NO: 9275 - DNA, 880 bp, Glycine max
  Clone ID: 700840647_FLI
ccatatttgaagcctcaaaactgaaggttttgttcttaggagtggacgaaaataaacacccaggaaatctcccaaggacttatacgctaacccatagtgatataaccgctaagctcaccttggcaatctctcaaaccataaataattctcagctgcaggggtggtacaacagatttcaaagggacgaagtggtggcacagtggaaaaaggtgaagggaaggatgtctctgcacgttcactgccacattagtggaggtcattttctcttggatatattagcaaggttaagatacttcatcttctgcaaggagctaccagtggtgttgaaggccgtcgttcacggcgatgaaaacctattcaacagctacccagaattgcaagatgccttggtttgggtctactttcactcaaacattccagaattcaacaaggtggaatgttggggcccactgaaggaagcgtcagcacccacaggtggggtccaggaggaggggttggcaattccacagccatgccaagaagaatgccaatgttgctttccaccgcttacgttgagccctattcagtggtctaaacaagttcccagccgccattacgaaccttgtgatgggattgggacccaacaaaatctataaacagccaaactactacaattcacagttacggggatgctgccaaattggcaaattccctgtatacaaattaaatattcgaaacccatttcaatgtaaataaggaagctcgtatttgcaatttttttttttttatatatttttctttactttctttgttatgatttttctttcgtaagaaattaaattagttcatgtataatatgtctgtatgcatggttatttcaaagaattaaacagatttttgt

SEQ ID NO: 9276 - DNA, 1079 bp, Glycine max
  Clone ID: 700840868_FLI
agtaaagctaacttcaacacctttaattttctaaaagtaattcagcggctgaataccaagcggagaagatgagtcaggagcagccacggcgtcccaaaggccaaaaccccatcaaatacggcgacgtttttgtcgtctccggcgaccttgcacagaagcccgtcgcaccggaagatgctgccatgatgcaaagcgcggaaactcgagtgctcggacaaacccaacccggcggagcagcttccgtcatgcaatctgccgccaccaggaatgaacaggctggccttgtcggtcaccgggacgtcaccgacgttaccggcgaccgtggcgtcacagtcacagaaactaaagtccctggaagacgcattataaccgaggctgttggtggccaggttgtggagcagtatgtggaggcaactccggttgaggcagggcgaagcagtgcaattaaggagaatgccataacaataggagaggcattggaggcgacggcacagactgtgggtcagaaagcggtggatcagagtgacgcctccgcgattcaggcggcggaggtgagagcaacgggaagtaacgttataacgccgggtggacttgcggctatggctcaatcagctgctgcttataatgctgactgcaagcttgaccaggacaaggtcaagctcgccgacattttggccggagccacagccaagttgcccgcggacaaggccgccacactgcaagatgctgaaggtgtagcgtgtgctgaggtgaggaacaaccctgatgccaccgccactcccggtggcgtagccgcttctgttgcggctgctgctaggctcaatgaaaatgttaagtaacgagtcatgttatgtgtcttgataatcatacttttgtttcatgatgtgtggtgttgatgtgttatagtctatagtgtattaataagtgtaagtggtgcaacatcttgtttttctttcttgtactctttgtgagttatattaattactggttttaaggactctacttaaggtgatgtatgtatactatgcgctatatgcatttctgtggttatcagttaataatatgtgctccaatcttgt

SEQ ID NO: 9277 - DNA, 336 bp, Glycine max
  Clone ID: 700840875_FLI
agtgggggtggctgcattgttgtggaaaccaaagtgaaaaaacttgcatgcttgatccctctaaataaaggctattattaatgctaccttcactttttggcctagagaatgctactatcctgtatgagatgtcattctaaatttgattagcacgaggattggctcttctttttggtgaaggaatccatgttaggattgtaataatagtattttctattccatcctcttaagattgtgatatatagtcacacggagagagaaattgaatttttttttcttgggtcaaatgttacgaggatctcttcatctcactagatcacattaatttttgattgt

SEQ ID NO: 9278 - DNA, 1231 bp, Glycine max
  Clone ID: 700840889_FLI
gagaggtcaagatattgaaagcacttactggccatgagaatgtggttcagttctataatgcttttgaagatggttcttatgtgtacatagttatggagttgtgcgagggtggagaactgctagatcggatattggccaagaaggacagtcgttatactgaaagagacgcagcggtggttgtaaggcagatgctcaaggttgcagctgagtgtcatttacatggtttggtacaccgggacatgaaaccagagaattttctttttaaatcaaccaaagaagattcacctttaaaggccactgattttggtttgtcagatttcataaaacctggaaaaaagtttcatgatattgttggcagtgcttactatgttgcacctgaagtgttaaaacgtaagtctggtcctcaatcagatgtgtggagtattggtgttattacatacatattgttgtgcggaagacgcccattttgggataagactgaggatggtatcttcaaggaggtcttacgtaagaagcccgattttcgtcggaaaccatggccaactattagtaatgctgcaaaagattttgtgaaaaaattactagtaaaggatcctcgggcgagattaactgctgctcaagctttatcacatccatgggttagagaaggaggagaagcattggagattcctattgatatatctgtcctgagcaacatgcggcagtttgtgaaatatagtcgattcaaacaatttgcactgagggcattggctagcacacttaatgaagaagagttggctgatataaaagatcaatttgatgctatagatgtagacaaaaatggttcgattagcctggaagagatgagacaggctcttgccaaagatcttccttggaaattgaaagaatcacgtgtactagagatattgcaagcgatagacaacaacactgatggtctagtggatttccgggagtttgtagcggctacattacacgtgcatcaattggaggaagactctgacaagtggcagcaactgtcacaggctgcttttgagaaatttgacctagataaagatggctatattactccggaagaacttagaatgcatacatgcttgagaggctccgttgatcctttgctagaggaagctgatattgacaaagatggaaaaataagcctaccagagtttcggagacttcttagaactgcaagcatgggttctcaaaatgtttcaagcccatctgttcatcg

SEQ ID NO: 9279 - DNA, 1293 bp, Glycine max
  Clone ID: 700840947_FLI
agaaaatcagttattgccgttgttgttttgtttccggttcggtttatttcaatggatcgggcggcgttgacggttggaccgggcatggacatgccgatcatgcacgacagcgaccgttacgatctggtacgcgacatcgggtccggaaatttcggcgtggcgaggctgatgcaggataaacaaaccaaggaactggtcgccgtcaagtacatcgaaaggggtgataagattgatgaaaatgtaaagagggaaatcattaatcacaggtctctgaggcatcctaacattgttagatttaaagaggtaattttaacacctactcatcttgctattgtaatggaatatgcatctgggggagagctctttgagaaaatctgcaatgctgggcgttttaccgaggatgaggctcgattcttctttcagcaactcatatctggggtcagctattgccatgctatgcaagtatgtcatcgggacttgaagcttgaaaacactttgctggatggaagcccggcacctcgtttaaagatatgcgattttgggtactccaagtcttcagtgcttcattcacaaccaaagtcaactgtgggaactcctgcatatattgctccagaagtattgctgaaacaagagtatgatggcaagcttgcagatgtctggtcatgtggagtaaccttatatgtgatgctagtgggagcatatccttttgaggatcctaatgaaccaaaggactttcggaagacaattcagagagttcttagtgtccagtattccattccggacggtgttcaaatatctccagagtgtcgccaccttatttcaaggatctttgtttttgacccggcagagagaatcaccatgtctgaaatctggaaccatgaatggtttctgaagaatctcccggcagacctgatggacgagaagataatgggcaatcaatttgaagagccagaccaacccatgcagagcatcgatacgatcatgcagataatttcagaagctaccgtaccagcagttgggacctattcttttgaccagtttatggaggaacaaatttatgacttggaatctgaatctgatgctgaatctgatcttgatatagatagcagtggggagatagtgtatgccatatagtttgatcttagttacacttgaaagacaacaacatattaaatggagagagcattttcagcatcaagagatatatacgtggtgcccgcattttctgtagattagcatggataatacaaacttcatgttaatatttatgtattcagtgttggttgctgaggg

SEQ ID NO: 9280 - DNA, 972 bp, Glycine max
  Clone ID: 700841015_FLI
aatccaccgatgctgagtcagactcggagtttccgtctcgggaaccggaagtcccggtggacgcttactcctgcgaccatttccgcatgttcgagttcaaggttcggagatgcgcatgtggcaggtcacatgactggaccgagtgtccgtacgcccaccccggggagaaggctcgccgccgtgatccccggaagtaccattactccggcacggcgtgccccgatttccgcaaggggagttgcaagaagggtgacgcgtgcgagtacgcgcatggggttttcgagtgctggctccaccccgcacgttaccgtactcagccctgcaaggacggcaccagttgtcgccggcgcgtgtgtttcttcgcgcacacgccggagcaactcagggtgttgccacagcagagtccgcggagtgctgattcatacgacgggtctcctttgaggcatgcaattgagtcttcgtgcgccaagactctggcaccggcaccgtttgtgtcttctcctgggtcggtgtcgccgcctctggagtctccgccgatgtcgccgatgactgtgagtgttaatgagatggtggcgtctttaaggaacttgcaactggggaaggtgaagtctttgccttcttcttggaatgtcatggggccttccgggttcggatctccgagaggacccatgatccgacccggattcttcagccttccgacaaccccgacccaggcaccgactcgcggtggggtcaactactttgacaagtgggatcagagttgcgaggaggagcctgttatggagagggtggagtctggacgaaacataagggcgaggatgtttgcaaaattgagcaaagagaatcatctggacgggtcggattctggatcgggtcaaattggggatccggatgttggatgggtttcggagcttgtcagtcgctgatttcattttgttgcacttctctcggtgtgtatagaatgcgggggag

SEQ ID NO: 9281 - DNA, 663 bp, Glycine max
  Clone ID: 700841043_FLI
gagcaaagtccaggatttacaaggaccctgctttgcgctatgttttcttgatgaataatgggaggtacattgttcagaagaccaaagatagtgaattgggaacccttttgggagatgattggatcagaaaacacgctgcaaaagttaggcaattccatgtgcactatcaaagatgctcgtggactaaggtattagggattttgaagcttgatagtaatggctcatcattgccccctaatggcttggcaaagtcaatgaaggagacgctcaagttgtttaacacagtttttgaggagacttgcagggagcattcttcctggtttgtctttgatgaacagctcagggaagaaataagaatttcccttgaaaaaatcctgcttcctgcgtatgggaactttgttgcgaggtttgagagtgttgcggagcttggaaagaatgctgacaagtatattaagtatggaacggaggaaattcaagcaacactcaatggtttgtttcagggaagcagtggatcaactggtagccgaaagtgaagttgaagctgctactagttgttcttgtgtatttgtggtgtaattaaaattaaaatacactgttttttatcataaaaaaatgtagtcttgtagtcttgtactataaatactgctgtatgttattctgctt

SEQ ID NO: 9282 - DNA, 584 bp, Glycine max
  Clone ID: 700841225_FLI
ctaattccaaagctaacaactttatagagagagagagagagagagagagagatggagggtgaaggaagaagaagagaaggaggagagagagaaacagcaacagcagcagcaacgaggaaggtggtggagggtgctgatcagagaagatacaaaggaataaggatgaggaagtggggcaagtgggtcgctgaaattagagaacccaataagcgttcaaggatttggctcggttcctattctacccctgtcgcagccgcacgtgcctacgacaccgccgtcttttaccttcgaggaccctccgcgcgtcttaacttcccggagcttctcatcggagaaggcgccgccgccctcaccggcggctgtgacatgtcagcagcttctattaggaagaaggcctccgaggtcggtgctagagtcgatgctcttcaggcaacccttcaccaccatcaccaccatgttgtgccaccacggcagcttctctctgccagctgtggcggtgggtccggtgattttgcagtgcgggttgttgacctgaataagatgcccgaacccgagagctccgactgtgagtggaacgtgaattg

SEQ ID NO: 9283 - DNA, 1114 bp, Glycine max
  Clone ID: 700841301_FLI
tttcatacgcaaagacctcaatattgagtaatcacgatgttcaagagaatatggtgagatagatatacattacagggtatcacacaaatctgaaagaaatttgtcaaacattctatgattcagaacgctgatatgagactcgaatcagggacttgtaatgtgtgctcagctgcttgttcatcttgcatgcatcctaaccgagctctcatggggtcaaaggctgaagaattctctgatgaaaactgtcgcttaggggaggttaatcagtattgtgatgagagtgatagatcttctcttgggagcagagcttgtgaaaggttgaagcatggtgtcagtgaaaccagtcacaagcctagtgtttcttccactcatgattctctatctgaaaatgctgagaacagtcaagccttatcagagaagtatcaggattccaagtgtttagaaagtcttgatgatagcacttcttgtattagtaggaccagtaatgctaatttagcgagcagttgccatcagataaatacagacagaataaatatatcttgtagttcaacttcagttagtcacttagtggcagaaggatctggaaatgggccaactgttgacatatctagtttgtcagaatgttgtatggaaaatgttgattcatcattgaccaaagagagagtacctattattgttcctggtgaaaaatctctggcagataaggaaaacctaaataatggtacagccaaggtttcaattgaaatatgtccaaagtcagaagaagatactgaaaataatgttgatgttgcggaagatgatgatcataaatattcagcccatgatggattgcatgagaaggttgaggagctgattaaatcatctggaagggctgaacctcaatcagaagatgagagtgatgaatcagatgttgttgagcatgatgtaaaagtatgtgacatctgtggagatgctggtcgtgaggatctacttgccatatgtagtaggtgcagtgatggtgcagagcacatctattgcatgcgggaaatgcttgagaaggtccctgaaggggactggttatgtgaagaatgcaagtgtgcagaggagactgcaaatcgaaagctagatattgaag

SEQ ID NO: 9284 - DNA, 2140 bp, Glycine max
  Clone ID: 700841319_FLI
tctggttctgacttcccaagttcagtacatttatgacatcaatctccggggggttgtttggttgctgtttgttgttgtagctgtttatgtgatctgaatctagtccattcccttcatcagaaatatataaaacattgcctgttagggaagagatcctgagagccctccttaattcggatttgatcggcttccacactttcgattatgcgcggcatttcctctcctgttgtagccggatgcttggccttacctacgaatccaagcggggatatattgggattgagtactatggtaggactgttagtatcaaaattcttcctgtcggtattcacttgggtcagcttcaatcggttttgaggatgcctcagactgaagaaaaagtttgcgagctcattagacagttttctgataaaggcaggacattgttgcttggtgtggatgacatggatattttcaagggaataagtttgaagttgttggccatggagcagcttctcattcagcatcctgagtatcgggaaaaggtggtgctggtccagatagctaatcctgcgagggggcgagggaaagatgtgaaagaagtgcaagccgagacgaaggccacggtgaaacgaattaatgaaacatttgggaaacccgggtatgatcccgtcattctgatcgaggagcctctcaagttttatgagagagttgcttactatgttgtcgcggagtgttgtttagtcactgcagtaagggatggaatgaatctcataccgtatgaatatatcatcagtcgtcaaggaaatgaaaccttggataaagttttgggtctagcttcctcccctaagaagaaaagcatgttagttgtgtctgaattcattggctgttccccatctttaagtggagcaatcagagtgaacccctggaatattgatgcagtagctgatgcaatggactcggcgctggaaatggctgatttggagaaggagcttaggcatgaaaagcattatagatatgttagtactcatgatgtcgggtactgggctcgaagcttcttgcaagatttggaaaggacctgtagtgatcatgtgcgacgaaggtggtgggggattggttttggattaagctttagagttgttgcgcttgatccaaacttcaagaagctctcaatggagcacataatttcagcttacaagcggacggcaactagggcaatccttcttgactacgatggtacactaatgcctcaatcatccaccattgataagagtccaagcagtaaatccattgaaattcttagtagtttgtgtagagataagaacaacatggttttccttgttagtgctagaagccgaaagatgctttctgaatggttttgtccttgtgagaatctgggagttgcagctgagcatggttactttctaagaatgaagcgagatgaagagtgggaaacacatgttgcggcaacagacactagttggaaacaaattgcagaacctgtaatgaaactttatactgaaacaaccgatggatccaccattgaagacaaagagactgcacttgtttggtgctatgaggatgcagatccagactttggatcatgccaagctaaggaacttctcgatcatcttgaaagtgtgcttgcaaatgaaccagtaacggtcaagagtggccagagcaatgtagaggttaaaccacaggggtgttagcaagggactagtggccacacgcctactttctgccatggaagaaaaggggatgtgccctgattttgttttgtgtataggcgatgacaggtctgatgaagacatgtttgaggtaatcaccagttcgatggggagtccgatcgcggcaaaggccgaggtattcgcgtgcacggtttgtcgaaaacccagtaaggctaagtactacctggatgatacaactgaaatagtgagattgcttcagggcttagcctgtgtttcagaacaaatagacaaatagtttcattttcttcggaacaaaaaatagtttgttaagctctgggaacaaaggtggtggtggtgatgagaggtattataaatacattgtactttgctttactttgtcattgaggatgtaggctcagttgtgctgctcttaaaatcttaatacacaattaatattattggtttccttg

SEQ ID NO: 9285 - DNA, 1113 bp, Glycine max
  Clone ID: 700841324_FLI
gattttgtatttatgatgttttttaacagtgacaagccaggcaatcacaattttgatcttcttaagaagctggttctcccggatggttcggttctccgtgctcagttacctggcaggccaactcgtgattctctatttgtggatccagccagagataggactagcttgctcaaaatatggaacctgaacaaatgctctggagttgttggtgtatttaactgccaaggtgctggatggtgcaagatagagaagaaaacccgcatccatgatacatctcctggtacactcaccgcctctgtctgcgcctctgatgttgacctcatcacacaagtagcaggtgctgaatggcttggagatacaattgtttatgcttacagatcaggtgaggtgattcggctaccaaaaggggtttcaattccagtgacactaaaagttctggagtttgagcttttccacttctgtccaatccaagaaatagctccaagtatatcatttgcagcaatagggctactggatatgttcaacactggaggagcagtggagcaggttgagattcataaccgagcagcaacgaaaacaatagctcttagtgtaaggggaagaggcagatttggagtttactcctcccagagaccactgaagtgtgtggtaggtggcgctgaaaccgacttcaactatgactcagagaccgggttgacaaccttctccattccagtttctccagaggagatgtacagatggtcaatagagatccaagtttgagtcctttttaagacttggtgtttgatgcattgttgtatcaggagaagggttttgttgtaattaagcattgagggaattgttggagtcaggcagagagagaggggggaggtttgttgtaagacacctagtattagtatcatgtagtggagaaaaagggttgttgatcctaatagctagacaaggcatgttgtagtagtcatggggtggggaagtccttttgttgtagcatgtaatttggtttagacttgtagtatgtcatcaattagatggataaagagagaatattgttatctacccgaggatgtaacaatgtttgtttctctgaataaaaagttcacatctgtcttttgg

SEQ ID NO: 9286 - DNA, 653 bp, Glycine max
  Clone ID: 700841354_FLI
agtaattctcccaagggaacggaagaagcatgagtatcatgaagccataaaaaaacgctataagcacctccctgaagttaaccgtatcgcaagacatagacacttgccaagaccaatattcaaagcttctgctttaatgcgcgttatggcggatgctaagagaaggaaggaagagaagaggaaagctcacagtgctccagggagtattacaacacagccattacgaagacgaagaattatcaaagaagtcgagtgaggtttttctgagccggtacctaaaaaaaatcaagcaaatatttatcagctattacggagacgaagaattatcaaatatactgatgtcagcatgcttctcttgggacgttccatctctggaggtgcttccaggttgatttcttaggcaaatggatgtaccgtgcctacaattttatgcctagttggctcagttgcatgtttagattggtaaaacaaggttatatttttgtgattcttcttctgggttcagttcactcccaattcaagaatttttttttcttgaatgtagtttctccttttccttaaaagcccttagagagctaattgttatatttttaattcaattcagtgcagtgattatgacaaaatcagtgacagatttcagttttagtatttat

SEQ ID NO: 9287 - DNA, 422 bp, Glycine max
  Clone ID: 700841461_FLI
gttaaaagctaataatgtgttcacagcaccctgcgacacttcagttctgtatccacaaagtggaggcaacatccatgaattcacagctataactccatgtgctgtgcttgatgtccttgggccaccttattccaaagatgatggcagggattgctctttctatagagatcacccttatactgcttttccaactgcagatggagaaagtggtaaggtgaaagaagagaatgatagttacggatggttagaagaaattgagatgccagaaaactctcaaatggatggaattgagtatttgggtcctccaattatagagactgccctatagataagatcaacatttgacacatattccgtagcatgtcctcttagctgttcttattgtgcataccacaggcatatataaagaaattttccacctc

SEQ ID NO: 9288 - DNA, 1432 bp, Glycine max
  Clone ID: 700841467_FLI
tgcagaccgagctagctagctagcaagcaagcacagagatggaggcaaagcgaggccatgccctcatgtgcttggcacgtgtttcactcttcctctgcgctctaaccctatccgctgctcacggaagcaccacggttcaagacatcgcgagaaagttgaaactcggggacaacgagcttctgcgcacggagaagaagttcaaggttttcatggagaattacgggaggagctactccacagaggaggagtatttgcgccgtttggggattttcgcccagaacatggtcagagcggcggagcatcaggcgctggaccccaccgccgtccacggcgtcacgcagttctccgatctcaccgaggacgagtttgagaagctctacactggcgtcaatggcggcttcccgtcatcgaataatgccgccggcggtattgcgccgccgttggaggtggacgggctgccggagaattttgattggagagagaaaggagctgtcaccgaagttaagttacagggtagatgtggatcatgctgggctttcagcaccacaggatctatagaaggagccaattttcttgccaccggaaagctcgtcagtcttagtgaacaacagctccttgactgtgacaacaagtgtgacataacagaaaagacttcatgtgacaatgggtgtaatggaggtcttatgacaaatgcctacaattatttgctcgagtctggtgggttggaggaggagtcttcatatccctacactggggagagaggtgaatgcaagtttgatccagagaaaatagcagttaagatcacaaattcaccaatatccctgctgatgagaaccaaattgccgcatatttagtaaaaaatggtccacttgctatgggcgtgaatgcaattttcatgcaaacatacattggtggtgtctcatgccctctcatatgtagcaagaaaaggctgaaccatggtgtgttacttgtgggatatggtgcaaaaggcttctcaattcttaggcttggcaacaaaccatactggatcatcaagaattcgtggggggagaaatggggagaagatggctattacaagctctgcagagggcatggcatgtgtggaataaacactatggtttctgctgcaatggtgcctcaaccacaaacaacacctacaaagaattatgcttcttattagctatgcacttaaggaaatctaaataaatatttttcattctaggtgatgtatcatgtatgtaccaaaatattttggtacgtaagtcttttaaaaagtttgcatctcctctttggttttccttagttctgaaagttatctcctaagaagacaatcatatgtactgtacgtagtgtgaagatatagtattgtatgctgcagaatatgattgtctaataaggtggactagctgtaataaaagatatttccaggttg

SEQ ID NO: 9289 - DNA, 1719 bp, Glycine max
  Clone ID: 700841470_FLI
taacattttaaagtagataagccttccccgcccactagaaatagagagaaggtaaggagggtttggttttgggtactttacaaattacaataattagcgaaagagagaagacatagcacatagagtcatagagacatcatcatcgtatgggaatggaagaggagagtagcaacaacagcagcatcatagaaggtggtgcttcgctgccatcaacgggttcagacgccaagaagcgaagagtgacgtacttctacgagcccacgatcggcgattactactacggtcaggggcacccaatgaagccgcaccgaatccgcatggcgcacaacctcatcgtccactactccctccaccgccgcatggagatcaaccgtcccttcccggcctcccccgccgacatccgccgcttccactccgacgactacgtcgactttctctcctccgtctcccccgagaacctcgccgattccgccttctcccgccacctcaagcgcttcaacgtcggcgaggactgccccgtcttcgacggcctcttccccttctgccaggcctccgccggcggctccctcggcgccgccgtcaaactcaaccgcgccgacgccgacatcgccatcaattgggccggcggcctccaccacgccaagaagtccgaggcctctggattctgctacgtcaacgacattgtcctcggtatcctcgaactcctcaaagttcacaggcgcgtgctgtatgttgacattgatgttcaccatggtgatggtgttgaggaggccttttacaccactgatagagtgatgacagtgtctttccataagtttggggactttttccctggcacaggacacgtcaaggacattggggtgggatcaggaaagaattatgcagtcaatgtcccattaaatgacggaatggatgatgagagtttccgtagtctgtttcgaaccatcattcaaaaagtattggaggtctatcaaccagaggcagttgttctacaatgtggagctgattcattgtctggggacaggttgggttgcttcaacttgtctgtgagaggtcatgcagattgccttcgttttcttagatcgttcaatgttcctttaatggtcttgggtgggggtggatatacaattcggaatgttgcccgttgttggtgttatgagacagcagtggcagtaggagtggagcctgataataagttgccttataatgaatattatgaatattttggcccagattatactctctatgtcgatccaagcaacatggagaacctaaacacacccaaggatatggaaaaaataaggaacacactactagaacagatttctcaacttccccatgctcccggtgtaccttttcagacaacaccacctaccttacaacttccggaagaggcagaagaggacatggatagaagacctaaacttcgcaaatgggatggtgaagattatgattctgatcctgatgaaggtggaaaggctaattccaagtttccaaacgtcactgcccatatgagggacattacagatgaaatggaagaagagaaaccagaagtgcatccatcatcttgttgttgatagaacagagcaagttcttgcacagcatgtttgtattgttatctttattccgtttatgggggagatcattactaaacagtaccacatgcagctgttgagaatgcaaatataatcaatacattgtgcaaatgtaatatagtgt

SEQ ID NO: 9290 - DNA, 841 bp, Glycine max
  Clone ID: 700841524_FLI
catcacacatccatcagaaacatacacaatattctctttcaaatggcgcagcaacaacaaaatcaccgagacgagttcgggaacgaccagagggcctatgatgtccgccaccgcgatctcgcggtggcggaaccagttcggaagccgaactgccatagaccccgtggcgaactacgcttacgggaacatagggagtggcgggtacggagcgccacccacaggagaaccgtatgctggccctaactatgcagcctcggggtttgaatacagtactgcttatggcactattggtgctgctcccgtgtaaggcgctccgactgaaggccatggaaccgctgatcgcggccgtggtgacggtgaaaggaacaagaatatggacatgaataggaacaggaacatgggtagggatcagaataagaagtgaagataattaagttctagtactttaatttatagtaacttatactactagtgctatatatatataaatgttgtttgttaggagaaattattagatgatcggtctttgagcatcacgtcattcatgatcatgctaaataattatgtcatatgattattgattgagatcatggatggatgataggttgatttcagaccacctaataatttagtttgtcaggtcttgttttattgtttgtcaagtgttgttttatgaggccggttggttcttagtttgtgtggttgaaaataaaatgcatgtgggggagtcatgcatgtgagagcaccctatagtatcgtagtggtataataacacgtttgtgagaaggaagtgtatctttgcttggaagtggtataatactgttgtgtctattttgcttat

SEQ ID NO: 9291 - DNA, 880 bp, Glycine max
  Clone ID: 700841557_FLI
gggaattgaattgcagctgcaggggtggtacaacagatttcaaagggacgaagtggtggcacagtggaaaaaggtgaagggaaggatgtctctgcacgttcactgccacattagtggaggtcattttctcttggatatattagcaaggttaagatacttcatcttctgcaaggagctaccagtggtaagctacttttgcttgcaagcatcaaattatggtttgtttcactgactggtcaatgaatgaaaaattaaacgcaacatgtttcctattgcgtgtgtaaattaggtgttgaaggccgtcgttcacggcgatgaaaacctattcaacagctacccagaattgcaagatgccttggtttgggtctactttcactcaaacattccagaattcaacaaggtggaatgttggggcccactgaaggaagcgtcagcacccacaggtggggtccaggaggaggggttggcaattccacagccatgccaagaagaatgccaatgttgctttccaccgcttacgttgagccctattcagtggtctaaacaagttcccagccgccattacgaaccttgtgatgggattgggacccaacaaaatctataaacagccaaactactacaattcacagttacggggatgctgccaaattggcaaattccctgtatacaaattaaatattcgaaacccatttcaatgtaaataaggaagctcgtatttgcaattttttttttttttttttatatatttttctttactttctttgttatgatttttctttcgtaagaaattaaattagttcatgtataatatgtctgtatgcatggttatttcaaagaattaaacagatttttgtaaggagtggaatttcgtggttgtaat

SEQ ID NO: 9292 - DNA, 1026 bp, Glycine max
  Clone ID: 700841686_FLI
tgcggcatagttgatagttggttgaagcgtgaaggaagggtccgcgcgccatggctggcatcacaaccttccccttcaaactctctcactgtcctctcttctctacttccgattccaaactcttcggccttcccctctccaatccctattccatcaaattcgacccttcttctctctccagtacctctctcccctacgtcaccgcccgctactacggcggcggcggcggcgcctctccccgctcccccaacgacccccgctcccgcaagtcctccgattctgacgacgacgataaagctctcgacctctccactctcaggtcagataccgtgaggcttattgatcagagccagaatatggttggagtagtgtcaatcgatgacgccattcaaatggctgaagatgtcgaacttgacttggtaatattatccccagatgcagatcctcctgttgttagaataatggattacagcaaatatagatatgaacagcaaaagaagaaaagagaacagcagaagaaaagtgctgctaatcgaatggatttgaaggagctcaaaatgggatacaacatagatgaacatgattattcagtgcgtttgaaagctgcacagaaatttttgaaagacggcgacaaggttaaggtcatagtaaaccttaagggtcgtgaaaatgaattcaggaatatggctattggacttattacacgttttcagaatgatgttggggagcttggaatagaggagacaaaaaacttccgtgacagaaacatcttcataattttggtttcaaataaagttgctgtgcagaaaactcaagaaccaccaaagaaaagagacaaatcagctgcagatgaagtcaccattagtgcccaagcataaccgaaaacttccacgctagtttctaattgtagaatggattgagtaacttggattggtccgagttggaaaattttccgagcattgtataatcgtataattcatgtgcaatgatagcatataagttcacgagaattttaattatagaggc

SEQ ID NO: 9293 - DNA, 1129 bp, Glycine max
  Clone ID: 700841740_FLI
ctctccttcgcacgtgtttcgccccgtgccggttcggccgattgttgaaacggcgtcgtcgcaagacgatgccgacgatgccggacccgcgacttcgctgtcgctgtctcttcccggtgtggagtcggcggaaatttcaaatcgcgcaactacggtgccggtgatgccggtgaataccgttgcggctccggcaccggttccggcggaggttggattgggagcgttgaatttgagtggagagtttatggcggtgatgcatgagatgataaggaaggaggtgaggagttacatggagcagcagaagaatgggatgatgtgttttcagggtatggaaatgatggaagggtttaggaacgtgtcggtgaagcgaattgggattagcagggtggattcgtaattattatgacctatttagtgttttcacaaaatgaggtttattaagaacttcgatcaagggagggaagagagaaaaaaaaaaaagaaggaagctgttttcctttttaatttttatttttagggaataataatattggatagtgtacagtgggaacgagacgagagaagacaagagtagtagcatggaatggaatgatggaaagtgaaatttcatggcaaatttgaaatttctttggcttgtgttctgaacctctttggattatcctgtgcttcagggtctatttagtttggaaaagacataaaaatgaggggttagatggagaaaaaggaaagggtaggatttaaaaaattgaatgaaatatcctcaaattttcaatattgagttcattttactttcatatctgcagaagcatgatgtaaatatttgttttcgttcaaatccaaaattagcaaatagtgttttagtgcagcaacagaaaggaaaaccggtgcttcgtttgaaagtagtttttgtctgttatccttttatggatctgaaagcagttagttaatcagtttactgcataatcttgcaccggattttttgcaacctaaaaattggggttaagctctcctggagtgttttagccttttaggaatcagttgagaccgtttatccagatattttgaatatttgaacctcccttcgacacacgtggtgaataaaacttataaattaaaattatattatttg

SEQ ID NO: 9294 - DNA, 992 bp, Glycine max
  Clone ID: 700841748_FLI
gcagatattttcgccgagtggaaccgaggggaacttgagagtttcttaattgaaattaccgcagatatttttaaagtgaaggatgaagatggtgaagggtttttggtggataagattttggataagaccgggatgaaggggaccgggaaatggacggtgcagcaggcggcggagctttcgatagcggcgcccacgattgcggcttcgttggattgccggtacttgagtgggttgaaggaggagagggagagtgccgcagcggtgttgaaggaggcgggattgagtgatgaattggggagggttagtgtgagtggggtggataagaagaggttgattgatgatgtgaggcaggctttgtatgcttccaagatttgtagctatgctcaggggatgaatttgttgagggctaagagcaatgagaaagggtggaacttgaatttgggggaattggctaggatttggaagggagggtgcatcataagggcggtgttcttggacagaatcaagaaggcctatcagaggaaccctaatttggctagcttgatagtggacccggagttcgccagggaaatggtgcagaggcaggctgcgtggaggagggttgtggggttggcggtttcagctgggattagtactcccggaatgtgtgctagtcttgcttactttgatacctatcggagggcaaggctgccggcaaaccttgttcaggctcagagggacttgtttggggcgcatacttatgagagggttgatcgccccggggcttttcataccgagtggacgaagctcgcccgcaagagtgggactggagttggtgcactcaattgattgatgatgggttttggttgtttgcttgattgtcgtgcagtgcagcatttgagttgtaattgtttgtttcttttgaggatctttggtaggcagagagcagctattgttttcttgctataactgtttttaatcttaataaaacaaaggcgtgtcatttggcttcc

SEQ ID NO: 9295 - DNA, 862 bp, Glycine max
  Clone ID: 700841760_FLI
gtgagaacaagaaaaagaggcgcaagatgagtggtagggtttctgggaaggtgaagtggttcaatgatcagaaggggtttggattcataagccctgacgatggcagcgacgatctcttcgttcaccaatctcagatcaaatctgacggtttccgaagcctcgccgaaggagagtccgttgagttcgccattgaatctgaatctgacggacgcgcgaaggctgttgatgtcactggccccgacggcgccagcgtccagggaaccagacgaggcggtgatggtggccgaagctatggcgggggacgaggaggtggtggaggtggctacggtggaggcggtggctacggtggtggtggtggctacggtggaggcggtggttacggtggtggtggaagaggcggtggaggcggtgcttgctacaactgtggtgaatcgggacatctggctagggattgcagtggaggcggtggtggggacaggtacggaggaggtggtggtggtggcagatatggaggcggcggtggcgggaggtacgttggtggtggaggcggcggcggcggcggaggaagctgctacagctgtggagagtctgggcattttgccagagattgcccatcaagtgctcgttgaatttactgttagggttgtttatgttttgcggattgttttaagtttttactttaatatgtcttagggattttaatggtttctgtccaaactatgggttcttatgagtagatgtgtgggatttttcttttttggttatttaaatgaagggtttctgtgttatcgttacaatctgcaaactaaaatctgtttgaacttacattttgctataatgaatcgtatgattgctatcaatt

SEQ ID NO: 9296 - DNA, 1006 bp, Glycine max
  Clone ID: 700841843_FLI
aaaacagtaaagctaacttcaacacctttaattttctaaaagtaattcagcggctgaataccaagcggagaagatgagtcaggagcagccacggcgtcccaaaggccaaaaccccatcaaatacggcgacgtttttgtcgtctccggcgaccttgcacagaagcccgtcgcaccggaagatgctgccatgatgcaaagcgcggaaactcgagtgctcggacaaacccaacccggcggagcagcttccgtcatgcaatctgccgccaccaggaatgaacaggctggccttgtcggtcaccgggacgtcaccgacgttaccggcgaccgtggcgtcacagtcacagaaactaaagtccctggaagacgcattataaccgaggctgttggtggccaggttgtggagcagtatgtggaggcaactccggttgaggcagggcgaagcagtgcaattaaggagaatgccataacaataggagaggcattggaggcgacggcacagactgtgggtcagaaagcggtggatcagagtgacgcctccgcgattcaggcggcggaggtgagagcaacgggaagtaacgttataacgccgggtggacttgcggctatggctcaatcagctgctgcttataatgctgactgcaagcttgaccaggacaaggtcaagctcgccgacattttggccggagccacagccaagttgcccgcggacaaggccgccacactgcaagatgctgaaggtgtagcgtgtgctgaggtgaggaacaaccctgatgccaccgccactcccggtggcgtagccgcttctgttgcggctgctgctaggctcaatgaaaatgttaagtaacgagtcatgttatgtgtcttgataatcatacttttgtttcatgatgtgtggtgttgatgtgttatagtctatagtgtattaataagtgtaagtggtgcaacatcttgtttttctttcttgtactctttgtgagttatattaattactggttttaaggactct

SEQ ID NO: 9297 - DNA, 1375 bp, Glycine max
  Clone ID: 700842282_FLI
gaccgagctagctagctagcaagcaagcacagagatggaggcaaagcgaggccatgccctcatgtgcttggcacgtgtttcactcttcctctgcgctctaaccctatccgctgctcacggaagcaccacggttcaagacatcgcgagaaagttgaaactcggggacaacgagcttctgcgcacggagaagaagttcaaggttttcatggagaattacgggaggagctactccacagaggaggagtatttgcgccgtttggggattttcgcccagaacatggtcagagcggcggagcatcaggcgctggaccccaccgccgtccacggcgtcacgcagttctccgatctcaccgaggacgagtttgagaagctctacactggcgtcaatggcggcttcccgtcatcgaataatgccgccggcggtattgcgccgccgttggaggtggacgggctgccggagaattttgattggagagagaaaggagctgtcaccgaagttaagttacagggtagatgtggatcatgctgggctttcagcaccacaggatctatagaaggagccaattttcttgccaccggaaagctcgtcagtcttagtgaacaacagctccttgactgtgacaacaagtgtgacataacagaaaagacttcatgtgacaatgggtgtaatggaggtcttatgacaaatgcctacaattatttgctcgagtctggtgggttggaggaggagtcttcatatccctacactggggagagaggtgaatgcaagtttgatccagagaaaatagcagttaagatcacaaatttcaccaatatccctgctgatgagaaccaaattgccgcatatttagtaaaaaatggtccacttgctatgggcgtgaatgcaattttcatgcaaacatacattggtggtgtctcatgccctctcatatgtagcaagaaaaggctgaaccatggtgtgttacttgtgggatatggtgcaaaaggcttctcaattcttaggcttggcaacaaaccatactggatcatcaagaattcgtggggggagaaatggggagaagatggctattacaagctctgcagagggcatggcatgtgtggaataaacactatggtttctgctgcaatggtgcctcaaccacaaacaacacctacaaagaattatgcttcttattagctatgcacttaaggaaatctaaataaatatttttcattctaggtgatgtatcatgtatgtaccaaaatattttggtacgtaagtcttttaaaaagtttgcatctcctctttggttttccttagttctgaaagttatctcctaagaagacaatcatatgtactgtacgtagtgtgaagatatagtattgtatgctgcag

SEQ ID NO: 9298 - DNA, 1065 bp, Glycine max
  Clone ID: 700842377_FLI
ggtaggaagagatgttgcaacatgtttgcaagaagcattggcacggaaaggcctagatgtgcgggtagctgcattggttaatgacactgttggaacattagcagttggacattatcatgatccagatactgttgcagcaattataattggtactggtacaaatgcctgctatttggaacgagttgatgctattatcaagtgtcaaggccttcttatgacatccggacgaatggttgtcaatatggaatggggaaacttttggtcatctcacttaccaagaacatcatatgacattgatttggatgctgagagccctaatccaaatgatcagggttttgagaaaatgatatcaggaatgtatcttggtgacattgtgagaagagtcattcttaagatgtcattagagtcggatatgtttggaccaatttctcccaagctttcaatgcctttcatactgtggactcctttgatggctgccatgcatgaggataattctcctgacttgagagaagtagcaagaatccttaatgacatatttgagattcctgatgttcccttgaaggcaagaaaaattgtggtgaaggtgtgtgatgtggtgactcgtagagctgctcgattggcagctgctggtattgttggtatcttgaagaagattggtagggacgggagtggtggtatcacaggtggacggagtagaagtgatatgaaaatgagaagaacagttgtggcaattgaagggggattgtattctaaatatacattgtttagggagtacttgcgtgaagctctaaatgaaatattgggacaagatattgccaagcacgtaattctaaaggtcaccgaagatggatccggcattggggctgcactgcttgctgcctcttattcatcctaaactgtggatagagggtacacctgctataaaatatatataaattgtttgatatttatatatatatgtgtgtatatatataatatatatataggcacacacacacgtatagccatgtaaatcagaattaattctccatatttaatatctctgtataaaggaaggtttcgtct

SEQ ID NO: 9299 - DNA, 1830 bp, Glycine max
  Clone ID: 700842952_FLI
catcattctgtcttgtgttagaagtaatgaacatcagggcattggattcctgaatgatcctaggaggctcaacgttgctttgacacgagcaagatatggcattgttattttgggaaaccctaaagttttgagcaagcagcctctatggaatagtttattgactcactacaaggagcatgagtgcttagttgaagggcctttaaataacttgaagcaaagtatggttcagttccagaaacccaagaagatttacaatgaacgaaggcttttttatgggggtggacctggaattgcatctaatgataattttggtaacgttggatctggtgctggcacaagttcagatcggaggagcagtcgaggaaggggatcttatatacctcctggtccaccaaatggaactcataagcctggagtgcatcctgctggatatcctcctgtgccaagggttcccttgcctcattttcatggtggtccccaatctcaaccatatgccattccatctcgtggggctgttcatggacctgttggggcagttcctcatgttccatctccagggagtcgaggttttggggctgggagaggtaattctggtgctcctccaattggcaatcatctacctcatcaacaaggcacccaacagcctattggatctacatttaacttccctgctctagagaatcccaacagccagccatctgttggtggtccattatcccaacctgggtttgccaacaatatgcatgttcaaggggctggccaatcatttcgtgatcaattttctatgcctggaatgtcccaggacttcttgggcgatgacttcaaaagccagggatctcatgttccgtataatgtcactgatttctctacgcaggcttctcaaagtggatatgctgttgattatgctacacaaggagcacaaggtggattcccagggaattttcttaaccagaattctcaagctggatattctcgctttggttctggaaacgactttatgtcacaggactacatgggccatggatcacaaggccttttcactcaggtggggttcagtgatcccttgcaagatgatgcaacacagagccatttcagtgtggcaaatgccaaccctcttcagtcccagatgaattctctttactcccaaccttttgctcactacaacacacagccgcttaacatgcaggctacccaacagcagcctcaggctcagaactcccaaaatcagaaaatccactataacgtttgaggaactttaggagcttaatgtggctttgatgggttatagtctttgcaatcagcaactgggtttgtgcctgtcttttgtgctgaaatacgtttgcatgtgacatccgaaggattgccttgggatagctatatcgaggaattggtatatatgatttcagttgatggaagtttggggcattacgaagatacaagcaggcgcatcccgggctgaaaattgataagataaccccctttaccgtactgaagttttgtattgtttgggattaaggtgaaattgttcgagaaagcattacatggaatggttttgtcgaaagggtttcgatcttgaagcagaaggggcagtttacatgtcggtgaaatactgaatatagtaatccatacggcaccaatcatcgccaaggaagttattattgtacagaaggcagggatgcggtgaaccctttcagctcttcctgacatgtaatttttcaactcgatattatagacacaagttatattatgcaactattgccactcgtaattttctgtggcatataaaggtgtgataattgtttccttgtaaattagttatcttataagtgc

SEQ ID NO: 9300 - DNA, 1463 bp, Glycine max
  Clone ID: 700842983_FLI
gccaaatgtgccggctcttcatttaccaggaagcaatcttcaatctagtcgattgaggtcttccctaagtgctcgtgacattccaccagaagacttgaacatgatgtctgatcttgatggccagcagcagcaccatctgaatgacttgagctgttacatacagcctcgccccggtgccagttctgtgagtagatctggtcggtccaagaccctaactccatcaaatctggaagagctcttttctgctgagatttctttgtctccccggtattctgatccagcagccggttctgtgttttcccctactcacaaatcagctgttctcaatcagtttcaacagctccaaagtatgttatcacctataaatactaatttgctgtctcctaagaatgttgagcatcctctttttcaggcttcttttggtgtctctccttctggaaggatgtcaccaagaagtgttgaaccaatctctccaatgagtgctcgtttatctgcatttgctcagcgagagaaacagcagcaacagctgcgcagtgttagttcaagagaccttggtgccaacagtcctgcctcacttgttggctcccctgcaaacccttggtcaaagtggggttctcctattgggaaagctgattggtcagtaaatggagactcccttggtcgtcagatgcgaagatcatcctcgtttgagcgcaagaacaatggggaagagcctgatctctcttgggtccaatctctggtgaaggagtccccacctgagatgatcaaagagaagtttgcatctcctatgcctactgcatctgctgatggaccgaattcaaattcccaaattgaatccattgaccattctgttttaggagcctggcttgagcaaatgcagctggatcagcttgtagtctagtcaaaattgaccctttacatatcttgttgagataggtatttaatttcgtaaggtacatattcttttggtgaaattttttgggaagacaacaaggaaagaagtgtagtaaaaggaatggaggattggttggctgcgaagttacctgaaggatattctattttttcttctttttttaaataataattgtcattcattattttactacagagcttcaagagagttgaagaagctctctctcttggggctgaaattcaatagtaggagaaaaatcctgtcgaggttatctatttttcttccaaaacggccccgtttcaggatttttccccttgctattttacttgatttctgagttcactatcaagcaagctagtttggtttataatggaacaaaaaccattattagcctgcgtttgttttgaaagatttttctgaagttcactaagttaagccaagtcaatgatttgctgttgcctatggttgaagttgtttctttctgagggaataattagagatgatctgcactgttgaatatttacggcagataaatgagatagtgaagttt

SEQ ID NO: 9301 - DNA, 802 bp, Glycine max
  Clone ID: 700843008_FLI
gaagctgtccataaatcaactagaacagaaaggatgaggacccttaggtctacaagttctaccagaaaggtcaacactgccagccttcaggaacacttacctgtgctgtatccagaagttgttctatctgtagaggtttaccataatgttcgaaagggtaccaagatccaagagttgttagttcttggaggtcagaccttaactgctctgagggacaagattttttgctcaacggaccaggtgatgcacaaagctgggcagcatgatccttctggttattttctcatcgaagatgtattctgtcccgatttgagggatccgtctgctattgatctcacaagacctatactggattggctcagagactccaaggaggaggcccaaaagaaatgggaatatattataactggggaactgcagaagaaacaaaaggcaatcatggggtgactgcacccataccttagtgatacgagatatgaggttaattcaccctgaagacgttcataatcgagctgtttatccaataatcacgtttcagttgaagttgcgttttcagaaatgcaatgtttgcaaaatattcagagctacaaaggtcacggtggatgacaaatggacaccagaaaacccttgttatttctgtgatgaatgtttttccctacttcaccaagcagatgatggcactctattatatactgactttgtagagtatgattacaaccatgattaattgctgttagccttggaagaacacccacaggcaactaaagttctttacaataatcttatagaaaattgttttttc

SEQ ID NO: 9302 - DNA, 1531 bp, Glycine max
  Clone ID: 700843126_FLI
gctttcagcgtattggcttggtttcaagtcacctgaacagctttcacgtatccgaaacactggtgtgaaaccagagatcttgaaaaatgttggaaaagcaatcacaaccatccctgaaaatttcacacctcatagagcagtgaagaggatatatgaacaacgggcccaaatgattgaaactggggaagatattgactggggatttgcagaggcgcttgcttatgctaccttgcttattgaaggtaaccatgttcgattaagtggtcaggatgttgaaagaggaacttttagtcaccgccatgctgtagttcacgatcagacaacaggagagaaatattgtcccctggacaatgttataatgaaccaagatgaagagatgtttaccgttagcaatagttcactttctgagtttggtgttcttggatttgaattgggttactcaatggaaaatcccaattcattgataatttgggaggctcagtttggtgattttgctaatggtgctcatgtcatatttgacaatttcttggcttctggtgaggctaagtggctccgtcagactggtcttgttgtgttacttcctcatggttatgatggccagggcccagagcattcaagtgcaagattggaacgctttcttcagatggctgatgacaaccctcatgttatccctgagatggatccaactcttcggaagcagattcaggagtgtaatttgcagattgtgaatgttacaactcctgctaattttttccatgttctaaggaggcaggtacatagagaattccgcaagcctctcattgtaatgtcccctaagaacctgcttcgtagcaaggcttgcagatcaaatttatctgagtttgatgatgtccaaggccacccaggctttgacaaacagggaaccagattcaagcgcctcataaaagatcaaaatgagcacaaagatgttgaggagggtattagacgtttagtactttgctctggaaaggtttactatgaacttgatgaacatcgaacaaaggttgatgcaaaggatgttgcaatatgtagggtggaacagctttgtcctttcccttatgaccttgtccaacgagagcttaaacgatatccaaatgccgaggttgtttggtgtcaagaagagccaatgaacatgggtggatacacttacattttaccccgacttatatcttcaatgaaagctgtaaataggggaggttatgatgatgtcaaatatgttggtcgtgctccatctgcggccacagccactggtttcctcaaggttcaccagaaggagcagactgagattgctgaaaaagcccttcaacaggaaccgatcgacttcccattttgaaaaggcatttgcacatgcatccatcttttttgagagtgataataatgcatttagtttaatttatccaccacgtaaggagctatagttggaaggaaggtgacttcatacatttgctttcgagttttgaccttttatgatcttttggttccttgcaaaaagtcagctaagctgaatttcaac

SEQ ID NO: 9303 - DNA, 1334 bp, Glycine max
  Clone ID: 700844117_FLI
attccaaccctgactctgcttggatcattgtccacggtcacgtctatgattgcacccgcttcctcaaagatcaccccggtggtactgacagcatcctcatcaatgctggcaccgactgcaccgaagagtttgacgccatccattctgacaaagcaaaaaaattgcttgaagattaccgaatcggggagctcatcaccactggctacacctcagactcatcgcccaacaactccgtgcatggcaattccgaattcactcatttggcccctattaaggaatctacaacaccaccatcacgtagtgtggctctcaacccacgcgagaaaatcccatgcaagctcgtgtcaaagacctccatttctcatgacgcgaggctattccgttttgcattaccctcagaggaccaactcttgggattatccgtggggaaacacattttcttgtgtgccaccatcgacggcaagctatgcatgcgagcctacactccaacaagtagtgtggatgaagtgggtttctttgatctactcatcaaggtgtacttcaaaggtgtgcatcccaagtttccaaatggaggactcatgtctcaacatttggactctctacccattggatccatgttggacgtgaagggcccattaggtcacatagaatacaccggaagaggcaacttcatggttcatggaaaaccaagattcgccaagaggttggccatgttggctggtggaactgggatcacgcccatttaccaagtggcgcaagcgattttgaaggacccagaggaccacaccgaaatgcatgtagtgtatgcgaatcgcacagaggatgatatattactgagggaggagttggatgagtgggcgaagatacataatgaccggttcaagctatggtacgtggtggaaatcgcaaaggaagggtggaaatacagtgtagggttcatcacagagagtatcacgagggagcaccttccaaaagcgtcgagggattccttggctttgacatgtgggccaccacccatgattcagtttgcagtgcagcctaatttggagaaaatgggatatgatatcaagaacgatttgcttgtgttttagggcatggagaagtagctagattgctagattgtgttgtgtattgtatttgtttgtgtatcgggtgttattggagtattaatgtttgtttcattctttataagggtaaaaaaagaagtgaaaaattgtatatgaaccgagattgttgggaagtaactcttcatcccttctcacgctttaatgtagacaggtaagtcaagatttttttactactttagtgtaaataaattaatgttatatatgcct

SEQ ID NO: 9304 - DNA, 975 bp, Glycine max
  Clone ID: 700844132_FLI
gcagattctacaatcaggatgtcattgctgctgtgattcttggtactgggacaaatgcagcatatgtagaacgagcacatgctattccaaaatggcatgggcttataccaaaatcaggagatatggttataaacatggagtggggtaatttccgatcatcacatcttcctctaacagaatatgatctagctctggatgctcagagcttaaaccctggagaacagatttttgagaaattgatttctggcatgtatttgggggaagttgtaaggagagctttattgaagatggccgaagaagctgacttttttggcgatactgttccccccaaattgaaagttcctttcatacttaggacgcctgacatgtcagccatgcaccatgacacaagttctgatctgaaagtggttggaaacaagttaaaggatatattagagatctcaaacacatcccttaaaatgaggaagatcgttgttgaactgtgtgacattgttgctactcgcggagctcggcttgctgctgctggtattttgggcatccttaagaaaataggaagagacacagttaaggttggggagaagcaaaagtcagtgatagcgttggatggggggttgtttgaacactacaccaaatttagagaatgcttggagagtgcactgaaggaattgctgggagatgaggctgctgagaccattgtcattgagcatgctaatgatggctctggcattggtgcagccctcctggcagcttctcactcccaatatttgggagtggaggagtcttaaattttattgccaaacaagggaaagacgtgtaatactagtttcattttttgcataggtggtagatcaacacattgaagcaatggtgccttgcagctggtgactgggggggcattcattattttggtttcagtgtttgtttctccttcgttaaggaataatatcaaagatataaacttcatcttgagtgact

SEQ ID NO: 9305 - DNA, 2074 bp, Glycine max
  Clone ID: 700844449_FLI
ggccttcaatttcacccttcacacgtggtggtggtgttgttcttcttctcttcccctttctttttcttcttctgagcttgtttaagctctttctatttgattccattaacatatattatcacaatgtgtggtattcttgctgttcttggttgttctgatgactctcgagccaaaagggtccgcgtgcttgagctctctcgcagattgaagcaccgtggccctgactggagtgggctccatcaacatggtgactgctttttagcacatcaacggttagccatagttgatcctgcttctggggatcaacctctctttaacgaggacaaatccgtcattgtcacggtgaatggagagatttacaaccatgaagagctcaggaaacagctgcctaatcacaagttccgtactggatgtgattgtgatgttattgcacacctgtacgaggaacatggagaagactttgtggacatgctggatggtatcttctcatttgttctactggacacccgtgacaacagttttatagtggctcgggatgctattggggtcacttccttgtacattggatggggattagatggctctgtttggatttcatcagaaatgaaaggcctgaatgatgattgtgaacactttgagtgttttccacctggtcacttgtactctagcaaagaaagagggtttcgcagatggtacaatcctccttggttctctgaggctactccatccaccccttatgatcctctcgttttaagacacacctttgagcaggcagtcataaaaagattgatgactgatgtgccttttggtgttctactctctggaggtttggactcttcattggttgcatccgtcacttctcgctacttggccaacacaaaggctgctgagcagtggggatcaaagttacattcattctgtgtaggccttgagggctcaccagatttgaaggctgcaaaagaagttgctgactatctaggcactgtccaccatgagtttaccttcactgttcaggatggaatagatgccattgaagatgttatctaccatgttgaaacatatgatgtgactacaattagagctagcacacccatgtttctcatgtctcggaagattaaatcacttggtgtcaaatgggttatctccggagaaggatctgatgagatctttggagggtatctgtacttccacaaggcacccaacaaggaggagtttcacagagaaacatgccgcaagatcaaagcactccaccaatatgattgcttgcgagccaataaatcaacatttgcttggggtctagaagcccgtgtaccatttttggacaaggcatttatcaatactgcaatgagtattgaccctgagtcgaaaatgataaaaagagatgaaggacgaattgagaagtggattctgaggagagcctttgatgatgaagagcatccttatctgccaaagcacattttatacaggcagaaagagcaattcagtgatggagttggctatagctggattgatggccttaaggcccatgctgcaaaacatgtgactgacaaaatgatgcttaatgctggtaacatctaccctcacaacaccccaacaaccaaggaagcatattactacagaatgatctttgagaggttcttccctcagaactcagctaggctcaccgttcctggaggagcaagtgttgcatgtagcacagccaaagctgttgagtgggatgctgcttggtctaacaaccttgatccttctggtagagcagcacttggagtgcacatttcagcctatgaaaaccagaacaacaacaagggtgtagaaattgagaagattatacctatggatgctgctcctcttggtgttgcaatccagggataatataaagctgtgacaaagaataattgggggagaatgaactatgctaaacgtgtatgaaaaatttgcctgcagtgtacttttatcttggcaaagctttgtagtgtatagatatagatataaggctttctaaaagtgtagcgtattgtattatcttgaatgctgtgatttgaagtcttaataaaagtgtttctattatcagttc

SEQ ID NO: 9306 - DNA, 1485 bp, Glycine max
  Clone ID: 700845218_FLI
tgaatactaagttcccgtaggttgtcgtgattcatcacagcatattgtctctgaaattcagaaatgacatctgcaatgccaaggtgttggtggtgatgcattgccatcttacatgcgtggagctgtgtattgggaacccaacaagcctctcaccatcgaggaatttaacatgcctcgccccaaggccggtgaagttctcatcaaaaccaaagcctgtggagtatgccactctgatctacatgttatgaaaggtgaaattccgttttccagtccttgtgttgtggggcatgagattaccggtgaggttgttgaacatggagcactcactgacagcaaaaccatagaaaggcttccagttggatctcgagttgttggggccttcatcatgccttgtggcaactgctcctactgttcaaagggccatgatgatctatgtgaagctttctttgcctataaccgggcaaaaggaaccctctatgatggtgaaactcgacttttttttcgaaacagtggaaaaccagcattcatgtatagtatgggagggcttgctgaatactgcgttgtgccagcaaatggagtgtctgtattaccagactcattgccatatacagagtctgcaattctaggatgtgctgtttttactgcttacggcgctatggctcatgcagctcaagtgcgtcctggtgattctgttgctgttattggaactggaggtgttggttctagttgtttacagatagctagagcctttggtgcctcagatataattgctgtggatgtacgggatgaaaagctacagaaagcaaagacatttggtgctactcacactgtaaattcagcaaaggaagatcccattgaaaagatacttgaaattactggtggaaagggtgttgatgttgctgtggaagccttggggaaaccacagacatttgctcagtgcacacaaagtgtgaaggatggggggaaagctgtgatgattggactggcacaagctggttctttaggagaggtggatataaatcggcttgttcgccgaaagatacaagttattggctcatatggaggcagagcgaggcaagatcttcctaagttaattagactggcagaaacaggaatcttcaatcttggccatgctgtttctagaacatacacctttgacgaggcaggaaaagcattccaagatctcaatgaaggaaaaattgtcggtcgagctgtgatcgagataatatagctctatattcccagcaatgcttttctgcagcagcaatagctctgcttctcacaccctacaagatatacatgctttggagttgcaaggtgttggtgccctgagaacacaaatagatagatgtcctctgatgtgtcattgcagggacatgttcaaatgaaaactgtttttctttttgtgcattgctttgcttctaagttctaactcatgtaatcaaataggtacaccaaggtgaagaataatagtctctgaatgct

SEQ ID NO: 9307 - DNA, 1411 bp, Glycine max
  Clone ID: 700845275_FLI
tgataatcctccactcaagataagatttgtggacaacacggatcctgctggaattgatcatcagattgcacaacttgggcctgagctagcttcaacacttgtgattgtgatatcaaagagtggaggtactcctgagaccagaaatggtttattggaagtgcagaaggcctttcgtgaagcaggcttggattttcctaaacagggtgttgctataacacaagaaaattctttgttggataacactgccagaattgagggctggttagctagatttcctatgtttgattgggtgggaggtagaacgtcagagatgtctgcagttggcctgcttccagcagcccttcagggcattgatattagagaaatgcttgccggtgcatcattgatggatgaggctaataggagtactgtgttaaggaataaccctgcagctctgctggctttatgttggtattgggctacagatggtgtaggatccaaggatatggttattcttccatacaaggacagcctgttattattcagtagatacttgcagcagctggtcatggaatctctaggcaaggagtttgacttggatggtaatcgggttaatcaaggaattagtgtctatggaaacaaaggaagcacagatcaacatgcctatattcaacaattaagggaaggtgtacacaatttctttgtaacattcattgaggtgctacgtgatagacctcctggtcatgattgggaacttgaacctggtgtcacatgcggtgactacttgtttggtatgctacagggaacaagatcagctctgtatgccaataaccgagagtccatcacagttactgtacaagaagtgacacctagaacagttggtgctcttattgcactctatgaacgagcagtaggaatttatgcctcccttgtcaacataaatgcttatcatcaaccaggtgtggaagctggtaaaaaagcagcaggtgaagtactagcacttcagaagcgagtgttggcagtgctaaatgaggcaagctgcaaagaacctgtagaaccattgaccctcgaagaagtagcagaccgttgccatgctcctgaagatatcgaaatgatttacaagattatcgcacacatggctgccaatgacagagcattgattgtcgaaggcagctgtggttcaccacgcagcatcaaggtttttcttggggaatgtaacattgatgggttgtatgcatgagttagacgactaccagaattcatgttttggtaatgttgcaattgtgtttgaatacacggaccaacagaagagaagttgcctgcaataatttggtttcaatgttgaatctccatcattaacgaaagtggaaatttctgttaagacaaattcttgaaagtgttttggtgttctgaattggaactacgtgtaacc

SEQ ID NO: 9308 - DNA, 1427 bp, Glycine max
  Clone ID: 700846330_FLI
cagaattctctaaaagagatctttttctgctctttgaagaaagaagggtctttgcttgattttggagatgtctctgctctcagatctcatcaaccttaacctctccgataccaccgagaaggtgatcgcagagtacatatggatcggtggatcaggaatggacctgaggagcaaagcaaggactctcccaggaccagttagcgacccttcagagcttcccaagtggaactatgatggttccagcacaggtcaagctcctggtgaagacagtgaagtgattttatacccacaagccattttcagggatccattcagaaggggtaacaatatcttggttatctgtgatgcctacactcctgctggagaacctattcccactaacaagaggcacgctgctgccaaggttttcagccatcctgatgttgttgctgaagtgccatggtacggtattgaacaagaatacaccttgttgcagaaagatatccaatggcctcttgggtggcctgttggtggtttccctggacctcagggtccatactactgtggtgttggcgctgacaaggcttttggccgtgacattgttgacgcacactacaaagcctgtatttatgctggcatcaacatcagtggaattaatggagaagtgatgcccggtcagtgggaattccaagttggaccttcagttggaatctcagctggtgatgagatttgggcagctcgttacatcttggagaggatcactgagattgctggtgtggtggtttcctttgaccccaagccaattaagggtgattggaatggtgctggtgctcacacaaactacagcaccaagtccatgagagaagatggtggctatgaagtgatcaaagcagcaattgacaagttggggaagaagcacaaggagcacattgctgcttatggagaaggcaacgaacgtcgtttgacaggacgccacgaaaccgctgacatcaacaccttcttatggggagttgcaaaccgtggagcttctgttagggttgggagagacacagagaaagcagggaagggatattttgaggacagaaggccagcttccaacatggacccatacgtggttacttccatgattgcagacacaaccattctgtggaagccatgagcaaaacctgcatgttttctccctttggatggaaaggaacagttatgcttttcttagtaggatttggtctctctctctttttaccttttgattggtactatggttggtgccttgttggttggtgcaactaactggcaagggttgttcattgttttcttctattcctttccctcgttttccgattgttacaatgacaataatttaatggttattatcagtcttgaacaaagaaatgctgattgtgaagtataataataatatatgaaattgtcatgttcattggagtagg

SEQ ID NO: 9309 - DNA, 1694 bp, Glycine max
  Clone ID: 700846348_FLI
atcagagggagagagagagtgtgaaagttggaatggcgaaaaaggcagtgttgatcggaataaactacccaggaacaaaggcggagctgagaggatgcataaacgacgtgtggagaatgcatcgctgcctgatcgagcgatacggtttctccgaagacgacatcaccgttttgatcgacacggacgagtcctacacggagcccaccgggaagaacatccggtcagcgctgaccaggctggtccgatcggcggagcccggggacgttctgtttgtgcactacagcggacacggcacgcgcctccccgcggaaaccggagaggacgatgacactggttatgatgaatgcattgttccttctgacatgaaccttatcaccgatgatgatttcagagaatttgttgatggggtccctagaggttgcaggatcacaattgtgtctgattcttgccacagtggtggcctacttgaagaagctaaggagcagataggagagagcacaaagggagaggaggaacaatctagctctggctttggattttcaagttttctacatcggactgtggaagatgccattgagtctcgcggattccatatcccttcagcgttgcgccacaacagaggcagggatgatgatggtgatgaagctcaaaatagggatattgaacttccggatgggggctatgtaaagaacaggtctttgcccctttcaaccctcattgatatactcaagcagaaaactgggaaagatgatatagatgttgggaaactgagacctacccttttcgatgtttttggggaagatgctagtcctaaagtgaaaaagttcatgaatgttatttttaacaaactccaacatggaagtgatgaaagtgggggtggaatattggggctggtgggtggtcttgcccaagagtttctcaagcaaaagcttgatgacaatgatgagggatatgcaaagcctgcactggagacaaaagtggaaagtaagcatgaggcatacgctggaccaaccaaacgcggccttccggatggtgggatattgatgagtggatgtcagactgaccaaacttctgcagatgcaagtcctgcaggcaacgctgccagtgcttatggtgcttttagcaatgcgatacaggctataattgaggagactgatggtgcaatcacaaaccaagaacttgttcaaagggcaagagagaagctgaagaactccggtttcacacaaaaacctggactctattgcagtgatcaccatgttgatgctccttttgtgtgttgatctcttctcatctgatgactgatgcagagaaagagagaataatgtgtgttgtttatagtatgcttgtgtattgctgtatatgtttggacaatcaaattgaagttagtgtgttttcatacagttttcctatgcatcactattatcaggtacggaccattccctccaacattttagcacttctaatgtctccgctgattacagcattatggtgtatttgctgctacttgaccattttgcggggagaccaaactatcagagcaagttctatgcaccaaaccacagacttcggctctgtaaatctgaataaaatggtgtatgtgaaattattataaaatatatggttaagttttgtatttcctttgcaacattcttgcaactttgtaaggattttaatttgttgaacttagttgtagt

SEQ ID NO: 9310 - DNA, 810 bp, Glycine max
  Clone ID: 700846408_FLI
tttttttttaaaaaaaaaaattcctttaaaaaatgaagaatactatcttcttcgctctctttcttgtttgtgccttcacctcatacctaccttcagccaccgctgatactatcttcgacataaatggtgattttgtccgaaacggtggcacatactacatcttgccagttataagaggagacggaggtggaatagaattcgccgcaacaggaaacgaaacatgccctctcactgtagtgcaatctccccttgaggtctctaagggtctaccactaatcatttcatcaccattcgaaatccttagcatccaagaaggccttattttgaacattgggttcacttttgtgcccccctgtgccctaattccttctgagtggactactgttaagggtttaccagaaggactcgctgttaaacttactgggtatgaaaataaagtgcctggttggtttaaaattgagagagtttcccttgaattcaatgactataagcttgtgttctgtgcaactgaagatagcacgtgtgtggatattggggtttatattgatggtgaaggaaacaggcgtttggtggtgactgagaataatgatccgttattggttcactttaagaaagttgaagttgaatcatcagctactgcttgaggtggccttaaaaaatcatgtggtttctcgtagtgtaagactgaataaatgctttggttgtaatgattaattcaagactgaataaaataagaatagtgcctttacgaatttctgtaacacgaaatatgtaatacgtgtaaagatggagctatattcaatgtccgtt

SEQ ID NO: 9311 - DNA, 883 bp, Glycine max
  Clone ID: 700846427_FLI
gttaagggagagaaagcggatccgttgaaggttttggagagaatacagaggaagagtcacagacaggtcgagcttctttctccgatcccgaaaccgcaagaggagaagaaggtccaagaggaagaaaagcccaagcccacacccgaagagaagaaagaagaggctcagattgtgatgacggttctgaaagttggcatgcactgcgaagcttgctctcaggaaatcaagagacgcatacagagaatgaagggagtggaatcagcagaacccgatctgaagaactcacaagtgagcgtgaagggggtgtacgatccagcaaagttggttgagtacgtgtacaagagaaccggaaagcacgcagtgataatgaagcaagagccagaaaagaaagagaaagtggaggaagcaaaagaggaagagatgaagagtgatggcgaaggggaagaaaacaaagagaagaaggaaaaagaagaggcaaagggtgaagaagccaaagcagaggaaccaacaacaccaacaattactgaagacaccaacaaggttgttccagaggttaagattaatgaatacttctataacccaccaaggtatggcatggaggtgtatgcatatcctgcacaccctgcacacccagggtatttccattcctaccctccccagattttcagcgatgagaacccaaatgcctgcactgtcatgtaaaaattgaaggtgtcaggggtgatatgggaattaggggaaattgtgaagtttggtgggggatatgaatatagataccctttcctgtgttacctgtactgtgaaagtacaatgtatgcataagctatagaattttgtaagactttctggttccttgtttaagtagaatatactatattacttt

SEQ ID NO: 9312 - DNA, 948 bp, Glycine max
  Clone ID: 700846438_FLI
atgattgtagatgatgagatcaatgccgcacttgttagacctattcctcatggagctaagctacatgcactaattgatgcctgccatagtggcactgttctagatttgccatttctttgcagaatgaacaggagtgggcaatatgtatgggaggaccatcgccctagatccggtgtatggaagggatctagtggtggagaagttatctgcttcagtggatgcgacgatcatcaaacttcagctgatacatctgctctatcaaaaattacatcgactggggcaatgacattttgcttcatccaagccatagagcgtggccatggggctacctatgggagcattcttactgcaatgcgcacttccatcagaaatgttggcggcggcggcggcggtaccgggggtggtgatgtggtaacatcccttctctccatgcttttgactggagggagtctcagcggtgtcggtggactgggacaggaaccacagttaacagcttgcgaagcatttgatgtgcatagaaaaccttttcattatgatactcaatattctttattctgcaatttgttttcctaggctctgcccctgtataccactacattgattacaatgattaatatattataaagtagagaggattcttttttcgtaaatcactgaggatgtgtttggatgaatttatgtctgcccttgagaatgtgacatgctcttgtaataatgactttggttgctgctgcaatccttggatgaaaatgctgattcgactcagatttgaattccacataagaggtgagcatcttaaccctggataaattaggaggtgtgcgtgtgaccccaattttacttcgtgaaaagtgtcaataatgacttgaaagtgatggtctcgtactgatcatacatcatgtgcataaatttgatgtaattacttgtatagtatgtttttggaacaac

SEQ ID NO: 9313 - DNA, 1329 bp, Glycine max
  Clone ID: 700847753_FLI
ctgaaattgtgctctcaattgaagcaatggaagtaacagctgctccagtgccttatgtccaagaaattgcaaaggaggcattgaccatagtgcctgagcgttatgttcgaccagttcatgaacgtcctatattatctaactctacacctttacctgaaattcctgtcattgacttgagcaaattgttgtctcaagaccacaaggagcatgaactcgacaggcttcactatgcatgcaaagaatggggtttctttcagctaattaatcacggagtggactcttcattggtggaaaaagtgaagagaggtgctcaaggattattcgatcttccaatggaagagaagaaaaagtttgggcagagagaaggagaagctgagggatatggtcaactcttcgtggtttcagaggaacagaagttagagtgggcagatttgtttttcatgttcactttgccaccaaacaagaggaaaccccacttattccccaaccttcccctgccattcaggggtgatttagacgcctattgtgaagaattaagaaaacttgcaatccagatccttgaccagatggccaattctcttgcaatagacccaatggaaataagagagttatttggtgaagcagaacaatcaatgaggatgaattattatccaccatgtccccaaccagagcttgtgatgggactcaatcctcattctgatggtggaggcctcaccatccttctccaagccaatgaagtggaaggtcttcaaataagaaaagatggactgtggattccagttaaaccccttcccaatgctttcatcataaaccttggtgacatgttggaggtgatgagtaatggaatctaccaaagcatagagcacagggcaacagttaactcagagaaagagagactttccatagccacattttatagcactgctatagatgcaattatatgtccagcaccaagccttgtaactccaaaaacaccagcaatgttcaaaccaatcagcgcgggagattacttcaaaggataccttgcacaagaacttcgcgggaaatctttccttgacaccataagaattcatgctgaaaatgagaatagctcttagaacttcaaaaatggatggaaaacattaaattttaatgtacgacacaggcttctgtatttggcaatgcatttacttttgcagtgaagcatgtcattccaacagctattgtatgagtaaattgaggccatgtccaaaaatgagaggcttttaaacaaagttaataaatcattaataaagataattattataaaaattattaagatggaatgtggattccggttcaatctcttcc

SEQ ID NO: 9314 - DNA, 1759 bp, Glycine max
  Clone ID: 700847764_FLI
cttacttgaagttgtgctattcaatcccaaagccacagaaataatattattcagattttagagactgaaaacatcatggccaacctcgacctcgacccattccagacaagcatcttaatcctcgtcccaatagcactcctggtggcgttactatctcgtactcgtcgaagagcaccctacccaccaggcccaaagggtttaccaatcataggaaacatgttaatgatggagcagctaacccaccgcggcctcgccaacctggccaaacactacggcggcatcttccacctccgcatggggttcctccacatggtcgccatctccgaccccgtcgccgcgcgtcaggttctccaagtccaagacaacatcttctccaaccgcccagccaccatcgccatcagctaccttacctacgaccgcgccgacatggcttttgcccactacggccccttctggcgccagatgcggaaactctgcgtcatgaagctcttcagccgcaagcgcgccgagtcctggcagtcagtccgcgatgaggtcgacgccgccgttcgcgccgtcgctagcagcgtcggaaagcccgtcaacattggagaattagtgtttaacctcaccaagaacatcatctaccgcgccgcgttcgggtcgagttcccaagaaggccaggacgagttcattaaaatactgcaggagttctccaagctctttggcgcgtttaatattgcggattttataccctatctcgggtgcgtggatccacaaggtttgaactcgagactcgctagggcacgtggcgcgctcgatagcttcattgataagatcatcgatgagcacgtgcataagatgaagaatgataagagcagtgaaattgttgatggagaaacggacatggtggatgagttgctggcgttctacagcgaggaggcgaagttgaacaatgaatcggacgatttgcagaactctatcagactcactaaggataacatcaaggctatcattatggacgtgatgttcggaggcacggaaacggtagcgtcagcgatcgagtgggccatggcggagctcatgagaagcccagaagatcaaaagcgggtccaacaagagctggcggatgtagtgggcctggaccgtcgggccgaagagtccgatttcgagaaactcacttatctcaaatgtgccctcaaagagaccctccgcctccaccctccgatcccgctcctcctccacgagacggcggaggacgcgacggtcggcggttacctcgtccccaagaaggcgcgtgtcatgatcaacgcgtgggccattgggagggacaagaacagctgggaggaacccgagagcttcaagcccgcccggtttcttaaaccgggcgtgcccgatttcaaagggagcaacttcgagttcattccattcgggtcgggtcgcagatcctgccccgggatggtgttggggctctacgcgctcgagttggcggtggcgcacctccttcactgcttcacgtgggaattgccagatgggatgaagccaagtgagatggacatgggtgacgtgttcggactcaccgctccaagatccacgcgactcattgctgtgccaaccaagcgcgtggtgtgccctctcttttaaaaaaacaacaatttggatcttttttcttccttttttttgtattttctttttatccctcaattatacataatcatattaaaataatataaagggaaaaaaggcagctacacaataagaatgtgggagtatttggaag

SEQ ID NO: 9315 - DNA, 1604 bp, Glycine max
  Clone ID: 700841855_FLI
cagattcagatttatattggaatctggatattttgtcttctcaagtgcatgcgcgattgtgcactgtgtaactcccattttataagccaataaagatgcacttgagaagacaaaatatccagattcagatttatattggaagaaatttgaggataaataccacttttcatgccaatttactgctgacctaatagccatgaataatgctgattttatcatcaccagtacataccaggagattgcaggaacgaaaaatactgttggccagtatgagagccacgctggttttactcttcctgggctctatagggttgtccatggcattgatgtttttgatcccaagttcaatattgtctctcctggagctgatatgtcaatatatttcccctactctgaaaagcagaacagacttacagccctgcatggttcaattgaacagctattatttgctcctgagcagactgatgaatacattggtttattgaaagacaagtcaaagcccataattttctccatggcaaggctagacagagtaaaaaacataactggattggtagaaagctttggtaagaacagcaaattgagggaactggtcaaccttgtcatagtagctggttatattgatgtaaagaagtccagtgacagagaagaaattgcagaaattgagaagatgcatgagctcatgaaaaagtataacttagttggtgattttcgttggattgctgcccaaacaaatagggcacgtaatggggagctgtatcgctacatagcagacacacaaggtgctttcgttcagcctgctttctatgaagcttttggacttacagttgtggaggccatgaattgtggactccccacttttgctacttgccatggtggtccggctgagatcattgagcatggtatatcaggattccacattgatccttatcaccctgatcaagcttcacagctattagttgaatttttccaaaagagcaaggaggacccaagccattggaagaaaatatctgatggtggtcttcaaagaatttatgaaaggtacacgtggaagatttattccgaaaggcttatgactttggcgggagtttatagtttctggaaatacgtttccaaattagagaggcgtgaaactcgacgatatcttgagatgttctatatcctcaagttccgtgatttggcaaattctgttccgctagctaaggatgatgcaagttaactagctatataatttcaccaaaggcttgacagcagacataataagagtcatttatgtaaatataatagtctgcttctcgtgttttgaaatctagtgaggcgacctagaggagtttcatggaagacttgtcttgtctatgttaacttcgattatgtaagagatggcgagcactggttgttgaatttggatgtctcttgttttcgtttgattagtagtcatcaatgatatagacctggaaattacctgtgactgaggattgttatccttactgatgggtaagaataaagcattatgaatcaatggcctaatgatctgtattgtggcactgtataatgttaatgtatatgatgagacggtctagccaacccactgttgggttgggtgt

SEQ ID NO: 9316 - DNA, 1526 bp, Glycine max
  Clone ID: 700841876_FLI
ggcacaattcctacctgactgggaatcagctgagcagcgattgcagtgatgtgccaatcataaaggctttgcaacgaggtgtgcgagtaattgaactagatttatggccaaattcaactaaagatgatatcgacgtagttcatggaaggacacttactgctcctgtctcacttatccaatgtttaaagtccataaaagagtatgcttttgctaaatctgactacccagtcatcataactttagaggaccaccttacaccattccttcaagctaaagttgcagagatgatagctcaagtatttggagacatgctctattttcctcaggcagattctctgacagaattccccacaccagaatcgttgaaaggtcgaattcttatatcaaccaaaccaccaaaagaatatcttgaatccaagcaattcaaggatagtgacagtgagagggaatcaactgaagaaggatcattatccccatgtgttatccctgaattggaggctgttgatgagaagttaaatggaagtgatcttgatgaggaaggcttgaatgctcgtgataaaaaatcagaccaacagagtgcacctgagtacaaacgtttgattacaatccatgctgggaagccaaagggtcatgtaaagcaccacttgaacaatgttgggggcgtgaagcgcttgagcttgagcgaacaggaacttgaaaaggcttctgctacttatggatcagatattgttagatttacacagaagaatattatcagggtgtatccaaagggaacacgtgttacctcctcgaattacaggccacatataggatggatgtatggagctcagatggtggcatttaacatgcaggggcatggaaaatcactctggtacatgcaaggcatgtttagagcaaatggcgggtgtggttatgtgaaaaagcctgcatttctaatagaaaaaggtccacataatgaggtttttgatcctaaaagagcattgccagtgaagaaaacattgaaggtgaaagtatatatgggaaatgggtggagctcagatttcagcaaaacacactttgattccttctctccaccggacttttacacaaaggtttgcattgttggagtaccagctgataaagccaataagaagaccaaggtaattcaagacaactggtttcccgtctgggacgaagagtttgaatttcccttgactgttccagaactagctttgctccgaatagaagttcgagaatatgataagcatgaaaaggatgactttggtgggcaaacatgtttgccaatctctgagttaagatctggtttccgtgcagtccctctatttgatcagaagggcgagcaattaaaatctgtaaagcttttaatgcggtttcagttcaaatgaactacaaagattagccattatttaggcatgtaacatgatataatattcctaggtggttttccttttgactagtgtgactaggggcatcaagaagattgttttaactatattatgggcttaagaggtttatttatctaactt

SEQ ID NO: 9317 - DNA, 737 bp, Glycine max
  Clone ID: 700841903_FLI
gaaaaaagaaagcacgttgaagattgtaacttgtaacaacaactatggctagcgatggcagcgaagagttcaggctagtgtcaccggcgttcaaaaacggggggaagttaccgaggcactacaccgacgatggtcagggtacgaagaagaacatatcccctccattggagtggtataacctcccggaggggacgaagactcttgccctcgtggtggaggatattgatgcgaccgattctggtgggcccatggtgccatggactcactgggtcgtcgcaaacatcttggccacggtgaagggcttgccggagggattttccggcaagtcggccgagatggggggcgactacgcggcgatcaaggaggggaacaatgacctgaaggtgcctgggtggaatgggcccaggctgcccacgcctggacacaggattcagtttaggctctatgctttggatgatgagctcaagcttggtaacaagttgacgaaggagaagttgttggaagataccattgaaggacatgtgttaggagaagcgaccttgatggctatattctaatgtaacaacatattgtgggtgcattgtctttggctttatacatgtaccattttaaaagtgttaggagaagcgaccttgatggctatattctaatgtaacaacatattgtgggtgcattgtctttggctttatacatgtaccattttaaaagtgtgtcatcaacgagataaacattttacc

SEQ ID NO: 9318 - DNA, 1375 bp, Glycine max; identical to SEQ ID NO: 9297
  Clone ID: 700841967_FLI

SEQ ID NO: 9319 - DNA, 185 bp, Glycine max
  Clone ID: 700842062_FLI
ttgaatgccggcaacgcagcctctctccctggcaaatgtggcgtcaacatcccttacaagatcagcacctccaccaactgcgccaccatcaagttctgaagggtggatctagtataaggaagaaactgcagggcagtttttcagtcgcaggatactatatatcataatgttgtaaaatttatatt

SEQ ID NO: 9320 - DNA, 147 bp, Glycine max
  Clone ID: 700842101_FLI
agactccagacacagacttgtatatatcatggctttctagtttctatacgaaaaattatactgtaatgttgaaaatagctacatgtatcatacttgcatggttagtgtgaaattttcttcagagtaatggagttcgattggttcttt

SEQ ID NO: 9321 - DNA, 909 bp, Glycine max
  Clone ID: 700842114_FLI
gtttgtttgtctgtcacgagactcatacattgtgctgccaattatagtaactctctatttctctttccatctctcaagttctgaagaagaaacatgtgtggaggtgctatcatctcagacttcattggtgtgaagcgtggccgcaacctcgccgcgcaggaactatggtctgagcttgaccctttctctgacttccttggcttcgataccaccaattccaaaaaccaaccacccctgcagaaaattccagacaaaaaagtggtgtcatcatgtgagaagaagaagaaaagcgtggtgggtgcagaaaagaagaagagtgatagtgggcgagctcgtaaaaacgtgtacagaggaatcaggcaaaggccatggggcaagtgggccgcggagataagggacccacacaagggtgttcgtgtctggctcggcaccttccccaccgccgaagaagccgcccaagcctacgacgacgccgccatacgcatccgcggcgacaaggccaagctcaacttcccggccaccaccatttccgccgccgccgctccgccaccttccaaaaagcaacgctgcctcagccctgacatcatcactgaagaaagcagcagcagcagctcacattccaccactggatccaccggcgaaagcggcggaggaaacgacgaactcgacctgaaacaaattgaatggtttctaggtttggagaatgagctgcctgttagcaacaacattggtgctgagtgggacaacatggatgacctgtggatgctggacgacgtcgttgtgcccaaccgtcacttaatttactagaaggctaataattaataaatggcgttttcttaagttttagttttactttataaattgtagtataaaactatgttggtatttgtgttcttagttttcttctgc

SEQ ID NO: 9322 - DNA, 1400 bp, Glycine max
  Clone ID: 700842281_FLI
ctcagccatgaacatggtgaagcacccaaacatcgtgcagcttcacgaggtcatggcgagcaagtccaagatctacatcgccatggagctcgtccgcggcggcgagctcttcaacaagatcgccagaggccgtctccgggaggagatggccagactttacttccaacaactcatctctgctgtggacttctgccacagccgcggcgtctaccaccgtgacctcaagccagagaaccttctcctcgacgacgacggcaacctcaaggtcaccgacttcggcctcagcactttctccgagcacctccggcacgacggcctgctgcacactacgtgcggcacgccggcctatgtcgcgcccgaggtgattgggaaaagaggctacgacggcgccaaggccgatatttggtcttgtggcgtaatcctctacgtacttcttgctggttttttacccttccaggatgacaacctggtggccttgtacaagaaaatttaccgcggtgacttcaagtgtccgccgtggttctcctccgaggcgcggaggctcatcaccaagctcctcgaccccaacccgaacacgcgaatcacaatttcaaaaatcatggactcgtcgtggttcaagaaacccgtgccgaagaacttgatgggaaagaaaagagaggaattggatctggaggagaagattaaacagcatgagcaggaggtttctactacgatgaatgcttttcacatcatttcgctctcggaggggttcgatttgtcgccgttgttcgaggaaaagaagagagaagagaaagagttacggtttgcgaccacgcgccccgcgagcagcgtgatttcgagattggaagatttggcgaaggcggtgaagttcgacgtgaagaagagcgagactaaggtgaggttgcagggtcaagaaaaagggcgaaaaggtaaactcgctattgctgcggacttgtacgccgtgacgccgtcgtttttggtggtggaggttaagaaggacaacggtgacaccttggagtataaccagttctgtagcaaggagcttcgtccagctcttaaagatatcgtgtggaggacttctcctgcagagaatcctacactcgcttgaagaacaaccaagactcccatgctaattgtcgttcctttgtagttgtttttgttaattcttgtttcaggactgagatattttagttatttgcttgcttctttgttatgttttggcctctggggtgtgtcgtcttttacccagaaaggggaattgttgaaaaggcgaatgcagtaatgaaccgaaatggacatcgaggagttgttgtcgatgatgattcaggtacatgtgctgcgtgttgttgtgctcgtgggtgatgttgttgctatgttggcgtgattgtgaatatgtttgc

SEQ ID NO: 9323 - DNA, 2804 bp, Glycine max
  Clone ID: 700842448_FLI
gatcatacatagtagtgttggtgggttgcaaagatgcttgggggtcttctccataggggtcataagataaaagggacagtggtgttgatgcgcaagaatgtgttggacgtgaatagcgtaaccagcgttgggggaattattggtcaaggtctcgacttagttggctcaacactcgatactcttactgccttcttgggccgatccgtgtctctccagcttattagtgctaccaaagctgatgccaacggaaaagggaaacttggaaaggctacctttttggaaggtatcattacttcattgccaactttgggagcaggccaatctgcattcaaaattaattttgaatgggatgatgggagtggaattcctggagcattttatatcaagaattttatgcaaactgagtttttccttgtgagtttgactcttgaagacattccaaaccatggaagcatccactttgtttgcaattcgtggatttacaatgccaaactcttcaaaagtgaccgcattttctttgccaaccagacatatcttccaagtgagacaccagctccactagtcaaatatagagaagaagagttgcataatttaagaggagatggaactggagaacgcaaagagtgggaaaggatctatgattatgatgtctacaatgatttaggtgatccggataaaggtgaaaatcatgcccgtcctgttcttggaggaaatgacacctttccttatcctcgtagggggagaactggtagaaaaccaacaaggaaagatcctaatagtgagagtaggagcaatgatgtttatcttccaagagatgaggcttttggacacttgaagtcatctgactttcttacttatggactaaaatccgtatctcaaaatgttcttccattattgcaatctgcttttgatttgaatttcacaccccgtgagtttgatagctttgatgaagttcatggactctattcaggcggaattaagctgccaacagatataatcagcaagattagtccactacccgtgcttaaggaaatcttccgaactgatggtgaacaggcccttaagtttcctcctcctaaagtaattcaagtgagtaagtctgcatggatgactgatgaagaatttgcaagagaaatgcttgctggtgtaaatccaaacttgattcgttgtcttaaggatttccctccacgaagcaagctagatagccaagtctatggtgatcatactagtcaaataaccaaagaacacctagagcccaacttagaagggctcactgtagatgaggcaattcaaaacaagagattgttcctactagatcatcatgacccaatcatgccatatttgaggcgaataaatgcaacctccacaaaggcttatgctaccagaaccatccttttcctgaaaaatgacggaactttaaggccacttgccatagagttgagtttgccacatcctcagggagatcaatctggtgcttttagtcaagtttttctgcctgcagatgaaggtgttgaaagttctatttggctgctagcaaaggcttatgtagttgtgaatgactcgtgctatcatcaacttgtcagccattggttaaacactcatgcagttgttgagccattcatcatagcaacaaacaggcatctcagtgttgttcaccctatttataaactccttcaccctcactatcgtgacaccatgaacataaatggccttgctcggttatcactggtcaacgacggtggcgttatagaacaaacatttttgtggggaaggtattctgtggaaatgtctgctgtagtttacaaggattgggtttttacagatcaagcattgcctgctgatcttataaaaagaggaatggcaattgaggatccatcgtgccctcatggcattcgccttgtgatagaggactacccttatgctgttgatggacttgagatatgggatgctatcaagacatgggtccatgaatacgttttcttgtactacaaatcagatgacacacttagagaagatcctgaactccaagcctgctggaaagaactcgtagaggtgggtcatggagacaagaaaaatgagccatggtggcctaagatgcaaactcgtgaagagctagttgaagcttgcgctatcatcatatggactgcttcagcacttcatgcagctgttaattttggacagtatccctatggaggtttaatcttaaaccgtccaactcttagtaggcgattcatgcctgagaaaggttctgctgagtatgaggagctgaggaagaatccccagaaggcttacttgaagactattacaccaaagtttcagacccttattgacctttctgttatagaaatcttgtcaaggcatgcatctgatgaggtgtaccttggggagagggacaatccaaattggacatctgatacaagagcattagaggcttttaaaaggtttggaaataaactggcacaaattgagaataaactctcagagagaaacaacgatgagaaactgagaaaccgttgtggaccagttcaaatgccttatactctgcttttgccttctagtaaggaaggattaactttcagaggaattcccaacagtatctctatctgaagaggtttgtggttccttaagttttgtggctttgaataaaagatagaagagaaggaatctgaatttcttcatccaacctgcacatggtaatctagtgtgtttgagtgctttcatgtttggctttaataaaataaaagcagttgttttgtaaaatgttcagaatcaataaaagcatttactgctttgctttgtgcgct

SEQ ID NO: 9324 - DNA, 1133 bp, Glycine max
  Clone ID: 700842514_FLI
ccggaggattaggcctccgagcattgtccaaagaccaattggacgagattcttaaaccagcagagtgcactattgttgcatcactttcaaatgattatgttgactcttatgttctgtcagagtcaagcctgttcgtctatccttataaaattatcatcaaaacttgtgggactaccaaattgcttctgtccatccctgtcattctcaagttggctgatgctcttgacatagctgtgaaatctgtgaggtacactcgtggaagcttcattttccctggggcacagtcttttcctcaccgcagtttttccgaggaggtttctgttcttgacagctatttcagcaaccttggttctggtagcaaagcatatgttatgggtgacccttcaaagtcacagatttggcacatctactctgcaagtgcacagaccaaaggatcatctgaagctgtctatggcctagagatgtgcatgaccggtttagacaaggaaagtgcttctgtgtttttcaaggagaatacatcttcagcagcttcaatgaccgaaaattctggaattaggaagatccttccacagtctgatatatctgattttgaatttgacccttgcggatattcaatgaatggaatagaagggagtgctatatccaccatccatgtcactcctgaagatggtttcagttacgcaagttttgaagctgttggttatgactttaatgacatggctctaggtgaacttgtggaaaggattttagcttgcttttgtccagcagagttttctgttgctttgcacattgacatgcatggtgagaaacttaataaatttcccttagacatcaaaggatactactgtggtgagaggagcactgaagagcttggagtaggtggtgcagttgtgtaccaaacatttgttcaaggctgcgatggtagtgcatctcctaggtctattctgaaatgctgctggagtgaggacgagaacgaagatgaagtgagggagatataagtacttctggtttttatgttctgttgttatttatctttactgtcgagtgtgttattacctaaataaataaatatgggggttatgatgtgagtgaagcaatgaacttgttgtgtagcttcacttcacttgtgtgat

SEQ ID NO: 9325 - DNA, 934 bp, Glycine max
  Clone ID: 700842617_FLI
gcacaacaacttctccagcttcgttcgtcaactcaacacttatgtaatctaattattcttctctatcaattcctttcttttctctttttacatttttctgatttttcttaattttgcttgacttgtagggatttagaaaagttgtacctgaccgctgggagttctcgaacgagtattttcgaagaggcgaaaagcgtcttctctgcgaaatccagcgacggaagatcctctccgcatctcctccgccggcgggagcaactgccaccgtggcggttccgtcgccgctgccgctatctgcgatcccgacggcgaagccgatcgtgtcgccgtcgaactccgcggaggagcaggtgctttcgtcgaactcgtcgccggcgagagcaccggtggagctgttggacgagaacgagcggctgagaaaggagaacattctgttgacgaaggaattggtgaagatgagatcgctctgcaacaatatattcaatctcatgtcgaattacgctaacgctcaagcggacggtagttccgcggcggcggcgaagcggtgctccggcgaggatgcggtggaggagatgaatccgaagctgtttggggtggcgattggtaagaagcgagcgagagaggaggaaggacatggagcgaagtatgatacggctttgagtctgcatcagccgtttcatgcggacgtgaaatctgaagcgttggatttaccaggacgtggcgaaaataaaaaaacgccgtggctaaatcaatgtcatagagcaaatcagagggtgtgtaattgacacacgacgttgtaatagctaggtaacacgttaggttaagttaggggcgtcgtagagaatcagagtctgtaagcacggagacgcgcgtgtcaaatgtacgtcgttaaccgtttgggacttttttcgtagaagtttctcagaagaaaact

SEQ ID NO: 9326 - DNA, 386 bp, Glycine max
  Clone ID: 700842638_FLI
tgggtggtgaactatctccggcagatgccacgggggacgacgatgatgacggtgctgccggagcaagcgaagcggcacgtggcggacatggcggagtacgtggggcagaagacgaaggaggttgggcaagacattcagacaagggcacatcatgcccagggaacaacaaggatgacagtgcattgagttatcatgagacaagaaaatggtttcaatttatatcgcttatgtatgacttgtgagatatactagtatgtaattaacctttggtacgtgtgttttggactttggaggagttccattttcagtgttccatgttgtgtcactttctgtatttgctcatgtacgtgtaatcagtaatattaatgcatttttcttttgggttc

SEQ ID NO: 9327 - DNA, 1655 bp, Glycine max
  Clone ID: 700842658_FLI
gagcgctgctacaagagagagagagagagagagagagagagagagagagaagcatcgacaccaaaatcgcgaatctcgttcattgttgtgcttccgtttcgcgttggtgatcctcctctcgctgctctctccaccaccacacagagtgactcactcaccaaatagcaatggctgctcagaagcgttccttccctgatgctcctaacgataacaaccgccacgccaaacatcaccacgaagaagcaaaaactgaagaagaagaagaagaagaagaagaagaagcacaacaacaacaacagcatgatgaagaagaagaagaagaggataataattacaaatcagacgattctcctcccgaagacaaatccgaatatgtgtttgtagaacttctggaaatacgcaaagaagtccaatgtccaatttgcctaggtattattaagaaaacacgtactgttatggaatgcttgcaccgggtttgcagggaatgcattgacaagtcgatgcgactagggaacaatgaatgccctgcttgtcgaacacactgtgccagtcgtcgttctttgagagatgatccaaactacgatgccttaattgcagctttatatcctaatattgagaagtatgaacaagaggagcttgaatttcgtgaagaggacaagaaccgcaataagcaggcttcaattgcaaaagttgttcaacgacaatctgaagcactggttaagagacgtagagatacaccaggttcatttgtgacaagatcacagcgcaatcaacgaaatgttctctctaggagacaaaaccaagggatggataatcaaggatctgaagataatgaggaggaaaatgacaataatgaaaaggactcatcttccacagatgagcgatgtacagaactcaggcagagaaggcgaaagaggcggaccagaggtcgtccttctcagccctcatcatcgacggcaagtcctgatggtggatgcatagaaagtgacatggacataagaatttcttctagactggtgtcaaaacctcaaaaactaacttggggaaggggtggttttaggagtcacacacggcatggcagtggcaatggtagcaatagcaaaagttcccgcagtagtcgcttggctaagttagttgattatctccatagcttgaatgaaaacactgatgagttagatgtccatctcattcttttgtctttagacaaacaaattacaccaagcttgcagcagccacacctttgctgtcggccaacattgtctgtgaagcatctttgtgaatatgttgctcatcagacacctttgctgcttgaagaagttgagatattggcagttaaaggatgctgcagtacagtttgtgacaagtcatttgatgagacttcatcctctgatgagctaactacgctggttatagatcctagcaaagatgaactggaaactctgcaagggcatgaatctctggcagggattaaatctaaatgcatatctaaaagggagcatttgattctggcatacaggaggaaggaatgaacattatagacagttttgagatttatgaatgccagggcttattctgtacgtacataggaaaattttcgactacaaaactatatatagttaaataataatatgaacctcccgaaagattatatagac

SEQ ID NO: 9328 - DNA, 883 bp, Glycine max
  Clone ID: 700842694_FLI
gacgatagtccctcattggaggctgctatcaaacaatctagggaggaagaaaaggaaattctcattgctaaagctaccactgatgaattaaaggaggaaggagtcactgacagtgttttggttataacggaactactgaagccacttaaaaatgcagtcccttggtttcaagaaatcttcacatgggaaaggccaataattactcttgctgttcttgctgcatccttgatgatcacctatatggaatgggttggcaagacatttgcagttttcttgatttgggcaataataaagatgcttgatgcaagacagaaaaagattcatgataaaagtaacgagatagtaatcagtagatccagtatggcttctgatcaatctacgatggagagcattgtctcagcccagcatggattgtatactgttcatgacatgatgcagatagcaaacatagcaatgctaaagatatggtcaatacttatttcaaaggctgataagcatgcaaatttagtgatggtggcaatgagtggattggcaatcttattggcagtaattccattcaaattcttccttatggctctcattctccaaagcttcactatgacattaggaaagtcctctggaagtggaacagggaatagacggttaagggaatggtgggattcaataccaattgttcctatccgtgtagtagatgatcctaacactgttgatgctaaataactttttattcacccttattagattttctagtatataggtttaatgtatgtagcctttgccccataactgactttggtataatgggaactggttagtgtacaaagcaatatatagagaagacactgaaaatacatgtataaatagttgtgccttgtttgattgc

SEQ ID NO: 9329 - DNA, 643 bp, Glycine max
  Clone ID: 700842705_FLI
gagaactttcccatctgcagatccagcttggttctatcttcatgttggttgccaggtatctgcttacgccattggggttgctggctggggaactggcatgaaacttggaagcgaatcagtggggattcaatatagaagtcatcgctatattggaattgccctcttttgttttgcaacactacagatttttgcattgttcctgaggccagtgaaggatcacaagtataggtacatctggaacatatatcaccacagcgtcggatacagcatagttatcctgggaatcatcaacatcttcaggggctttagcatcttgcatcctgatcagaaatggaaatcaacttacactgcagttcttattgcacttggtgcagttgccttgttcttggaagtgatcacatggattgttgtgttgaagagaaagtcttacaagtccaccaaaacctatgatggatacaacaatggacaatctagggaagagccccttaacatataaaaatagagtgaacaaatttggcttggatgtgttttacttcttcccctccctctttcccgtccccttcttttacctttttttcttctatttatgacatatctttgtataatgcttgcgtatataatatagatttttcattctgtcttt

SEQ ID NO: 9330 - DNA, 715 bp, Glycine max
  Clone ID: 700842735_FLI
attgaggccttgccgagtgtggaaattggagaaggtaacgaagattcggagtgtgtggtttgtttggaggagtttggggttggtggggtggcaaaggagatgccatgtaagcataggtttcatggtaattgtattgagaagtggttggggatgcatgggtcttgccctgtgtgtaggtatgagatgcctgtggaggagattgattgggggaagaagagggaggaggaaggtggtgagaggagaaggagtgatggtggtgaagtttgggttagtttttctttcaataggagtagtagaagaaaccaagatcatgatcaagctgattctggtgattcaaatgatgatgatggttcttcatcaagtcatggagatggtgctgctgaagagagttagagaaggttttttttcttttttgtgtttttctggtagatcaaggttttaaattgcggtcacagttatggttttgttgcggtcggtctttgatgttgcaggaaactacagacaaatgcagtcgatgttgttggaattgaggtcgtggtggtgactccaaaaacattgattttgtggccaaaattgtgatcgttttttaaaatcttggggtagagtgttgtcggttttcaagttggggaggactggaaaatatgtacaggcaaaaatgcacaaaattgttattatatcttgtggtgataaataaaaatgatgattttttgctctt

SEQ ID NO: 9331 - DNA, 1975 bp, Glycine max
  Clone ID: 700842749_FLI
aaaaaacattgcccttgttctttcaaagttaccaaacacaagtacacaacacaacagcaacatatggcgtctgaacaattggctcgcagagagggtcaaagatcatgcaggaaaagccatgggagatattggtggacgtgggaaagccagagagactcacgagctgggtgcacactttgaatccctggctgacaaagtaactgaccatgcagcagccaatgtagttggaaacaaagagagtcaaagagaagctcgtggtggtgttcgtgatgttgggaagttcgaaatgagaactgaagggggagaaaaaggaaacaaggatagaccagaactgaaaacacgaaccagagaggtaataggaagaacggagaaagaaagaggaagagaaagtggaggacaagtagtggcagagaaaggaagagaaacagaaactgcaaggggaagggttggtgctgaaaatgaaggtgcaagaacaaccgctgttataacttgcacgttggaaaaaggtggtggtactcagaaaccaataagagaagaagagagagagagtgaaagtgaaagatcagcgtgggaacagatttccaactacagtgatcaagccacacaaggtgtgaaggaaaagtacgagagagcaaagcaagcagcaagcgagacactgaacaccacaacacaaaccgcacaagagaaaagcgcacaggcaaagaatcttgcagcacaagcaaaggacgcaacgttagagaagggtcagcaaggctatgctgtgacaaaggacaccatttcaagtgcagcgaaaaccgcttcggagaaaactgcgccagtggcagagaaggccaaagactacactcttcaggctgcggagaaggccaagagtgcgggtggcacaacggcgagttacgtcggagagaaagcggtgcaggccaaggatgtcgccgtggagagtgggaagagtgcggctgggtatgctgccaaggtggctgctgatttgagggacaaggccaccgcggtggggtgggccgcggcccatttttcggcggaaaagacggtggaagggaccaaggccgccgcccatgttgtcgagggagcggccgggtatgccggacataaggccgcggagcttgcttcgatgtcggccggtgctgttaaagggctggctgcttctgctggtgagactgctaaggaatacaccgcaaagaagaaagaggaggcacagcgggaattggaggccaaaaaaccatctcaacctcaggaagctgaagagaggccatcagaaggaattggcgaaactgtgaggcagtatgcacaaaaaccaaagccaagtgaaagaaaccctcagaaggagggaaccggaagcatcgtgtttacagcaataggcgaaacagtaagcagtgccggtgagaaggtaaagaaaccgtttaaaaacactatgggaggagaaagtgaaggaggaggagggaaagaagaggggaagagtgtcattggtaaaagtttgaccagcattggtgagaagctgggtgatgcaaaacagagagaggagctgttagacaacgtcactggcaacatcaccgagggaggaggcgaggtgttgggagcagtaggtgaaaccgttgctgagattggacagaacatgatgaagccagcggagatagttcaggaacgcgctcacgttcgacaagcgggtggggtcttggatgccattggtgaaaccattgctgagattgctgaaacgactcgagtcatggtttctggagaggacgagagagtgctgaggcagagcgtggtgttggagactcgcgtaactggtcgtgccaagcatgaagaagggtcgcacggtgcttgagtctcttgagtgaacgctgtgttttttaaggtttatttctgttaatgtcatgtttagtctgtgtcaagtttcatgtttcgggtttgttgactttgttctatggaattgtaaccaataagaatctccttttttgagatt

SEQ ID NO: 9332 - DNA, 658 bp, Glycine max
  Clone ID: 700842846_FLI
cctagctagggtttctgagtttatgtggttgcgcctctgcctgtaagagtgaaaaaaccttctcttttccttctctcaagtctcaagagatttcatcatggctccaaagaaggacaaggctccaccaccttcctccaagcccgccaaatctggcggtggcaagcagaagaagaagaagtggagcaagggaaagcaaaaggagaaggtgaataacatggtgctgtttgatcagggcacctatgataagctcctttctgaagctcccaaattcaagctcatcactccttccattctttctgatcgtttgaggattaatggatcacttgcaaggaaggctataagagaattgatggctaggggttcaatcaggatggtgtctgcccatgcaagccagcaaatttacaccagggcaacaaacacctaggtgtggaactgatcttagcttacggagtattggtaggaatagtaatgaagtattgttcttttgcactttgggaagcatctcatatggttctatcagttctagattgtcgctgaatccgatgctcagattgtatttttggtttccttcaatgttttatcttcttcaatattctggcagttgtcttatacttgttttgtttacttgaattgttaatgtggcagagattctttttgg

SEQ ID NO: 9333 - DNA, 901 bp, Glycine max
  Clone ID: 700842849_FLI
gaaggcatcgttagcagttttgtagattcaacctcaatttgcagagttacgttctaatatatttacacaagactgataagagaaaatgtctctgattccaagtttcttcggtggccgaaggagcagtgttttcgaccctttctccctcgatgtgtgggaccccttcaaggattttccatttcccagttctctttctgctgaaaattcagcgtttgtgagcacacgagtggattggaaggagacaccagaagcacacgtgttcaaggctgatattccagggctgaagaaggaggaagtgaagctggagattcaagatggcagagttcttcagataagcggagagaggaatgttgaaaaagaagacaagaatgatacgtggcatcgcgtggagcgaagcagtggcaagttggtgaggaggtttagattgccggagaatgctaaagtggaccaagtgaaggcttccatggaaaatggggttctcactgtaactgttcctaaggaagagattaagaagcctgatgttaaggccatagacatctctggttaatctatgttgctctgttccttcgttgaaatgtgtttatgttttcttattctgaggatcatttgtgtgagtcgtgtgaaaaatatttcaggttttatgttggctaagaggcctaatgtttgggccctagaaatctctggttaaactgtgtaaagatctgttacttggtttaaagtttgtgtgttttgttcacttccaaggaatttatgtgtgcaagaaagatgtaattgaaaaatttagcaatagactaatggttttatatattctatgttgcaataaatcttaggatatgtatatcactggaacagattcactatgccagtgtgtgagaaagcaatgatagttctaaatcctccc

SEQ ID NO: 9334 - DNA, 535 bp, Glycine max
  Clone ID: 700842857_FLI
ggaattttgggctagatgggctcatagggctctctggcatgcttcgctgtggcacatgcatgagtcccaccatcgaccaagagaaggacccttcgagcttaacgatgtatttgcaataatcaacgctgtccctgccatcgctctcctttcctatggtttctttaacaagggactggtccctggcctttgctttggtgcgggtcttggaattacggtctttgggatggcctacatgtttgtacacgatggattggttcataagagattcccggtgggccccattgcaaacgtgccctatctcagaagggtggcctctgctcaccaacttcaccattcggaaaaattcaatggagtgccatatgggctgtttttgggacccaaggaaattgaagaggtgggagggctagaagagctggagaaagagataagtaggagagcaagatcatacaaaatagctaatgagaacaactaatacaaatcaagaatgtttcgaagaattatcagtgtaaatcagaaatatgaaataaaatgatcc

SEQ ID NO: 9335 - DNA, 550 bp, Glycine max
  Clone ID: 700842889_FLI
ggaattttgggctagatgggctcatagggctctctggcatgcttcgctgtggcacatgcatgagtcccaccatcgaccaagagaaggacccttcgagcttaacgatgtatttgcaataatcaacgctgtccctgccatcgctctcctttcctatggtttctttaacaagggactggtccctggcctttgctttggtgcgggtcttggaattacggtctttgggatggcctacatgtttgtacacgatggattggttcataagagattcccggtgggccccattgcaaacgtgccctatctcagaagggtggcctctgctcaccaacttcaccattcggaaaaattcaatggagtgccatatgggctgtttttgggacccaaggaaattgaagaggtgggagggctagaagagctggagaaagagataagtaggagagcaagatcatacaaaatagctaatgagaacaactaatacaaatcaagaatgtttcgaagaattatcagtgtaaatcagaaatatgaaataaaatgatccaaaaattttgcttgc

SEQ ID NO: 9336 - DNA, 1305 bp, Glycine max
  Clone ID: 700842903_FLI
accaaggactatgccggtgacactgctcagaaaaccaaggactatgccggtgacactgcacagacatcaaaggactatgccggtgatgctgctcagaaatcaaagggctatgtcggtgatgctgcacaaaagaccaaagaatatgttggtgatgctgctcagaagaccatggattatgccactgatgcagcacagaagaccaaagattatgctactcagaagactaaggactatgcaagtgatgcaactgatgctgcaaaaaagactaaagattatgctgctcagaagaccaaggattatgcaagtgatgcaactgatgctgcaaaaaagactaaggattatgctgcgcagaagaccaaggactatgccagtggtggtgcgcagaagaccaaggactatgccagtggtgctgcgcagaagaccaaggactatgcaagtgatgctgcgcagaggaccaaggaccatgcaagtgatggtgctcaaaagagcaaagaatatgcgggtgatgtagcacagaatgccaaagattatgctcaaaagagcaaagattatgcgggtgatgctgtacagaatatcaaagattatgcaaatgatgcagcgcacaagagcaaagattatgctggtgatgcttctcacaagagcaaagaagcttctgattatgccagtgagacggctcagaagaccaaagactatgttggtgatgctgctcagaaaagcaaagaggcttctgaatatgctagtgatgcggctcagaggaccaaagagtatgctggtgatgccaccaagagaagcaaagaggcttctgatcatgccaatgacatggctcggaagaccaaagactacgccagtgacactgctcagagaaccaaggaaaaactccaagacattgcatctgaggctggtcaatacagtacagagaaggccagagaaatgaaggatgcagcagcagagaaggctagtgacattgcaaaggctgcaaagcaaaaatcacaagagctgaaagacaaattaggtggacaacaccgggatgctgagctttgagaattgagacggtttttaatcactttgtaccttttaattatgccacaatagttgtccaattctgccagaaataatattgtgtgcgtatatatataagggagtgtccgtctttgtgttatgtacggggtgtggtctgatatattagcaactacatagtcgaggttggaatattttgtattgaatatgatgttttctttatgtatagttaaaatataatagatactcagcatgtcatttctctgaataaagtgcccaatttgtagg

SEQ ID NO: 9337 - DNA, 534 bp, Glycine max
  Clone ID: 700842924_FLI
aaattttctttgggaaatatttctatgaataataataatatgtctaatgagatggtcccaaaattagagcaagagatgaaggagttaaaggagaggcatgaggaagaaatgaaccaaatgaaagagttgaatcaaaagcaagttgcagaattgaccatcatgagacaaaatcaagaaaaaatgatgttagaattatctttcatgagggaagttatgtgtagatttatgcatacggagttaccaacgcctaactttaatagaagctatggacaagtctctgattctaatggtggtcgtgaacgagcaccgcgagtaccacattagtcatgtcacttgcatagtatgggggaaatactacagattatcatggcactttgattttcagaaatccacttcactaggattataagccgaagtggaatattttgtttatagacactacttttgtatggtaaatgtgattagacttgttattggagaattggcactatatattagatttgtatggtattaatactgtgtcttttcaggttc

SEQ ID NO: 9338 - DNA, 1446 bp, Glycine max
  Clone ID: 700842936_FLI
ctagctagcaagcaagcacagagatggaggcaaagcgaggccatgccctcatgtgcttggcacgtgtttcactcttcctctgcgctctaaccctatccgctgctcacggaagcaccacggttcaagacatcgcgagaaagttgaaactcggggacaacgagcttctgcgcacggagaagaagttcaaggttttcatggagaattacgggaggagctactccacagaggaggagtatttgcgccgtttggggattttcgcccagaacatggtcagagcggcggagcatcaggcgctggaccccaccgccgtccacggcgtcacgcagttctccgatctcaccgaggacgagtttgagaagctctacactggcgtcaatggcggcttcccgtcatcgaataatgccgccggcggtattgcgccgccgttggaggtggacgggctgccggagaattttgattggagagagaaaggagctgtcaccgaagttaagttacagggtagatgtggatcatgctgggctttcagcaccacaggatctatagaaggagccaattttcttgccaccggaaagctcgtcagtcttagtgaacaacagctccttgactgtgacaacaagtgtgacataacagaaaagacttcatgtgacaatgggtgtaatggaggtcttatgacaaatgcctacaattatttgctcgagtctggtgggttggaggaggagtcttcatatccctacactggggagagaggtgaatgcaagtttgatccagagaaaatagcagttaagatcacaaatttcaccaatatccctgctgatgagaaccaaattgccgcatatttagtaaaaaatggtccacttgctatgggcgtgaatgcaattttcatgcaaacatacattggtggtgtctcatgccctctcatatgtagcaagaaaaggctgaaccatggtgtgttacttgtgggatatggtgcaaaaggcttctcaattcttaggcttggcaacaaaccatactggatcatcaagaattcgtggggggagaaatggggagaagatggctattacaagctctgcagagggcatggcatgtgtggaataaacactatggtttctgctgcaatggtgcctcaaccacaaacaacacctacaaagaattatgcttcttattagctatgcacttaaggaaatctaaataaatatttttcattctaggtgatgtatcatgtatgtaccaaaatattttggtacgtaagtcttttaaaaagtttgcatctcctctttggttttccttagttctgaaagttatctcctaagaagacaatcatatgtactgtacgtagtgtgaagatatagtattgtatgctgcagaatatgattgtctaataaggtggactagctgtaataaaagatatttccaggttgaaaacagagcaaatcatgttaaagagct

SEQ ID NO: 9339 - DNA, 2168 bp, Glycine max
  Clone ID: 700843132_FLI
aaatccgtcaacacgatccgcttcctcgccatcgacgccgtcgagaaggcgaattcgggtcacccggggctccccatgggatgtgctccgatgggtcacgtgctatatgatgaaaccatgaagtataaccctaagaaccctttctggttcaaccgcgatcgcttcgttctctctgctgggcacgggtgcatgcttcagtacgcgcttctgcacctcgctgggttcgatagcgtcaaggaagaggatttgagggaatttcgccaatgggggagcagaactccgggacaccctgagaattttgagactccgggaattgaagttacaacaggtcctcttggtcaggggattgccaatgctgttggtttggcccttgcagagaagcacttggctgcaagatacaacaagcctgacaatgagattgttgaccattacacgtatgctattctgggtgatggttgtcaaatggagggaattgcaaatgaagcatgctcacttgctggccactggggactggggaagctgatagcattttatgatgacaatcatatttctattgatggtaacacagagattgcgttcactgagagtgttgatagtcgttttgagggacttgggtggcatgttatttgggtaaagaatggaaataatggctatgatgatattcgtgctgccattaaggaagcaaaagctgtcaaagacaaacccacattaatcaaggtcacaacaaccattggttatggttctcctaacaaggctaactcctacagtgtgcatggaagtgcactgggtgccaaagaagttgatgccacaaggcagaaccttggatggtcacatgagccattccacgtgcctgaggatgtcaaaaagcattggagtcgccacacccctgagggtgctgcacttgaagctgaatggaatgctaagtttgctgagtatgaaaagaaatacaaggaggaagctgcagaattgaaatctattatcaatggtgaattccctgctggttgggagaaagcacttccgacatacactccagagagcccagcggatgccaccagaaacctgtctcaaacaaaccttaatgcccttgcaaaggttcttcccggtctgcttggtggcagtgcagatcttgcttcttccaacatgaccttgctcaaaatgttcggggacttccaaaaggatactccagcagagcgtaatgttagattcggtgttagagaacacggaatgggagctatctgcaatggcattgctcttcacagccctggactgattccatattgtgcaaccttctttgtattcactgactacatgagaggtgccataaggctttctgcgctgtctgaggctggggttatttatgtcatgacccatgattcaataggacttggagaagatgggccaacccaccagcctattgagcacctagcaagcttccgggcaatgccaaacattttgatgcttcgtcccgccgacggtaacgaaacagccggagcatacaaagtggccgtgctcaacaggaagagaccctccattcttgccctatccaggcaaaaactgccccagcttcccggaacttccattgaaggagttgaaaagggtggttacaccatttcggacaactccactggcaacaagcctgatgtcattttgatcggaactggttcggaattggaaatcgctgccaaagctgctgatgacctaaggaaggaagggaaggctgttagagttgtttcccttgtttcttgggaactttttgatgagcaatcagaagcctacaaggagagtgttttccctgctgctgtttcagccagagttagcattgaggcaggatcaacatttgggtgggagaaaattgttggagcaaagggaaaagcaataggcattgatcgttttggagctagtgctccagctggaagaatatacaaagaatttggtatcactaaggaagctgttgttgctgcagctaaagagcttatctagaacttttgattttttttgccttctggttttggttgagagcattccatgtcatgaataagaaaaaggttaaatatccttcgattgggaatttgggattttaagtgaagaagcaacatagattaaagaattttgtgaacttgtaataactatttgacaatttagttttgcactgccacatggttaaattc

SEQ ID NO: 9340 - DNA, 708 bp, Glycine max
  Clone ID: 700843161_FLI
actagcgatagctgataagagagataccaacaagaaaagaaaaaaagaagagttgagattccctttgaagaaaagatggcatcccataggcaaagctatgaagctggtcaaactaagggccgaactgaggaaaagacgaaccagacgatgggcaatattggagagaaggctcaagctgcaaaggagaagacccaggaaatggcccaagctgcaaaggagaagacccaacaaacagcccaagctgccaaggacaagacttgcgacacttcccaagcggcaaaggagaagacccaacagaatacaggagctgctcaacaaaagacctcagagatgggccagtccacgaaggaatcggcccagtcagggaaggacaacacccaagggttcctgcagcagacaggggagaaggtgaagggcgcagcccaaggtgctacagaggctgtgaagcaaacccttggcttgggcgagcatgatcaagacaaccgcagaaattactaatactataatttgaagtgctttcttgtagtagtggtttacgcagcatggctttttaaataagctgctattccctacactcctacctaaggagtgtactattatccgcagtttctattctctctagctactttcatgtatgttcaatgctatatatagccttgaattaatgtcaactatgttctaattaatgctatagcttcggtttgtgtt

SEQ ID NO: 9341 - DNA, 978 bp, Glycine max
  Clone ID: 700843201_FLI
gcccaatgagctaagtgttttctacaagtttttgtatatctcacttggccttgctgggtttcttttggtcatgatcatagttcagaagcaagtgcatttctcacaaagtgagtatggtgtcagtgctggggttgtgctcttcttactatttcttcctcttgctgttgtgtttgttgaacaatataagatcagagagagtcaaaagctagcattcattgacccctccccggtcaagatagtagctgaaggagagtctgcaaatggtaatacctctaacacgccaatttcaacagagattgaagaaactagatggtggcaaaaagtgttaagtccaccgcctcgaggtgaggactatactatacttcaagccctattcagcttagatatgatactgctattcttcgctggcacatgtggtgttgggggaactttaaccgcaattgataaccttggtcagattggtacatcgctagggtaccccaaggctagcataagcacgtttgtgtcgttagtgagcatttggaattatctgggacgggttttttctgggtttgtttctgaacactttctacaaaagtacaagttccctcgaccactgatgctcacgctaaccctcctcttatcctgtgccggtcaccttctgatagccttcgatgtgcccaacggactctacgtggcatcggtgatcatagggttctgcttcggcgcgcaatggcccttggtgttcgccataatctcggagctgttcgggctcaagtactattcaacgttgtacaactttggaggtgcagcgagcccgattgggctttatgtgcttaacgtgagggtaactgggcacttgtatgacaaagaagctctgaagcaattggcagtggcggggataccaagaaatgatgccaaagaattgacttgtattgggtccagttgttttaagttgtccttcattattatcactgcagcaaccttttttggggcctt

SEQ ID NO: 9342 - DNA, 1096 bp, Glycine max
  Clone ID: 700843266_FLI
taatattgcgaagataaggaggcatgtccgccagtcaaaatgcttgcaggacaagatgacagcaaaggaaagtgcaatttggttgggggtattaagtcgagaagaagctctcattaggcagcctagtagtgataatggtacatctggaataactggagtgccacctggtgttcctgttgagaataagcaagcagctactagtagtgctagcaactatgatgttgatggtactgatgatggcattggttctgtttcttccaaagaaaataggagaaatcattttatggttacggaaccatcagataacttgcgtaggggtaggaaacctgtccaagatacagatcaatctgagaagcaacccaggcccaaaaagccacgaagggccaatgacaaaccaccagcacaagctgacaatgaaattttacatgttgagccaagaagcaaagggatcaatataaaccagacagaagcacaagtagttggagtccagattcatggaaatgaacaaagtaatgagacagattctgctgcaaggccactggaaagaggacttgaggtgcctgcacaattaccagtacctgaggttgatcagtactcttatttacatacaaacaacttagtttcctcagaaagcatgtatatgagtggaaaaccaatgcactatcctgagttgcaaaaccctgacatgcatcatgagaccacttataatctttataatccagcagcaggatatgagcctggtcaggatgggcagcagctacattctgcaaacaatgaagcagttaggctagagaatgatgcagtttctttacaaggagtacatatgaaaggggatggaattaatggaggagacttgcaatattttggtaaagatgcatttcaaaatgagcttgatagacctatggatcactccttctttggatcaccccttagcatgtcattagattttggagcactcggcagtccgttccatttagatgatttcgtgtgtgaggatgaaatgatacagtactttggagcataaattattgaaactgctagctcagcagagatcgttagtgctatttttattattattctctccaataatgctgtg

SEQ ID NO: 9343 - DNA, 1299 bp, Glycine max
  Clone ID: 700843339_FLI
gggccacactcacatggtcaaggagttccatcttcacctgctgctgggactccttcaagcgtagaatcaccaaccaaattctctggaaatactaatcagggtttagtgaagaaattgaaagggtttgatgagcttgcaatgtcaataggcaattgcaatgctgagagtgctgagcgaggagctgaaaacaggctgtcacagagtgtggatactgagggttccagcgacggaagtgatggcaacactgcaggggctaatcaaacaaaaaggaaaagaagccgagaaggaacaccgatcactgatgcagaagggaaaactgagctacaaaatggtccggcttccaaagagactgcatcttccaaaaagattgtgtcagctaccccagctagtgttgcaggaacattagttggacctgtagtttcttcaggtatggccacagcactggagctgaggaacccttcgactgttcattctaaggcaaattccacaagtgccgcacaaccttgtgcagttgtgcgtaatgaaacttggttacagaatgagcgtgagctgaaacgggagaggagaaaacaatctaaccgtgaatctgctagaaggtccaggctgaggaagcaggccgagactgaagaattggcacgaaaagttgagatgttaactgctgagaatgtgtctctgaagtcagaaataactcgactgactgaaggttctgagcagatgaggatggaaaattctgcattgagggaaaaactgataaatactcaactgggaccaagggaagagataactttgagcagcattgacagcaagagggctgcacctgtaagtacagaaaacttgttatcaagagttaacaattccggatctaatgatagaactgcagagaatgagaatgatatctgcgagaacaaaccaaattctggtgcaaagctgcatcaactactggatacaaatcctagagctaatgctgtagcagctggttgaaaccagtaactgcactggctaattatgtaattttggcatattacaagcccaaaattacagcttggtgctaacagttttcagagggatggatcagctgaattttacaatctaattccatctatatagaccagaactaattctttgcttgtgagtttcttagggcataaactctgtattttactagatttcacagaattgaatgacaactttaaaagtttgtaaattgaagagtattagggatttagtttagactttaagagaggcttgtcggccgctgtataattggttgtgtattaactatattggtgtgatctttct

SEQ ID NO: 9344 - DNA, 2752 bp, Glycine max
  Clone ID: 700843342_FLI
caaaatggaaagaagctaccagatggcttgtgggaggaggtacttgaaggcttgcaatttgtagagaatgaaatgggagccattcttgggaatcctttaaaacctcttctcctctctgtgcgctctggtgctgcgatttccatgcctgggatgatggacacagttctcaacttaggattgaatgatgaagtggttgctgggttggcagcaaaaagtggagagcggtttgcttatgattcttatagacgtttcttagacatgtttggagatgttgttatggacattccacactcgttatttgaggagaagttagaaaagctaaagcatacaaaaggtgttaaacttgacactgatctaacaacttatgatctcaaagatctagttgagcagtacaagaatgtctaccttgaagccagaggagaaaagtttccctcagatccaaagaagcagttagaactggctgttaaagctgtttttaattcttgggatagcccaagggctattaagtatcggagcattaatcaaataactgggctaaagggaactgctgtaaacattcagtccatggtgtttggtaacatggggaacacttccggaactggcgtccttttcactagaaatccaagcactggtgaaaacaaactttatggcgaatttctaattaatgctcagggagaggatgtagttgctggaatcaggacacctgaagatttggaggtcatgaaatcttgcatgccagatgcttataaggaacttgaggggaactgtgaaattctagagaaacattacaaggatatgatggatatcgaattcactgtccaagaaaataggttgtggatgttgcaatgtcgaagcggaaaacgtactggtaaaggtgcattcaaaatagctgtagatatggttaatgaggggcttgttgatattcgttctgcaatcaagatggtagagccacagcatcttgatcaacttctccacccacagtttgaggatccatctacttacaaggataaagtgatcgccgttggtttgcctgcatcccctggagccgcagtagggcaggttgtattcactgctgatgatgctgaagaatggcatgcacaaggaaagagtgtcatcttggtgaggaatgagactagtccagaggatgttgggggtatgcatgcagctactggaatcttgacagctagaggtggtatgacatctcatgctgctgttgtagcccgtggatggggaaagtgttgtgtgtctggttgctctgacatccttgtaaatgatgctgagaaggtgtttgtagttggggataaggtgataggagaaggagaatggatctcactgaatggatctacaggtgaggtgatactgggaaagcagccactttctcctccggctctaagtgatgatttggaaattttcatgtcttgggctgatgaaataaggcatctgaaggttatggcgaatgctgacacacctgaagatgcagtaacagctagacaaaatggtgcccaaggaattggactttgcaggacagaacatatgttttttgcttcagacgagaggataaaggctgtgagaatgatgataatggcagttacaccggagcagagaaaagctgcactggacctgttgctaccttatcaaagatcagattttgaggggatctttcgtgcaatggatggtctgccagtaacaatccgattgttagatcctccacttcatgaatttcttccagagggtgaccttgaacacattgtcagggaactaacttctgacacaggaatgaaagaagaagaaatcttctcaaggatagaaaaactatcagaagtgaatcccatgcttggttttcgtggctgcaggttgggaatatcatacccagaactgactgagatgcaggcccgtgcaatctttcaggctgctgtttcagtgagtaaccatggcattacagttcatccagagataatggttccacttatcggtacacctcaggaattaaggcatcaagtgaatttaataaggaatgttgctgataaagtgttgtctgagatgggttcttctttaagctataaggttggaactatgattgaagttccaagggctgcactagttgcagatgagattgcaaaggaagcagagttcttttcgtttggaaccaatgaccttactcaaatgacgtttggatatagtagagatgatgttggcaaatttcttcctatatacctatctggtgggattctgcagcatgatccattcgaggtacttgaccaaaaaggtgtgggtcaactcatcaagatatgcacagaaaagggtcgtgctgctaggccaaacttaaaggttggaatatgcggagagcatggcggggagccttcttcggttgcattttttgctgaaattggacttgactatgtttcatgttctccttttagggttccaatagctaggcttgcagcagctcaagttgcagtttaagaggcagttaccaatgaatggcatgtgagaggattattgactctcgacaaccgtaaataactctggttcatcataagcccgtatacatcagaaatggaactcataacatataattgtaaaagtgaaagcaaaggaaaattaatttgcaaatgtttgttaataaaaaagagaaaacatggtgtacatgcaaatgtttctcttataccgtgtctcgtcataaaataagacagattcttgtacatgttgtattttatcacaataaaatctttaaaagatagaagattcttgt

SEQ ID NO: 9345 - DNA, 1140 bp, Glycine max
  Clone ID: 700843418_FLI
gcgataagtgataactgcaaacttattgaatccttaaacaatatgaactctagaaataagagttagttgtttagttgcacattttctgacatggtgtttcaattggaccctttgtggcttattacagaagatacttagtgtccagtactcggtccccgattatgtacgagtttccatggaatgtagacatcttctatcacaaatatttgtggcaagtcctgaaaaggtaattgatttgatttctaaaatctaattgttttctacatctataaattcctactagatagaagatttaattgcttaaattctggagcacactgtttctataaaaataatcttcatatttattctcaagtaacttaaaagttctgttattctctcaccagtgcatgttttggcttcaagtatgtgtagtttgtgtgttttgggcacacttctagcgatgcttattattctttacaccatctttggcatcttgttgtgaatcttctattgaaatgtatgtagcttcctttcccattgtattgaaccatttatggcattttgcagagaataaaaataccagaaatcaaaaaccatccatggtttttaaggaacttgcccatagaacagatggaaggtggaagctggcaaatgaatgatgtaaataatccatcacaaagtgttgaggaagtcctgtctattatacaagaggcaagaaaatctcttaatgttcccaaggttggaggccttcttattgggggcagcatggacctagatgacttggatgctgatgaagatcttgaagatctacaaacaagtggtgaatttgtgtgtcctatttaagtgtgtacatgaacaagctgagttagctgtgaaaatgtaaatagatttttctgtaggggctaaaattccttgatggttaacttaattttcaattaagatcagtagccccatttgtatggcttgttatttattagttttgacatttgaaggttttgtttccttatgttcattttgccctctcccccatcacacatgtggatgtcctcagatttaggaacttccaaaaccatgtgccgttttcctagagaagtaacaccacatgttccaaagatgagaatattaaataaagcaagttgtggcaggttccacttttgc

SEQ ID NO: 9346 - DNA, 492 bp, Glycine max
  Clone ID: 700843552_FLI
gagagagaatggcagcacttggtgggaatcgtgatgtgacaggaagccagaacagcgttgagatcgatgctctagctcgctttgctgttgaagaacacaacaaaaaacagaatgcccttttggagtttgaaaaggtggtaactgcgaaacagcaagtggtttctggtaccttgtacaccatcactttggaggcaaaagatggtgggcaaaagaaggtttatgaagccaaagtttgggagaagtcatggttgaacttcaaggaggtgcaagagttcaagcttgttggagatgcacctgcatagtctagtgcttaattaggttgctgaagagtgaagaatgagacagcctggttcgaaggggaaaagcctaaggatatatcaaaggatcctatatgtataaaataaatgttgcttttttaccttcggtattgatatctgaagtctaatttgacatcctatatatgaatatatgatctatgtgtttctttctctc

SEQ ID NO: 9347 - DNA, 1193 bp, Glycine max
  Clone ID: 700843557_FLI
ctcagaagataattggaacgacgccgtttgaggccgctgctgcggttgtgcaagattatcaacttccctgctccgccattgaattcctctccgaaatttcgccactcttctctgaccagtggtgcaacattaaagcacttcctggtgctaataggttggttaaacatttgaagagtcatggagttcctatggccttggcgtcaaactctccaagggaaagcatcgaagccaaaatatcctatcatgatggatggaagaattctttctctgttataattggtggagatgaagtaagaacagggaaaccttcccctgaaatattccttgaagctgctaggaggttaaacatggagccttccagctgtcttgttattgaagactctctacctggggttactgcaggaaagactgctgaaatggaagtagttgttgtaccatcacttccaaaacagtcgcatctctatactgcagcagatgaggtgatcaattccctacttgatttgcgactcgaaaagtggggtctgcctccatttgaagattgggtggagggaactttgcccgtagatccctggtatattggtggtcctgttgtcaagggatttggtcgtggctcaaaggtacttgggatccctacagccaatttatcaacagagggctattcagatctcctttcagagtatcctgcaggtgtttattttggttgggctggattgtcggcaagaagtgtttttaaaatggtgatgagcattggttggaatccatatttcaacaacaaagaaaaggctatagaaccatggttactccatgactttaatgaagatttctatggggaagaactgcggcttgttatagttggttacatacgtcccgaggtcaatttttcatcccttgaaagcttggtagctaaaattcatgaagatcgaagagttgctgagagggctcttgatcttcccttatattcaagttttaagaatgattcgtatttgagaagctcttagtacaattttttttatcccttagcttcttgtcgaataaaaccctggtgttaattgttgtaagtgcaaaatccagttattcaactcgaaagcagtacgcatattataccctatgattcataatcatgccaatgcaatgtgatttggaacatgcataaagaaatactgaaaaaaaataagagtcattgtttgcatttt

SEQ ID NO: 9348 - DNA, 1365 bp, Glycine max
  Clone ID: 700843577_FLI
gtttccttgggtgctgcatgcactttcactcgaagaaccttgaagcgagtctgggccacagcaaccagcgacaacaactcaatcagctagggttgctttgcttgctatcttgttggaggattttctgttcaagagaagatggtaactagaattgtggatcttcgttcagacacagttacaaagccaactgaagcaatgagagctgctatggcaagtgctgaagttgatgacgatgttctaggctatgatccaactgcttttcgcttagaaacagagatggcaaagacaatgggcaaagaagctgctctttttgttccatctggcactatggggaaccttgtatctgtacttgttcattgtgatgtcaggggaagtgaggttattcttggagacaattgccatatcaacatttttgagaatggaggcattgcaaccattgggggagtgcatccaagacaagtgaaaaataacgatgatggaaccatagacattgatttgattgaggctgctataagggacccaatgggggagctattctatccaaccaccaagcttatttgcttggaaaacactcatgcaaactctggtggcagatgcctctcagttgaatatacagacagagttggagagttagctaagaagcatggactgaagcttcacattgatggggcccgtatttttaacgcatcagttgcacttggtgttccagtggataggcttgtccaggcggctgattcagtttccgtttgcctatctaaaggtataggtgctccagttggatctgttattgttggttccaagaattttattgccaaggctagacgactccggaaaaccttaggaggtggaatgagacagattggcctcctttgtgccgctgcacttgttgccttgcaggaaaatgttgggaagctggaaagtgatcacaagaaagctagacttttggctgatggattaaaagaagttaaaggactgagagtggatgctggttctgtggagaccaatatggtatttattgacattgaagagggtacaaagactagggcagaaaagatatgcaagtacatggaagaacgtggtatccttgtgatgcaagagagttcatcaagaatgagagttgttctccaccaccaaatatcagcaagtgatgtgcaatatgcattgtcgtgctttcagcaagctctagctgtcaagggagtacaaaatgaaatgggcaactagtggaagaatttgaatatggcacgttgctgccatattagtcattaaaaaggaattccgtgttccatttgcctttgctcatttgattttcttaaatgtaccctaaagaacatgcaaagatttacatctttgatgttgttccctgtt

SEQ ID NO: 9349 - DNA, 803 bp, Glycine max
  Clone ID: 700843580_FLI
agtgatgcagtcaatgatgaacagaataagactcttctagaccaagcagaagaagatgatgatgaagaagaaggacaacaaaagactaagaaacagttgaagcctaagaagacaaatcagaagagacagagagaaccaagattcgcattcatgacgaaaagcgaggtcgatcatctggaagatggatacagatggagaaagtacggtcaaaaggccgtgaaaaacagcccctttcccaggagctactatcgttgcaccagtgtttcatgtaatgtgaagaagcgtgtggagcgatctttcactgatccaagcgttgtagtgacaacctatgaaggccaacacacacatccaagcccagttatgcctcgttcaggtgtctccgctggatacgccaacaacttcggttcagttttgccaccgggaaactacttatcccagtatcagcactaccaccaccaacaacaacaacagcatcttgtcaacacattgtcctctttgggttttccttacaatgattcttcatctccaaagaacgctgtttttactcaagagagacggctttgcagtaatcacgggacgaatgcgtttctgagggaccatgggcttcttcaagatgttgttccttcacacatgttgaaagaagagtagagctgatataactccagtaattattagtcatcatgcttctatgtgatttattttttgctgactttttcctatgagacttaggtgagaactctagtactggtacatgtaatttttcttcctgaccggaggtaatattagtgatcatgatcatatat

SEQ ID NO: 9350 - DNA, 1418 bp, Glycine max
  Clone ID: 700843588_FLI
ctcagaattctctaaaagagatctttttctgctctttgaagaaagaagggtctttgcttgattttggagatgtctctgctctcagatctcatcaaccttaacctctccgataccaccgagaaggtgatcgcagagtacatatggatcggtggatcaggaatggacctgaggagcaaagcaaggactctcccaggaccagttagcgacccttcagagcttcccaagtggaactatgatggttccagcacaggtcaagctcctggtgaagacagtgaagtgattttatacccacaagccattttcagggatccattcagaaggggtaacaatatcttggttatctgtgatgcctacactcctgctggagaacctattcccactaacaagaggcacgctgctgccaaggttttcagccatcctgatgttgttgctgaagtgccatggtacggtattgaacaagaatacaccttgttgcagaaagatatccaatggcctcttgggtggcctgttggtggtttccctggacctcagggtccatactactgtggtgttggcgctgacaaggcttttggccgtgacattgttgacgcacactacaaagcctgtatttatgctggcatcaacatcagtggaattaatggagaagtgatgcccggtcagtgggaattccaagttggaccttcagttggaatctcagctggtgatgagatttgggcagctcgttacatcttggagaggatcactgagattgctggtgtggtggtttcctttgaccccaagccaattaagggtgattggaatggtgctggtgctcacacaaactacagcaccaagtccatgagagaagatggtggctatgaagtgatcaaagcagcaattgacaagttggggaagaagcacaaggagcacattgctgcttatggagaaggcaacgaacgtcgtttgacaggacgccacgaaaccgctgacatcaacaccttcttatggggagttgcaaaccgtggagcttctgttagggttgggagagacacagagaaagcagggaagggatattttgaggacagaaggccagcttccaacatggacccatacgtggttacttccatgattgcagacacaaccattctgtggaagccatgagcaaaacctgcatgttttctccctttggatggaaaggaacagttatgcttttcttagtaggatttggtctctctctctttttaccttttgattggtactatggttggtgccttgttggttggtgcaactaactggcaagggttgttcattgttttcttctattcctttccctcgttttccgattgttacaatgacaataatttaatggttattatcagtcttgaacaaagaaatgctgattgtgaagtataataataatatatgaaattgtcatgttc

SEQ ID NO: 9351 - DNA, 1816 bp, Glycine max
  Clone ID: 700843593_FLI
ggtaccactaccacctttccgccttcagccgtttcaaccaccagcaaatggctgggcttcgtggcggccgtgtggattcaatgcatctccggcaacaactacactttctcaaactactccgacgccctcaaatccctcatgcacctcactcagctccaactcaacaacctctccgtcgctaaagacgttggcaaagcctttgggcttctcgcgggcctggcctccgaccgcttccccacttgggccattctcctcataggctccgtcgaaggcctaattggctacggaacccaatggctcgttgttagccaaagaattcaacccctcccctactggcagatgtgtgtgtttctgtgcatgggagggaacagcacgacgtggatgaacactgccgttttggtaacatccattcggaacttccgttcaaacagaggacccgtttcgggcattctgaaaggctttgtagggttgagcactgcgatattcactactctctgttccgctctcttcgccgacgatcctggctccttcctcatcatgctctctgtcattcccttcgcagtttgcctcaccggtgtgtttttcctccgggagattcttcccgtcgcctccgccgacgccgacgccgaggaggtaaagtatttcggcgtcttcaacgtcgtggcggtggcaatggcgctttttctgttggcgtatgggttcatccccagccccagcatgttggtgtcaagagtgttcgtggcggttttggttgttatgctggtttcgccgttggggatcccggtgtactcgtacttgaagggtagcttcggagaggggaatgacgtggaggggcagagggtgaaggagccgttgcttcagattccggagaaggagaacgaagctgtggcggcggagatagtgaagagggtgccggtggtgggtgaggagcacacgataatggaggcgctgagaagcgtggatttttggatcttgttcgtgtcgtttctgtgtggggttggaacgggtttggcagtgatgaacaatatgggtcaaatcgggttggctctcggatacccagatgtctcgctctttgtgtcgcttacaagtattttcgggttttttggacggatcatctcgggtactgtttcggagttcaccatcaagaaagctggaacacctagacctctttggaatgcagcatctcagcttctaatggctgtaggttacatactcctggccatggctatgccaggttccctatacattgggtctattttagttggcatgtgctatggagtgaggcttgccattacagtcccaacagcctcagagttatttggactcaaatattatggtctcatatacaacattctcatccttaaccttcccttgggttctttccttttctctggtctgcttgctggcatactctatgatatggaggcaactacaacagagggaggaggcaacacgtgtgttggaggtcattgttacaggctagtctttgttgtcatgactggagcatgcattgttggcttcttcttagacattctgttgtcaatcagaaccaagaatatttacaccaagatttccatgagcaagaaatccctagcaacatccaataggcagtgattcagaatggtatgacattcctgggattgatgaactttatgctcaagtgatatctcaagatctgtcagcaaggtgacttatcctatcagatagttaaaactcattttttcaataaaggagggccgtttgtcatgtactgtaatttttatttatttatttttatgatgtgtttggaaggatcagtgagaattctttttgttcc

SEQ ID NO: 9352 - DNA, 796 bp, Glycine max
  Clone ID: 700843651_FLI
accgtttacggcttcaatgccaccatccccaacttcctcacctcaagttttcaggtcacgctttcctcgcgcaaccccaacgacaaaatcggaatctactacgaccgtctcaacacctacgtaacttaccggaaccagcaggtcacgtaccgaacctcaatcccaccctcgtaccaaggtcacaaggaagaggatgtgtggtccccgtttgtctacggcactaatgtccccgtcgcaccctacaacttcgttggcctcagtcaagaccagaccaacggcaacgtcctcgtcctcgttaagattgacggtaaggtacgatggaaagttggttccttcgtctctgctcactacaacctcaatgtaaggtgccctgctttcataacctttggcccccaaagcaacgggattgcccttggcaataacgctgttaagtatcaattggttcaacgctgcaccgtcggggtttgatgtcaacgccttccaagatatattgctctgcctcttggtatatttagtgtctatttatatacggtctttctcatttcttttttttcatatacgtattcttcctatcttcctctacgtatttcttctacggatcactttgttgttagacatacatatgtctgtcttcgttactgtattttgaattgtacattttgctatagaataaatttgtatttggagaaaattctcatgagatgaagcaaaattacaatttatagcaaagtcattttagataaattaaaacgttgtttcaatttggataaagaattcagtgtctcgtgaatcatct

SEQ ID NO: 9353 - DNA, 810 bp, Glycine max
  Clone ID: 700843705_FLI
ctccaccataactatttcaacaagtttgtctccgtagcagatgttttagtcgtttccgtcgagtataggttggctccagagacccttcttcctgcagcttatgatgactgctgggatgctcttaaatgggtcgccaccaacaccgaaccatggcttgtcaaacacggtgatttcaacagagtcttcattggaggtgacagcgctggtgctaatatagttcataacattgccatgcgtgctggggctgaagctttacctggtggtgtcaaactcttgggtgcttttctttctcattcctacttctacggttcaaagccaattggatcggaacctgttgcagggcaccaacagagcgtgccctatttggtatgggattttgtttatccatctgcgcctggagggattgacaaccctatgatcaatccaatggttactggggcgcctagcttggctggacttgggtgttctaagattctggtttgcgttgctgaaaaggatctgataaaggatagaggggttgcgtactatgaggctgtgaagaagagtggctggcaaggtgaagcggaactgttcgaagtggagggcgaggatcatgctttccacatccacaatccacaaacccagaatgccatgaaaatgatcaaacgcctctcggattttctcctccactaaaacacataccctgaggattctgagttttaatgtctcatggatgtaatctaatgtaatgcttcaactctgcttattattattaagcaaataaaatttggaaatcagaagccagtgtagctggcctagttcgtgtgatct

SEQ ID NO: 9354 - DNA, 692 bp, Glycine max
  Clone ID: 700843710_FLI
ctctgcgctctcgaccacctccattccatgggcatcgcctaccgcgacctaaaacccgaaaatgtcctcgtccaaaacaccggccacgtcaccctcaccgatttcgacctctcccgaaagctcaatcccaaacctaaacctaatcctaaccctgtcatcgttccttcaatccccttgccaaattccaacgttccccaacctcgccgcaagcaccgccggaatttatcccggtggatctccttcttcccgccggacgggactaacaacaacaacaaaaacggtctcaagaaggccaagtccgcgcaagtcagcccggtgagtcggagaaaaccgagtttctccagcggcgaacgatccaactcgttcgtcggcactgaagaatacgtctcgccagaggtcgtccgaggcgacggacatgagttcgccgtcgattggtgggcgcttggaatactaatctacgaaatgctctacggtaagacgccgttcaagggaaggaatcgtaaggaaacgtttcggaacgttatcatgaagccgccggagttcgtcggaaaacgaacggcgttaaccaaccttattgaaaggttgttggagaaggatccgacgaagcgtttgggttacacgcgcggtgccgcggagatcaaggagcacgagtttttccgaggggttcagtgggagcttttgacggaggtggt

SEQ ID NO: 9355 - DNA, 2279 bp, Glycine max
  Clone ID: 700843719_FLI
tggactttgaaccattcaatgcagccttccctcgcccaactcttaacaagtcaattggaaatggtgtgcagttcctcaaccgccacctttctgccaaactcttccacgacaaggagagcttgcacccacttttggaattcctcaggcttcacagcgtcaagggaaagactttgatgttgaatgacagaattcaaaacccagatgcactccaacatgttctgaggaaagctgaggagtatctgggcacagtgcctcctgaaactccctactcagaatttgagcacaagttccaggagattggtttggagagagggtggggtgacaacgcagagcgtgttcttgagtcaattcaacttctcttggatcttcttgaggcccctgacccttgcacccttgagactttccttggaagaattcctatggtcttcaatgttgtcattctttctccccatggttactttgcccaagataatgtcttgggataccctgacactggtggccaggttgtttacatcttggatcaagttcgtgctttggagaacgagatgctccatcgcattaagcaacaaggattggacattgtacctcgtattctcattatcacccgtcttctccccgatgcaatcggaactacttgtggccaacgtcttgagaaggtgttcggaaccgagcactcccacattcttcgagttccctttagaactgagaagggaattgttcgtcagtggatctcaagattcgaagtctggccatacttggaaacttacactgaggatgttgctcatgagcttgccaaagagttgcaaggcaagccagatctgattgtcggaaactacagtgatggaaacattgttgcctctttgttggcacataaattaggagtcactcagtgtaccattgctcatgcacttgagaagaccaaataccccgaatccgacatttactggaaaaaattggaagagagataccacttctcttgccaattcacagctgatctatttgccatgaaccacacagatttcattatcaccagtaccttccaggagattgctggaagcaaggacactgttggacagtatgagtctcacacagcctttacccttcctggactctaccgtgttgtgcacggcattgatgtctttgatccaaaattcaacattgtctcccctggagctgatcaaaccatttacttcccccccaccgaaactagccgtaggttgacctccttccaccccgaaatcgaagaacttctttacagctctgtggagaatgaagaacacatatgcgtgctgaaggaccgcagcaagccgattatcttcaccatggcaaggttggaccgtgtgaagaacatcacaggactcgtggagtggtacggtaagaacgcgaagctgagggagttggtgaaccttgtggttgttgccggagacaggaggaaggagtcgaaggacttggaagagaaggccgagatgaagaagatgtacggcctgatcgagacctacaagttgaacgggcaattcagatggatttcatctcagatgaaccgtgtgaggaacggagagctgtaccgtgtgatctgcgacaccaagggagctttcgtgcagccggctatatacgaggcttttggtttgacagtggttgaggccatgacttgtgggttgccaacattcgccacatgcaatggtggtcctgctgagatcattgtgcatggcaagtctggcttccacattgacccttaccatggtgaccgtgctgctgatctccttgttgacttctttgagaagtgcaagcttgacccaacccactgggaaacaatctcaaaggctggtctccagcgtattgaagagaagtacacatggcaaatttactcacagaggcttctcactctcactggtgtctatggcttctggaagcatgtgtctaaccttgaccgccgtgagagccgccgctatctcgagatgttctatgctctcaagtaccgcaaattggccgagtctgtgccccttgctgttgagtaaactgaggatgaagagttggataaagaaatggaggaaccggctttttgtttctcatttggagtttgtcttacttgagttctataaataatatgtccctgatgattttaattttgtgattaagctttcgataagagacagagagagaaaaaaaaggaaaaaaaaagccttttactttttttcttttgcatgatttgaatcttgattggaaaagcttcgaattggggtgttttacccatcaattcaattttaagccgtgccttcttc

SEQ ID NO: 9356 - DNA, 1192 bp, Glycine max
  Clone ID: 700843748_FLI
gaaaatggtgtgacaaaggttccacggatgttctattgtgaacactctaatctcagtgatggattaaccacagaatcaaattcaaacttcactatcccctccatagacctcactggcatcaatgatgaccctattttgagagatgctgttgtgggaaaagttagatatgcatgtgaaaagtggggcttctttcaggttacaaaccatggaattccaactcaagttttggatgagatgatcaaaggaactggcaggtttcatgaacaagatgccaaggtgaggaaagagtactacacccgtgatatgagcaggaaagttatttatctttccaactttagtctttatcaagatccatctgctgattggagggatacacttgcatttttttgggcgcctaattcacccaatgatgaagaattgcctgcagtttgtagagatattgtgcctgagtactcaacaaaagtaatggcacttgcttctactttgtttgagttactgtcagaggctcttggccttgatcgctttcaccttaaagaaatgggttgtgatgaagggcttcttcatctgtgtcactattacccagcatgccctgagccagaattaactatgggcactagcaggcacacagacggtaacttcatgacaatacttttgcaagaccaaatgggtggccttcaaattcttcatgaaaatcaatggattgatgtgcctgcagcacatggagctcttgtagtgaacattggagatcttctgcagctagtgactaatgaaaaattcatcagtgttcaacatagagttctagcaaaccatcaaggcccaagaacatcaattgcatccttttttagaattggtgatcagtcaccagagggactctcaagagtctttggtcccatcaaggaactgttatctgaacacaatccaccagtgtacagagaaacttctttaaaagactacttggcacatcaatacgcaaagagcatcggagcttcttcactgtcattattcaagttgtgattatgataaattgcatgcaacacttgatgttttcagaacaagttgtggtttatctcattttgctaaaatttggtacatggctatgtggcttcaagaactgaaaactatggcatattgtattctttgaaaaatgtatccgtttagactagagaaaaataattatgcaccttgggttctc

SEQ ID NO: 9357 - DNA, 612 bp, Glycine max
  Clone ID: 700843769_FLI
aattgggtttacagaaacagaagcaagctttggcgaagcagttgaatcttaggccacgacaagttgaggtgtggttccagaacaggagagccagaacaaagctgaagcagacagaggtggactgcgagttcctaaagaaatgttgtgagacattaacagacgaaaacagacggttacagaaggagcttcaagagcttaaagcactgaaactggctcagcctctgtacatgcctatgcctgcggcaacactcaccatgtgcccctcttgtgagaggctcggcggcggcatcaacggtggcggcggcggttcccctaagacaccattctccatggctcctaagcctcacttcttcaaccccttcgccaacccttctgcagcatgttgattgattgttattataattaggcttttaattagttttcattaaaaaaaaaaaaaacagcaaaaaccaaagaagagttgccccacaacctttgtatttttttggttgagggatacgtcttatgaactacatagctagtgaaaaaaaggttaagggtgtaattaattaactaatatactgtagaaatttgtaactgctgattagaattactttttactcttcctttatt

SEQ ID NO: 9358 - DNA, 1093 bp, Glycine max
  Clone ID: 700843780_FLI
tgaagatgccttctgatgctgaattgatgagaatcgcaataagtgacttgaataacgtgtctacatccttggaagataggcaccgtgctttacaggagcttcttgagcttgttgagtcgattgataatgcaaatgatttaagcaaacttggaggacttctcgcgtttagagaagaactttattgctctgatcctggtataaggacaattgctgcatgggttcttggaaaagctagtcaaaataatgcaattgttcagcagcagatcttggaacttggagtgctctcaaggctgatgaaaatggtaaactctaattcgatggaagaagccaataaagcattatatgctgtttcagctttgattaggaatgatttggctagtcaggggttgttctatgctgaagctggaggttggatgcttcagactacggaggaaagctgtacgtctattggctgatctagcagcgtatcaattagaaaatgtagatagggaagaacaaccatttttcaatgaccaagatctgttgaaggctgtggttgatttaactacatcaaccgaccttgatctccaggaaaaggcccttgttgcgattaagagtctcttgcaattaagaaccactgaagctcgggttttcaaggacttttgtgctttaggtgatgcactgaacagaatgagacaattgttgcatgatttgatggcggatgagtatcagagagactatgtgatggatgtggaaaatcttcgtgttgaagtggaacacactttccaaagaaagctgaagcaatcatgagttgacgtgtccataaatcttgtatcagtatctagtttctagagatttctcacaattttgaagctgctgtaggtgtttgatgaattcatgttaattttataggtgtacaggttaatccccgtcaatatactagtacctggtgatttgtattctgccattagtccttttttacgtatagaatttgtgttaacaggcgtcttttattttattgagtaaaacggcttaaacttaaacaaaatagttataatcaaatgtttttatatacttagatatatggattatttattgaatagattgttggcat

SEQ ID NO: 9359 - DNA, 667 bp, Glycine max
  Clone ID: 700843802_FLI
gcaatttgcagtacgtaacatcaactagcttccttctcttgacatacgccaaatatctgaacacaaacggcggtaatgtagttcgatgtgggacttcagcagtcacgggcgaaaacctagtaacactagctaaagcacaagtggactacattctgggcaacaatccaacaaagatgtcttatatggtgggttttggagagaggtatccaaagcatatccaccacaggggttcctctctgccttccatccacgcacacactcaacacatttcatgcaacgacggctttcagtttttccattctgcctcgcccaaccctaatatccttgttggagccatcgtaggtggtcctgataacaatgacaacttctctgatgatcgacataactatcagcagtctgagccagcaacatacatcaatgcgccgtttgtaggtgctcttgcctatttctctgccaacccaccaacaacctattaggattaggaattaataatccacctataatcaagttttcaatatcgaccaatgccgttccaaatgtggttgcagacacttaaaaaaccttgttgcctatcattaatgcttgtatgcttggtgttaggctgtttgttagttccttcatccttgatgaatgtttacgtttccatcaaaagtgatgtttattagtg

SEQ ID NO: 9360 - DNA, 548 bp, Glycine max
  Clone ID: 700843818_FLI
accaaatgttgtggtatgggatggtcaatatgggtaccaaaatttgtttgatgctatgttggattcagtacatgcagccattgataacactaagattggttatgtggaggttgttgtatccgagagtgggtggccatcagatggaggatttgctgccacttatgacaacgcacgcgtgtacttagacaatttggttcgtcgtgctaatagaggaagcccaagaaggccttcgaagcccactgagacttatatatttgccatgttcgatgaaaatcaaaaaatccagagatagagaaacattttgggctcttcaatcccaacaaacaaaaaaaatacccatttgggtttggaggaaagaggctagggaaagttgttattgacgacttcaatgcaacaacttccattaagagtgatgtgtaaggttggaatcctactcctcaaaatctctgttattccacccataaaataagagagaatatgttgtttgtgtgaaatatgtatatatccttcagtcttggatgaataaaatttgtgaaaagttgataaag

SEQ ID NO: 9361 - DNA, 517 bp, Glycine max
  Clone ID: 700843855_FLI
ggagaaaatggggtctctaatggcctctcttactctcactcttgtattggcaatagtttctctaagcttgtcatctcaagcctcagctgacaagtacgactattcatctccaccaccaccagtttacaagtacaagtccccaccaccaccctacaagtattcatctcctccaccacctcctaagaaaccatacaagtatccatctccacctcctccacactatgtctatgcatcaccacctcccccataccactactagatagtgattttagtatagcgccccatggatctgaagaacttgtgcaaataaaggagagggaagaagcaccatgcagtttatacagtgaagagtggaacttgtgaaagcagtagtgtttatttggtttccctttattatttttattttgtactttatatattcaaagttttaaggcactgttcagatctgatccacctcttgttactccagttatattactatataataaataaataccatgattttttttctactttg

SEQ ID NO: 9362 - DNA, 296 bp, Glycine max
  Clone ID: 700843866_FLI
caagtttgtgaagcccaaggtgagcccacgggctattcaccagcccaggtagacgcaacccggcccattccccaccagctatagctgtgtacataagcgcaaatgacttcagagctttctttctttacattttccagattttaattttcgtgttgacttgttgctctgatattttccataaagataaagtcagtttctttgttaatgataattgcttggcttgtgtccgtgttacagatcttaatatctgctgtaatttcagaattttatgtttacgagtttggctaagagataac

SEQ ID NO: 9363 - DNA, 1361 bp, Glycine max
  Clone ID: 700843914_FLI
gattactgcgtgcgttcttccttggctagctctgcgggaattcagactattgttttggtccctactgatatgggagtggtggagttgggttctgtcagaatgttacccgagagttttgaactcttgcaggctgttaaatctgtgttctccacgcagtctccttcataccaaggggtgagtgtgagcaccggtgggaatgctgttttccctggtttggcaattggggatgctaataaggtagatggaggagtttcgattcccaaggtttttgtcaacacaattggaaatcggacgcatttcagagagaaacttgcagttagaaaaatggaggataataggccttggccaggccatggccaccccgaccccaatgggaacaatctccacaacaacgttagttttccgaatgtgcggggtaatagtcttcatgtttcgagttgggcagtgaattcggatctgaggcagcctggtccccttgagatttttgctcctagggcccccacgagtagtgtcctcgcagagctggctaatgttgggaaacaggatttcagacctcaaaggcaggtgcaaatgcaaattgactttaccggagccacttccaggccttcttcagcgagaccggtcgtcggtgaattggagctttctgatgttgaggcctcttgcagggaggagcaacaacccagttttgccgatgaaaggaagcccaggaagcggggaaggaagcctgccaatggaagggaagcgcccctcaatcatgtggaggcggagaggcaaagacgcgagaagctcaaccaacgcttctatgcgttgagatctgtggtgcctaacatctccaagatggataaggcttcattgctgggagatgccattgcttatatcaacgagcttcaggctaaagtcaggatcatggaagctgaaaaagagagatttggaagcacttcaaatgatggatcagtcttggaagctaagttgagattggaaaatcaggagaaaaaagctcctgatgtggatattcaagcttttcaagatgaggtcattgtaaaggtgagctgccctcttgacagtcaccctgtttcaaaagtaatccaaacatttaacgaagcacagatcagtgttgtagagtctaaacttgctgctgcaaatgataccatttttcacacatttgtaattaagtcccaaggacctgaacagctcacaaaggacaagttgattgctgttttttctccaacagaatccaactcattgcagccattgtcacagttggatagcaagggaattgcagtcagcatagtccatacgtagagaaataccaatttctaaaagcttcctcagaatttttttgttacaccacggaggatctt

SEQ ID NO: 9364 - DNA, 1055 bp, Glycine max
  Clone ID: 700843917_FLI
gagctacttaaatctaataacgaggggaatgaatctttgctcaagtccttgtggcatcactctgatgcaatattgtgctgcactctaaaggtatgcttgaaatttaattcaatttcatagcgcatgtatctatttcgtgcttataaaaaatatatatatctattttgtgctctgtccataatgcaattcaaattctctaactcataaaggttttactctgaaatagagggtatcattgtatcaacatgggctatatagcctgagtagtagcctagtaaaatatgtgagatgaatttgtattatgctggcctaagttaaatttgccctgacctggtccaagaaaaatttcccccaacctcaactatagacccatttctgggtagtattctgcaaagagctttactggtcacttgtcagcgtttcaagtctattattcattcctcttccaactacagtgcatataagttgtataacccaacatggatgacatgttattctgtactgtctaattttgttctaacagtggaaatggcttgaaaacagtttcaactctaatcatggtattctatctggttcgagggcacattctttttaacttttgtttatgcaggcattgccagtgttcactttctcgaaccaggccgggcttgacatgctagagaccaccctagttgcattacaagatataactttagagaaaatatttgatgatcatggacgaaaaattctcttttcagagtttccacagattatacaacagggttttgcatgtcttcaaggtggtatttgtctttcaagcatggggcgacctgtctcgtacgaaagagttgttgcttggaaggtgctgaatgaagaagagaatgctcattgtatttgctttatgtttgtgaactggtcttttgtttgacatcttgttctgagtacacttgggcttattgtatcttagtgtaagataaggatttactctaagacactcgtgctttgttggttgatgttttactgtatttgcactaaatacttggattgcacattaaatgactatttatttcttagtc

SEQ ID NO: 9365 - DNA, 836 bp, Glycine max
  Clone ID: 700843928_FLI
gctactcacataggagaggttgtgatcaacaaatgcttctgcacccgcaggaatccgattagcatctcagctgctgctatatatttggcttgccaacttgaagacaaacgcaaaacccaggcagaaatttgtaaggtaactggtcttactgaggtcactctccgtaaagtgtacaaggaactattggagaattgggatgatttacttccctctaattacaccccagctgttcctccagagagggcatttcccacaacggtaattgcttctggtcgttcttcaacggctaaggttgatgctgtagaggttatttcttctttggacccagaaaagttgccagatattaaacatagcaaacctaatgagggcccgggcatggttcatcatcccagagggaaggatgaggctgttggtggttatcatgcaagccattccacactgaatcaacagtcaactttttggcaatcccagcttcccagtgggacacacaatcatcagaatgttttgcaaggaatggatattgatgtatcgcagcgaaaccaccaacagccagaacacatggcagaggatacaacaaatggtgctgccaatggtagttctctaaaatcaaaccaactttgtagtcctcctgcttctagtgcaagttctgttatgaggcagttttcagctcccccttcatctgggccttcaaatgttcgataagtacagtcacctaagataatgccaggttatccggatcactgaagaacaatgaaatctaaatggttggggaaataccggttccttgtgccaacacctaacctagcacggataaaattacttcgcctcttttaagt

SEQ ID NO: 9366 - DNA, 501 bp, Glycine max
  Clone ID: 700843975_FLI
ctttcctctggcaatgatatgaatgaagaggatgttttccaaaggtaccttacaatgacctcaacaaatgaggccaacggttggtatggaggtagtctcctcggcgatcaagatgaaagcagtgagatatataaacattatgctgagttatgtcagggacctgccttggaacttttccaaaatgaccctgagaaggagcaacactatgcagatgctttaagcacgagttcatatgaaattgttaatgatgctgtcgttgcagcagaaatggaagcagctctaaaggagtatgaccaagttggtgctgaccttgggattattcccaaatcttgtaaattctatgttgatgatccgagctggctgacgagatggttaactggggacgaaaaagtaccaaggatatgatgggtcattgttttgacatgtataagttgaaaacttatttctgtaccattttaactcgtagttccttgtacaaaagtcattgcaagttttcttatc

SEQ ID NO: 9367 - DNA, 1517 bp, Glycine max
  Clone ID: 700843977_FLI
aaacattcctaaagaattggagggccttcatgagaaatactcgtcaacttgccgattgtttgagtaccaagaacttgtatcggccacatcgaatttcttgcatgaaaacttgatcgggaaaggaggaagcagtcaggtttatagaggctgccttcctgatggcaaggaacttgccgtcaagatcctaaatccttctgatgatgtgttgtcggaatttcttctggaaatagaaattatcaccaccttgcatcacaaaaacattatttccctcctggggttctgctttgagaatggcaaacttcttctcgtttatgatttcttatcaagaggaagccttgaagagaaccttcatggtaataagaaaaattcacttgtgtttggttggtccgagagatataaggtagcagtaggtgttgctgaggctttagattatctgcattctaaagatgatcaacctgtgatccatcgggatgtgaagtcatcaaatgtattattatctgagaattttgaaccccagctctctgattttggactggcaaaatgggcatcaaccttgtcatcacatataacatgcacagatgttgctggaacctttggttacttggctcctgaatacttcatgtacggcaaagtaaatgataagattgatgtctatgcattcggtgtcgtgctccttgagcttctttcagggagaaagcccataagccgtgattatccaaaaggccaagagagtcttgttatgtgggcaagtccgattctaaatagtggaaaggtgttgcaattgttagatcctagtttaggtgataattatgatcatgaggagatggaaaagatcgtattggcagccactctctgtataaaacgtgctccaagggctaggcctcaaatgaaccttatctcaaagctccttcaaggtgacgccgaggcaatcaagtgggcaaggttacaagttaatgctttggacccaccagaaatgcttgacgatgaagcgtgtccacctagtaatctacagtcacatataaatcttgcactgcttgatgtggaggatgacttgctctccatgtgcagtgttgagcagggtctcactttggaggactacttgagaggccggtggagccgtgcatcaagctttgactgagcaaactgctagcaaatcgctagaagaagctcaaccctttgaccttaatctcttttgtagatacagttttcttgtgcctcttccattaacaatggcatcttctatgggtttaaaatggatttagggtgacaggatgtttgtgtgtgccctcctcctttccttaataatgaggaaactaggccttataagttgttaggctagttaccccttttcattctatacttgaaatggtttctatttttgtccatgatctcaattcgatcgagttttgtaatttgtattgataaaaagatgaagaagttgtatttagagcataaggatcatagctttgcattttaacaaggctatagcaatttcgtccctgggtttcttttatttc

SEQ ID NO: 9368 - DNA, 503 bp, Glycine max
  Clone ID: 700843978_FLI
gtttatgcagcaagtaaagctgcaattaatcagcttacaaaaaacctggcttgtgaatgggccaaagacaacataaggagcaactgtgttgtaccatgggcaaccagaaccccacttgtagaacatttgttgagagaccaaaagtttgtggatgatattatgtctcgaactccgattaaacgtatagcagaacccgaagaagtgtcatcgttggtgactttcctttgcttgcctgctgcttcttacatcactggacaggttatttgtgttgatggaggattaacggtgaatggatttcaacccagcatgagaattacctgaaattactttccttccatctttgtgggagtagaacaacgattctcatttgatttcaacatgtgtgtgacaagccatgtcaatttcgttttttctcccttctagttgcatatgaaaatgaatggccttatttaattcatatgaacaacttatataataaatggaacatcctatttaatagtact

SEQ ID NO: 9369 - DNA, 727 bp, Glycine max
  Clone ID: 700844012_FLI
gctgttggagattatagctctgagcttaggccttgaggcaaagaggtttgaagagtttttcatcaaagatcaaactagctttattcgactcaaccactatcctccatgcccttcccctcatctagctcttggtgttggtcgacacaaggacattggagccttaaccattcttgcacaagatgatgttggaggacttgaagtcaaacgcaaagcagatcaagagtggataagagtgaaacctacaccaggtgcttatataatcaacgttggtgatcttattcaggtttggagcaatgacttatatgagagtgtggaacacagagcgatggttaactctgagaaagaaaggttttccataccttttttcttattccctgcacactacactgaagtcaagcctttggaggagttgacaaatgaccaaaaccctgcaaaatataggccatacaattggggcaagtttcttgtccgtagaaagggcagcaatttcaagaaactaaatgtggagaatattcagatttatcattataagatagcttaaaaggatggtaaattagcagtgccttttagcctatgcatgtaaaacaaactgattcaagaatgtttctgatatgtgggactgtgatcttatgctgctaaaattactagtgtgcaatgtgcattatgtatgccaggagcatctaataaaagaaaaataaatcaagattaatgatatttgaacaattct

SEQ ID NO: 9370 - DNA, 1503 bp, Glycine max
  Clone ID: 700844032_FLI
tatttgaatcctgcaaatcaatttcagttattgatctagatagcaatagcttatctggaaccatcccaaacggtgtttccaaatgtcaagctcttgagaaaatcaacctatccaacaataatctgacaggtcatatacctgatgagcttgcctctattcctgttcttggtgtagtggacctatcaaacaacaagttcaatggccccataccagccaagtttggtagttcttcaaatttacaactcctcaatgtgtctttcaacaatatctctggttcaataccaacagcaaagtcattcaaattgatgggaagaagtgcatttgttggaaattcagagctatgtggagcaccattgcaaccatgtcctgattcagttggaatattgggaagcaaaggcacgtggaaggttacacgtattgtgcttctctctgtagggttgttaatagtccttctgggacttgtttttggaattctttacttgagaaggggaatcaaaagtcaatggaagatggtctcattcgctggtctacctcaattcacagcaaacgatattttgacaagcctcagtgccacaacaaaacctacagatattcaatcaccatcagttacaaagactgttctgcctacaggaataacagttttggtcaagaagattgaattggaagcaagaagcataaaggttgtgtcagaatttataatgaggctaggaaatgcaaggcacaagaacttaatcagattgttggggttctgccacaaccagcacctagtctatcttttgtatgattacttgcccaatgggaatttggctgagaaaatggaaatgaaatgggattgggcagcaaaattcagaacagtggttggaattgcaaggggactttgcttccttcaccatgaatgttacccagctataccccatggagacttgaggcctagcaacattgtattcgatgaaaatatggaaccccatttggcagaatttgggttcaaacatgtgtcgaggtggagcaaaggctcatcacccaccacaactaagtgggaaacagaatacaatgaagccacaaaagaggaactgagcatggatatctacaaatttggggagatgattctggaaattttaaccagggaaaggttggcaaattcaggagccagcatacacagcaaaccatgggaggttctcttaagagaaatttacaatgagaatggagcaagttcggcaagttcattgcaagagattaaacttgttcttgaggtagcaatgctttgcacccgaagcaggtcatctgaccggccatccatggaagatgttcttaagcttctgtcagggttaaaacatctagaggatggcagaacttcgaaagaagggcaataaaatgttcatttgcatcactgcgttgaaaaccattagaaacatatagtaattgcttagataacaagtttgcacgtatgtaattaaaggagtttgcagcttgtataatagatatttccattgtttcagtgtgccc

SEQ ID NO: 9371 - DNA, 535 bp, Glycine max
  Clone ID: 700844046_FLI
gtactatgcaaatcagcaattgactgaaaagagtgacgtgtacagttttggagttgttctgctggaattgatatcaggaaaaaagcctgtatcatcagaagactatggtcctgaaatgaatattgttcactgggcaagatctttaattcgtaaaggagatgtgataagcatcatggatccttctcttgtggggaatgtgaaaaccgagtcagtttggagggttgctgaaattgccatgcaatgtgtagaacaacatggtgcatgcagaccaaggatgcaagaggtcattttggctatacaagatgcttctaacattgaaaaagggtcagaaattcaactgaagttatcttcttcaggtggttcaaagccacagtcttcacgtaagacattacttgcaagctttcttgaaattgagagccctgacttgtcaaatagttgcctcccctcagcaagataatttttgttttctcttttttcatatcaaggtgggttttgtacattacttaattataattattttcttttgccttttgtt

SEQ ID NO: 9372 - DNA, 669 bp, Glycine max
  Clone ID: 700844141_FLI
gagagggctgatccccacattatccaccgggacatcaagtcaagcaatgtactaatctttgatgacgatgttgctaaaattgcagattttgatttgtcaaatcaggctcctgacatggcagcacgtctccattccacccgtgtccttggaacctttggttatcatgcaccagaatatgcaatgactggccaattgaatgccaagagtgatgtatacagctttggtgttgtccttctggaacttttgactggaaggaagcctgttgatcatacactaccacgtgggcagcagagcctggttacttgggctacaccaagactcagtgaggataaagtcagacagtgtgtagatgcaagactaggaggagaatacccacccaaagctgttgctaagatggccgctgttgctgccctgtgcgtgcaatatgaagctgatttcagaccaaacatgagcattgtagtcaaagctcttcaacctttattgaatgcaagacatgggcctgctggtgaaactccaaactaatctttgtctatatttatatctgtatcaatgagtatgtgcataagtgtgcacgtgagatataagaaagtgactgcttcagaagcggatggaaatttgcttgaacatgtttatatatcccattgtttacattgcatttattttgttcat

SEQ ID NO: 9373 - DNA, 826 bp, Glycine max
  Clone ID: 700844223_FLI
cgacaacctcctcctccaaactatgatgggcaggctccagctgcgagctccgataaacaaccccttggtcacacagtccctcgaggactttttattcaacgacctcggcgacgacgacgacgacggcggtgacaacgaggacagcgagaaagccttcgaagggaaatcggagcttgcgagagaggaggccaagctggaaagagaagtcatcaagatcgtcctaagcggaaacggcgagtccgtcctcaagcccaattcgggccaggccgtgtcggttcgcgaccaccacatatgtgtcgggtttcaagacgaagaggattctgggtatcgcgtgtgggagtggcatggccacatcatgtcttttgatgaggaatttgggtataaccctgagtatatatacggcaattactttcagtggtttaaggctagaccttctcctgttgctgctgttgctgatgccgttgttgagaaagaggaagaagaagaggaggatgaagagaaacaggagaatcagggtttgagggagttgattgataacaaggattccgcggatgctcgcattcttcacaggaacatcaacgctgcttgtccaagcctgacaggtactagataagacatgattcttcatcggaaattcaagttcaaagtgttgcgagcagaggttatagccaacatctcatttcccgtgttcagcagagattgatttcccctgctattcagagtctaaatctcagaagcccgcatcgaggaatttgtttgagctttaaattacatgtaaaggatgcgagacctagatttctctacaataatacatttatctttgctc

SEQ ID NO: 9374 - DNA, 1436 bp, Glycine max
  Clone ID: 700844230_FLI
agcaacatcaatatcatcgacagacaacaatttcgggaatccgctggctatgactgcagttgtggtcgtcccattgggccttctcttcttcgcttccggcctcatcgttaacctcattcaggcaatatgctacgtggttgtgcggccggtgtcaaagaatttgtaccggcggatgaacagggtggtggctgaactgctgtggctggagctcgtttggattattgattggtgggctggtgttaaggtccaagtattcacagatcctgaaacctttcattcaatgggtaaagagcatgctcttgtcatatccaatcacagaagtgacattgattggcttggatgggttttagctcagcgttcaggttgccttggcagcacacttgctgtgatgaagaaatcttcaaagtttctaccggtcattggttggtcaatgtggttttctgaatatcttttcctggagagaagttgggccaaggatgaacgcacattaaagtcaggcctacagcaactgagggatttccctcttcccttttggttggctctctttgtagaaggaactcgctttacccaggccaaactattagctgctcaggagtatgcagcctcagctggattgcctgttccaagaaatgttttgattccaagaactaagggttttgtttcagcagtaaaccatatgcgctcgtttgttcctgccatttatgatgtaactgtggcaattcccaagagttcacctgctcctacaatgctaagactcttcagagggaaatcttcattggtgcatgtgcatattaagcggcatgcgatgaaggatttgccagaagaagatgaagctgttgctcaatggtgtcgagatgtgtttgtggctaaggatgcattgttagacaaacatatagctgaggacacatttagtgatcaagagctgcaggatactggtcgacccgtaaagtctcttgtggttgtcatattgtgggcttgtgtcgttgttacgggggtcgtaaagttcctccaatggtcttcactactatcctcctggaagggtgttgcattttcagcatttggtttgggagttgtcactctactcatgcacatcttgatcatgttctcacaatctgagcgttcaaccccttccaaggttgcccctacaaaaaagtccaagaatagcgaacaactggaagctagggataacaaacaagactagatcacacacgttacctgaatattctatacataagagaattcttctgaggtcacatcttgaacttgttttgcatttatgtgcttttttttataaaaaaaattgcattaacgtgtgtttagggactcactaccccctttctttatttgtttgctttggaattgtacctcgtatgtgttcagttcttgtattatgtattatgcatatactattcattactttcaaattaattaggatg

SEQ ID NO: 9375 - DNA, 1034 bp, Glycine max
  Clone ID: 700844279_FLI
ctcattcagagcttccaaaattctggagttactctaatccagggagatatgaacgatcatgaaagtctggttaatgcaatcaagcaagttgatgtagtaatctgctcatttggtagactactaatagaagaccaagtcaagatcgttgcagcaataaaagaagctggaaacgtcaagagatttttcccatctgaatttgggctggatgtggaccgtcacgatgcggctgagcctgtaagagaagttttcgaggaaaaagcgaaaattcgaagagtaattgaagctgaaggaattccttacacttacctatgttgtcatgcctttactggttatttcttacgtaacctggcacagattgacatcactgttcctcctagggacaaggtgttcatacaaggagatggaaatgtgaaaggagcgtatattactgaggctgatgtgggaacttttaccatcgaagcagcaaatgaccctagagccttgaacaaagccgtgcacataagactcccaaacaattatttgtccttaaatgatatcatctctttgtgggagaaaaaaattgggaaaactcttgagaaaatttatgtttcagaagaagaagttcttaagcaaattaaggagacttctttcccaaataattatcttctggcactataccactcacagcagataaagggagatgcagtgtatgagattgaccctgccaaagaccttgaggcttctgaggcttatcctcacgtggaatacagcactgtttctgaatatttggatcagtttgtctgatttccgaaatcttaggaaccaaagcacttatatgattttatcactctgcaaaatgcttaataaaacaaatgcagttcttccttctgtttttctttcagaaaaggcctatgcaggcttttttgctgcactaccattgtctgtttcgtagtggttgcttgtgtttgtcctgttctcaagaaagtatccacatttatcatttatgtaatgttctacctgaaaaataataatataatctgttttaatattgttac

SEQ ID NO: 9376 - DNA, 599 bp, Glycine max
  Clone ID: 700844289_FLI
attacttgaaggcagtgattaaagaaacttttcgattacatcccccaattaccatattggccccaagggaatccacgcaaaatactaaggtgatgggctatgacattgcagctggcacgcaagtaatggttaatgcttgggcaattgcaagagatccttcatattgggaccagcctgaagagtttcagccagaaaggttcctaaatagttcaattgatgtcaaaggacatgatttccaactgctcccatttggagcaggaaggagggcttgcccaggattaacattttccatggttgtagttgagctggtaatagcaaaccttgttcaccaatttaattgggcaatacctaaaggagtggtgggggatcagacaatggacataactgaaactactgggttatccattcatagaaaatttcctcttatagcaattgcatccccacatgcataagaagcgttttttttttatcagtggtggaaataagaagccatgaatattaaagatatacaagaggaaatacctgaaaagaaaaataagggagtattctctcgttaatgtatcattaaaataacttatggccaagagtgccttcatagt

SEQ ID NO: 9377 - DNA, 1455 bp, Glycine max
  Clone ID: 700844360_FLI
tctccctatcgtcaccgtcactgccatggaggatgccaatcttcagaggctccattgctccgtcaaaaactacgattggggtctcccaggtcgcgtctccgaggttgccagactccacgcgctcaattccgcgtctgaattccacgcggaggacccttacgccgagctttggatgggtacccatgattcaggcccttccttttttagcttcctccaatggaaatgagaatggtgtctccctcaaggcttggatttccgagaaccctgatgtgctcggtcacaaggttcttcacaaatggggttctgatctccctttcttgttcaaggtgctgtctgtggggaaggccttgtcaattcaagctcacccggataaggagttggcaaggactctgcataagttgcaccctgatttgtataaagatggcaatcacaaacctgagatggcccttgcactcactaattttgaggctctctgtggattcatcactctcaaggagctcaagggtgtgcttcatactgttcctgaaattgtggaactggttggtgctacaaatacaaacctggtcttacaaactaatgatcaggatggtgaagagaaggtcaaacctgttctgcaggcagtgttcaccgacctcatgtcagctagtaaagatagagtaacggatgcagtaaacagattgaaaagccgtctgcttaaggagagtgaggtgaggcagttgacagataaagagcagctggtgctgcggttggaaaaacaatacccagctgatgttggtgtcatagcagccttctttcttaaccatgtaaaactcaatcctggtgaagctttgttcctcggggcaaatgaaccacatgcatatttatctggggagtgtgttgaatgcatggcaacttctgacaatgttgtgcgagctggcctaactcccaaacacagagatgtccagaccctttgctccatgctcacatacaaacagggttctcctgaaatcttgcgtggagtatctgttaatccatatgtaaataaatatactccaccatttgaggaatttgagattgatcgttgcattcttcctcaaggggaaacagtggtgttcccagcagttccaggtccttcgatctttttggtcacagttggtgaaggaacaatgaatacaggattacccaaaggacatgtggtcaccgaaggtgatgttctttttgccgcagctaacactgagattagtgttactagtgcatccgagttgaatttgtacagaacaggggtaaatagcaagttttttcaagcttcataagtttcaacaggggatcacccaaatttttattttttttggtcatatgctgttgggagtcaaataatgcaactatctgttgcgtgtaatagaagcagtttaatgtacatgcaagagtaaaaaaaatcacttagtatattgagtcttagagaaatgttcattatag

SEQ ID NO: 9378 - DNA, 1288 bp, Glycine max
  Clone ID: 700844396_FLI
ccgaacgccgctccatgtggcgtccctccacggctggatcgacgtcgccacgtgcctcatcgagttcggcgccgacgtcaacgcgcaagatcgctggaaaaacacccctctggcggatgcggaaggagctaagaagagtaatgtgatcgagctcttgcaatcgcatggaggattgtcttttgggcaaaatggaagccatttcgagccgaagccggtagcgccgccgttgccgaacaagtgtgattgggaagtcgagcctaccgagctcgacttctccaactcggtgcgaatcggaaagggttcttttggtgagattttaaaagcccattggcgtggaacaccagttgctgttaaacgtattcttccatctctttcagaagatagattggtgattcaggacttcaggcatgaggtcaatttgttagtgaagcttcgacaccccaatatagttcagtttcttggagctgttactgccaggaagccccttatgctaattactgagtatctaagagggggtgatcttcatcagtacctcaaagaaaaaggtgcacttagtcctgcaacagctatcaacttttccatggatattgtcagaggaatggcctatcttcacaatgaaccaaatgttataattcatcgagacctaaagccaaggaatgttcttttagtcaattctagtgccgaccatttaaaagttggagattttggattgagtaagcttatcacggtccagagttctcatgatgtatacaaaatgactggtgaaactgggagctaccgctacatggctcctgaagttttcaaacatcggagatatgataagaaggttgatgtgtactcctttgcaatgattttgtacgagatgcttgaaggtgaaccaccttttgcaagtcgtgaaccttatgaaggagcaaaatacgctgctgagggacacaggcctcattttcgggcaaagggttatactcctgaattgcaagagttaacggagcagtgttgggctcatgacatgagtcagagaccatccttcatagagatcctaaaacggcttgaaaagatcaaggagaatttacctacagagaatcactggcacttgtttacctcataaatgtctaatagcattaatttgttcagaaattcagatgatttatttaacattaccattctctggtttggtgccggatttatggataggttgagcatactggaaaacctgcaaagtcaatacttgttttcaactgtttggattaatgagcagaaaaaggtgatgttgattgccctgcctttggtt

SEQ ID NO: 9379 - DNA, 1290 bp, Glycine max
  Clone ID: 700844448_FLI
gcaccacacagcaacccatcggaatattccctttcttcgttttgaatcactggacggcatggccacttccaatggcttcgtcgacggcacttctccggaatccgcattgatctttctcggcagcggttgttcgagcatggttcccaacgtcatgtgcctccttcagccttctgaccctccctgccccgtctgcgtccagtcattgtctatccctcccgaacgaaaccctaattacaggtcctcttttctcttctttcatttcttttctctttcaagaaatttcctcaagatctcgatttgcaggtgcaatacgtctctcttaattgattactgcggcgacgccaacgctggtgatcgtaagtatatattgatcgacgtcggcaagaccttcagggagaccgtgcttaggtggttcgttgcccatcggattcccagagttgattctgtgagttcacttttcttaatttagagatacttcccttcccttccctactgtgcaaaagctagtgattgatgttttggcacaatgtatggcatcaacgtgtttcctttcagtgtggtgaagggagaagggaagggggagaggtcccgaattcaaatccccctactaacaaaaactaacaatattaacgactaacacactaaactaacaatgtgtgtagtgaatctgaaaatctttattgtatcatggttccttggcctggcctctctaacaaacaagtgtgggtcttgttgtgctagttattgtctacctgttgtaatttaaacaagctttcgtcgcatcgtaactgaagcaaagcagagtggatgagatttctttcttgtatctgattttccgaactatccatgatcctatttttaatgaaattttatcatgtgaatgagaacatttgtttagtggtgctcaacttccaagtatgtatttgaatacatgtttggcttttgggctatagacaatgtcctttcttgaatggtgtcatggatgctttgaacagtgttctctgtttctgtttttctaaaagaactgatttaaaaaagatgaccaacctaggaatatcatgacatactagtctgagtactgggatctctgtttcctttagcttcctctttctggcatgtgtcttccataatcaatttgaatggtgaaaatggagattataaattatgcccctgaaataaaactaatattacttttacttctgcttctgcttcactgtcttattaggagactcacagtctgtcagatgaatgcagaaagttaaaagatcaaggattatcactatccgagat

SEQ ID NO: 9380 - DNA, 1375 bp, Glycine max
  Clone ID: 700844560_FLI
tgaatctcagaattctctaaaagagatctttttctgctctttgaagaaagaagggtctttgcttgattttggagatgtctctgctctcagatctcatcaaccttaacctctccgataccaccgagaaggtgatcgcagagtacatatggatcggtggatcaggaatggacctgaggagcaaagcaaggactctcccaggaccagttagcgacccttcagagcttcccaagtggaactatgatggttccagcacaggtcaagctcctggtgaagacagtgaagtgattttatacccacaagccattttcagggatccattcagaaggggtaacaatatcttggttatctgtgatgcctacactcctgctggagaacctattcccactaacaagaggcacgctgctgccaaggttttcagccatcctgatgttgttgctgaagtgccatggtacggtattgaacaagaatacaccttgttgcagaaagatatccaatggcctcttgggtggcctgttggtggtttccctggacctcagggtccatactactgtggtgttggcgctgacaaggcttttggccgtgacattgttgacgcacactacaaagcctgtatttatgctggcatcaacatcagtggaattaatggagaagtgatgcccggtcagtgggaattccaagttggaccttcagttggaatctcagctggtgatgagatttgggcagctcgttacatcttggagaggatcactgagattgctggtgtggtggtttcctttgaccccaagccaattaagggtgattggaatggtgctggtgctcacacaaactacagcaccaagtccatgagagaagatggtggctatgaagtgatcaaagcagcaattgacaagttggggaagaagcacaaggagcacattgctgcttatggagaaggcaacgaacgtcgtttgacaggacgccacgaaaccgctgacatcaacaccttcttatggggagttgcaaaccgtggagcttctgttagggttgggagagacacagagaaagcagggaagggatattttgaggacagaaggccagcttccaacatggacccatacgtggttacttccatgattgcagacacaaccattctgtggaagccatgagcaaaacctgcatgttttctccctttggatggaaaggaacagttatgcttttcttagtaggatttggtctctctctctttttaccttttgattggtactatggttggtgccttgttggttggtgcaactaactggcaagggttgttcattgttttcttctattcctttccctcgttttccgattgttacaatgacaataatttaatggttattatcagtcttgaacaaag

SEQ ID NO: 9381 - DNA, 545 bp, Glycine max
  Clone ID: 700844589_FLI
tatggcttccttaagctcctcattagtgctgctccttgcagctctaattctatcccctcaagttcttgctgactatgagaagcccccaatttacaagccacctgtttacacaccgccagtttataagcccccagttgaaaaaccaccagtgtacaagccaccagtgtacaaaccaccagtgtacaaaccaccggtgtacaagccccctgttaagaaacctcctatttacaaaccaccttacccaaagtaccctccaggctccaactgaagacacccacctgattttgaattaagttaagggatgtattaagtatatgctaaataagaggtgtatctacaaccattgactttgtcatgctcaaaaatttagtttaatttacaaattatggcaagggttacacctggctagcttccgcgtttagatcatttgtttatagtgctatggccacgacaagagtgttatgggtgcatgaatgtaaaacgaaaaaaaaaaaaattgtgtttattttgtacttcaagttatgaataaaagaatttcactgttt

SEQ ID NO: 9382 - DNA, 1166 bp, Glycine max
  Clone ID: 700844620_FLI
attttgctttgtgtgggttgattggtattatcactgcttacatatttgtctggattgccaagtattataccgactacaagcatgagcctgtgcgcatattagccctttccagctctactggccatgggaccaacataattgcaggagtcagtttgggtctggaatctactgctcttcccgtccttgtcatcagtgtgtcaattatctcagctttctggctgggccacacctgtggactagtagatgaaacaggaaacccaactggtgggctgtttggcacagctgtggcaacaatgggaatgcttagcactgctgcctatattcttaccatggatatgtttggcccaatagctgataatgctggaggaattgtagagatgagtcagcagcctgaaagtgtccgagagataactgatgtccttgatgccgtaggaaacacaaccaaagctaccaccaaagggtttgctattggttctgctgctcttgcatctttccttttgtttagtgcttatatggacgaggtttctgcatttgctcatgaaccttttaaacaggttgatattgctattcccgaagttttcgttggtgggctgctaggttccatgcttatatttgtttttagtgcttgggcctgtgctgctgttggcagaactgcacaagaagttgttaacgaagtgagaaggcagttcattgagaggcctggtataatggattacaaggagaaaccagattatggtcgctgtgttgctattgtagcatctgcgtcgttaagagagatgataaaacctggtgctttggcaatcatttcacctattgtagttggtattctgttccgaattttgggctactatacagggcaacctttactcggggccaaagttgtggctgctttgctcatgtttgcaacagtgtctggtattcttatggcactttttctgaacacagcaggtggtgcctgggataatgcaaagaagtacattgagactggagctcttggaggcaagggaagtgaggctcacaaagcagccataactggagatacagtgggagacccattcaaagacacagctgggccttcaatccatgtcctcataaagatgcttgcaacgattacactggtaatggctccagtcttcctgtgagtgagagttgttgatatatctatt

SEQ ID NO: 9383 - DNA, 1903 bp, Glycine max
  Clone ID: 700844626_FLI
aaagaaaacaaatttcccattctattgagctgaaaacaaacgaaacctcatccatggcttctcttctccgttgcaacggagtcttcctctcccccttacctccccaacccagacgcgaccccatccttcccaaattctttctcccccaatccccaaatcctaaaccgtcacgcctcctgacggtgcgcgcggaggtgaaagagacctcctccgccgccgccaccaccaccaccaccacttcctccgacgacaagatccgcgaaatcctccgcaaccgcgactacgacaagaaattcgggttcagcgtggacatcgagtctttgacaatcccaaaagggctctcgaaagaaaccatccgtctgatctcgtccctgaaagaggagccccagtggatgctcgaattccgcctcaaggccttcgagaaattcctgtccatgaaggaacccacctggtctgataacacttacccccccatcgacttccagaacatctgctactactccgctcccaagaataaaccctcactccaatccctcgacgacgccgaccccgagcttctccgctacttcgacaagctcggtgtccctctcaacgagcagaagcgcctcgccaacgtcgccgttgacgctgtcctcgacagcgtctccatcgccaccactcaccgcaaaaccctagaaaaagccggcgtcattttctgctccatctccgaggccattaaggagtatcctgatttggtgagaaagcatttgggaagagttgtcccctccgacgacaactactacgccgcgttgaacgccgccgtcttcagcgacgggtcgttttgctacattccgaaggacaccaagtgtcctatgcagatttcgacttacttcagaatcaacgcgttggagacagggcagtttgagaggactttgattgtcgccgatgatcggagctctgtggagtatctggaagggtgcactgcgccttcctatgaccggaatcagctccatgccgcggtggtggagttgtattgcggcgagggggcggagattaagtactccacggtgcagaattggtacgctggggatgaagaagggaagggtggggtttacaatttcgtgacgaagagagggctgtgtgctggtgccgggtcgaagatatcgtggacgcaggtggagacgggttcggcgatcacgtggaagtacccgagcgttgtgttggagggagatggcagtgtgggggagttttattctgtggctttgacgaataactatcaacaggccgatacagggacgaagatgatacacaaagggaagaacacaaggagtaggattatatcaaaggggatatcggtggggcattccaggaactgttatagagggctggttcaggttctgtccaaggccgagaatgcccgaaactcctcgcagtgtgactctatgctcattggtgacaatgcagctgcaaatacctatccttacattcaggtgaaaaatccaacagcaagaatcgaacatgaagctagtacgtccaaaattggtgaagatcaattgttttattttcagcaaaggggaatagactatgaaaaagcaatggctgctatgatctctggattttgccgtgatgtctttaatgagcttcctgatgaatttggttctgaggtgaaccaactcatgagcttgaagcttgagggatcagtaggttaaacttaaacagcttgttaagcatatcattatatggaatttgctcaggccatttgttcctgaaattgtcaaagtccttataggtagtgtattcggaaggatgtgtatatgtttgtatatagatgctgtcttcaactgcaccctgcaaaagtggcctgaaacatagccagttttgaaccttaataaatgatcattgcaatcctataatgttgtttgtg

SEQ ID NO: 9384 - DNA, 823 bp, Glycine max
  Clone ID: 700844629_FLI
ctggttgctcggacatatatgtacacaatgtgaattgtggacctggtcatggaatcagcattggaagtcttggcagagagaacactaaagcctgtgttagaaatgtcaccgtccgagatgttactatccaaaataccctcactggtgtcagaattaaaacatggcagggtggctctggttcggtccaaaatatcatgttctcgaacgttcaagtttctggggttcaaactccaatttccattgaccaatactattgtgacggtggaaggtgcaggaatgaatcatcagctgtggcagtttcaggcatacattatgtgaatgtaaagggaacatacactaaggagcctatctattttgcatgtagtgacaacttaccttgcagtggcataacccttgataccatacaactggaatcagcccaagaaactaaaaattccaatgttccattttgttgggaagcatatggggagttgaagaccacaacggtccctcctgttgaatgtcttcagagaggaaacccatcaaaagaaggaggaatcaattctaacattgattcttgctgaatttatcaacacaatgtccgggatatatagattattatgatatatacatcatggaaagttgttactagttagttattatgatatcttaaaattagttcacattcatgtaatataatgttggatttagtggattgtaataccgtgtgtcaaaaagatgttgggggagaagatttacaagcctatactacttagattgaaaaatgtatgaagtggaaagagtgtattagccatatgtaatatatcaattttttttttcaatt

SEQ ID NO: 9385 - DNA, 1324 bp, Glycine max
  Clone ID: 700844684_FLI
cgatcatcaagcctaatagagggctaatccttcacttgtttgttttgtggtgtattattacattttgcaccatgccttctctcttcgctagaaaccagaggttctcattggctactctcctgcttcttctggaactattgacaggaaaccttcgcatggcagatgctcaaattggtgtgtgttatggcatgctgggcaacaatctaccgtcagcaaacgatgttataggtctttatagatcaaataacataaagagaatgagactctatgatcctaatcaagctgctctagaagcacttagaaattctggcattgaactcattcttggggtgccaaactctgaccttcaaggccttgccaccaatcctgacacttctcgtcaatgggtgcaaaaaaacgtgttgaacttttggcctagtgtcaaaatcaagtacgtggcagttggaaatgaagtgagtcccgttggaggctcttcttcggtagcccaatatgttctacctgccatccaaaatgtataccaagcaataagagctcaaggccttcatgatcaaatcaaggtttcaacatctattgacatgaccctaataggaaactctttccctccatcgcaaggttccttcaggggtgatgtgagatcatacctagatcccataattgggtacttggtatatgcaaatgcaccattactagtcaatgtgtacccttattttagttacactggtaacccccgtgacatatcacttccctatgctcttttcacagcaccaaatgttgtggtatgggatggtcaatatgggtaccaaaatttgtttgatgctatgttggattcagtacatgcagccattgataacactaagattggttatgtggaggttgttgtatccgagagtgggtggccatcagatggaggatttgctgccacttatgacaacgcacgcgtgtacttagacaatttggttcgtcgtgctaatagaggaagcccaagaaggccttcgaagcccactgagacttatatatttgccatgttcgatgaaaatcaaaaaaatccagagatagagaaacattttgggctcttcaatcccaacaaacaaaaaaaatacccatttgggtttggaggaaagaggctagggaaagttgttattgacgacttcaatgcaacaacttccattaagagtgatgtgtaaggttggaatcctactcctcaaaatctctgttattccacccataaaataagagagaatatgttgtttgtgtgaaatatgtatatatccttcagtcttggatgaataaaatttgtgaaaagttgataaagatgaagctatat

SEQ ID NO: 9386 - DNA, 1297 bp, Glycine max
  Clone ID: 700844704_FLI
gtggaggtgaatactctggagctgaaaatcgatgaggaggtggagattgagattgaagagagtgcgtcggcggagtcgccgaacatagggtggggacgatggtatagtctcaaggagcttgagaatgcgactgaagggtttgcggaagtgaatgtgatcggagaaggaggctatgggattgtctacaaaggaattctcatggatggatctgtcgtcgctgtcaaaaatcttctcaacaacaagggccaggcagagaaagagtttaaagtggaggttgaagccattggaaaagtgaaacataagaatttggtggggttagttggatattgcgcagaaggtgctcaaaggatgcttgtttatgaatatgttgacaatggaacattggaacagtggcttcatggtgatgtaggacctgttagccccttgccatgggatataagaatgaagattgctgttgggactgcaaaagggctagcctacttgcacgaaggattagaacccaaagtggtccaccgagatgtaaaatccagtaacattcttttggacaaaaagtggaatgctaaagtatcagactttggactagccaagctcttagggtctgagaaaagctacgtgacaacccgtgtaatggggacatttggatatgtttcacctgagtatgcaagcactggtatgcttaatgagggaagcgatgtgtatagttttgggattctactgatggagctaattacaggaaggagtcccattgattattctagaccacctggagagatgaacttggttgattggtttaaggtaatggttgcaagtcgtcgaggcgatgagctagttgatcctttaattgatattcagccctatccaagatctttgaagcgagctttactggtttgtcttcgctgtatagacttggatgtcaataagcgaccgaagatgggtcaaattgttcatatgcttgaggctgatgattttcccttccgttctgagcatagaacaaatcgagagaaagatcctgttcattctaaagcagctgtttccagtaagattctatacccaacaaggcatgtggagcccgcagataaatcaagctggagatgattatctgttgtgctgttcatggaaacctggagatcaaactatttgttccaacgattttcaatttattatgaaaatgtcagaagccattgtgcataaatagtgtagtttcttctctgtaggtccgtctgaacatatattttgctgtaatgtatggcatcgtcttgtcaagaaatgaactttgtagatatgaatttcccacaac

SEQ ID NO: 9387 - DNA, 891 bp, Glycine max
  Clone ID: 700844710_FLI
cctcgttgaaacttctcacagagccaaagctgttctctttttttcatctgggtctaaagaaccactggtgaccaaaattgtgaaaaggggttccttgattttcatcaattcatggcatttcagcactacatttcccgggatttgaaaaccatcccaaatgctgcgactgagacagaaaactccaatggttgttttgattgcaacatctgcctagactttgcacatgagccggtggtgaccctatgtggccacctctactgctggccatgcatctacaagtggctccatgtccaaagtgattctcttgcacctgatgagcatccacaatgccccgtttgcaaggcagatatatccaatagcacaatggtcccactctatggccgtggccatgccgccacagctgaaggcaaaacatcttcttgtgatgtttttataccaccaagaccatctgcttcatgtgttcaagcccttttggcaacatcatctcaaaggggtcagcaccttccatatcgtaatccttatcagggtcactacttcagctctcatccataccaagaagaggatgatgccacttcacaaatgctcaatcttggatcccaccaccaccctgtgactgggatgtttggggagatggtttatgccagagtgtttggcaacccagaaaatttgtatgcataccccaattcttatcagctgatgggaagtgccacccctagattgagaaggcaagagatgcaggcacacaaatctttgaacagaatttctatttttctcttttgctgcttccttctttgtcttgttgtcttctaagtgagcacttgagattattttctctcattctctgttgtatactttgtaaagaagcatggatgcaacctttaaaaacttgat

SEQ ID NO: 9388 - DNA, 664 bp, Glycine max
  Clone ID: 700844719_FLI
gattctgcaggctcttttacgcaatgcaactgatgccatgagggagtcaagggttcttgagatcataaatacgatggagccacttgcctatagaaagatggactttgaagaattttgtgcagctacaatcagcacacatcaattggaagcacatgagtggtgggaagatattgcctcaactgcttttgaacattttgagagagaaggcaaccgtctgatatcagttgaagaactagccagagagttgaatcttgggccttcagcttattcagttctcaaagattggataagaaatactgatggaaagcttagtttacttggatatacaaaatttttgcatggtgtgactctccgtagttcaaacccaagacaacaccggtagtcttgggccctttgacatacaatttgaatttgaatatgcgggaaaaaaagtagatttagagattctttttggattttttcttctttcatttttcttttatggggcaaaaaaagaatgtataaattaatgtgttagcaagtcaatacagggactgttgagtcaattatatgccaaatccttgctcctttggcctatttcgcaaatgatatgttgccatgggtctgatcccatgaatattcattaatttgtgaatgcttttaaagattacatatagtcaaaatt

SEQ ID NO: 9389 - DNA, 388 bp, Glycine max
  Clone ID: 700844831_FLI
atggttccagatactacaccaagagtttcaaaggatcggtagatgctttccatgtcaatacagttgatacaactggtgccggtgattcctttgttggtgctttattggccaagattgtcgatgatcagtccatacttgaagatgaaccaaggttaagagaagtactaaagtttgcaaatgcatgtggagctattacaactacccaaaagggagcaattccggcccttcccaaagaggaggctgcactgaaactgatcaaaggggggtcatagaatcttttggcaaaatgcaaaagtgctagcatgatttcgttttcttcccctaatgtttaaattttccgttggatttgcttgctataagtttaggagggaacttttgttttttctcc

SEQ ID NO: 9390 - DNA, 379 bp, Glycine max
  Clone ID: 700844834_FLI
gaggaattatgatgaaatgcttgctcaatcaagagctatgaggagacaaggtggtggcaatcctcaagcggctccttcaggatttaggtaatcacacagcataaggccacttattcagctccaaatccaatgccttcaaaggatgctcgcgggttaaatttaagttgacgcctggcataaaggtcaaaaagctatctcacatcaaggccatatggaaaatttctctggatattgtatgatatctgtatcttggcagttgggcgacttgttcaatacttatatttgaattacttatgcttagtttcaacaactaaagaaagtgaccatatttcttaagttgtaaatatcgaaccattagcaatgtgatggactttatctg

SEQ ID NO: 9391 - DNA, 1242 bp, Glycine max
  Clone ID: 700844888_FLI
gctcccatatagtagatgattttcaagactatgcggatctttgctttaaggaatttggagatagggtgaagttttggactactttgaatgaaccatggttgttcagccagggtggctatgcaaccggagcgacggcaccaggaagatgtaccggtccacaatgcctcggtggtgatgctggcactgaaccttacatagttacacacaatcaaattcttgctcatgcagctgctgttcatgtgtacaagactaagtatcaggcacatcagaaaggcaagataggtataacgttggtaagtaactggttcataccgcttgcagagaatagcacatcagacataaaggctgcgagaagggcaattgactttcaatatggatggtatatggaaccattaacaaaaggagagtatcctaaaaacatgcgagccctggtgggaagtagattgcctaagttcaccaaatggcaagccaagctagtgaatggatcatttgattttattggcttaaactattactcctctggttatattaatggtgtccctccaagcaacgacaaacccaattttctaacagattctcgcaccaacacttcatttgaacgcaatggaagacccctaggtctaagggccgcttcagtttggatatacttttatccaaggggacttctagatcttctgttatataccaaggaaaaatacaataaccctttgatttacatcaccgaaaatggtatgaacgaattcaatgatccaaccctttccgtggaagaagctctcatggatatttatcgaattgattattattatcgtcatttcttttatcttcgatcagcaattaaggctggcgcaaacgttaagggattttttgcatggtcatttttggactgtaatgaatggtttgcagggttcactgttcggtttggattaaactttgtagattacaaagatggcttaaaaaggtaccctaagctttctgctcaatggtacaagaactttctgaaaagaaactagtgttagacccaccgtttgaaagctatgcagcacctaaaaacggttaggttaagctcaatgtttgtagttgtagctaattccacgtataagtcattaggttgttgttttctgttagaataatttcatggcacactactaagtgtcctgcaccagcacagctataaattaatatgttatagctgatccttcatgtatcggtttgattttgaatgttatctcagaattaagattc

SEQ ID NO: 9392 - DNA, 873 bp, Glycine max
  Clone ID: 700844894_FLI
tcttcacataccaacatttaaaaagggttgctgaaattgctaggaaacttggaatctttgtcatttctgatgaagtttatgcccatgtaacttatggaagcaatccatttgttcccatgggggtgttttcttcaatagttccggtcattacaattggatctttatcaaagagatggttagttcctggttggagaactggttggatagccacatgtgaccctcatggaatttttcagaaaactggggttgtgaaaagtatcatcagttatttggagatcacaactgaccctccaaccttcttgcaggcagcaatacctgaaatccttggcaaaacaaaagatgatttcctttcaaaaaatcttaatatactgagggagactgcaaacatattctatgatttatgtaaggagatcccttgcttaacatgccctcacaaaccagaaggagcaatgtgtgtcatggtggagattaacttctcacaaattaaggacattgttgatgatatggatttctgtgccaagctagctgaagaggaatctgtccttcttcttccaggtgtcacggttggactgaagaattggcttcgaattagttttgctgtcgacacttctaatcttgtagaaggccttagcaggataaaagcattttgccttcgatatgcaaagatgccatgaagtcatgtcacatggtagggtgtggaagatgttgatttcttagggatatcttatcaaagaccatttatttagcaaaatttataatgtatggagatatttcttcttctcacacggtagggtgagggaggtgttgatttagaggcatgttatatcttcttttaggcattttatatcttaacaagaccatttattgacagtt

SEQ ID NO: 9393 - DNA, 616 bp, Glycine max
  Clone ID: 700844911_FLI
cttgatcactgtgatgatttgatccaactgccctcaagcatttgtggaatgaagtcactccaaaacttgagtctcaccaactgccacaatttgactcaattgcctgttgaattaggcaaactaagatctctagagatcctacgattatatgcttgtcctgatctgaaaacacttcctaatagcattagtcacatgataaggttgaagtatatggacatttctcaatgtgttaacttgacttgcttccctgaagagattggtagtctagtaagcttggagaagattgacatgagggaatgctccatgattagaaatgtgccaaagtctgcattgtcgttgcaatctctgaggcttgtgatttgtgacgaggaggtatctgggatttggaaagaggttgagaaggccaagcctaataattttcatattcaagtttcagagcagtactttgatttggactggctcaaagagtgacataatatatcatatatgtgtatatatatgtttttgtgatgtttttactttccaattcaatgtgaatacttgtagataacttctatttgaagtggaaattacttttctccaaaatcaaattcttgtgtcaagagtattgattgat

SEQ ID NO: 9394 - DNA, 1011 bp, Glycine max
  Clone ID: 700845003_FLI
ccactcttaactcaaaacacaatgacacaacaaacaacaacctcttcctcctcacattcgggcccaagggcccaggcccagaaacagagcaagaggcccagggactgcagcaagcacccggtgtaccacggcgtgcggaagcggaactggggcaaatgggtgtccgaaatccgggagccacgcaagaagtcccgaatctggctcggaacattctccactcccgaaatggcggcgcgagcccacgacgtggcggccctcaccatcaagggccagtcagcaatcctcaacttccccgaaattgcagacctgctccctaggcccgtcacgtgctccccacgtgacatccagaccgcggccacggccgcggcctccatggttaagttcgaccctgtgacacaatcctcagactcggagactccagagtcttcggagctgagcgagattgtcgaacttcccaacattgaagacagcagcgttgactcgacaccggagttcgtcttggtcgatgttgttgacagttgggtgtttcccccaatgggaatgggttcagagggaatcgagttctgtgccgctttttctgatgagttatttccgcaacagagttttattggttccgagatagagatactacccatttgggattgaatggtgagtgggattcatgtgccttttgctcgcttcacgtgggattggcaaatactagcattcatggctgttttgctgtcaatggtccagggccacttcaatttactctctactgtgtctgtgtgcactatatttttcacactgttacttatagttatagttagttagccttagcatttagcaagttccattgtcttcaacttcaatccctttcttccttccttccttccttctaccgagtaatttcctctgttttatacaagtagaaacagaaaatatgtgaatgcctaataaatttttaccacattaccttactgtacagaagaactatagtgttttttaagaatgttcccaaattttccaact

SEQ ID NO: 9395 - DNA, 1514 bp, Glycine max
  Clone ID: 700845021_FLI
gtaacaacagatcaccatggctctatcacgtttgtcccaccgcagcatcggatccactctcacaaaacccttctccgccgccgccgcctccgccgcctcctcccgttcgatctccacctcggacacccccttaacaatcgagacctctgtccccttcaccgcgcacaactgcgaccccccgtcacgcgcggtcgcgacctcctcctcggagctcctcaccttcttccgcgacatggccctgatgcggcgcatggagatcgccgctgactccctctacaaggccaagctcatccgcggcttctgccacctctacgacggccaggaggccgtcgccgtcggcatggaggccgccatcactaaaaaggactccatcatcaccgcctaccgcgaccattgcatcttcgtcggccgcggtggcacgctcctggaggtcttcgccgagctcatgggccgcaaggaaggatgctcgaaggggaagggcgggtccatgcatttttataagaaggagagtgggttttatggtgggcatgggattgttggggcgcaggttccgttggggtgtgggttggcgtttgctcagaagtattctaaggacgagagtgtcacttttgctatgtatggagatggcgctgccaatcagggacagctctttgaggcgcttaatatcgccgcgctttgggatcttcctgctattttggtctgcgagaataatcactatgggatggggactgcggagtggagagctgccaagagtcctgcttattataagcgtggggattacgtgcctggcttgaaggttgatggtatggatgttcttgctgttaaacaagcttgcaaatttgcaaaggaacatgctttgaagaatggaccccttattcttgaaatggacacttacagataccatggacactctatgtctgatcctggcagcacataccggacacgtgatgaaatttctggtgtgagacaggagcgtgatccaattgagagagtaagaaagctggtattgtctcatgatattgctgctgaaaaggagctaaaggacattgagaaagaagtcagaaaagaagttgacgaagccattgctaaagcaaaggagagtccaatgccagatccatctgatctatttaccaatgtctatgttaaaggttacggagttgagacatttggtgctgataggaaagaagtgagagctactttaccataattcagaactttgtcctttgaatatcttgccaccttgtcgtagcagactcttcaaaatagtgaagaataaaaggttctacagagggtcatctctctcccctattcgttgagtttctgcccgcgtgtatagtgtgaatttattcatatgcttggttagcaatggggcggggtttgttatttttttgtcatgtaatatttgcggatctaacagccaaagcatcattgtgattgatgcaactggggtgttctgcaaatttgaggaatacattgtgcactactgaagatatgtagttcagaatattttagac

SEQ ID NO: 9396 - DNA, 4074 bp, Glycine max
  Clone ID: 700845087_FLI
gtttggttgaaagtagcaaagatgtttcctttcgggcaaaagggtcaaaagataaaggggactatggtggttatgcagaagaatgtgttggatatcaacagcatcaccagtgttggagggatcgttgaccaaggcttaggcttcataggcagtgcagtcgatgcacttacttttgcagccaccaaaatctccatccagttgattagtgctaccaaggctgatggtgggaaaggaaaaattggaaagagtacaaatttaagaggaaagataacattaccaaccttgggagctggcgaacaagcatacgatgttaattttgaatgggacagtgacttcggaattcccggtgcattttatattaagaacttcatgcaaaatgagttctacctcaagtctctaattctcgaagacattccaaaccacggaaccattcacttcgtatgcaactcctgggtttacaattcaaaaaactacaagactgatcgcattttctttgccaacaatacatatcttccaagcgagacaccagctccacttttgaagtacagagaagaagaattgaagaatgtaagaggggatggaactggagagcgcaaggaatgggataggatctatgattatgatgtctacaatgacttgggcaacccggatagcggtgataaatatgcacgccccgttcttggtggttcagccttaccttaccctcgcagaggaagaaccggaagaggaaaaactagaaaagatcccaacagtgagaagccgagcgattttgtttaccttccaagagatgaagcatttggtcacttgaagtcatcagattttctcgcttatggaatcaaatctgtatcccaagatgtcttgcctgtcttgactgatgcattcgatggaaatattttgagccttgagtttgataattttgctgaagtgcacaaactctatgaaggtggagttacactacctacaaactttcttagcaagatcgcccctataccagtgatcaaggaaatttttcgaactgatggcgaacagttcctcaagtatccaccacctaaagtgatgcaggtggataagtctgcatggatgactgatgaagaatttgcaagagaaacgattgctggtttaaatccaaatgtcattaagattatagaggagttcccactaagtagcaagctagatactcaagcctatggtgatcatacctgtataatagcaaaagaacatttggagcctaacttaggtgggctcactgttgagcaggctatccaaaacaagaagttgttcatcttagatcaccatgactatctcattccttatttgaggaaaataaatgcaaataccacaaagacttatgctacaagaaccatatttttcttgaaagatgatggaactttgacaccattggccattgagttaagtaagccacatcctcagggtgaagaatatggtcctgttagcgaagtctacgtgcctgccagcgaaggagtggaagcttatatttggttactggcaaaggcttatgttgttgtgaatgatgcatgctaccatcaaatcattagccattggctaagcactcatgcaattgttgagccatttgtcatagcaacaaacaggcaactgagtgtggttcaccctatttacaaacttctgtttcctcactaccgtgacaccatgaatattaattcacttgcccggaaagccctggtcaatgcagatggtattatagagaaaacattcttgtggggtaggtactctatggaaatgtccgctgtcatttacaaggactgggttttcactgatcaagcattacctaatgatcttgtaaagagaggagttgctgttaaggacccatctgctccccatggagttcgtcttttgattgaggactatccttatgcttctgatgggctagagatatgggatgccatcaagtcctgggtgcaagaatatgtctcattctactacaagtcagatgaggaactccaaaaagaccctgaactccaagcttggtggaaagaacttgtagaggtgggtcatggtgatttgaaagataagccatggtggcaaaagatgcaaactcgtgaagagttggttgaagcttccgctatcctcatatggattgcttcagcccttcatgctgctgttaactttggacagtatccatatggaggtttaatcctaaacaggccaactattagcaggagattcatgcctgaaaaggggtctcctgaatatgatgcgttggctaagaaccctgagaaggagtttttgaagactattactggcaagaaggagaccctcattgaccttacagttatagaaatcttgtcaaggcacgcatctgatgagttctaccttgggcagagagatggtggtgactactggacttctgatgccggtccattagaggcatttaagaggtttggaaagaagcttgaagagattgaaaagaagcttatagagaagaacaaagatgagacattgagaaaccgctatgggccagctaaaatgccttacactctgctctatccttctagtgaggagggattgactttcagaggaattcccaacagtatctctatctaaggaccctatggttgcttaagtctgatgaatcccctaatgattttggtaaaaatcattaagttaaggtggatacacatcttgtcatatgatcaaatggtttcgcgaaaaatcaataatcagacaacaagatgtgcgaactcgatattttacacgactctctttaccaattctgccccgaattacacttaaaacgactcaacagcttaacgttggcttgccacgcattacttgactgtaaaactctcactcttaccgaacttggccgtaacctgccaaccaaagcgagaacaaaacataacatcaaacgaatcgaccgattgttaggtaatcgtcacctccacaaagagcgactcgctgtataccgttggcatgctagctttatctgttcgggcaatacgatgcccattgtacttgttgactggtctgatattcgtgagcaaaaacgacttatggtattgcgagcttcagtcgcactacacggtcgttctgttactctttatgagaaagcgttcccgctttcagagcaatgttcaaagaaagctcatgaccaatttctagccgaccttgcgagcattctaccgagtaacaccacaccgctcattgtcagtgatgctggctttaaagtgccatggtataaatccgttgagaagctgggttggtactggttaagtcgagtaagaggaaaagtacaatatgcagacctaggagcggaaaactggaaacctatcagcaacttacatgatatgtcatctagtcactcaaagactttaggctataagaggctgactaaaagcaatccaatctcatgccaaattctattgtataaatctcgctctaaaggccgaaaaaatcagcgctcgacacggactcattgtcaccacccgtcacctaaaatctactcagcgtcggcaaaggagccatgggttctagcaactaacttacctgttgaaattcgaacacccaaacaacttgttaatatctattcgaagcgaatgcagattgaagaaaccttccgagacttgaaaagtcctgcctacggactaggcctacgccatagccgaacgagcagctcagagcgttttgatatcatgctgctaatcgccctgatgcttcaactaacatgttggcttgcgggcgttcatgctcagaaacaaggttgggacaagcacttccaggctaacacagtcagaaatcgaaacgtactctcaacagttcgcttaggcatggaagttttgcggcattctggctacacaataacaagggaagacttactcgtggctgcaaccctactagctcaaaatttattcacacatggttacgctttggggaaattatgaggggatctctcagtgcttaagtactgttcctggttttaaataaatgtgaaattgaaggaaccagattccttaatcagttgtgtatgcttaagtcatgtatttggagtggctgaatgtatttgtatttgtcattaataaagagagttgtgttagt

SEQ ID NO: 9397 - DNA, 540 bp, Glycine max
  Clone ID: 700845147_FLI
agaaccaaaaacttcaggctgagatattggcactgaaaagtagagagccaacagaatccataaaccttaacaaagaaacagaaggatcctgcagcaatagaagtgagaacagctcagacatcaagttggatatctcaaggacaccagctattgacagtcctcattctacacatcagcaacagccaagcagacccttctttcctccttcttctgttaggcctgcaggagttgctcagcttttccaaacttcttcaagaccagaacttgcatcatgccaaaagattgaccaaatggtcaaagaagaaagcctaagcaacatgttttgtggcatggatgatcaatctgggttttggccttggttggagcagcagcatttcaattgaatcaaatcaaagggagagagagagagagagagttaattaattttaaaaatttggatgtagtagtttttccctgtgaaatcaagagggtgtccatcaatttatcacacaatactttattatgatgatgagttcttaaattaaaaacccatgttttgat

SEQ ID NO: 9398 - DNA, 1182 bp, Glycine max
  Clone ID: 700845152_FLI
ttaggcccaagatgacagttcggatattttcagaaattatggcagtggcttttgtcgagataatacttgatcaatgcttcacgttccttggtatgaagtacacatcagcatcatttgcgtctgctgtgatgaattctgtaccctccattacctttgtactcgcaatcatttttcgattggagagcatgaacttgaaggagctaggatgtttagccaaagtgattggcactgcagttagtcttggaggtgcttttctaatggctctgtacaaaggtcctgttgttaacattgcagactcttctgccagccacgtgggacggcctgataatgtgaacgacccttctggcagtcactggcttattggtgcttgttttctcctcataggttgtgctggcttctctgctttctacatattgcaagctataacattgagaaagtacccagcagagatgtccctagccacctgggtttgctttgtaggtgcacttcaaagcagcgcagttagttttttcatggaacgcaatagccctcatgtctggtctctagcatgggattctaggcttgtagcttatgcatactcgggaatagtaacatcagcaatccaattttacgtgcaaggcatggttattaaaaccacggggccagtgtttgtgactgcatttaatcccctgcgtatgatcatagtcacggccttggcctgcattgttctctcagagaaactccatcttggaagcattattggaggagtagtggtggtaattggtctctatctagtagtgtggggcaaagctaaagaacagaaacatctcatgccaccatcccctgaaaaggtcaccctgcaacgccatcaacagctaccagttactgtacccataagtgatgatgcaaatgataataacaaacctcaattggtcataattgaagatagaaacattgggccagaacattgaatgcagagagccagcaacagtgagctaccaccacggtcaatttatgtgggccttaatgggatcacaaagtagtaatagtagtagtgatagagtcacagtagtccatgatcaatgtattgtgatcttaactttactttgtttatgaaacaagtttggaaatttgggtagttttatatgcgaattctgagcttcacctccgcgttttacgatatatatggattatgtacttttc

SEQ ID NO: 9399 - DNA, 925 bp, Glycine max
  Clone ID: 700845160_FLI
gagctccagaacttatatttggggcaactgaatacacaactgctattgatatgtggtctgttggttgtgttttagctgagcttctcctaggacagccattgtttcctggagagagtgggattgatcagttagtagagatcattaagattttgggaacacccaccagagaagaaataaggtgcatgaatccaaactacaatgaatttaagtttcctcagatcaaagctcacccatggcacaaggtttttcacaagagaatgccacctgaagccgtggatcttgtatcaaggctgcttcaatattcaccaaatctacgttgcactgctttggctgcatgtgctcatcccttctttgacgatctgtgggacccaaatgcatgcttgccgaacggccgaccactacctcctttgttcaacttcacatctcaagaactggcgaatgcacctgaagagttgcggcaacgcctcattcctgagtatgcaaggagttgaatcaattccaaagttgaaacatctctagggcattgtaaatgggttttgaattattggacaccctctcggtcatcgcccctgacctgcctgttctgttctgttcttcagcctcttctctgcacaagtcacaactgtgactatacaaagtgagaaacctcaacaccttggaaagttctatcaagtaacttgtaaagatctgcaggtgactcgaatggataaagtggtactacctggtgatacagggttgcaagcctttttttttttttgaagtagtttataaatttggtgcctcagttgtgaaagataatgagttctaagttctaacaatcttgtaagcatgttttcatatagttcaagttcgtttattaattattactttattccttgaagtggaccaagtggaatcctcaattgaataggcttcgcttcttcac

SEQ ID NO: 9400 - DNA, 429 bp, Glycine max
  Clone ID: 700845163_FLI
gtctggaagctagatgcctttgatgattcaactggacagtggtttgtgaccactggtggtgtgttgggaaaccctggcaaggataccatcgacaactggttcaagattgaggagtatgatgatgattacaagctcgtgttttgccccacagtgtgcaacttctgcaagcctttgtgtaggaatgttggggtgtttagggatagtaatgggaaccagcgcgtggctctcactgatgagccttacaaagttaggttccagccatctgcttgaagcttcattaatgcatatgcatgaaaaaagatatgtaattaatgagaacatgatatttcatctggaaaattaagcatcatcatcatgcacgaataaaattgatgcttttgtcatattctatttttgtatgaataaattacgtattgatatcttctgatg

SEQ ID NO: 9401 - DNA, 591 bp, Glycine max
  Clone ID: 700845165_FLI
aatagcttcctctgcggtacgggcagccatcaaggttaaggcttctgttattatttgctttacttcatctggcagggctgcaaggttgattgctaagtaccgtccaaccatgcctgtgatatccgttgtcattcctcaactaaagacaaatcaacttcgatggactttcactggagcttttgaggcaaggcaatcacttattgtgagaggtcttttccctatgcttgcagatccacgacatccagctgagtctaaaagtgcaacaaatgaatcaattttgaaggttgctttagaccatggcaaggcttttggtatcataaaggcacatgatcgagttgttgtatgccagaaagttggtgactcctcagttgtgaagattattgagcttgacgaatagaacttgattcattttcaagtttgcgttataatatgtcttctttgtattagtattttctgttgtatgctttaataataaaaacacttcaaaataatgtgtatcacattggaagaaatgcttttggggaatggatatcattcattgccagcatgccaactgttgtttataatataacaccattgaatccttttatc

SEQ ID NO: 9402 - DNA, 1344 bp, Glycine max
  Clone ID: 700845315_FLI
gaccaatccctagtaaaagaaaaaaaaacgtcttcaaaattacgacaattattatctgataagctgagggtagttatagagaacaaggacatggttttctcttcacttcgcaggtactttagtatgaggcaccaaagctccaaggttcaggctttgtatgaacattgcaaaaccatcttatcgccctctggatcaccccctccttcgtcccaagctttgcagaagctttcttcgattctggacactattcaacctgctgatgttggccttaaagaagaaattgcagacgatgatcgagggcatggattttttggcgctaatgcacttagtagattagctcgatgggctcaaccaataacttatgtagacattcatgaatgtgatagttttacgatgtgtatattttgtttccctacttcttcagttattcctctccatgaccatcctgggatgactgtatttagcaaacttctctatggctctttacatgtgaaagcttatgactgggttgagcctccctgcatcatagaaagcaaagaaccaggatatgctcaagtaagactagcaaagttagcagttgataaggtcttgaatgcaccgtgtgatacatcagttttatatcccaaacacggtggaaatctgcactgtttcacagcagtgacaccttgtgccatgctagacattctcacacctccttacagagaagaggaaggaaggaggtgtacatactatcatgattatccttattcagcattctcagttgcaaatgcacctatatgtgacggggaagaggaggaatatgcatggctcacagagttagaatcacctagtgatctttatatgcgccagggggtatatgctggtccagctattcagctttagctctgcttgcttggatttaaaagcaattgcttgtttcctgctgtgaagggtggatgatattaatgcctgaaaatatacttatcccattttgctcctggaagctagtgacaagaggatctaaaatgctgatggatggaatgttctggtttatttgtgcctccttgtgctggatgcatattttgagcaaagattttcgtaaataaatctgcattttctcattagcttggaacaacaaatctttgctatagttaccagtggctattgtgtttcataccatgttccctcattgttacaagttatagatgttctgtccctgcacattaatataagcataattgttttgtaataattatcataaatatggtatgtacaaaacggattcctgtgtagccgtaatcaagtatggtaatacttttagtataatggaaaaagatgccctggcatcatcagtctgtgggttgc

SEQ ID NO: 9403 - DNA, 1526 bp, Glycine max
  Clone ID: 700845329_FLI
ccaatccactgttgttgttgttgtctaaagcaaaataaagtggctagtgtacgtgtggattcgattttcgtttggtccaaaattaacattaggatttcaataacagtgcttctcaaaatttctagaacccacgtcacacttgggagggatggggttggaaaatgtctgggttccgtattatataagagtctcgccctagaatcctcgagcagaatattattcactgtactttatccctttctgtgagggaattatggtaattgatatcgaggttttgactcatggattctgatcgccccagaaaaccttccaaaaatttagttcactctcgcttcttccttttcggcttctattgctgggattgggagttcttaaccgctctcctcctttttagttgttccccttaatcttgttccttcatattttttttttttcttattagatcagattgaacaaaagggttgctctttattttttaatcttgggggaataatagaaatagaaataagaaaagattagtgaggttgaaatgttgcaacaacgatcggtgccggcaccgttcttgacgaagacgtatcagttggtggaggatccggggacggacgaggtaatatcgtggggtgaaagtgggaacacttttgtggtgtggaagcatgcggattttgcaaaggatttgcttccaaaatatttcaagcacaacaacttctccagctttgttcgacagctcaacacctatggatttcgaaaaattgtgccagacaaatgggaattcgcgaacgaacacttcaagcgagggcagaaggagcttctctcggagatcaaacgccgcaagaccgtgcctcagtcgtcgacacattccccggatgccggaaaacccggcgccgaaggcaactctccgtcgaaccccggcggctgcgacgacgcgggctccacctcaacctcgtcctcgtcctccggttccaagaaccagggatcggtggaaacaaacacaacgccttctcaccagttatcgagcgagaacgagaaactgaagaaggataacgaaacgctgagttgcgagctggcacgtgcgaggaagcagtgcgatgagctcgtggcttttctcagggaccgtctgatggtgggtcccgatcagatcgatcgcatcatgcggcaaggaagttgcggatctgaaaacgcggtaggtgaaggcggtggtggaggacactgtttgaaactgtttggtgtttggttaaaaggggatacactaacagacaaaagaaacaaccacaagagaggccgcgaagaccaaatgggcttcggtgggcctcgcctcaaggagtcaaagcccgttgttgactttagtaggaataggatgatgatgattaatgaaaaaggaaaaggctaagcggtaatcatgtttgggtaaaaagaccaaatgcgctagcctatgcttcctaaacatgttgaggctgtgtaatttttaatgtacgtaggtaaatgcctctatgaatattgattgggaaattaaacaggttttaataatc

SEQ ID NO: 9404 - DNA, 843 bp, Glycine max
  Clone ID: 700845470_FLI
ctttcctctccgaaccctcgatcactctcacgcgctcctatattcgctcctccaccgtcgctctctcgaacaaccacaacaccatcttcatcacatggcaaacgcagcatctggtatggcagtccatgatgactgcaagttgaggtttttggagctgaaggcaaaaaggacacaccgtttcatagtttttaagattgaggagcagcagaagcaggtcattgtggagaagcttggtgagcctgcccagggctatgaagatttcactgccagccttcctgctgacgagtgccgttatgctgtttatgattttgagtatctgactgaagggaatgtccctaaaagcagaatttttttcattgcgtggtcccctgacacatcaagggtgaggagcaagatgatttatgcaagctccaaagacagattcaagagggagctggatggaattcaagtagagttgcaagcaactgatcctactgagatgggtcttgatgtgttcaaaagccgtgccaactaaaatgattatataaaatagtaggctttctggtgggagcagcacccctgaagccttagttactcatatggaaaatatcctagtttgtgggatggtcaacttgggtagttatggtcccaaactctcaattttccaagttgtggcataaaattctattgcaccttttgacaagctttgcttgttccagtgtgttttattatgatttgtgatttatacaacctttgcgtttgagtgccattttagtcgtcttatcccttactagttgaatttgtaactgttttgtgttatcagacaaaaaatgggggttcttcacttattgacactcgtcatcc

SEQ ID NO: 9405 - DNA, 2190 bp, Glycine max
  Clone ID: 700845556_FLI
cagatggtgtgagtttggcaagaaatacatccaacaacgcccgtcgagggttgccaatgatccaaacaaacatgaagccaacggattcggaattccaagtgtgccacgacgacagcaccccgccggtcagagcccaaaccattcacgagctccattctctgcagaagaaaaagtcaaccccttccactcccctctcagcaacgcaaggccccttcgccactgtttccgatgaggaacgccagaaacagcaactccaatcaatcagtgcgtcgttggcgtcgttgacgagggagtcagggcctaaggtggtgaaaggagacccagccactaaggcagagaaggggacacatgttcatcaccatccgcaaccacattactttgcttcaacggcgtttgatgtcagtgacagtgcgctcaaattcacccacgtcctctacaatctctcccccgctgagctgtatgagcaagcgattaagcacgagaaaggatcattcataacggcaacgggagcgttagctacactttctggagcaaaaacgggacgctctccccgagacaaacgggttgtcagggacgacaccaccgagcatgacctctggtggggaaagggctcgcccaatattgaaatggacgaacataccttcttaatcaacagagaaagagcagttgattacttgaactcccttgaaaaggtttatgtgaatgatcaatttctgaattgggatccagaacacagaatcaaagtccggatagtatctgcaagagcttatcactccctatttatgcacaatatgtgcatccgacccactcctgaagagctagaggaatttggaactccagacttcactatatacaatgcaggacagttcccttgtaatcgttacacacactacatgacttcatcaactagtattgacatcaacattgcaaggaaagaaatggtcatccttggcacacaatatgctggggaaatgaagaaaggtctctttggtttaatgcactacctcatgcccaagcgcaatattctctccctacattctgggtgcaatatgggcaaagatggcgatgttgcactcttttttggattatcaggtactggaaagacaactctgtctaccgatcataaccggtacttaattggagatgatgagcattgctggagtgaaaatggagtggcaaatattgaaggaggttgctatgcaaagtgtgtcgatctttcaaaggataaagaaccagacatctggaatgccatcaaatttgggacagtactcgaaaatgttgtttttgatgagcatactcgagaggtagatttctctgacaaatctgtgaccgagaacactcgtgcagcatatcctattgagtacatacccaatgctaagataccgtgtgttgctccccatgcaaagaatgtcatccttctagcttgtgatgcatttggggtgctccccccagtaagcaagctgagcttggcccaaacaatgtaccatttcatcagtggctacacagccctggttgctgggacagaggatggtataaaagaaccacaggctacattctctgcttgtttcggggcagcgtttataatgatgcaccctaccaaatatgcagcaatgctagccgaaaagatgcagaagcatggggctactggatggcttgtcaatactggctggtcaggaggaagttatggattaggcaatcggattaagttagcgtatactaggaaaatcattgatgctattcactctgggagccttttgaatgcacagtacactaagactgaagtgtttgggcttgagatcccaacagcactagagggagtcccttctgaaatcttggaccctgtgaatacttggtctgacaagaaggcctatcaagatacacgcttgaaactagcaagcttattcaagaagaattttgatggattcacgacctacaagataggaggggatcagaagttgactgaagagattgtctctgctggtcctatattctgatgagagcatttcctatttagcgaaaaaaaaaatgaagtccaaaagcattcggttgattatttctacttaaaggttttcactgtatttagcttgcttgactataagacgatccctttattattgacacttccgagacaatacacaaatctgttattttgcgagcgtttaattattgaaattttcggccttgtcaggc

SEQ ID NO: 9406 - DNA, 1033 bp, Glycine max
  Clone ID: 700845570_FLI
cttccacagggatctcaagcttgagaatgtactagtggataacaaagggaacatcaaaataactgattttggtcttagtgctttaccccagcatcttagggaagatggattgctgcatacaacttgtggaagtcccaattatgttgcaccagaggtacttgctaataagggctatgacggtgcaacatcagatacatggtcatgtggtgttatattgtatgtgatcctaacaggacacttaccttttgacgatagaaatcttgtagttctctatcagaagatttttaaaggagatgttcagataccaaaatggctaacaccgggtgcacggaatatgataaggagaattcttgatcctaaccccgaaacacggataacaatggctgggatcaaagaagatccatggttcaagaagggttacattccagtaaatcctgaggatgaggatgtatatgttgaccaagaagccttttccatccatgaacagccaaatgaagcagaacagaggaattcaggatcaccatccctaatcaatgcatttcagttgatagggatgtcttcatgcttagacctctctggcttttttgagaaagaggatgtttctgagagaaagataagatttgcgtcaaatctttcggttaaagatctgatcgagaggattgaagatactgcgacagaaatggaatttagagtcgagaagaaaaatggcaaattgaaagtgatccgagagaacaaagtgcacaaaactcttggctgcctctcagtggtagtagaggtgtttggaataagctcatcattgtatgtagtagaattaaggaagtcttatggagatggttctgtatataaacagttatgcaataaattattaaatgatttgggaattccccccaagcaaccgctagtgagatcagcagcaaattagaagccagattatgtgtaggatgtttttttggctcaggtggatagctacacagatgatataaaaaccaattgtaaatgcattatagttaaagagtagagaaatgcactcatg

SEQ ID NO: 9407 - DNA, 601 bp, Glycine max
  Clone ID: 700845715_FLI
gggaattgcgatggatgggagaaacggaagcggaagcaggaggagtggggaagcaggaggaatggggaaggcgataatcgcgttggtaattgggagtcttgtgtactatcactgtgcctaccgcaattctacccttgtctctcttttttccgatgtcttcatcgtccttctctgctccctcgccattctcggtcttctattccgacaaatgggcatccaggttcctgttgatccccttgagtggcaaatatctcaggagagtgcgaacgcgatcgtggcatggttggccaatacgattggtggcgccgagtcagtgttcagggtggcggctactgggcacgacaagaggctgtttctgaaggtcattctttccctatatctcttctctgctcttggaagactcgccagagggattacagttgcctatgccggactatgcttgttttgtctttacatctttgccgagtgctctcaatcaattaccttcttcgggagaactactgaaactgaagaacaagacaccatcatctaattgtaacataactactcattttcgctattgtatgtcttccccgtcaagaataaatcatctttgctgcac

SEQ ID NO: 9408 - DNA, 677 bp, Glycine max
  Clone ID: 700845729_FLI
cccatcagtaccagtcgattaagaaaacgcgaaaatcatcgctgaaaaacaaacatggtctgcctctgttagcagcaaatattaggttgtttgttccgaacccaaccatggaagagttcagatccaaatcgtacggtgacggaaggatgcagattgaggcctaccgtggaaccaacatgcaagatctccggtgctacagcgcctcctacgcctcttcggtgcacccaacaacaacacagcaaacccagatgggaaataacgacgccaagtttaagaagggaaagtcaacgaatgggtccacatccaaaagttggagctttagtgaccctgagttgcagaggaaaaagagggtcgctagttacaaggtctatgctgttgaaggaaaactcaaaggctctctcaggaagagtttcaagtggttcaaggacaggtgcaacagagttgtctatggctggtagttattacaacaacaacaacaactatgggtgttttatataatgtaagaataataattttataatttatttggctttgtttatctatttgctgcacttagtgtttcttttctgtggctgctaaagtaccacataaagggtgtaatatggaagagaaattgtgattcttgtgttcattttggtccatgtaaagagtgcaatcaccttgcttgcttgctgttt

SEQ ID NO: 9409 - DNA, 689 bp, Glycine max
  Clone ID: 700845740_FLI
attcctatataatagaaaagtcttccaaagtagctttccccatccatctttctttccaacgttcacaaagaaaaagagaaaaaaaggaaggttgctattaaaatggaaagcagccataacatgaggcaaagcaccatggaaactgagtttgaggacttgctgccagtgatggcagagaagcttgatgtggagtcctttgtctctgaactgtgtggaggtttcaagcttctatcggacccggaaactggtttgatcacgagcgagagtctaaggacaaactcagctcttcttggcatggaagggatgagcaaggaggatgcagatgctatggttagacaaggtgatcttgatggagatggaaagcttaatgaaactgagttttgcatccttatggtgaggcttagccctggaatgatggaagatgctgagtcatggctggagaaggcaattgatgaagagcttaggaagtcatcatcttagagataaattggtccccttttgtaatcaattgtaagttatgatagtatgtatttaattttaatcttgccagtttttaagttccatgaaactcatctttgtcctaatgggtcgtggcttatgaaatgaatttctttgatttcttttgttaccgcgatattgatgtgatatatatatcgtttttgtcaaatgaatatgagccaaatctatgt

SEQ ID NO: 9410 - DNA, 907 bp, Glycine max
  Clone ID: 700845749_FLI
acggaggaggagcactctccccgtcgatctcttccaatgctgacacgtgctcattattctcctccgaccatttccgaatgttccagttcaaggtgcggaactgtccacgtgtcaggtcccacgactggaccgagtgtccctacgcccaccccgccgagaaggctcgccgccgtgacccccgcaagtaccactactcaggcacctcctgccccgattaccggaaggggaactgcaagaggggcgacacgtgtcagttcgcgcacggcgtcttcgaatgctggctccacccttctcgctaccggacccagctctgcaaagacggaacaaattgccgccgcagagtgtgcttcttcgcccacaccagcgaccaactccgcgtcgtgacggattcatcgtcgtcgtcgtttgtttcctctcccacttcggtgctcattaactcttcgttctccgattcttcgccgtacagcttcgtccgcggaatagttaaactggatgaggaagggtcgtattcgggtctgacccgttgcgtgttcgggtcgccacgtggcgggtttatgagtgtgaatgggtgcgaggaggagcctgcgatggagagggtggaatcggggagagacattagagcgaggatatatgcgaagcttagtagggagaattccattggatgagtatcggaactcgtgaaatgaatggattccgtggcctttcatttgggtctgtctgtttgtctctgtacaatatataatgcaattcaataaaataaaactatatgtacatagttgagaaggtagagaccgttttgctctctgtgttttgttttttaccttagttcctggctgcccaaaattgggtagcatttgattgtatcaattgttaattttggacttcattcaagaatcatgtttttctt

SEQ ID NO: 9411 - DNA, 787 bp, Glycine max
  Clone ID: 700845806_FLI
gcaattaaaaaagaccatgaactccaagcatggtggaaagaagttgttgagaagggacatggtgacttgaaagacaagccttggtggcctaaaatgcagactcttcaagagcttattcaatcatgttctactatcatatggattgcttcagctctccatgcagctgttaattttggacaatacccttatggtggttttatcctaaaccgtccaactcttagcaggagatggattccagaagaaggaactccagaatatgacgagatgacaaagaatcctcaaaaggcttatttgagaacaatcacgccaaagtttcaggctcttgttgatctttcagtgatagagatattgtcaagacatgcttctgatgaggtctaccttggacagagggacaatccaaattggacctctaatccaaaggcaatagaagcctttaaaaagtttggaaaaaagctagcagagattgagacaaaaatctcagaaagaaaccatgatccaaatcttagaaatcgaaccgggccggctcaattgccctacactgtgcttcttcctaccagtgaaacagggttgacttttagaggaattcccaacagcatctctatctaaatgagtgtggctcaatcgtattgtacttttacttttgaatatctcatatacgtacgtaagcttatgtttattttagggtgatgtttagtaattgtgtttgtttgagtaatattgtatttagggtaagatttagtaatatgggtgatgttcagaatgctaattaataaataagctctttagc

SEQ ID NO: 9412 - DNA, 1431 bp, Glycine max
  Clone ID: 700845874_FLI
ctcaaaagagcagaaagggacaagatcccggaaaggcgtgccagcgtcagagagactcatcagttctcactcgtacggcgcttttgctttgctttgcttcatttctttcatcgtcatcataaagttcgttcctttctcagttttcacccatacccagatgagtaacagcaccatctcggatctgtgtccctcctttgagtgaaaaaggttcaatctttggtctctggggctgttggggttccgtcattgaagaagaagaagaagaagggtattattgttattataatcatgtacccgaggctcatacacccccacgatgggattgtgacgcaggatgagttgcagggtggtgctgcttccaacctctctcacgctcacaagggtgacccttgtctcgttttaacggctgatcccaagcctcgtcttcgttggactcaggacttgcatgaacgcttcgttgatgcggtcacgcagcttggtggagctagtaaagctacaccaaaagcaatcatgcggactatgaatgtcaagggtttgactctgtttcatttgaagagtcatcttcagaaatacaggcttggtaagcaatctgggaaagatgtgggcgaaggatgcaaagatggttcatatcttttagaaagccctggtgctgataacacttctccaaagttgccaactcctgatacaaatgagggttatgaaatcaaggaggcattgagagcacagatggaagtgcaaagtaaattacatttgcaagtggaggcggaaaagcacttgcagattcgccaggatgcagagaggagatacatggcgatgctcgaaagagcttgcaagatgctggctgatcaatttatcagtgctacagttatagacacagacagccaaaagttccaaggaattggaagcaaagcacctagaggtaccttggttgatcctcttggtttttactccttgccatccactgaggtagccggagtgaatgtcccggaagaagaaatactgccaagtctcccaccccaaagggccgattgttcaaccgaaagttgtttaacctcgcatgagagctctggaggattggctttagaaggatctccaggcgagggaaaaaggaggatgctaggcatggactctatggcagcacctttgatctggagtgaagctaagatgagaactcaagccatcaatgtagctcaaggtaatcatcctcaaggaataactaggtatggcatgtagggatggaaggtcttcttgatggttcatcccctcataatatataaacctttgagcttcatgcattccctttttttatgggtacttgaactcttcatgtcttgtaagttagtgagacataggtggaatcaattttacccctttgtaaattcaatctactctgtggctttaaacatcgcaaaaaactagctttgactatac

SEQ ID NO: 9413 - DNA, 517 bp, Glycine max
  Clone ID: 700845877_FLI
ctcccattaacagcaaccatggtgcagaggctcacttatcgcaagcggcatagttatgctaccaaatccaaccagcaccgggttgttaagacccctggagggaagttggtgtaccagaccactaagaagagagcaagtggacctaagtgccctgtcactggcaagaggatccaagggattccacacttgagacctgctgaatacaagaggtctagattgcctcggaaccgcaggaccgtaaaccgagcctacggaggtgttttatcaggaggagctgttagagaaaggattattcgtgctttcctggttgaagagcaaaaaattgtgaaaaaggtattgaagatccagaaggcaaaagaaaagcaggcatcaaagagttaagctgttgagtgattcatgagtgcaaaaaatatcttatcgttaaaatttgtgctaaagaattttgattttgaatggtgttaactatgaatgtgaaacttaatttgaaatttattttatgatttctgtgctttttggt

SEQ ID NO: 9414 - DNA, 1555 bp, Glycine max
  Clone ID: 700845880_FLI
catgaactcgtctccgtcttcttcccagttaccttcatcaagcgctgattttgacaagtttaatagtttgccgcgcttccgcccacttgaatgcttgcaagggaacccggttccggcgttcctgtccaagactttcgaactcgtcgacgatccctcgctggatccgatcatatcctggggctccaccggtgttagcttcgtggtgtgggatcctaccctgtttgcaagacacgtcttgccgaggaatttcaagcataacaatttctccagttttgttcgccagttaaatacctatggattccgcaagattgacactgaaaaatgggagtttttcaatgaagctttccagcgaggaaagagacatcttctgaagaacatccggaggcgcgggccacctcagtcccatcaggttggtggcaatattgtgccttattccgatgcagataaggccgggcttgaatttgagctagaaagtctaaggaaagaaaggagtgtgctaatgcaagaggtggttgagttgcaacaacagcagagaacgacacttcaacgtgcgagacaggtgaatcagaggcttcaatctgcagaactgatacagaaacaaatggtttctttcttggcaaggttatttgaaaagccagcatttttaaccagtctccagcatgcgaaggaacaaagagatttagggtgtcctaaagttagaaggagatttatcaagcagcaccaaggccaaacagaaatatcagattttttaaatgaagggcagattgtaagataccaacctgattggagaaatgtaaccacctcttctgaaatacaagaaatgtatccagtttcacttgaagagtctccaaattacctttctcaggctttggcaaaagaatttagtgaaggcacagagaatctgatatcagatgaagtcatgtcaattgctgacaccatggggtttaagtcatcaagctttggacttgatggtaaccttttcaaagggaaaaatgtcatgagctcaaacgaaggtcttcttgcagaggagtttgtgtctttcccagaggatttgaccaaggagacaggatttccagagttttcacctcttggaactgaaggcatcatcaagcgagaagataaacggaacaccaactttgatgttagtggtgctgattcaagctctgggaatgaacagtggggaaatcctatcaattatgaagtgccagaatttgtagtcacaagtggtatgacagacatgtgggatattaactatttaactcacagcaagtgacagaaagtatcccaactgatgattcaacacttgatgaaaaagaaagataatataaataagaatatggatgcatcgggcttcatctgcttctgcacatattgtgctgtgtttagttcccaggggtccaattattaaataaattgatttgtaactggtgctcattcactaatcaccaggtttcattcttttagattagttgtgtagttgttcatgctagtagttatgaaccaaattcttaatttaaatatgttaagatttaaagaatttgtgaaactttatatc

SEQ ID NO: 9415 - DNA, 1314 bp, Glycine max
  Clone ID: 700845984_FLI
ccagaatccacacctaatgcaatggaagcggagtccttgaatgaaaagagtatcaggagaatccacaaggcattggactctgatgatgttgagctactgaagcttcttctaaatgagtctagtgtcactctagatgatgcatatgccctgcactatgcttgtgcctatagcgattctaaggttattcaagaagttcttagtctaggcatggctgatattcttcgtagaaattcccgaggatacacagttctccatgtggctgcaaggcgaaaggatccatccattttggtagcactactgaataaaggggcacgtgcatcagataccactccagatggacaaaccgctcttgcaatttgtcagaggttgacaagatgcaaggattatcatgagaaaacagtgcagtgtaaggaatctaacaaggacaggctttgtgttgatgtcctggagagggagatgagaagaaattctatgactgtgaatatgtctgtttcatcacagttaacagctgatgatttgcacatgagactggattaccttgaagatagagttgcatttgctcggctgttgtttcctgctgaggctagggtagccattgagaatgctgaagcagattcatcatcactgtatgcaaattcatcggctttgaaggtcacaaatggcaacccgaaagaagtagatctaaatgaatctccctcggctcgaaccagaaaactccagttaagattgcatgcccttatgaaaacagttgagaatggtaggcgcttctttccccattgctctgaagtgcttgataagtttctggaagacgacgaaatgccagatgttttcttcctagagaagggcagtgaagaagagcagagaatcaaaaaagcacgcttcatggagcttaaagatgatgtgcaaaaggcatttcacaaggatatggctgaaaataaccattctggtttttcatctacggtgtcttcctcttcttcctcaactcgtagggaaggtcttaaccatagagtaaggagaaaatgaagtccatgttcttctatgtagagtgttgcaacttgcaagtagaagccgtggaatatttagaaaaaataagatggaatgttaaattagggggttttgctaatgaacttgggagatttttactagcttgatttagtttcttatagttgttggaccaagagaagaagaaaaataaaagaagacgaattggcttatagtaatatctttgttccttttcgaagaccctaaagtgtgtattttttacattgttatctgattatagattgttatataattgaaaattttacctcctgt

SEQ ID NO: 9416 - DNA, 740 bp, Glycine max
  Clone ID: 700846047_FLI
ctgattagttcattgtcagtgattatggggatgcagaagcatgttcttcttggactacataaagaatcgcttcaagctttacgtgtgaactattaccctccttgcagcacacctgagcaagtgctgggtttgagtccacactctgacgcgagcaccatcaccttgcttatgcaagatgatgatgtaactggcttagaaattcaacaccaaggaggatgggtgccggtgaccccaataccagatgctctagttgtcaatgttggagatgtgattgagatctggagtaatggcaaatacaagagtgtagaacacagagcagtgacgagtaagaaaaagagaaggatttcttatgcattatttttgtgcccacgagatgatgtggaaattgagccccttgatcatatgatagatgctcaaaaacccaagttgtatcagaaagtcaggtatggagattatctgagacaatctatgaagaggaaaatggagggaaaaacacacatggatgtggcaaggatagaggattctcatctcacgaaaaaagatgattaagaaaagaaatggcccagtaaaagaatatgagaagaacataaagtgtaaaagtactccctcgtgctgatttaccaagtgtcaattgtgtttgtataatatgcataaactaagtcgagtctttacactctgcttactacatatccttgtcactgaaatttagatttctttctaaaatctaaaccaacttctgt

SEQ ID NO: 9417 - DNA, 1431 bp, Glycine max
  Clone ID: 700846063_FLI
tgaatctcagaattctctaaaagagatctttttctgctctttgaagaaagaagggtctttgcttgattttggagatgtctctgctctcagatctcatcaaccttaacctctccgataccaccgagaaggtgatcgcagagtacatatggatcggtggatcaggaatggacctgaggagcaaagcaaggactctcccaggaccagttagcgacccttcagagcttcccaagtggaactatgatggttccagcacaggtcaagctcctggtgaagacagtgaagtgattttatacccacaagccattttcagggatccattcagaaggggtaacaatatcttggttatctgtgatgcctacactcctgctggagaacctattcccactaacaagaggcacgctgctgccaaggttttcagccatcctgatgttgttgctgaagtgccatggtacggtattgaacaagaatacaccttgttgcagaaagatatccaatggcctcttgggtggcctgttggtggtttccctggacctcagggtccatactactgtggtgttggcgctgacaaggcttttggccgtgacattgttgacgcacactacaaagcctgtatttatgctggcatcaacatcagtggaattaatggagaagtgatgcccggtcagtgggaattccaagttggaccttcagttggaatctcagctggtgatgagatttgggcagctcgttacatcttggagaggatcactgagattgctggtgtggtggtttcctttgaccccaagccaattaagggtgattggaatggtgctggtgctcacacaaactacagcaccaagtccatgagagaagatggtggctatgaagtgatcaaagcagcaattgacaagttggggaagaagcacaaggagcacattgctgcttatggagaaggcaacgaacgtcgtttgacaggacgccacgaaaccgctgacatcaacaccttcttatggggagttgcaaaccgtggagcttctgttagggttgggagagacacagagaaagcagggaagggatattttgaggacagaaggccagcttccaacatggacccatacgtggttacttccatgattgcagacacaaccattctgtggaagccatgagcaaaacctgcatgttttctccctttggatggaaaggaacagttatgcttttcttagtaggatttggtctctctctctttttaccttttgattggtactatggttggtgccttgttggttggtgcaactaactggcaagggttgttcattgttttcttctattcctttccctcgttttccgattgttacaatgacaataatttaatggttattatcagtcttgaacaaagaaatgctgattgtgaagtataataataatatatgaaattgtcatgttcattggagt

SEQ ID NO: 9418 - DNA, 944 bp, Glycine max
  Clone ID: 700846085_FLI
gcatgaatgacagtatcaagcagttagctgctgaggcttctgatttggattcaactgcaacatctagattcaagatgccgaggattgaggctaatcattcccttttggaagaaattagggaggttaatcagcgacttattgacacagtagtagacataagtaacgaagaagttgatccaacggcagctgctgctgctgctgaagggacagaagggaccattgtcaaatgttcttacaatgctgtggctctcagtccgagcttaaaatcccaatatgcttcagcacagatgtcaccaattcaacccttgcgattgcttgttcctacaaattatcctaattgttcccccatactcctagacaagtttccagttgaatccagtaaggagaatgaagatctttctgtgaaagcgaagtcaaggtttagcatatccttgcgaagtttatcacaacctatgtcccttggggagatagcaaggacttgggatgtttgtgctcgcactgttatttctgagcatgcacagcagagcggtggtgggagtttcagctctaagtatgggacttgggagaattgcttgaccacatgatgatccttgccgttccatgcaaacaaacatcttttttcttctgaaatttgccaaaacttgtgtcaatcattggaatcggagtttttgggtgcaggtgaaaagcaattttgcatcaggtcaaattggttccgtttcagtgaattgtgtattccgttagtatccattttcttgtttatttatatctcaaattgcgatatttaccgctgcctaagatatgtggtagatttgtgtgacttgaatcaaattgccttcaccaaggctttgttcataactaatatagtagctcaacagtttaggcccgtaatttctgcataagaacaattcttccagatgctcataattaaattgttagttatgatt

SEQ ID NO: 9419 - DNA, 671 bp, Glycine max
  Clone ID: 700846152_FLI
agcaagcgcaattgtctgagcttgagttgcaggttgaaaaactcaaagtggaaaatgcaaccctatacaagcagttcacggatgctagtcaacattttcgtgaggctgatacgaataatcgagtgctaaaatcagatgtagaagctttgagagccaaggtgaagttagcggaggatatggtcactaggagctcttttactacgttaaactatcagcttcttcagacacaacaacatcaaatgagcacacccccgcaactgaacacgactaatcttcgccgcatggcgcatgtttcgccaaccatcaccgtccatggtaatgatgcctcatacaatggtgtaacagttggtgaacagaattcatcagcacttggaaacttggatatgactttcaacaacatcaacaatggagtcatgaacaatgctatgagttgtgggactatttggccacttgattagactctagctatgttatttgtcttgtctaatttgattagtagcctatgttaatgtcaagctgtgttatttgtcttcgcttgattcctctttaatgatgcctctgtttaaaatggtgtcttctttcgttgtatctagttttgtataaaaggccatggttgctttatccatttcccggaaggtaattgtaaaaagccccaaaaaaaaaaagggggg

SEQ ID NO: 9420 - DNA, 832 bp, Glycine max
  Clone ID: 700846162_FLI
ggagaaaccaacttggcttattgcaatggctaacttgtttgttgttattcatgtaattggaagctatcagatttatgcaatgccagtgtttgacatgattgaaacggtgatggtcaagaaattgaatttcgaaccaagcagaatgcttcgttttgttgtacgtaatgtatatgtggcattcactatgttcattgctattaccttcccatttttcgatggtctcctaggattttttggagggtttgcttttgctccaacaacatactttctcccctgcatcatgtggcttgcaatccacaaaccaaagagatacagcttgtcttggttcattaactggatctgcattgtgcttggcctatgtttaatgattttatcacctattggaggattgaggacaatcataattaaagccaagacctacgaattttactcttgaactctttctcctcttgactcagtcatggaaagttaactatatggaaatgtgtgtgatttatcataggtcgctctttaatttactattgcaaaagattgcttgtatagtattgcgtgttggtggaaggggaaattattcccacggaatctcatgaaagaggaatttctagatgtttttttcctttggcattttcattataggaatgtaccattttctctttgctctacattattctcgtaatgatacctattttgtaaagcacatatagcatgtttggctttgattaatttttggaaacaagcaagatttgttttccttttaagcacattttgtataaacttttgatgtaaattattttgaacaaaataaatgaaaaatgagattttttttctgaat

SEQ ID NO: 9421 - DNA, 304 bp, Glycine max
  Clone ID: 700846257_FLI
gacacaaataacatcctgttcatgcgtttgcatcatgataaaaacatcacagtggttgttgaacacagttatttttttttatcaaattaagacacctcccttccctagcccctcataacagaaacataatcttacccagaaaacaggaagtgaaaagcaaacccacaaaagttttcatagatgcaatccatttcaatattcacttccctccggattatcctttcaagcctcctaaggttgcctttaggactaaggtgtttcacccgaacatcaatagcaatggtagcatttgtcttgatatcct

SEQ ID NO: 9422 - DNA, 647 bp, Glycine max
  Clone ID: 700846440_FLI
cacccattccataaaaacaaagctttttcttcctttgccactttcccggaaaatcctcctcattttttctggaaaatttatcttccgttttctcgctgacaccaccgcacactcttcacgccttctctcactctaatctattatggcggatgaaggtgttgccaacggcggcgtcgatgatcagtacggcgaagaatcggcgactaagatcgcggcgttgcaacgcgagcgcgacgaattggtgagcgaaaacgcggcgaggaaggaggagatcaagaagctgacggcggagctcgacggattgaggagcgacggtgcagataggagcgagaagattgaagagctgcagagagaagtagcgcagtcgcgtgatgctgccaaagcgacggaggttatcgccgcgagggcggcggacctggagacggaggtggcgaggcttcaccacgatatggtagcggagatgactgcggcagaggaggcgagggcggatgccgctgaattgaggaaggttttgggagagacagagtctagggttgagtctctggaaagggaattggcagggttgaagaaggtgaaggctgagagtgaggttagggttagggatttggagaggaagattggagttctggagactaaggaaattgagg

SEQ ID NO: 9423 - DNA, 1088 bp, Glycine max
  Clone ID: 700846492_FLI
caaaaactacgtcaaaacgcgaactccgacgcaggttgccagccatgctcagaagtactttctccgacgacgccgctcctcagaactccgggcgccaccgcgagcgcgagcgaaagcgaggagttccgtggacggaggaagaacacaagttgtttttggttggattgcagaaagtagggaaaggtgattggagaggaatctccaaaaactacgtcaaaacgcgaactccgacgcaggttgccagccatgctcagaagtactttctccgacgaagcaacctcaatcgccgtcgccgtagatccagcctctttgacatcaccaccgacacggtctctgcaattccgatggaggaagaacaggtccagaatcaagacaccctgtgtcattcacaacaacaacccgtgttccctgctgaaactagcaaaatcaatgggtttccagcgatgccagtgtatcagtttggggttggttcttctggagtgatttcagtccaaggtactggaaacccaatggaagaactcactctgggacaaggaaacgtggaaaaacacaatgtgccaaacaaggcctctacagtgtctggtatcatcacccccggttcttctagttctgccattgacccaccaccgacactgtccctggggctatccttctcatctgaccaaagacagacatcatcaagacattcagctttacatgccatgcaatgtttcagcaatggagatagcatcattagtgttgcttgagaatatggtccttggattcacagattaattacatatattaatatttctctagtttcctgtctttttggtgggagaaagagaaagaggttgaaggaaagggcgatggattagagaaggcaagaagagttttaacagactgaatttgatccttctgttccttgtacagaccccagaaaaggtcctgtcctgtttcttcttgtttgcttatgttaattaatgtcatgactttagattcttgtttatttggccgtttacgtttgtagtagttgatgtaactgaaaataacaaagtacactctgttctttgctgataatgtattaacgttcgatatgaactttcact

SEQ ID NO: 9424 - DNA, 1497 bp, Glycine max
  Clone ID: 700846510_FLI
ctctgaggatgatgacttgtttgatggaggttatgaatcaggtgatgatgctcgtggtattgtaccctctaacaggccgcctgaggtgaacttgaagaatgtgctttctgggatctttgctattttgtctggacggaccaaggctccgagtgttactgcaaaccagcagctcccaagttcaaatgtgtcattttttgactctggaaagaatggggatgttttccttgactcttcggtgtacacgccaagtgctccgccactttgtctgccaaatggaattgattatagttcttacaaagaggtcttggaagctgaaccccctgagtggctccctgatagttctactactgtttgtatgcaatgtagtgctccttttactgcgattacccgtggtagacatcattgcaggttttgtggggggattttctgtcgaacatgtacaaaggggcggtgtttaatgcctgttgggttcagggaaagaaatccccaaagggtttgtgatgcctgctatgatcggcttgatcctttacagggcgttctgatcaacaccataagcaatgccgtacagggggctaagcatgatgtcacggactggacttgtgctagaggatggattaatcttcctattggtttatctatggagcatgagatttataaagcatctaatacattaagaaactactgtcaggtggccaaatccaatcctgagaagtccattcctttaactgttcttaaaagtgccaagggcctagcaattttaacagttgctaaagctggtgcactagtctcttacaaactgggtactggcttggttgttgctcgaagatcagacggatcatggtctgcaccgtcagcaatattctccctgggtttaggatggggtgctcagattggtggtgaacttatggattttatagttgttcttcgtgatatgaaagctgtgaagacattctgcagccgtatgcatttttctctgggtgctggttgtagtgctgcagcagggcctgttgggagagtgcttgaggcagatattcgtgctggtgacagaggctctggcatgtgttacacttacagttgcagtaaaggtgcatttgtgggagtgtctttggaaggaaatatagttgcaaccaggatggatgccaatttgtgcttttatggtgatccttacctcaccacatctgacattctactgggaatggtggacagaccaaaggctgctcaacccttgtatggcagtcttcaagaactatattcctgtctacgattctaagctggtccctggttccagttacagaattgcatcattttttctgtcttctgcaagtggtgtgataaatagtgcctgatgtatatacagttctagttctacatggatttctgaaatgtatggatgagggatctcctcataattcagttatacatcatatgtttactacaaatgatccatatatctaatacacgaatttataatgtgaatatgttagactaattgtacat

SEQ ID NO: 9425 - DNA, 564 bp, Glycine max
  Clone ID: 700846513_FLI
caagaaaataggaagagacacagtaaaggacgggaagaaatcagtagtagcactggatggaggattgtttgaacactatactaaattcagaagttccttggagagtacactaaaggagttgttgggagatgaggcagctgagacaattggcattgagcagtctaatgatggctctggaattggagcagccctcctggcagcttctcactcccagtatttggaagtgcaggagtcctgaagatgtggtttaatgtcaaggtaaatcagtgtaacactagtttcatttttttgtatacctactagatcaacagattgaagcagaaaagtcttcgttactagtcctagagagcttttaaccaggaaggtggaccaagtccacagtggagttatttgtagggctgtgttcttcttgctgcaaatgcaacattgctgcttctcggctaattactggtgcattgttttggttacagtgtttgtctctcccacatcaaagaataataggagagatgtaaacttttgagttgtctcgttttcccaatgtaacatgttttcaatgagaataag

SEQ ID NO: 9426 - DNA, 749 bp, Glycine max
  Clone ID: 700846556_FLI
tcccatttcctctcagaaccctcgatcactcccacgcgctcctatatcctctccttcaccgtcgctctctccaacgatcacaacaacatcgtcatcccatggcaaacgccgcatctggtatggcagtccatgatgactgcaagttaaggtttttggagctgaagacaaagaggacacaccgtttcatagtttttaagattgaggagcagcagaagcaggtcattgtggagaagcttggtgagccagcccaaggctatgaagatttcactgccagccttcctgctgatgagtgccgatatgctgtttatgattttgagtatctgactgaagggaatgtccttaaaagcagaatttttttcattgcatggtcccctgacacatcaagggtgaggagcaagatgatctatgcaagctccaaagacagattcaagagggagctggatggaattcaagtagagctgcaagcaactgatcctactgagatgggtcttgatgtgttcaaaagccgggccaactaaaatgattatagaaaatagtaggctttctggtgggagcagcactccttaagccttagttactcatggaaaatatcctagtttgtgggatggtcaacttgggtagttatggtcccaaactctctcaattttccaagttgtggcataaattctattgcaccttttaacaagctttgcttgttccagtgtgttttattatgatttgtgatttatacaaccttgcgtttgagtgcc

SEQ ID NO: 9427 - DNA, 428 bp, Glycine max
  Clone ID: 700846578_FLI
gtggatggtggggcaactgtaaacaacctgctgatgcagattcaggcagatttggtgggatgtccagtaattagacctgctgacatagagacaacagcacttggagcagcctatgctgccggattagctactgggatttggaaagaagattttattttcaatactgaggagaagttgaagaatgctagagttttccgtcctgtaatgactgaggaagtaaggaaaaagaaagttgactcttggtgcaaagctgttagtaaaactttcgacttagctgatcttgctctttgatggtaaaacacagtttatgtttctttttatttttattttttatgtcctttacttctgggtataactttatttttagccttactaaaatgaagggagtaattatgtcaactcaaataaatttgacattatgtttctgt

SEQ ID NO: 9428 - DNA, 1230 bp, Glycine max
  Clone ID: 700846585_FLI
accagcttcccggcgaagacctcgacgccctcatctccgtcaccaacgacgacgacctcgatcacatgatgcacgaatacgatcgcctctatcgcgcttccgctagaccctcccgcatgcgactattcctctttccctccgatactcttccttcccctccacctgctgcttctgctccacacgattcggttatcaaacctaataacgtcgattttctcttcggtctccagcctcagccaccacctattgatgtcaaattcaatgatccgctgccggagcccgtggcgccgccgccggagcatccgttgcgattcaattttaaccctgcggtctcggatccgagcgcgattcagcgccagttgcagcaactgcaaattgcggagaacgagcaagctgcgcatcggaggaagggtgaggataattaccccgccggtgattactacgttcaaaaagtgcctgagaagttccccccaccgaattttctggcaagctcgccgggttattggcctgaaaaacatgtttccggcgacgtttatcctccggctgtgacggctacgtccggcggaggggaaccgtcggtttatatggttccggcgccggggacgttctatcatgcaccggttatgcggcctccacctccagcaactcagggatactacaccgtgcaacgaatgggttccgataattaccgtgaagcgccggtgtacggcggtgttccgccgccaaaagcggcggttccggcgagtatggcgccagcccagcagccgattaaggctcccgcgtatacggaaggattcggaatggttcggccaggtgggatagtggataatactggtgttccgtacgcgcaggtggcgtacgatagtggaagtgggagacaggtttattatactgcgcccggtggtggtgtaacgcacgctcctccgtaccatggggtttttccgcccgtaaccgctgatatgagactgggaggggtttcgtttggtcaggatgttaaagtcataagcaagcttacccaaggttcagtctgatcattatcgaacaaaaaaataaaaataatagttcagtatgattatgattatggttatcgctaaatatgttttttttttttgctatcttgttcgtaatcctatttatgtaataggaatactattagcttttagtttttcgcttgctattgttgtacacaatgttgccgatgatggttataacttataccatgttattcct

SEQ ID NO: 9429 - DNA, 1113 bp, Glycine max
  Clone ID: 700846625_FLI
tttgtactgtcccatctccctgacttcaactccattactggtgtatccttggcagcagcagtcatgtccttaagttactctacaattgcttgggtagcttctgtacataagggtgttcaagaaaatgtacaatatggttacaaagctaagagtacttcagggacagtgtttaacttctttaatgcccttggcactgtggcttttgcctatgctgggcacaatgtggtgctagaaattcaagcaacaatcccatccacaccagagaagccatccaaggttcctatgtggagaggagtggttgttgcctacatagttgtggctatatgctacttccctgttgctcttattggctactggatgtttggcaatgaggttgattctgacatcctcatctctttggagaaaccaacttggcttattgcaatggctaacttgtttgttgttattcatgtaattggaagctatcagatttatgcaatgtcagtgtttgacatgattgaaacggtgatggtcaagaaattgaatttcgaaccaagcagaatgcttcgttttgttgtacgtaatgtatatgtggcattcactatgttcattgctattaccttcccatttttcgatggtctcctaggattttttggagggtttgcttttgctccaacaacatactttctcccctgcatcatgtggcttgcaatccacaaaccaaagagatacagcttgtcttggttcattaactggatctgcattgtgcttggcctatgtttaatgattttatcacctattggaggattgaggacaatcataattaaagccaagacctacgaattttactcttgaactctttctcctcttgactcagtcatggaaagttaactatatggaaatgtgtgtgatttatcataggtcgctctttaatttactattgcaaaagattgcttgtatagtattgcgtgttggtggaaggggaaattattcccacggaatctcatgaaagaggaatttctagatgttttttcctttggcattttcattataggaatgtaccattttctctttgctctacattattctcgtaatgatacctattttgtaaagcacatatagcatgtttggctt

SEQ ID NO: 9430 - DNA, 921 bp, Glycine max
  Clone ID: 700846666_FLI
attaattcaccagctacatagtttttctgtttgaagtgctacaaacaatggcagctactcaggaagatgtgacgcttttgggagttgttggaagcccgtttgtgtgcagggtccagattgccctcaaattgaagggaattgaatgcaaatttttggaagaaaatttggcaaacaagagtgatctacttctcaaatccaaccccgtttacaagaaggttccagtgtttattcataatgagaagcccatagcagagtctcttgtgattgttgagtacattgatgagacatggaagaacaaccccatcttgccttctgatccttaccaaagatcctttgctcggttttggtccaagttcatagatgacaagattgtgggtgcttcatggaaatctgttttcacggttgatgagaaagagcgtgagaagaatgttgaagaatcgttggaggctctgcagtttcttgagaatgaactacaggacaaaaggttctttggaggagatgaatttggatttgtagatattgctggtgtcttcattgcattttcaatcccaattttccaagaagtagcagggttgcaattattcaccagtgagaaatttcctaagctcttcaaatggagccaagagttgatcaaccaccctgttgtcaaagatgtccttcctcctagagaaccactttttgccttcttcaaatccctctatgaaagcctttctgcttcaaaatagattgtttaagaatgattgtgtgaactacttgtcgctcattgaattattgttgtttgaatttcatgtcaatttgatactatatgtaatttagtaacctgggatattaggatatccccaaggaacaaagaatcctaggattttgtttccattttggccatttcagttaataattaaagaaactctattttttcttgtt

SEQ ID NO: 9431 - DNA, 579 bp, Glycine max
  Clone ID: 700846721_FLI
gtcaacaaacagtgaaagaagaagatgatgaaggtccacctccgggatggcaacctctccccgctcagccaccgccaccgccacgtccatccggttgggctcaaatggtttgcggttcttgtcgtcgcctgctttcatatccacgaggtgccaaacatgtcaaatgttcatgctgtcagactgtcaacattgtattagaagctgatcaggttgggcaagttaagtgtggcagttgtgcggtattgctgatgtacccatatggtgcttcacaagttagatgttcatcatgccgatttgtgacagaaattggggcacacaacaagcggcctccatggtctgtacaacaaaggaagccatctcctccaaaaactggttgttagtggcctgtccgttggcctagtagatggatcatccttgtacatcaaacaaattaggtatgaggattcatgtaccaatctcaaaattgctttgttattgagatacgcatccttaaggaattatttattaatgtaaagttttggaatttcaccagaatttttaagatgaagtttcacttgagagtcttctattcctgcttgc

SEQ ID NO: 9432 - DNA, 843 bp, Glycine max
  Clone ID: 700846795_FLI
ctaaaaacatgcgagccctggtgggaagtagattgcctaagttcaccaaatggcaagccaagctagtgaatggatcatttgattttattggcttaaactattactcctctggttatattaatggtgtccctccaagcaacgacaaacccaattttctaacagattctcgcaccaacacttcatttgaacgcaatggaagacccctaggtctaagggccgcttcagtttggatatacttttatccaaggggacttctagatcttctgttatataccaaggaaaaatacaataaccctttgatttacatcaccgaaaatggtatgaacgaattcaatgatccaaccctttccgtggaagaagctctcatggatatttatcgaattgattattattatcgtcatttcttttatcttcgatcagcaattaaggctggcgcaaacgttaagggattttttgcatggtcatttttggactgtaatgaatggtttgcagggttcactgttcggtttggattaaactttgtagattacaaagatggcttaaaaaggtaccctaagctttctgctcaatggtacaagaactttctgaaaagaaactagtgttagacccaccgtttgaaagctatgcagcacctaaaaacggttaggttaagctcaatgtttgtagttgtagctaattccacgtataagtcattaggttgttgttttctgttagaataatttcatggcacactactaagtgtcctgcaccagcacagctataaattaatatgttatagctgatccttcatgtatcggtttgattttgaatgttatctcagaattaagattcagtttcagtttc

SEQ ID NO: 9433 - DNA, 1306 bp, Glycine max
  Clone ID: 700846835_FLI
attcggctgaggaaggatttctaaagaatggacaatctcctcttctaactgtaatgtcagctggccatgttctccatgtgttcattaacggtcaacttgcaggaactgtgtgggggggattgggaaatcctaaattgacatttagtgacaatgtgaagctgagggctggcaataacaagctttctttacttagcgttgcagttggtctcccgaatgttggtgtgcactttgaaacatggaatgcgggggtgttaggcccagtcactctgaagggtctaaatgaggggactcgagacttgtcccggcagaaatggtcttacaaggttggactgaaaggtgaatccttgagccttcacaccgaaagtgggagtagctctgtggaatggatacaaggatcattagtggctaaaaaacaacctttgacatggtacaagacaacttttagcgcaccggccggcaatgatccattggctctagatttgggaagcatgggaaagggtgaagtgtgggtaaacggtcgaagcattggtcgccattggcctggatatatagcacatggtagttgcaatgcttgtaattatgctggatattatactgatacaaaatgccggacgaattgtggacaaccttctcagagatggtatcatgttcctcgctcatggctgagctcaggtggtaactccttggttgtgtttgaagaatggggaggtgaccctaatggaattgctttggtgaaaagaacatgaagtgtgatattttgtgatgctctcttaaaaggagcagcattgacaggcaatatatatcttgtaacaaatgtctaggaaatgcaaagaagctgtcaagtgagtcctatgcggttaggaccctatgatgcagcaatttaccaaatacgtgtggtttagatcatattaggttcagtatataaaaaacatttgaagttcataattggtgctccttgtcttctggttgttcaagtatacctcaaaagattgccaaggcctaatcatgcactgcctggccaaaaacaaagatttatataagagaatttggatgcgcaaagactgtgtatactgtacatagtcaagtcaggctattgtgctgaatattgccccatgtattacagggcttgtatcaatgaagattgagcccttacacatttatttaatttactatgatacaatggaaagaattgtagacacgcaaaatgtgtcggagagtatatttgctatattctgccagaaataattgtgttttcccattataattattaagtaagaacagattgaaagtaataaaatatcctttg

SEQ ID NO: 9434 - DNA, 757 bp, Glycine max
  Clone ID: 700846841_FLI
gtccaagaagagctagacagggtaattgggcttgaaagggtgatgactgaagctgacttctcaagcctgccttatctacaatgtgtgatcaaggaagcaatgaggcttcacccaccaaccccactaatgctcccacaccgtgccaatgccaatgtcaaagttggaggctatgatattccaaaagggtccaatgtgcatgtgaatgtgtgggccgtggcccgtgacccggcagtgtggaaggatccgttggagttccgacccgagaggttccttgaggaggatgtggacatgaagggccatgactttaggctacttccattcggggcgggtcgccgggtatgcccgggtgcccaacttggtatcaacttggtaacatccatgttgggccacctcttgcaccatttttgttggaccccacctgaaggaatgaagcctgaggaaattgacatgggagagaatccagggttagtcacatacatgaggactccaatacaagctttggcttctcctaggctcccctcacatttgtacaaacgtgtgcctgctgagatctaatctttctttttcttttccttggattactctttgttgcattaagaaaattgccttgtgtctatgtaactacatttgaaatggcaattcaaggaactaaggaaaaacccatagcgagtttggcttctcctcttcagattttggattgaaattcctgtttaagattaattaaataagttacatgagaaaggagttttccgaaaat

SEQ ID NO: 9435 - DNA, 1076 bp, Glycine max
  Clone ID: 700846936_FLI
attgagggagagacatctatgtcctcatcatctgactgttctcttgatgatccacttgtagatggcctaattgcaacagcaggtttcttttgtatggcaggtatggaaggaatcccaactggtgcattgatatctttatcttgtaacttagattgatcatttccagaaggaatagatcctttagaagtagtctgagatccaactagagaaggattagtcggctgtgatccaccatcagaaaaaggggacattgagggagagacatctatgaatgacaacacagaccctgctgatgtaaaacgagtaaggaggatgctatccaatagggagtcagcccgtcgctctagaagaagaaagcaggctcatttaactgacctagaaacacaggtttctcaattaagaggtgaaaattctaccttgttaaagcgccttactgatgttagtcagaaatacagcgactctgctgttgacaacagagttttaaaagctgatgttgaaacattaagagcaaaggtgaagatggctgaagagaccgtcaaaagaattactgggttgaacccaatgcctcatgccatgtctgatatatcatcattgggcctgccatcatttgatggaagaagcccttcagacacttcagctgatgcatctgttcctgtgcaagatgatccacatcatcacttctatcaacccacattgaataatcctattcccagtcatgatccgatagtcaacaatggtttggggggcatttcttcaattgaaaatgtgcagcagcagaacgctgcagcagtggtaggtgggaacaagataggtcaaacagcatccctgcagcgggtggctagcttggaacatcttcagaagcggattcgtggtggacctccatctgagcagtaactaagtagccagatcttaaggttgctttgccaaaaaattattctaaaacagttatttctgttgcctattcttctggaatacattgtaaatcatttgatggagcacatgatgctggattcaattagtgcaccccgtttttttttttttttttataaaaataatataaaatgaactttaccttc

SEQ ID NO: 9436 - DNA, 1269 bp, Glycine max
  Clone ID: 700846947_FLI
atactcaatcttcagcagtctttagtgaaagcaaatcttgctggttacattaaactagttgtcccctgcaatgcagatgcgtatgagtcatcacttccttcacaaggtgcattccggcctgaactgacccaaatcatgactcagctggttcagttcctcaactcaaacggtaccccgtttattgttaacatctacccattccttagcctctatgacaacaatgatttcccgcaagactacgcattctttgagggaactactcatcctgtcacagatggtaacaatgtctacaccaatgcatttgatggaaactatgacactttagttgcagccctgagtaaacttggatatgatcagatgcctatagttattggggaaattggttggccctcagatggagccattggtgcaaatatcactgcagcaaaggttttcaatcaaggtctcataagtcatgttttaagtaacaaagggacccctttgaggccagatgctcctcctatggacatctatctcttcagtcttcttgatgaaggagcaaagagcatactaccaggagggtttgaaagacactgggggatattctcttttgatggacaagctaagtatcctctaaaccttggccttggaaacaaggaattgaagaatgcaaagaatgttcagtatcttccatctagatggtgtgtggcaagcccctctactgatgctcaaaatgtagcaaaccatatgagaattgcatgcagtgttgcggattgcaccacacttgattatgggggttcatgtaatggaattggagagaagggtaacatctcatatgcttttaacagttactatcagttgcaaatgcaagactcacgaagctgcaactttgatgggcttggtgtgatcactttccgagacccttcagttggtgactgccgttttcttgtgggtgtcacagataaaggctccgattcctctgcttctcagatcagatgtcagtggtggattctactagcatttctagttatacagacgatctcttctttctcattgtgattcagaggtttcataagtgggtttttcatgatcacctattcgataacttagaagtagcagtcaagtagaatagcttaaaaaaaagaatatttgatatttatgggctaataatatatagaaaatattcgactgcattcttggtctgtaacccagcgtaggatctagtcattgtatcataacacaaaaggtgatccgaacaccaaaaatatacaatattacacatgatttatc

SEQ ID NO: 9437 - DNA, 1769 bp, Glycine max
  Clone ID: 700847055_FLI
agataccaaggagcagaggacatatactggggaatgtgaggattgatttcttaatgctgagagacctagtttgaaacatcaaaggaaatggaaatctgaccccaattacaccaaatcatggtacgatagaggtgctaaaatctttcaggcagacaagtatcggaaaggtgcttgtgagaactgtggagctatgacacatgattctaagtcatgcatggaaagaccacggagagtgggagcaaaatggacaaacaaacacattgctcctgatgaaaagatagaaacttttgagcttgactatgatggaaaacgggacagatggaatggctatgatgcatcaacgtatgctcgagtcattgagaggtatgaagctagagatgaagctcgaaagaagtacctgaaagaacagcagctgaagaaactggagaagagcaaccaaaatggtgaggatgctgcaagtgatggggatgaagaggaagaggaagatgaagatgaagatgatttaagggtagatgaggcaaaggttgatgagagcaaacaaatggactttgcaaaggttgagaagcgtgtgcgtacaacaggtggtgggagtacaggaactgtgaggaatctacgtattcgagaggatactgcaaaatatcttcttaatcttgatgtcaattctgcacactatgatcccaagaccagatccatgcgtgaggatccacttccagatgcagatccaaatgaaaagttttatttgggtgataaccaatatagaaatagtgggcaagctttagaattcaaggaactaaacatccatgcttgggaagcctttgacaagggacaagatgttcacatgcaagcagctccatcccaagctgaattactctataagaatttcaaggtcatgaaggagaagttaaagtatcaaacaaaggaaaccattattgagaagtatggcaatgcagccgatgaggacaaacttccaagagaacttctgctgggccaaagtgaaaggcaagttgagtatgatcgtgcaggtagaattattaagggccaggaagcagctctccccaggagcaagtatgaagaagatgtttacattaacaaccacacgactgtttggggctcatggtggaaggatcatcaatggggctataagtgctgcaagcagacaatacgcaatagctattgcactggtgctgctggtattgaggctgctgaggctgcaagtgatcttatgaaagctaatattgcccgtaaggaggctgctacagatgatcctgcacctgtggaggagaaaaagcttgctacatggggtactgatgtccccgatgatctagttctagatgaaaaattgcttgctgaatcactcaagaaggaggaacaaagaaagagagaagagaaagatgagaggaaacgcaaatataatgttagatggaacgatgaggttactgcagaggacatggaggcatacaggatgaagaaagtacatcatgatgatccaatgaaggattttctgcactgagcttggaaaggataaaaaggcctgcatctctttggttgcaagtcaacgagcctctctgttgttacttactgccagctgctggattggccagaataggttatcagtttggcatccttgatcctttgacccgtagtgagaaggaggggctagggtgaaactatcaatgtttgtacagcttttgtgtgcttcatataatcgcgtttgacttagatcaacttgaaaatgtttgctttaatagcagttttacattttgtcgttc

SEQ ID NO: 9438 - DNA, 873 bp, Glycine max
  Clone ID: 700847068_FLI
gttttttaaccatacaggatcagtgactgtgcacctgaagatgtctcaaaggcactaactaggactcttgcggacatgcagcttgactacattgatttatatcttatgcattggccttttaggacaaagttgggttcaagaggttggaaccctgagaatatggctcccttgtgtcttccagagacatggaatgcaatggaaggtttgtttgcctcgggtcaggcacgcgcaatcggggtgagcaacttttcaactaagaagctgcaagacttgcttggatatgctaagattccgccagcagttaaccaagttgaatgccacccagtgtggcagcaacctgctcttcacaatttgtgcaagtctaccggtgttcatctcacagcatattgtcctttaggctctcctgggtcatgggtaaaggggcaagtcttgaaggaaccactgttgaaggaaattgctgaaaagcttcacaagtctccagcgcaagtggcattgcgttgggggactccaaagtggtcacagtgttcttccaaaaagtgtaaatgaatctaggatcaaggagaaccttagtttatttgattggtgcattcctcctgagctactctcaaaattatcacagattcaccagcaaaggttacttcgaaatgaatctgctgtccatgaaacttgtagtccttacaaaaatcttgaagaattgtgggatggagaaatatgaaatgcagattacttttgatgaagctcgggatgtaatttgacattgaattcttatttctgatgcaaattgtagaaatgttttaacatttgtattgtctgaagacaatcacccctctaccttggggttttatgtgaatcctcacatatgattatatgaac

SEQ ID NO: 9439 - DNA, 637 bp, Glycine max
  Clone ID: 700847082_FLI
tggagatgctgtttcatatatgcatgaacttcaagcacaagccagcatgctgaaggctgaggttgaaggacttgaaacatcctcattgaactccaaaaattaccaaggattgattgaaaaccccatgagggttcaattgatcaccaacaagaagataatccagatggacatgtttcaagtggatgaaaaagggtttcatgtgaaaataatgtgcaataaaggagaaggtgtggctgcctcattgtacaagtctctcgagtctctgacaggcttcaatgttcagaattcaaacttgaccacaatttctgatcgcagttttctacttacattttcattgaatgcgaaaggccctgagccagaaattaacctgcccaacttgaagttatgggtgactgaagcttttgtgaaacaaggctttgaattcataccttttttttatgcttgactctttcaatctaggtgtaactaattaaggtttgcgttagagagtcagtgtatgtttgaataaaagtttgtgaagttaagtttgtaaacctagttagctcaagttttgtttttacaaagttgagtttcttgacaaaaatttgatgtgctaatgtattttttggaggtaatcaaaatgtcagtaattaaaatg

SEQ ID NO: 9440 - DNA, 1490 bp, Glycine max
  Clone ID: 700847135_FLI
aaaaagggtccctctttgttcactctctttgtgttttctttttctcagtttataactttttatccatcgacatcaaaacaaggactcttgggaaaacgcagagttatggacactgtcctttgaaactccaaacaaataaaacagctcatagtagtattatagtaaaagatagccttcaaagttcgctaacccatttcttcttttcgcataactcaattggaaattgcttcttccttattagttttgctttcatctgcttgaaactttctcggatttctgaaggatctttttgtgtgacaaaaggctggattggaaaaaagggaaagtgaacccttttatgagtagcataagggcaaggctaaggccaagaccgatgccgttgaatatatttccggacatggaaggattgccccggattatattgactgaggcaactggttcatcagcagaggtgcttctatatgggggtcaggttgtttcttggaagaatgaacgaaaggaagaactgctttttatgagcagtaaggctaactggaaacagtctaaagcaaacagaggaggtatatcagtctgctttccacagtttggaaatcttggttcactagaacaacatgggtctgcaagaaacagattgtggtcattggatagggacccttcacctctacctccatcagacaatcagtcctctgtggatctgataataaagtcaacaggagttgacttgaagaataggccatgtagttttgagtttcggcttcgaatctctctcagtgctggcaagctcattttgatcccccgagtcagaaacacggataataaaacactttcttttacactgtcaataagcaactatttatcggtatcagatatcagtgaagtacgtgttgagggattggagacacttgattaccttgacaatctgctgaacagatcaaggttcacagagcaggcagatgcaattacttttgatggccagatggataggttgtacttgcgcacccccacaaaaattgcagtaatagaccatgagaagaaaagaacatttgtactgcagaagaatgcaatgccagatgcagtgatatggaatcccggatataggaaggccaaggctcttcctgatttaggggatgctgattacaagttcatgatatgtgtggattctgcagctattgaaaccccacttatgttgaagccctatgaagaatggaagggctatcaggagctctctaatgtttcatcaagctattgcagtggacaattggatccttctaaggttctttatggttttcactaaacaccataatgcagccaatggagattattagattataatggacttcactctcctaattagttaaacactataagtgcactacacgtgcattcataccatgctgagattataataaagtgagagcaactaaataattgcgagatgcttctttgtattcatactcatgtcaataaataagttgcattattacagtatt

SEQ ID NO: 9441 - DNA, 801 bp, Glycine max
  Clone ID: 700847152_FLI
acttgatcttagtgaggagcccatgtatgtgaacgcaaagcagtaccatgctattctgagacgcaggcagtatcgtgcaaaactggaagcacagaacaaactcatcaaagaacggaaaccatatcttcatgagtcccgccatctacatgcactgaagagagctagaggttccggtggacgctttttgaatgccaaaaagctccaagagttgaaactcacttcagcaaaccgtggcctagatgtttctggctgtactcaattgaatctgagtggaaatatgtcagaatcaaaggttcaagcagtagaaaacttgaactacagaaatggtgcttctacaaccacgtgttctgatgtcattagtacatctaatagtgatgatgtcttccagcaacatgagtcagactttaggttatgtggttacccttctcatattggaaggaacatgcagggttattccgcagacattggtggtggtggtggtggtggaaatcaacaccgtctatcagtccttatgtgacaaacttttatggcacactagcaagttattcttcagcgctctgttggagatcataattgcctgtgttccatagggaagtcatccttggctcatttacattattatgtttttactaatatgtttatgttagttgttttggaacaaagatatagacctttgctagatttcaattttcttatattgatgactgaaatatttgggcaaagtagcacatttaactgactagtcacaagcaatatttcttttatgttgatgttacattggaaaatgtctttttgagaact

SEQ ID NO: 9442 - DNA, 1862 bp, Glycine max
  Clone ID: 700847178_FLI
gacaaattcatcaacatacaaggcgactacaaggctattgtacataatccaaatcctttgatccctcccatttttgcatcggatgataacacgtgttgcttagagtggaacactgcaatggaaaagcttactggttggagccgcgcggatgtcattggaaaaatgttggtgggagaggttttcggcagttgctgtcagttgaagggttcagattcaataacaaagttcatgattgtcttacacaatgcgcttggtggacatgatacagatagattccctttttcatttcttgatcggtatggcaagcatgtgcaagctttcctgactgcaaataagagggttaacatggatggtcagatcattggggcattttgctttttgcaaattgtgagtccggaacttcaacaggctctgaaggcacagagacaacaagagaagaattcatttgctaggatgaaagagttagcttatatttgtcaaggagttaagaatcctttgagtggcatacgctttacaaactctcttttggaggctacatgcttgtccaatgagcaaaaacagtttcttgagactagtgctgcttgtgagaagcaaatgttaaagataatacacgatgttgatattgaaagcattgaggatgggtccctggagcttgaaaagggggaattcttgcttggaaatgtcataaatgcagttgttagccaagtaatgctactgttaagagaaagaaatttacagttgattcgtgatattcctgaagaaatcaagacattggctgtttatggtgatcaattgaggattcaacaagtgttgtctgatttcttattgaatatagtgcgctatgcaccatctccagatggctgggtagagattcatgtacatccaagaataaaacaaatctcagatgggctcactcttctccatgctgaatttagaatggtatgtcctggtgaaggtcttcctcctgaattgattcaaaacatgttcaataacagtgggtgggggactcaagaaggtttagggctgagcatgagcaggaagattctaaagctaatgaacggcgaagtgcagtatatcagggaggcccaacggtgctacttctatgttcttcttgaactacctgtgacacggagaagctctaaaaagtgttaaatatgtattctgtagctgtaagattaagtttaaaggtgctacttctatgttcttcttgaactacctgtgacacggagaagctctaaaaagtgttaaatatgtattctgtagctgtaagattaagtttaaagccctggcactgcccctcatgctgaccattagatagtttgttgtcatagattatgctctcacctaacaaggcaacttaagggacaagcgtttgaacaagctgatttggcaagctatcccagtcacatgtaattctaccaaattggactgttgttttgcaccttgacaaaacttgttcggtaaagcaagagtggccatttaatatgtagctaaatgtaaccttaaatcttactgataaagttatggctgagtagatgaaatgaagttttgccaatacgcacacaagtggagtctcctgtgaaaattttcaagcaaatgcttacatcattagcagctgcagtgaactccaatctatagttggattgaactgcatccatctcctgcactgttgtctgttctgatagtaactgcttataccaaatgcgttcccaagttggcaaataattgtaaaatcctagtctccaacaaggtttgccctctgcaatgttgctttccaactccacccttttttttttcatcattgcctgtaaatcccttcctactctgtaataaaagctgggttatttatcctgtaatttttt

SEQ ID NO: 9443 - DNA, 543 bp, Glycine max
  Clone ID: 700847205_FLI
gaaaaaactgatgtgtttgggtttggaatcttgctgcttgaactgatcacaggtcataaggctctagattttgggcgagcggcaaaccagaaaggtgtaatgcttgattgggttaagaagctccaccaggatggaagattgagtcaaatggtagacaaagatctaaagggcaacttcgatctgattgaactagaagaaatggttcaggttgcactcttgtgtacacaattcaatccttcgcaccgccccaagatgtcagaagtattgaagatgttagaaggggatggcttagctgagagatgggaggcctcacagaggattgaaacaccaaggtttcggtcttgtgagcctcaaagatattcagatttaatagaggaatcttcactcgtagttgaagccatggagctttctggtcctaggtgacaaacaagtatcttggttttccactatagctccttgtttaaaaggtgtagtttaaatgttaaatatgacattgtcattcgtgtcaatagctatgtaatgctcgtattcatctgtaaaaag

SEQ ID NO: 9444 - DNA, 1767 bp, Glycine max
  Clone ID: 700847216_FLI
gttggcttcttccacgtacaacacatgtactatgtaagtttttgaaactctgtcatcaaagttgcgtaatctggaggtccttgacataagttttaaccctttgacaaatgacatcctgccatccctcgggggattcacatctttgaaggaactatatctgtcttatattgatttggactcagatcttcatattcaaggtttatgttcatcattaaggaatcttgagatccttgacttgtccagtaacaatttcaataatagtgatattacttctgctcttagtggactttcatccctcaagtttttagatttatcaatttgtcaattgacttcaagatcaatttttaatatatcaagatttacttcattgaagatcctcgacttatcttataacaagttggataaaagtattcagtgacatcaagattttcatgatttaagtaacctagaacatttgatattggactacaataacctggaaaatgagtttttaaaaaatatcggggaattgacatctttaaaagttttgtctcttcaacaatgtgatataaatggcacccttcctcccacggattggtttaagctaaagaagttggaggagttatatctatccagaaacgaatttgagggaccacttccctcatcttttgttaacatgacatctctacggaatttggaaatttctggaaatcacttcattggaaattttgattctaaccttgcaagccttacatcacttgaatattttgatttcacgggaaaccaatttgaagttcctgtgtctttcactccatttgccaatctttcaaagatcaagttcatctatggtgaaggaaacagagtcgtattggactcacaacatagtttgcaaacatggattccaaaatttaagttacaaaagcttattgtgtcttcgacaactgagactaaatctcttcctctcccaaattttcttctttaccaaaacaatttaacctatatagatttgagtggttggaagttggaaggagactttcctcattggttgttggaaaacaacacaaaaatgaccgatgctctatttaggaattgttctttcactggtactttccagctaccaatgagcccccttcctaacatacaaacaattgacgtgtcggacaataccgtaaatggccaaattcctagcaacaatatcagttcaatttatccaaatttgcaatatctaaacttgtctgggaacaacatccaaggatcaattcctagtgagttaggccaaatgagcttattgtatttattggatctttccgagaaccaattgtctggaaaaatacctgagaacatattagcagatggacacccactccaattcttgaaactttcaaacaatatgcttgagggacctattttgaatatccctaatggtttggagaccttgatattgagccataatagatttactggtagactcccaagcaacatttttaactcatcagtcgttttattggatgtaagcaataatcatttggtgggaaagcttccaagttatgtagaaaaattctcaaggttgcaggggctttatatgtccaataaccattttgaaggatccattccaatagaattggcagaacctgaaaatctaagtcatttagatctctcccaaaataatttgactggtcatgttccatcatttgcaaattctaacttgcaatttatccatttgaacaacaatcatttaagtggattgtcaaaaagaatgttcaatgaaaactcttctttagtgatgct

SEQ ID NO: 9445 - DNA, 1631 bp, Glycine max
  Clone ID: 700847226_FLI
cagcttcttattactttgtatctctgtgtatatttgaaaatgaagaatatgaatatgaaactaaacaccattgcattgataattgccattgcattttctgtgtggtcttcaagctgcacagcagcacgtgtcagccactggaggaaactgaaagctgctgcatctgctacttcttttaatgtgttagactatggtgctaaaggtgatggacatgcagatgatacaaaggcctttgaagatgcatgggcagctgcttgtaaggtggagggttcaacaatggttgttccatctggttctgtatttttggtgaaaccaatctctttctcaggccctaattgtgagccaaacattgtttttcagttggatggcaaaatcattgcacctacaagctctgaagcttggggctctggtaccttgcaatggcttgaattctcaaaacttaatacaatcacaatcagaggcaaaggtgtcattgatggtcaaggctcggtttggtggaacaatgactctcccacttacaatcccacagaagtgatgctggaaagcaatggaagacttccaagcacaaaaccaacagcactcaggttctatggaagtgatggtgtaacagtgacaggcataacaattcagaatagtcaacaaacccatctcaagtttgactcttgcacaaatgttcaagtctctggcatcagtgtttcatcacctggtgatagccccaacactgatggaattcacttgcaaaactcccaaaacgtggtcatctatagtagcacacttgcttgcggcgatgattgcgtctctatacaaactggttgctcggacatatatgtacacaatgtgaattgtggacctggtcatggaatcagcattggaagtcttggcagagagaacactaaagcctgtgttagaaatgtcaccgtccgagatgttactatccaaaataccctcactggtgtcagaattaaaacatggcagggtggctctggttcggtccaaaatatcatgttctcgaacgttcaagtttctggggttcaaactccaatttccattgaccaatactattgtgacggtggaaggtgcaggaatgaatcatcagctgtggcagtttcaggcatacattatgtgaatgtaaagggaacatacactaaggagcctatctattttgcatgtagtgacaacttaccttgcagtggcataacccttgataccatacaactggaatcagcccaagaaactaaaaattccaatgttccattttgttgggaagcatatggggagttgaagaccacaacggtccctcctgttgaatgtcttcagagaggaaacccatcaaaagaaggaggaatcaattctaacattgattcttgctgaatttatcaacacaatgtccgggatatatagattattatgatatatacatcatggaaagttgttactagttagttattatgatatcttaaaattagttcacattcatgtaatataatgttggatttagtggattgtaataccgtgtgtcaaaaagatgttgggggagaagatttacaagcctatactacttagattgaaaaatgtatgaagtggaaagagtgtattagccatatgtaatatatcaattttttttttcaatt

SEQ ID NO: 9446 - DNA, 582 bp, Glycine max
  Clone ID: 700847244_FLI
gttttggggttaggttatcaaaaacaaacaaaaatcttagccgcagaggcagaggaggagatggagacgatgatgatgagttgcgtatcgattccgagttcaattccaaaatcaagaccttctattagcttgggtttgggaactcccaagttgttcaattcagtttcagtaagggtagccgtgaacgtgaatggtcggggaagaaacaaaggtttgagttgcaacgccatgttcggtctgggcgtgcctgaactggtcgttattgccggcgtggccgccctcgtttttgggcccaagaaattgcctgaagtcggccgcagcatcggcaaaactgtcaagagcttccaacaggctgcaaaggagtttgagtcggagcttaagaaggaaccggattccaccgaaggggactcatctgagaaatctattgtagtcagtgagaagcagcagcagcaggacaatgaggtgtctacttctaaggagactgtatgagatattatatgatatgtagatgtcaaattttcgccatgaaagaaactattctgttagtttagtattttttggctgtctgagattccattattt

SEQ ID NO: 9447 - DNA, 711 bp, Glycine max
  Clone ID: 700847374_FLI
cgggaaattgttcattttgtaaacgatgctgagccggttatgtttgcacaccccattcctcggtttccagttgttaaagaacgggtgcctaatccaagctttttgcaaaaaggagaagagcctcctggggagcatattcctgcttggttgcctgcattccctgatccacaaacttattctcagtcacctgcagtgaatggaagagggacagaacctcgtgcggtcaaatttgaccaagaaagagagagtggcaagggggagtggcctgcgttgaatttgcagcagcagatggtctcaaatatgtttgaaaagtctgcctcgattgaccctgcagatgctaaggcaaaaagagtagcagcagaaggtaacccgttccttgctgcacctttgaaaattgaggacaaggaagttgcttctgttccccctccggctaagctttttaatgatgaagctcttgataatcctgttgtggaaaatcttgttgaaaatgaaccgatttcagcattggagacatttgctccagcaattgaagcaatgaaaagcacaatctgtgattccaaggaagatcagacaaaattttgtgccaatgagaagcctacggtgcgttttaagattgggattaaaaacaaattattaggaaaatccattggtttgatcccacaaaaagaggagcatgaaaagactttgccatggtttgcaatggaagatgag

SEQ ID NO: 9448 - DNA, 1572 bp, Glycine max
  Clone ID: 700847377_FLI
aatttccatgcggtactatgttttctttgcaagtactagcacaaacagctagctactatttttgaacttgtcataattagtctctaattctaattagccatacattgaacacaccagcacaccttaaacgtaagtggtatttgttccacacaggtacactatgccttcactctcagaagcctaccgagcccaccccgtgcacgttcaacacaagcaccctgacttaaactccctacaagaactccccgagtcttacacttggacacaccatagccatgatgatcatactcctgcagcttccaacgagagtgtccccgttattgatctcaacgacccaaatgcttcaaagttgatacaccatgcatgcataacttggggagcgtaccaagtggtgaaccatgccatacccatgagcctcctccaagacattcaatgggttggggagacactcttctctctcccttgtcaccaaaaacaaaaagcagctcgttcccctgacggtgctgatggctatggccttgctcgcatctcttccttcttccccaaactcatgtggtctgagggattcacaattgttggatcccctcttgagcattttcgtcaactctggccccaagattaccacaaatactgtgatatcgtcaagcgatatgatgaagccatgaaaaagctagtgggaaagctgatgtggctgatgttggattctctgggtattacaaaggaagacctgaaatgggccgggtccaaaggccaattcaaaaagacatgcgcagccttgcaattgaactcttacccgacttgtccggatccggatcgggccatgggtctggccgcccacaccgactccacccttctcacaatcctttaccaaaacaacataagcgggttgcaggttcaccgaaaaggcggcgggtgggtgacggtggcaccagtccccgaagggcttgtgatcaatgtaggcgacctcctccacatattgtcgaacgggttgtacccgagtgtgctccaccgggtcttagtgaaccggatccagcaaaggctttcagttgcgtatttatgtgggccccctccgaatgtggagatatgtccacatgcgaagctagtgggcccaaataagcctcccctttataaggcagtgacttggaatgagtaccttggcactaaagcaaagcatttcaacaaggcactctcaaccgttcggctttgtgcacctagctagctattagcggttcgtttgatgtaaaccagcctcacacaattgcttcgatccttccctcttgcatggtctattttctaccaaacatgaatgaaacacctcttctttttcttttttttgcttaatatgaatggaaacttggtggggatcgatgccaacaataaataagttcaagagggtgtatatgtatgtagatatatttgtttggctctaaactggagagagaatactggggataagatagtctcatccgtgtttcatttgtctttgtctttgtctggaaagggacatcactaaattgtcgaagctgattattcaattcgaccacaggactcgccaaaaaacattttctttcc

SEQ ID NO: 9449 - DNA, 1670 bp, Glycine max
  Clone ID: 700847407_FLI
tttgaagttgttggccatggaacagcttctcattcagcaccctgagtatcgggaaaaggtagtgctggtccagatagcaaatcctgcgagggggcgagggaaagatgtgaaagaagtgcaagccgagacgaaggccacagtgaaacggataaacgaaacatttgggaaacccgggtttgatcctgtcattctgattgaggagcctctcaagttttatgagagagttgcttactatgttgttgcggagtgttgtttagtcactgcggtaagggatggaatgaatctcataccgtatgaatatatcattagtcgtcaaggaaatgaaatgttggatgcagttttgggtctagcttcctcccctaagaagaaaagcatgttagttgtgtctgaattcattggctgttccccatctttaagtggggcaatcagagtgaacccttggaatattgatgctgtagcagatgcaatggactctgcgctggaaatggctgattcggagaaagagcttagacatgaaaagcattatagatatgttagtactcatgatgttgggtactgggctcgaagcttcttgcaagatttggaaaggacttgtagtcatcatgtgcgacgaaggtggtgggggattggttttggattaagctttagagttgttgcacttgatccaaacttcaagaagctctcaatggagcacatagtttcagcttacaagcggacggcaactagagcaatccttcttgactatgatggtacactaatgcctcaatcatccaccattgataagagtccaagcagtaaatccattgaaattcttagtagtttgtgtagagataagaacaacatggttttccttgttagtgctagaagccgaaagatgctttccgaatggttttctccttgtgagaatctgggagttgcagctgagcatggttactttctaagaatgaaacgagatgaagagtgggaaacacatgttgcagcaacagacactagttggaaacaaattgcagaacctgtaatgaaactttacactgaaacaactgatggatccaccattgaagacaaggagactgcacttgtttggtgctatgaggatgcagatccagactttggatcgtgccaagctaaggaactccttgatcatcttgagagtgtgcttgcaaatgaaccagtaacagtcaagagtgaccagaacaatgtagaggttaaaccacagggtgtgagcaagggactagtggccacacgcctactttctgccatgcaagaaaaggggatgtgccctgattttgttttgtgtataggagatgacaggtctgatgaagacatgtttgaggtaattaccagttcaatgggcggtctgatcgctccaaaggccgaggtatttgcatgcacggtttgtcgaaaacccagtaaggctaagtactacctggatgatacaactgaaatagtgagattgcttcagggcttagcctgtgtttcagaacagatagacaaatagtttcattttcttcagaacaagaaatagtttgttaagcttgggaaaagtggtggtggtggtgagaggtattataattatattgtgcttgctttactttgtcattgaggatgtaggctcagttgtgctgctcttaaaatcttaatacacaattaaaattattggtttccttgat

SEQ ID NO: 9450 - DNA, 1409 bp, Glycine max
  Clone ID: 700847483_FLI
gtcataatcagagttcaggccactatttcacaatcgcaagtgataagagtaatagaacaaccactcaccccctctccgatctaatggccaccgtaatcgacggcaaagccgttgcgcaaatcatccgatctgaaatcgccgacgaggtgcgcctgctctctcaaaaatacggcaaggttccgggactagcagttgtgatagtagggaacagaaaggattcacaaagctacgtgggaatgaagagaaaggcatgcgccgaattgggaatcaaatccttcgatgtggaccttcccgaacaagtctcccaagctgaactaataaaacaagttcacgagttgaatgttaaccctgatgtacatggtatattggttcagcttccgttgcctaagcacataaatgaagagaaagttctgactgaaatcagccttgagaaggatgtagatggctttcatcctttgaacattggcaagcttgcaatgaaaggcagagaccccctattccttccctgcactcccaaggcatgtattgaactattacagcgaagtggtgtaagtataaagggaaagaaagcagttgtggttggcagaagcaacatagttggactaccagcttcattgctgcttttgaaagcagatgctacagttactattgttcattcacacacaagtcaaccggaaagtatcatacatgaagcagatattgttattgcagcagcaggacagccgatgatgatcaagggaaattggatcaaaccaggagctgcagtcatagatgttggcacaaatgctgttgatgacccaacaaagaagtcgggttacaggcttgttggagatgtagattttgaggaagcatctaaagttgctggttggattactcctgttcctggtggtgtaggttcaatgacagtgacaatgttgctgaagaatactgtggagggagccaagcgctacattgagcaaaataattgatcttcctttaatttgaataaatgaaaggtatgtactattagtttgaaattctttgagaatcgggtttatccacagttttgtttctgctaaggtagatgaatgcatcctataaaatcacaaggatcggtttcaatgggtaagcagaactggtccaatcgaaactatgtatttgccctttcactatctctgaagaagcattctcgatgtgggtactgagcatattttagattggatttagaccataggtagtccttggagataagaaacgcatgttttttgggagtacttttggagtggactgatctgtagccacagtgtaagttctgttcttatgtaagaatcagttctacaacaaagtataaaaatgtggagtaatatgtagaacacatttttaattcttaagtggttttactattagagtaaaaagttattgaaattctt

SEQ ID NO: 9451 - DNA, 1230 bp, Glycine max
  Clone ID: 700847540_FLI
cttcccactttttatgagcattggccaacccccacgcttcctttattctccctctcaagcttcaagctactcacaccaatgaagatccagtgcgacgtttgcaacaaacacgaggcctccgtcttctgcaccgccgatgaagccgccctctgcgacggctgcgaccaccgtgtccaccatgccaacaaactcgcctccaaacaccaacgcttctctcttctccgcccttctcctaaacaacaccctctctgcgatatttgccaggagagaagagcctttacattctgtcagcaagacagagcgattctctgcaaagagtgtgacgtgtcaattcactctgccaacgaacacacccttaagcacgataggttccttctcaccggtgttaaactttctgcttctgctatgcttcgttcgtcagaaactacctctgattcaaactcaaacccttctcttcttaacttttcacaccaaacaacattactacctccatcttccaccaccaccaccaccaccagcaacaacaacaacaacaaggttgctgttgaaggaactggttcaactagtgctagcagcatatcggagtatttgatagagactcttcctgggtggcaagttgaagactttcttgattcatattctgttccctttggtttctgtaagaatgatgaagtgttgccacggtttgatggtgaaatggaggggcatctgagttctttctcaaccgagaacatggggatctgggttcctcaagcgccaccaactcttatgtgttcttcacaaatggatcgggtgatagttcacggtgagaccaatatcaaaggtagcagcagatcaaggttgaaggatgataatttcactgttccacagattagtcctccttccaattccaagagagccagatttctgtggtagaaacaaataaacaaacaaacaagcctcactttccattctcttgaggcagaattaacaaccctctttgttttgttttgtcccttttctctttttcttaccctggcttgtagtttactctgcccatgttttcaatttggttcagtttgacttttttttttccctttttcttgtttctcctccctctttccctactgggctgtgttttgataaatttgtgcacctttctactagtgattgtaaatataaaccttttcaaatgcatgttgttttttgacacatgtttagaagagaaacaacagagtatgagcttaatag

SEQ ID NO: 9452 - DNA, 1130 bp, Glycine max
  Clone ID: 700847560_FLI
gagatggagaagccaggaggaggaggagtgttatcggcgaaggaggcattcgagaagcttgaaaaggtgggagaagggacatatgggaaggtgtacagagcaagagagaaggccacggggaagatcgtggctctgaagaagactcgtctccacgaggacgaagaaggtgtccctcccaccactctccgtgaggtttccattctgcgaatgctctctcgcgatccccatgtcgttaggttaatggatgtcaaacaaggtcagaacaaggaagggaagacagtgctctacttggtctttgagtacatggacaccgatctcaagaaattcattcgctctttccgtcaaactggacaaaccgttccaccccaaaccatcaaaagcttgatgtaccagctttgcaagggcgttgctttctgccacggtcatgggatcttgcacagggacttgaaacctcacaatctcttgatggacccaaaaaccatgatgcttaaaattgctgatcttggactcgctcgagcatttactgtgccgattaagaaatatacacatgagatactaaccctgtggtatagagctcctgaagtcctcttgggtgctacccattactcaatggcggtggacatttggtccgtaggctgcatatttgccgaacttgtcaccaaacaagcactctttcctggtgattccgaactgcaacaactcctgcatatattcaggctattgggtactcccaacgaagacgtgtggccaggcgtgagtaaactaatgaactggcatgaataccctcaatggaaccctcaaagtctgtcaacggctgttccaagtttggatgagcttggactggatttgctatctcaaatgttgaaatatgagccttccaagaggatttctgcaaagaaagcaatggaacatgcttactttgatgacttggacaagaggcacctttagaacgaataaattggtccaagatttggaagtagaattttatgactaccaatttactctatgcttctctcgagcgtgtatcctaatccgtttaaggagtggttgcccttgggatttatttcatagctgcttctatgttttttagtcattctaatggaaatatcgaggtgttttcgtgtcattct

SEQ ID NO: 9453 - DNA, 839 bp, Glycine max
  Clone ID: 700847609_FLI
ctttcaaagtatttgcttttattttttggtgaaaaagtgttttgcttttgctgttgtacaagatgagtgatgagaatggcgaagaacctcgagaaaaccgtccggttccacgcttgaatgaaaggattctttcatctctgtctaggagatcagttgctgctcacccttggcatgatcttgaaattggacctggagcgcctatgattttcaattgtgttgtggagatcactaagggaagcaaggtcaaatacgaacttgacaaaaagactggattaattaaggttgatcggattctgtactcatcagttgtttatcctcataactatggcttcattccaagaactctatgtgaagacaatgatccaattgatgtcttggttctcatgcaggagcctgttcttcccggttgtttcctgcgagccagggccattggattgatgcctatgattgaccagggggagaaggatgataaaattattgcggtatgtgctgatgatccagaatttaagcactatactgacttaacagaacttccacctcatcgcctcatggagatccgccgcttctttgaagattacaagaagaatgagaacaaggaggtagcagttaatgattttctacctgcatccactgctgttgaatccatccagtactcaatggatctttatgcggagtatattctgcataccttgaggcgatagacaagaataatatactaatactattctcctcaaatcagaattagctgcagcattatagatggtttttgaatacattttgatgaaactttatattgtattttgtattgagttggataatatataacagttgtttgtttt

SEQ ID NO: 9454 - DNA, 879 bp, Glycine max
  Clone ID: 700847620_FLI
ttggaggatcctcttggcaagctcaatatgttttacctgccgtccaaaacgtgtaccaagctataagggctcaaggccttcatgatcaaatcaaggttacaacagttattgacacgaccctaataggaaactccttccctccatcacaaggctcctttaggggtgatgtgagatcatacctagaccccataattggatacttattatatgctggggctcctttattagtcaatatttacccttattttagttactctggtaatccccgtgacatatcacttccctatgcccttttcacctcaccaaatgttatggtatgggatggtcaatatgggtaccaaaatttgtttgatgctatattggattcggtgcatgctgccattgataacacaaggattggttatgtggaggttgttgtatctgagagtggctggccctcagatggagggtttggtgccacttatgacaacgcacgtgtgtatttagaaaatttggttcgtcgttctagtagaggtagcccacgacggccttcaaagcccacagagacttatatatttgccttgtttgatgagaataacaagagtccagagatagagaaacattttgggttgttcaatcccaacaaacaaaagaagtacccatttggatttggtacaaaaaggaatgagaaagttgttattgatgacttcaatgcaacaatttccctcaagagtgacatgtaaggttggagtcctactcttcaaattaagtctatgatatttcacccataaaataagagagaatatgttatttgtgtgaaatatttatccttcggtttcggatgaaagttgaaaagttgataaagatgaagctatataatatgagacactttcctatgtt

SEQ ID NO: 9455 - DNA, 1728 bp, Glycine max
  Clone ID: 700847631_FLI
ctttctctacttctttccctttccccaacccctcatacgttactctttaaatacgcaccacatcttcacgtgcctctcggttcttcagtccaaacaatggccatggttgagctctggtggattacgtgctttctctaactactgttttccacacttaacgaaccagaacacagtgagaaagacataatggcggtggagtacacatgctgctcaacggccttcttcgttcacatactggtcatcgtgctgctcgtgcttttcgcgggcctcatgtcgggcctcaccttgggcctcatgtcgctcagcctcgttgatcttgaagttcttgctaagtctggtactcctcaggatcgtaaacacgctgagaagatattaccagttgtcaaaaaccaacatttattgctatgtactctgctaatttgcaatgctgcagccatggagacacttcctatttttcttgatggccttgttactgcatggggcgctatcctaatttctgtgacattaattcttttgtttggtgagattataccccaatcagtttgttctcggtatggtttggctattggtgcatcagtggctccctttgtccgtgtgcttgtatgcatatgttttccagttgcctatccaattagtaaggctggaaaagggggggaactgacacatgatgaaacaacgatcattgccggggcacttgaactcagtgagaagacggcgagtgatgccatgactcctatatctgaaacatttactgttgatattaattcaaagcttgatagggaactgatgaatgagatattggagaaagggcacagcagagtcccagtctattatgagcagcctacaaacattattggacttgtactggtcaagaatttattgacagttcatccagaagatgaagcacccatgaagagtgtaaccatacgcaggattccaagggttccagaaagtatgccactttatgacattttgaatgagtttcagaagggccatagccacatggcagttgttgtcagacggtgtgacaagactaaccaacaatcttcccaaaataatgcaaatgactcggtgagagatgttaaggtggatattgatggtgaaaagcctcccaaagagaaagctttgaaacccaagatgccactccacaagtggaaaagctttccaaatacaaacaagtcatcaaataggggttctcggagcagaaaatggtcaaaaaatatgtactcggatattttggagatagatggaagtccccttccaaagctccctgaagaagaagaagccgttggaattattaccatggaagatgtcattgaagagcttttacaggaggagatctttgatgagacagatcatcattttgaagactcataacagtggcttttttccataaaaccttccatgttcatatttcttgtttggaccttaaaaataattaaatagataatgcggtttagggttgaaagctgctgtatagagatctgagttgtgatttggaacgtgtaagccattatcgttgatgaaatgcagggaccagacagctgtttttgagatgtacatgcgtgtctctatcgcaatgacgcataccagcaaggcagcaaatcttggtttgttttttagtgcgcgcgcgttttcctttcttttgattaattgatacctacttgtattgtatgaagtgcatatgtattacgtaacagtattggcatttagtaagcacatgattag

SEQ ID NO: 9456 - DNA, 832 bp, Glycine max
  Clone ID: 700847651_FLI
agcaaaggtaatagagggtggagaatgagtctgatgagtcttctacctcctcttgctgctgcttcttacacaaacacagttcctaaactgaaaactcacagtccaaaccttgtacttggacaaagggtcctacctaatctcctctcattggcccttgctgtaaccttagcctctcctttaccttcatatgcaatcccatcccttaattctcaatcccctccaatctctttcaccactcctttttctcaatccaagaacttggagcttggactagaaaatggaaaaattagaccttgcccatcaatcaatccaggttgtatatcaacaaatcccaagtcatcatcttttgcgtttccttggcttattccctcaaattccttggacgatgcaattcagaaactacgtgaagcaatcctaaagacccagaaaaatgtgaaatttcagcctgtggaagatagcccagatggtcaatatctacaagctgaagttgatggaggatttggtagagatgttattgagtttctggtgaaaggtgatgtggttgcatacaggtgtgtggcaatgaaagtgacttatgtgtaccctttcactactgcattaggagattcaaagggtcaagaagcaagactgaagcaaattaatgaccacttgggatggtatgctccaagttttgattccatggaggaatagtgttgtttcgtttcattcttttgttggttcagttctttgattggtgcctatctgaatccttaatgcctttaatgttgaattttgcctcattatgttcaattttatggattttgcaatttaaatgctcaaaagttttagactc

SEQ ID NO: 9457 - DNA, 1019 bp, Glycine max
  Clone ID: 700847727_FLI
gatgatatgaggatacctttggatatgataatccacaagcttgttaaagcttacatttgctcgtcttcgttgcgcaaatctgctttacgggctcttgcaaagacattaacagtagctcagctagcttatctcagagatcaatttactctgttagggccaaacaaaagtggattaatttctatgcagaactttaagacggctgttttgaggagctctacagatgcctcaaaggattcacgggtcttagattatgtcagtatggttagttctatccaatataggaaattagattttgaggagttttgtgctgctgctataagtgtgcaccaactcgagggaatggagacctgggagcaacatgcaaggcatgcctatgagctttttaaaaaggaaggaaatagaccaattatgattgaagaacttgcctcggaacttgggcttagtccatcagtacctgttcatgtagtacttcaggattggataaggcactcagatggaaagcttagtttcttgggatttgtcaggcttctgcatggggtttcttcccgcgcatttcagaaggcttgagagaatgtacacacagttgctattattttttcttgcccgttacctttaaatattttgatggtacctaaatgcatgagctaactccatcagcagacctcagtgggcttctgcaagttgaaggcagtggctgataggaatttgtttctgaagctttatgcaacatatatctatcccacttttccaagatttacaaacacaacctatattccccaccttgtttctcactcactttagtttggtggttctggagttagaagcttgtacagttgaaagctagaccaaaaattgtacccaccttgtcttaagggtttaccccttgtgtacccatggcacctatcaataaacatcacgtgaactccttgataatagacagatatgtagcctttttttcgtagtattttgttgcatttatatgttattattattcaaggccacaagggttggtacttttt

SEQ ID NO: 9458 - DNA, 2508 bp, Glycine max
  Clone ID: 700847733_FLI
ctctttcttctacactattcattcaatccatgccggtcaacgtgaggtgctgaaggtcaatcgtggtctttcgaaatggggaacgggagcagaagctactcggcgaaccggagcgactacaagcttctagaagaagtcggttacggcgccagcgccaccgtctaccgtgcaatctacctcccctacaacgaggaggtcgccgtcaagtgcctggatctggatcgctgcaatataaatctggacgacatacgtagggaggcgcagacgatgagcctgatagagcaccccaacgtggtgagggcctactgctccttcgtggtggagcggagcctgtgggtggtgatggcattcatggcgcagggctcctgcctgcacctcatgaaggctgcttatcccgagggattcgaagaggccgccatcggatctatcctcaaggagactctcaaggcgttggagtatctccaccgacacggccacattcaccgtgacgttaaggccgggaatattctcctcgacgataacggccaggtcaagctcgccgacttcggcgtctccgcttgcatgttcgacaccggcgaccgccagcgctccagaaacaccttcgtcggaactccctgctggatagcgccggaggtgctgcaacctggaaccggttacaatttcaaggcggatatttggtcgtttgggattactgcgttggagttggctcatggtcacgcgcctttctccaagtatcctcccatgaaggttcttttgatgaccattcagaatgctcctccggggcttgattatgatcgtgatagaaagttctccaagtctttcaaggaaatggttgctatgtgcctggtaaaagatcaaacaaagaggccatccgtggagaagttgctcaaacactccttcttcaaacaggctaagccaccggagctttctgtaaagaaattatttgctgatttaccgcctctgtggaaccgtgtaaaatccctccagcataaagatgcagctcagctagcactaaagaaaatgccttctgcagaacaagaagctatatctcaaagtgaatatcatcgaggagttagtgcatggaacttcgatattgatgatttgaaagcacaagcggcattgatgcaggacggtgatgatattgcagagatgagggaagaagatgaaaacaaattcttcagctcttacaagggtacagctgattcccagtttattgtggatgaaaagaattcaaataacttgcaacaatatgagttcacatcacaagtaggtagtaacgacataccacagtgtgagaaaagaaatggatcagttgctgaagcaacaccatctactttagagaatgatgtgggaacaagcaaagttaaaactcaatcagtgaaacttggtaaaacccaaagtggacccctgatgccaggcttagtgcttggtcattcttcatctgaaagagggcgtacatttgaaaggtttgagaatgaaaaccagttagcgggtgagaaaagtaatcgtgatatacgacgagctccaagctttagtggtccattaatgcttccaaaccgagcttcagcaaatagtttatcagctccaatcaaatcttctggaggattcagagattccttggatgataagtctaaggctaatctagtgcaaattaaaggacgattttcagtgacatcagaaaatttagatctggtgaaggatattcctgtaagttcagtttcgcgccgatcttcacagggatcaccaatgaggaaatctgcgagtgttggtgattggatggtggattacaaacaaatgccaattggtcagtcctccaatgattctgccaatatcaatattcctgcatcacttttagtgcctcatcttcacaatctttttcagcagacatctattcaacaggatcttataatgaatctgttgaatagcttgcaaactgccgaggcaattgatacttctcagaacgggaagttaccaccattacctcgcaattcagagaacaacggaagtgccgatacagcagtttcagagagggaacagctgctgctgggcaaaatttcagaactccaatcccggatgattaatttgaccgacgaactgacttatgagaagttaagatatgtgcagttgcaacaacagctaactggtctctacagccaggaacaaaatggggaaagagaggaatttgcatgaaagcagataattatgaacctccaggcgagtgatcaatcatacgttgggctccaattctttctctttgctgaggagaactactttttggatgtttatagtcagtccttgataagtgtcatatatatatatagatatatatattctctgatccagccttgtgttcaataaacttttgtgacgatctataatacccagctagtgcaaatgagcaagatgatgatctgtcatagttaatctcattatttatttcatttaaagattcagatgtaaataagcttctctgttgtatcatactgcaacgtgctatgtttgcagatc

SEQ ID NO: 9459 - DNA, 968 bp, Glycine max
  Clone ID: 700847843_FLI
ggtggttgctatgccaaatgcattgacctctcacgggagaaagagccagatatttggaatgcaatcaggtttggcacagtgttggaaaacgtggtgtttgatgagcacgaccgagaagttgattactctgacaaatcagttacagaaaatactcgtgctgcttatcctatagagtacattccaaatgcaaagttaccttgcgttggccctcatccaaagaatgtcatacttttggcatgtgacgcatttggggtactcccacccgttagcaagctaaacctggcacagaccatgtaccatttcattagtggatatactgctttggtggcgggcacagaagaaggtattaaggagcctcaggcaactttttcagcttgttttggtgcagcattcattatgctacaccctacaaagtatgcagcaatgcttgctgaaaagatgcagaagcatggtgctaccggatggcttgtcaacactggttggtctgctggcagctatggctatggaagtcgcattaaactacaatacacaagaaaaatcattgatgctattcactcaggaagtctgctgaatgcagagtacaagaagactgaaatttttgggcttgagatccccaccgaagtggagggtgtcccttcagaaattctagaccctgtgaacacttggtcaaacaaaaagggctacaaggagacactattgaagttggctggattgttcaagaacaattttgaaaccttcaccaactacaagattggcaagggcaacaacaacctgacagaagagattctcgcagctggtccaatcttttgagacaatgttatgtaacatgttgtgtggttgggaatgttaatgttaggatggtagataaaatcttgccttagaataaaatattgtaccattggtttggttgggctcataatgtcatttctattcttcctccaaaaaaatgaagtttattttctaggctt

SEQ ID NO: 9460 - DNA, 1739 bp, Glycine max
  Clone ID: 700847848_FLI
attttcttctttctctctcccttagtcaaagggactcattgttcttctcccaggttatttagaaaagcaaaatggtgaagatttgctgcattggtgctggatatgtggggggtcctactatggcagtcattgcacttaagtgcccatccattgaagttgctgttgttgatatctctaaatcccgcattgcagcctggaacagtgaccagcttcctatctatgaacctggccttgatggtgttgtgaagcaatgccgtggcaagaacctcttcttcagcactgatgttgaaaagcatgtctttgaggctgacatagtgtttgtctctgtcaacaccccaaccaaaactcagggtcttggagctggtaaagcagcagatttgacatattgggagagcgcagctcgcatgattgctgatgtttcgaagtctgacaagatcgttgtagagaaatccacagtcccggttaaaacagctgaggcaatagagaagattctgacccacaatagcaagggaatcagattccagattttatcaaaccctgaattccttgctgagggaactgcaatcaaagatctctttaacccagaccgtgttcttattggaggcagggaaaccccagagggccaaaaagctattcaagcattgaaggatgtttatgctcatgggtccccgaagaaagaatactaaccacaaatctctggtcggcagaactatctaagcttgctgctaatgccttcttggcccaaaggatttcatctgtcaatgccatgtcagcactttgtgaggctaccggggcaaatgttcaacaggtgtcctattctgttggaacagactcaaggattggacccaagttcctcaacgccagtgttggttttggtggatcctgcttccagaaggatatcttgaaccttgtttacatctgcgagtgcaatggccttccagaggtggctgagtactggaaacaagttatcaagatcaatgattatcagaagagccgttttgtgaaccgtgtagttgcatcaatgttcaacacagtctcaaacaaaaagattgctattctgggatttgccttcaagaaagacactggtgacactagggagacccctgccattgatgtatgccaggggctacttggtgataaggccaacctgagcatatacgatccacaagtaactgaggaccaaattcagagggatctatcaatgaacaagtttgattgggatcatcctatccacttgcagcccacaagtcctactactgtgaagaaggtcagtgttgtttgggatgcctatgaagcaacaaaggatgcacatggcctttgcattctaaccgagtgggatgagttcaagactctcgactaccagaggatatttgacaacatgcaaaaaccagcatttgtttttgatggcagaaacattgtggatgctgataagttgcgtgagattggcttcatagtttactcaattggtaagccactggatccatggctcaaagacatgcctgctttggcgtaaaatagatcattgatcaagtacactgcaataccagtcaaatgttgaggcagtcagtttaattctttattattttttgtaagagtttttcttttcctgcttaactttctcataatagttggtgacataaatggggtataaattgtgggaaatgggagggtttatgttctatgttactttgtactccaatcttttatgaatgtactagggaaacttgttttgtttgatt

SEQ ID NO: 9461 - DNA, 1938 bp, Glycine max
  Clone ID: 700847855_FLI
ggagggtcaagctctttgttgaatagtgtttgtgttgcctttatctgcaacttttaattgaaccaatcctaccctttttatgaacatatgaaaagatcggttttttgtggttcctccactcattgttgttgaagggtctcgcgaaatcaatcaagttttgagacctgttttctggtagaggtgtaagtacaagatcttaataataaggattttgtacaaaggaaaagttgagaataagatgggggaagatggttattcttggattaggaggacaaaattttcacacactgtctgccatcgtttggatcctgctaggttaggctctattcctatcagtgttcagtcagagcaaaaatcaaggcctgctgcctcaaaggctcagagacaccccataacaaacaagcagagatctttgtcaccattgcctgagacttatctttctgaggccttcagggaagctagacatgaacagaagaggttctccacgccgaatccccggagggaaaagaggattatggggaagttgttgaacaaagattctagggagactaaggaatcaagttcaaagtcaccttcgcatagtccaaataggcaagtgaagtcaaagaaccgcaaggattcagcatggactaagcttttggacaatggtggaggaaagattactgctgtggaaacagctgaagagtggaatgttgacatgtctcaattgttttttggcctaaagtttgctcatggtgcacatagtcgactttaccatggtgtatataaggaggaggctgttgctgttaaaatcattatggtacctgaggatgatgaaaatggagctttggcttctcgattagagaaacagttcattagagaagtcacccttttatctcgtcttcaccatcaaaatgtcataaagttctcagcagcatgcagaaagccaccggtttattgtattatcacagaatatctggcggaaggttccttgagggcatatttgcataaattggaacaccaaactgtttctctacaaaagctaatagcttttgctctggatattgctcgcggaatggaatatatacattctcaaggtgtcattcatcgggaccttaaaccagagaatgtcctaatcaacgaagacaatcaccttaaaattgccgattttggcattgcatgtgaggaagcatcttgtgacttattggctgatgaccctggcacctaccgttggatggcacctgagatgatcaaaaggaaatcctatgggaaaaaggttgatgtctacagttttgggcttatgatatgggagatgttgactggaacgataccatatgaggatatgaatccaatacaggctgcttttgcagtagtaaataagaattcaaggccggttattccatcaaactgccctcctgcgatgcgagctttaattgagcaatgttggagcttgcaaccagacaagaggcctgagttctggcaggttgtgaagatattagagcaatttgaatcttcacttgccagtgatggaaccctgagcctggtgccaaatccttgttgggatcataagaaagggcttcttcattggattcaaaagcttggtcccttgcaccaaaatagtggccctgtgcctaaacccaaattcacatgaatcttccaagtgtcctcctggcctggcttttattgtacaccgggtccattgtaattaaaaatgaaaggtttgtttttcaggttctctggttgtgtagtcactttatgacattcatgtgatagtatattgatttttaggcttgcacataaaggtgaaagcatctttttttttgcgaagtgtgcatacaaaacttgtacgaaactcttgcttcatgtgtagttggttgtagttgacacttcaccccaaaagttaaacactcctcttccactttcctccccttacaaatgaaaatttataattccggtgtg

SEQ ID NO: 9462 - DNA, 2402 bp, Glycine max
  Clone ID: 700847859_FLI
aataggtcaccctgccgcttccccatccctagggaaacgacgtttctttcactctccatctctatcctaacccatctatcctgactcaaaaataacaaaaaacgaaaaaaaatccatcgattccctgcacttccatgtcttctttgtctacgcatcacacctatagccgaaagcaaaaatctctcggcctcctgtgcaccaattttttgagtttgtacaacaaggaaggtgtgcgattaatcggtttggatgatgcagcttcacgattaggagtagaaagacgaaggatctacgacatcgttaacattttagagagtgtggggtgctagctagaaaagctaagaatcaatgtacctggaaagggttttctgcaattcatgtagccttgcaagaacttaaggatgagggtttgaaggagaatcctggatcatccgatgactccaatccatccattaatttagtattaaccgttttaggtacatgatgatgaggacgaagaagaaacgtttcccaacattaatactgggagtcagaatgttatggtcaaatcctcctccaagaatgaaaacagaagggaaaaatctctggcattgcttacacagaattttgtcaagctttttgtctgctctaattttgaaatgatctcccttgatgaagctgcaaagttgttgcttggaaatgccaataatagaacaaaagttagacgcctatacgatattgcgaacgttttatcctccatgaacctaattgagaaggttgcagacccatacaacaaacacaagaaaaccagcatttaggtggttgggtgtgagagggaaaacatggagtgaatcagctcagacaaatgttaaagagtcacagaaaaggatgtttggatctgacataacaaacataaattttaaaaggaaagttgatttgtccatggatggccagaactttaaaacgcaaaaccaacaggaaaatattagtcccagagctcagctggagaaaaaaagcttaaaaaaagatgcaaaacagacttcaatgagctatcagtttggccctttcgctccagcttatgtgcacaaagttggaacctctgaaaataatagtgtgaaacaggtgcaagactgggaaagcctcgcacaggagcatcgtcctcaatatcaaaaccaaggttagagctttgaaagatctattctctcactacatggaagcatggaaatcttggtactctgaagctgctaaaactttataattgacttgtccaaagtcagtcagataattgcagctttctaaaaaaagaaatgatccattactgaacgtgtgttttacatgctttagtgtattctcaatagaaaaggatccattgttgaatgcatgttctccatgctttagcgtattgctgccgtatgccgattttgtaaattataaattattgttaacatgacttttaagataattttattaaaattaataattaataattgatcataaataatggtttctgattgtatgtttacactttcaattcatagttgttttggattacaaagtttgtggggtattaaaaggtttgaattaggggtaacaaagcatgatgaacctactagattcatatgcctagctaatcttgcttaacacaccaagttggtgagtcaaaggtaggttgtggttggttgatccaatgcatttttttgttaaaaatttgtttacctttctaagacaccggaacctatttcccggaaagtgatgcaaatgttgcaattttttgagtgatttttagtctaacaaattgtttaattcaccctaggccttctaccttcacgtggcattgctctgtcaggctttcgtccattgtagaaaattctcactactgcctcctgtaggagtgtaggctgtgtcttagttccagtgtggctgatcatcgtcttggtctcttggatcaagattgtcgccttggaaagttattgtctcgccaactagctaatcagacgcgaactcctcagacggattcctccaaactatcattaaagattagtaaaattatatttttatttttacagaaatcaaattgatataaatttttttaaagataaaattaatatttttcaaattttatatgtattttaaacatatcttaccttaaaatttttattagggtttcattgttgttcataacttgtattgagattgattgatcagaaatttataataaattatggatgaatgaattagtattttttttaataaatatttgacgggtttggtgggtcaattcactattttatgtcttccaactcatttttaaccgtgggtcaatctaacttgccttgcttaaagtggtagcttgaatctaagggattatttttactaaattgttgtaattcactttaaaaatatcaaactaatgtagtttttgt

SEQ ID NO: 9463 - DNA, 1997 bp, Glycine max
  Clone ID: 700847896_FLI
gtaaggtatctctgtaccaagatgctcatgtacctgataattttgtacctaaaatacctcttgctggaggcaagaattatgaggctcataggtgttgggaggatatatttgatgcaatcactaatgctagacacttcatatacattactggttggtctgtttatactgaaatttccttggtgagggattctaggaggccaaagcctgggggagaccaaacacttggtgagcttctcaagaaaaaggcaaatgaaggggttaaggtattgatgcttgtttgggatgatagaacatcagttggtttgttgaaaaaagatggactaatggctactcacgatgaagaaactgcacagttctttgaaggcactgaggtgcattgtgttttatgcccccgcaatcctgatgatggtggtagcattgttcaggatttacaaatttctaccatgtttactcatcaccagaagatcgtggtggttgacggtgcgatgccaggtgaagggtcagataggcgaagaattgtgagttttgttgggggtattgacctctgcgacggaagatatgacactgccttccactcacttttcagaaccctagacacagcacaccatgacgattttcatcagcctaactttcctggtgctgctatcacaaaaggtggtcccagggaaccatggcacgacatccactcccggcttgaaggacccatagcttgggatgttttgttcaactttgagcagagatggagaaagcaaggtgggaaggatgtacttgttccactgagagagcttgaagatgtcattattcccccatccccagtaacgtttcctgaagatcatgagacctggaatgttcagttgtttagatccattgatggtggggctgcttttgggttcccggagactcctgaagatgctgccagagctggtcttattagtgggaaggataatatcattgatcgtagcattcaagatgcttatattaatgctattcgacgtgcaaagaacttcatctatattgaaaatcagtatttccttggaagctcttttgcctggagtgctgatgatattaagcctgaagacattggtgctttgcatctaatcccaaaggaactttcactcaagattgttagtaagattgaagctggggaaaggtttgctgtgtatgttgtagtcccaatgtggccagagggtgttccagaaagtgcatcagttcaggcaatattggactggcagaagagaacaatggagatgatgtacaaggacattattcaggcactcagagctaagggaatcgatgaagatcctcgaaactatttgacattcttctgccttggcaaccgggaagtgaagaaaccaggagaatatgagccttctgagcaaccagatcctgattcagattatcagagagcccaagaggcccgacgattcatgatttatgttcataccaagatgatgatagttgatgacgaatacataatcgttggatctgccaatatcaaccaaaggtcaatggatggtgctagggactctgagattgccatgggtgcttatcagccctatcatttggctaccaggcagccagcacgtggtcagattcacggtttccgcatgtcattgtggtatgagcaccttggcatgcttcatgactccttcctccagccagaaagtgatgaatgcattaacaaggtgaaccaagttgctgacaaatattgggatctgtattctaacgagtcacttgagcatgaccttcccggtcaccttctccgctaccccatcggggttgccagtgaaggagatgtcaccgagctgccaggatttgaattctttcccgacaccaaggctcgcattcttggtggcaaagctgactacctcccccctattctcactacttaatttgattttgtactttgttacaaacttgttattgcttacatcctaatctgtgttttcattactacttagtaataatcttaatatagtctgtgatgtcttgtggag

SEQ ID NO: 9464 - DNA, 1293 bp, Glycine max
  Clone ID: 700847912_FLI
ggccaacaaggtgcttatggaaaatgaaacttgggagatgactttgtatcagaagctagatttctccattgatgacattgtcatgaatttgacatcagccaatgtgattggcactggaagctccggagttgtgtacaaagttacaattccaaatggtgaaacattggctgttaagaagatgtggttagcagaagagtcaggagcattcaattctgaaattcaaacattggggtcaataaggcacaagaacatcatcaggcttcttggatggggatcaaacaagagcctgaagttgttgttttatgactacctgcctaatggaagcctgagctcattacttcatggttcaggaaagggaaaagctgaatgggagacaagatatgatgctatattaggtgtggcacatgcacttgcatatttgcaccatgattgtttgcctgctattattcatggagatgtcaaagccatgaatgtgttactaggccctggacaccaaccttaccttgctgactttggcctggcaagaactgcaactgaaaatggttgcaatactgattccaagccacttcaaagacattaccttgctggttcatatggatacatggctcctgagcatgcatcactgcagcctataactgaaaagagtgatgtgtacagttttggcatggttctacttgaggttctcacaggaaggcacccattagacccaactctaccagggggtgcacacttggttcagtgggttaggaaccacttgtctagcaaaggagatccttctgacattcttgacacaaagcttagagggagggctgatcccaccatgcatgaaatgctacaaactctagcagtgtcctttctatgtgtaagcactagagctgatgagaggccaacaatgaaggatgttgttgcaatgctcaaggaaattagaccccttgagacctcaagggcagaccctgatgtattgaagggaggtttaacagcacatagttcaccaccacctcctaagaatgtggtctcacatggatcttcgacatgttcctacaatttctcggataactcaatcaattgagcatgtatgaataagtttgcatctcatggagaagctatcactccaattgtacatagtctaatgcaatgccaatcagaggtggcctgaattattattagttaatgatattctagtaatctagtgtataattttttttccttttaatgtaatgtcatatagacgatgcaggtttcaagaatccatatattcatttgaaatatataaataaatataatttcttaagc

SEQ ID NO: 9465 - DNA, 915 bp, Glycine max
  Clone ID: 700847975_FLI
gtttggaatgtgagcactgcaagaccgatcaggaaaattactgtgaaaagttgcaatttgtctacaacggagtattctgggatggcagcatcacctatgggggctactctcaaatttttgtcgcagattacagatatgtggtacacattccggaaaacctagcaatggatgcagcggctcctctgctatgcgcaggaataacagtgttcaatcctttgaaagaccacgatttggtagcatcaccgggaaagaagattggggtggttggtctgggaggccttgggcacattgccgttaaatttggcaaggctttcggccaccatgttaccgtcatcagcacttctccctccaaggaggctgaagctaagcagcgtttgggtgctgatgatttcattgtcagctccaaccctaaacaattacaggctgcaaggagaagcatagatttcatattggacactgtttcggcagagcactctctgttgcccatcttggaattgctcaaagtcaacgggaccttatttctcgtgggtgcaccagacaagcccttacaattgccagctttcccattgatatttggcaagagatcagtgaaaggtgggatcatagggggaataaaagagacgcaggaaatgttggaggtttgtgcaaagtacaatataacgagtgacattgaattaatcacaccagacagaatcaacgaggctatggagcgccttgctaagaatgatgtgcgctaccgtttcgtcattgatattgctaatgctgccgcttccaacaactaaactagccttcaattcggatcaaattttacttgtttcgatatttactgtttaatagacccgtgattttacctctgcaattggacgaataagtcatatatttatgtcaatgactttttacttgttaaactgatct

SEQ ID NO: 9466 - DNA, 1290 bp, Glycine max
  Clone ID: 700847984_FLI
gaaagggcaaaatgaagaaattttgctggaattggtaaaacctgacccagcagttttgagtctggaagataataaaggaaatacagcattgcatattgccacaaagaagggccgtactcagaatgttcgctgcttgttatcaatggagtgtatcaacatcaatgctacaaacaaggctggagagactcctcttgatgttgcagaaaaatttggaagtccagaactcgtctccatattgagggatgctggggctgccaattctactgaccaaaggaaacctccaaatccatcaaagcaactcaagcagactgtcagtgacataaagcatgacgtacaatcccaactccaacagacacgtcagactggcatgagggtccagaaaattgcaaagaagctgaaaaagctccacattagtggcctgaacaatgcgataaactctgctactgttgttgccgttcttattgctacagttgcttttgcagccatcttcacagtccctggtcaatacgttgaagacaaaacacatggattttcacttggacaagcaaatagcaaacaatgcagctttcctaatattttttgtgtttgacagcctggcattgttcatctctctggcagttgtggtggttcaaacctctgtcgttgtgattgagcaaaaggcaaagaagcagctcgtttttgtcattaacaagctcatgtggatggcttgccttttcatttccattgccttcatttctcttacatacgtggtggtgggatcacactccagatggcttgcaatatatgctactgtgattggaagcttgataatgctctctacaattggctccatgtgctattgtgtaattttgcataggatggaggagacaaaattgagggccgagagtcgatcgttctctatgtctcatgcatcagaccaagagattttaaacagtgaatacaagagaatgtacgcactgtagtctgtaggatagttgatatatcagaatggaatggcttttatcctccagcatattcttgaagtgatatgtagtttctactatcagtatcagattttaccaagacaagctgtctatgttagactacaggtaccgtgagaaaagagggaaaagaagaaaatgggtggggaattctcgtcacatccactcgtaattataaatgatgtcaaatttagcatcatgtcagtgaaatgattgtggtgttgaagaatgaagacttatatccatttgtatttactctagtattctattataaactaaacttcataaaagaatctaattcaattggttt

SEQ ID NO: 9467 - DNA, 758 bp, Glycine max
  Clone ID: 700848185_FLI
cacaggttcaaagatgtgcagatgacaaagcagtgttgataacaacctacgaaggcaatcacaaccaccctttgccgccggccgccaccgccatggcaaatactacgtcagcagccgcagccatgctgctatcaggttcggcagccccaagcaaggaagcgctaacaaactctgcaggatattactcttcttcttcaattccctatgcttcaatggcaaccctatcagcttcagctccattcccaaccatcactctcgacttgacccaaaaccccaacaacgccatgcagctgcaccgagtaccagcaggccatggcgccacgttccctctgccactgcatgcggcagctgctggtccccacctactaggtcaccccttgttcttccaacagaagcttccaccggcagcattaatgccccttcttcaacgacaaccttcgtcgtcgatggtcgaaacggttagtgcagccattgcttcggatccgaacttcactgcagctttgatggcagcaatctcatcaatcattggagtaccaagaagcagtgatgataataacaatggaaatggtgctattccagggtcaccacagcttcctcagtcatgcactactttctccaccaactagcggaattttgagaaactatatacttaatttctctatgtatatacacaacttaaaagagaagattaggcatgcgcggtgtttactgtttttatttacttatatgtaaaacagattaattaagagtcacctctg

SEQ ID NO: 9468 - DNA, 1719 bp, Glycine max
  Clone ID: 700848190_FLI
ggaaaattgaaagtgaacgtttccgatggtgtcgtggaacaggttgcggctgggaatggacggtgacggcgaggagttgacggcgcaggagaccgctttgtatgaccgtcaaattagggtttggggagctgatgctcaaagaagattaagcaaatctcatgtcttagtctatggaatgaaaggaactgtagctgaggtaatcctagaacttgtctctctctggtatctcaaatttgactttggcaaacaaaaaagagtaaaaaaatgggttccccccccccaatatgttgttgtaataatgtgtgaggaatttgagtttcctgctgttggttagttttgcaagaatattgttctggctggagtaggtagtctgactttagtagatgaccgggctgccacggaggaaatgctttcctccaactttctcatccctcccgatgagaatgtgtatagtggaaagacccttgcagaactttgttgtaattcacttaaagacttcaaccctatggttcatgtttccgttgagaaaggtgatttgtcaagttttgatgttgaattcctcagcaagtttgatgttgttgtcgtcagttgttgcacgctttcggccaaaaaactggctaatggaaaatgcagaaagctatcaaaacgtgtagcattttatgctgttgactgcagggattcttgtggtgaaatttttgttgatttgcaggattataaatattcaaagaaaaaacaggatgaaactgttgagtgcgacctgaaatatccatcttttgaggatgcattatctgtaccttggagggcacttcacaggagaatgtcaaagctgtactatgctatgagaggtctggtaaacagtaaactgtagagttctgtttagtgagtaaaatacataaaatgaaaataaatgattctaatcaattggaaaataaaacttttagttgagaacatctgccttattgattgggtccctagactgtgttacctgagaagagatagagctggagaccattgcttacatcttaatgctttttgttgtgacttgtgtttgaaagaaatctgtcttcttcctttctgctttgcattttgtgatgggcctgatctatagaaaaattttctgtcagttacatgaaattatctattgcagtaatagaaaagtttgaagaggctgagggacgtagcacaggggaagtttcgattgcagatttctctggtcttctcaaactgaaaaaggagatttgtactgcacagtctctcaatgaatctcaagtgcctgattctcttctaaaaagattggtgacaaatgcaacagaatttccccctgtttgtgctattatagggggaatccttggacaggaggttatcaaagcaatttctgggaaaggagaccccctaaagaattttttcttttttgatgcttttgatgggaagggcattatagaagacatctctccgaagtgattaactaatggccgaagctttggcaatataaagtagggatgtaaccttttggcaaaacagcacagaaaactagtaaatttcgaaagatatcttaagaagaaattgacccttcacccttgttaactgctcatatagcttcctagttgtatgtaatttatctagactaatgacagtttaggcttaggatcttctcgtcatgtaatcactagacactcatcaacattccctttgatgttatgaatatgaagtgtttgtggt

SEQ ID NO: 9469 - DNA, 1121 bp, Glycine max
  Clone ID: 700848210_FLI
actccccttactcgctcgacctagaactgtgttagggttttacgaaaccaccgaagttgcagaaaaaggaagaaagaagaaaaaatggtggctgacaggagcaagaagccgaaggtctccgagaagggcgaaaacctcgatgaaatcgacggagaactcgtcctctctatcgaaaagttgcaggagatccaagacgagctcgaaaagatcaatgaggaagccagtgacaaagtgctcgaaatagagcagaagtacaatgagatacggaagcccgtctatgataagaggaatgatattatcaaggctattcccgatttctggttaactgcttttttgagccatcctgctcttggtgatcttttgaacgaggaagatcagaagatatttaagtatttgagttctcttgaggttgaagattttaaagatgtcaaatcaggctactcaatcacctttaatttcaatgccaatccctattttgaggatacaaaacttgtaaagacctataccttccttgaagaaggaacaactaaggttactgctacacccataaaatggaaagagggcaagggcatacccaatggagttaatcatgagaaaaaaaggaacaagcgtgctcctactgatgtcagcttcttcagttggtttagtgacaccgagcagaaagatgatatagatgacattcatgatgagcaggttgcagaattgatcaaggatgatttatggccaaatccacttacttatttcaacaatgaagaacctgacgaagaggaaggtgatgaggatgaagctgatgatgagggaaaggaggatgaatctggtgatgatgatgacgatcaagaggaggatgacgatgagggtgaggaggaggatgacaagtgaaaaatacattatggtcatattacttttttttttttggggttgtaggagtatttaagcgttctttaggggatgatcatggcctccctttgtggttgtcatcttatgtcagctggtggagctaccaaggccagttattggttctctctctgactatagcctatttattgtcctacgaagttatttctggtttcatcccttgtgcactttttcagatactaatgttacatcgtttcttttttcat

SEQ ID NO: 9470 - DNA, 607 bp, Glycine max
  Clone ID: 700848271_FLI
caggtgacaatgatcaaacccttgacggggcagcaatactcagagaaagtggcagaaaattgtgtggccatttggaggtctcttgggatttatacagattcagaagccgaagcaatagacaagtttctttctgttttcaaagacctaacattcccaccaggctcctctatccttttcactgtctcacccaatggatcattaacgataagtttctctggtgatgaaaccattccagaagttacgagtgctgttatagagaataaactactctcagaggctgtgttggagtcaatgataggtaagaatggcgtttcccctgcagcaaaacagagtttggcctccagattatctcacttattcaaagagcctggggtttgtgaccctcaatctcataagtgaactcattatatcatcaacccaagatcaaaatcccttaccactctgctgtgactttcagtactgtgctactaataaataaagggcaaattacagtttttctaagtgctaaacttctagcaacattattgtgttgttcttactgtccatgtctaagtactgaactgctgtatttgatttttcgttgggaattgaagcaactaattacatt

SEQ ID NO: 9471 - DNA, 685 bp, Glycine max
  Clone ID: 700848307_FLI
tcaacagtgatatgcacatatcaagagaggaagcatttggacctgttgcaccccttttgagattcaaaactgaagaggaagctatcagaattgctaatgacactaacgcaggtttgggttcatatgtatttacaaacagtatccaacgatcatggcgtgttgctgaggctcttgaatatggactagtgggtgttaatgaaggagtaatttcaactgaggtggctccatttggtggttttaaacagtctggccttggaagagaaggctccaaatatgggatggatgaatatttagagatcaagtatgtgtgcttcggaaacatgaacaaagaatgaagtacgagacagtgccaagcaaaatagggaggagtcaccttgcgtttcttagttgaagaatatgcatatagctgcacacgtgttgtatacaaataagtgctggcttgcaaagggcctcctcatttttctgtttggttctttttgctttcctttttcattctctttatttttcacagatttttagaatattaaaaaatgcactgtgaaaggtacgaggttagtaaaaaaaagaaagaaaagcaattagcctttgacccctttggtgtaacgttgtttcattgtgtttttccaaatcaatgaactcaaaaatccaaattggatcggtttgaataaaggtgttagattgtgtc

SEQ ID NO: 9472 - DNA, 1196 bp, Glycine max
  Clone ID: 700848323_FLI
cacaaggtaatgtagtcattggtgggataatggagcacattgaacaggctgggatacattctggtgactctgcctgctctattcccaccagaactgttcctgcttcttgcttggagacaatcaggtcgtggacagtaaacttggctaaacaattgaatgtttgtgggctcatgaattgtcagtatgcaataactccatcaggggatgtatttttgctagaggccaaccctcgagcttctcgtacagttccatttgtatcaaaagcaattggccatcccttggctaaatatgcttcccttgtcatgtctggaaagaccctctatgatttacagtttacaaaagaagttatccctaaatatgtgtcagtcaaggaagctgttcttcctttttcaaagttcccaggctgtgacgtgtttttaagtcctgagatgcgaagtactggtgaggtcatgggtattgacccttcttataatattgcatttgctaaggcacaaattgctgctggccagaagttaccactttctggtaccgtgttccttagtttgaatgacttaacaaagccacatcttgagaagatagcaaaggcttttgttgagaatggtttcaagattgctgctaccagtggaacagctcatgttcttaacttagctaaaattccagcggagcgagtgctgaagttgcatgaagggaggcctcatgctggtgacatgattgccaatggggacattcagctgatggtggtaaccagttcagatgatgcacttgatcggatagatggtctggccctgagaaggatggctttggattacaaggttcctatcgtgacaacagttaatggagctctggcaactgctgaagctataaacagcttgaaggccaactctatcaaaatgatcgcacttcaggacttcattgatggtgaatttaatgagtgagaaagttttttgcagacaaccactttctttctgaattggttaaggcgatacacaccacttaccgtgagattgtacaagttgctagatttgggagtggcagatgaattgctatgggatgctttcatttgtaaagtttccagatgagatatgtaaaggtcatgtagtctgtgtcctgactcctgatatatagcatttgtgtttttgtgtaaacggttttgtagtatttggatatctactgcttaataattaaactcctttttt

SEQ ID NO: 9473 - DNA, 678 bp, Glycine max
  Clone ID: 700848334_FLI
gagagatgtgagattaatgggtatgagataccagccaagagcaaagtcatagttaatgcatgggcaattgggagggatcctaactattggattgaagctgagaagtttagtcctgaaaggttcattgattgctcaattgattacaaaggtggtgagtttcagtttattccatttggagctggaaggaggatatgccctggcatcaatcttggcattgttaatgttgaattctcacttgcaaatttgcttttccatttcgattggaagatggctccagggaatagtccccaagaacttgatatgactgaatcctttggcttgtcactaaaaagaaaacaggatttgcagttgattcctatcacttaccacacagctgcataattgagtgtcattaactctttatcataaattgaaaatctcagttagttatatgatggagaaaatttgtttggacttaggaccatggacatgcaatctaggaccacataatttctccaagctaaggccataactgttgtgtgcagttcctatcaggcattggccacgtgtggccaatagctaatgtgtcatccttctttctctcttttaaaatttggcttgtatcctagagtaagtcctttaaatttattttctgtaattcacagccataactccagaaattagaacatgagtttaatt

SEQ ID NO: 9474 - DNA, 1543 bp, Glycine max
  Clone ID: 700848338_FLI
tgacacgtgtgaaggtacccgacacgtcgaaggcgcgcgtggcagcaacgattgggatgagagagtgcaaagagagatgcttgagggattgttcgtgtgtggcttacacgagtgccaacgagagctctggaagtgggtgtgttacttggcatggaaatatggaagacactaggacttacatgcaagtgggacaaagtttgttcgtgcgagtcgacaagcttgagttagctaaatatgcaaaacatccgtatggttctctaggcaagaaggggatggtagcagttttaaccgctgctattttcttgtttttgttgttggcgatcactttcgtgtattggtttgttaaaacaaggagacaaggaataagaagggatcgcaagtattcctttcgtcttaccttcgacgactcaaccgatctacaagaatttgacactacaaaaaattcagatttaccattctttgaacttagctccatagctgctgcaacagacaatttctctgatgctaacaagcttggccaaggaggttttggttctgtttataagggtctattgattaatggaatggagatagcagtgaagagactgtcaaagtactctggacaaggcatagaagagtttaaaaatgaggttgttttgatctcaaagctccaacacagaaatcttgtgaggatcctaggttgctgcattcaaggagaggagaagatgctaatctatgagtatttgtcaaacaaaagtttggactccttaatttttgatgaatcgaaaaggtcgcaactagactggaaaaaacgatttgatatcatctgtggggttgctagagggatgttatacctccatcaagattcgcgattgagaatcattcatcgagacctaaaagccagcaatgtcttgatggactcttcattgaaccccaaaattgcagattttggtatggctagaatatttggtggggaccaaattgcagcaaacacaaaccgcgttgttggaacctatggctatatgtcaccagaatatgccatggaaggacaattttctgtaaagtctgatgtatacagcttcggagttttacttctagagatcgttacaggcagaaagaatagtggtctatatgaagacattaccgccacaaatttagttggacatatatgggatctatggagagaagggaaaaccatggagattgttgatcaatcattaggagagtcatgctctgaccatgaagtccaaagatgcatccaaattggtcttttatgtgtgcaagattatgctgctgacagaccatctatgtcagcagttgttttcatgttgggtaatgactcaactcttcctgatccaaaacaaccagcatttgtttttaagaaaactaattatgagagttcaaatccttcaaccagtgaaggaatttattcagtaaatgatgtaagtataactatgattgaagctcgttgaaggccaaggcttttggatagtatatgtggaaagcctgtatgctattgtatgatgctatagtatcatgaatccaaacaataataaggtttggc

SEQ ID NO: 9475 - DNA, 1120 bp, Glycine max
  Clone ID: 700848426_FLI
attgtcgcaattaaacaacttgaccgaaatggactacaagggaatagagaattccttgttgaagtgttgatgttaagtcttcttcaccaccctaaccttgtcaacctgattggttattgtgctgatggggatcaaaggcttttagtttatgaatttatgtctttaggatccttggaagaccacttacatgatatttctcctggcaagaaagaacttgactggaacacaaggatgaaaatagctgctggggctgcaagaggattggaatatttgcatgacaaagctaatcctcctgtcatataccgagatttaaagtgctccaacattttgcttggtgaaggatatcatccaaagttatctgattttggtctggccaaacttggtccagtgggggaaaacacccatgtatcaacaagggttatgggaacctatggatattgtgctccagagtatgcaatgaccgggcaactgactctgaaatcagatgtttatagctttggtgttgttcttctggaaataattactggaaggaaagcaattgacaattcaaaagctgcaggagagcagaatcttgttgcatgggccagaccattgtttaaagatcgaagaaaattttcgcaaatggctgatccaatgctccaaggtcaatatccttcaagaggactataccaggcccttgctgttgcagcaatgtgtgttcaggagcaggccaatatgcgtccagttatagctgatgttgtcacagctttgagttaccttgctttgcaaaaatatgacccaaatacacagacagtacaaagctctcgccttgctcctggtactcctccaagatccaagaggggatattgatatggagctgaatgtttgttagctatatgatattctggtgcaaatttcaaacatcttacaacacactgcaagttatagatttgtagatcataataccagttgtcttatggtggtgatctttcttcagagcatagttgctaaaaatgttttgtaaaattttgttctacctctggtgcacagaactgctcctatttccatttggagccaagatagtatatcctcttccttttgttagtttctatttaaaagcaaattgctggattcattattc

SEQ ID NO: 9476 - DNA, 739 bp, Glycine max
  Clone ID: 700848441_FLI
gtttggtggctgttccctttcacgattctttctttagatcctctcttgactctttattctttatgaaattgtgggtttgacttaaatttctctgggtttgttgatttcgtggcagtgattaagagaatggcttcagatcggaaacttcacacttttgaggaggtggcaaagcacaaccagaccaaggattgctggctcatcatttctggcaaggtgtatgatgtcacccctttcatggaggatcatcccggaggtgatgaggttttgttatctgcaacagggaaagatgcaaccaatgactttgaagatgtggggcacagtgattctgctagagatatgatggaaaaatactacattggtgagattgatgcatcaaccgtcccactaaaacggacctacattccacctcagcaagctcagtacaatcctgataagactccagaatttgtgatcaagattttgcagttcctggtccctctcctgatcttgggcttggcctttgttgtgcgacactacaccaagaaagagtagagttgttccttctttatcacattggacaatggtgaagggtctgttagctattttatagtgtcatttaaaggacagtgtttagtttctttctggggtctgagaattgaatctggatttagaccatatagttcagtaagccaatgttttccaactttctttggcaatggtattagtgttattgtgaccggagaacctaatgttggacgat

SEQ ID NO: 9477 - DNA, 1382 bp, Glycine max
  Clone ID: 700848583_FLI
gaaagatcctttaccaatttgaaggataatactaaacaagtagtattattatcgattttattgtaccttccaaacaaaccctgcagcgatttgtttccttccatctccgccgtaccatgtcggaagcaccaccgcctccaactgccgatgcgtcaccgcctccgtactggtgctaccactgcgagaagcgcgtctccgtcgaaacgctcgcgaatctccccgacgtcgtccgcggcgagtgcaagaacggctttgtggaatccatgcccacgccgtcgcgctctcgctccccctccgcctcctccgacgacccctacttcggctcgcagttcctccaggtccttcgcctaatcgctcagtcggcgcgtgacgacgacgcgtcgcctccgccgccgccgagccgctctccggagaacgatttcctcaggatcgagctcggcggctgggacaacgacgaggagaacgaaaacgacgacgataacggcgacgaggagttcgaggaacacgaggaggcggaggatcgctccggcaacgaagatccgcacggaggagacgacgaggatctgagaagaaggaggcgcgagctacttcggcttcggattagggatttggcgactcgtacgaggagcatgcggaaccggatcttggattgggccgagattctgatgggcctcgaggacaattccatcgagttccgcctccagctgccagaatccgaccgctacgtcggaaatcccgaggattacgtcgacgcggcagagtacgaggcgctgctgcagacgctggcggagagcgacgggggaggcaggaggggagcgccgccggcgtcgaaggccgcgctggaagccttgccgacggtgaaaattgcgtcggaaagcgaagccgtggcgtgcgctatatgtaaagatttgctcggtgttggagacgcggcgaagaggttgccgtgcgggcatcggtatcatggagattgcattgttctttggttgagttctcgaaattcttgccctgtttgcaggtttgagctaccaacggatgataaggaatacgaggaagagagagtggttatcgctgcttcttcgaattcgaacggagcttcgagttccggtggaggtggaagtgccattgtttgattccgcttggtatgttccgtcatgctctgctctgctctgttctgttctgccatttgtgtaatatatttcgtggtttctgaatttctctttcttttttttttggtattagtggatttaaatcaaagcttgcgccatgttattatttattttatttgaagcttttattatgtagttggcttcttagctctcggatgatgctaagatacttgtatatagcatttgaatcaatgtgaatgtgatcatatcacactt

SEQ ID NO: 9478 - DNA, 1015 bp, Glycine max
  Clone ID: 700848828_FLI
ggcaattccactgagaaaaggctcaggctatttggctttgagctaaacccttcatcaaaagagggttgtgccaaagaatctggtgaaggagatgaaagtgtgaactcctctaactcagcttcttctggaggagacaaaactgtgcaagagaaaacatcagccaatgaccctgatgagagaaaatttgagtgccaatattgttacaaggaatttgcaaactcccaagccctaggggggcaccaaaatgctcacaagaaagagagaatgaagaagaagaggttgcagcttcaatccataaaccgttacctacaacaccctttccaaagcaaccatggctttgcttacccttctgatactccttggttctatgacccctctacctataataataactctgagttcaccctttgtgaagaacctcagattagcttcaattcaaatagcgttttggattccaatttttctaatgatcagaaaactagttggtattctcttgcatctcacccttctaatatccaacaagatacttgcatgtttactttctcatccaatgcaagtaataataataatagtcctttcatattcaagccttgccatttccctgcttcaaatcagaaccataataaaaccctagatcttcaactaggtctcaacttggagtcaaatacaagaagttctctaagaaggatgtaatttagtatatacaggatatataggttaaattaacagtttccatgtttctccttgaattattttaatgtatcaattcttaaacattgggaaaagggaatgagaaaaagagaagaaaacaaattcacaattcattagttagttggccttggtcactgcagagccaagaagagtctgacaatgatcaccattcagaattcagacaacatgtacaattcatatgatgtattaatttattatagcatgttgtagccatttgatattacataacttttttcagtacatataaggtgcttagataacaacgttctctttcatttcagtt

SEQ ID NO: 9479 - DNA, 491 bp, Glycine max
  Clone ID: 700848840_FLI
gaggttttgatgcaacgctgtcactgagaaaggatctctatctacgaaggagcggaataaaacccttctctctgtgattaagagaatggcttcagatcggaaactccacctcagcaagctcagtacaatcctgataagactccagaatttgtgatcaagattttgcagttcctggtccctctcctgatcttgggcttggcctttgttgtgcgacactacaccaagaaagagtagagttgttccttctttatcacattggacaatggtgaagggtctgttagctattttatagtgtcatttaaaggacagtgtttagtttctttctggggtctgagaattgaatctggatttagaccatatagttcagtaagccaatgttttccaactttctttggcaatggtattagtgttattgtgaccggagaacctaatgttggacgattagttttgtttggtttcgttttattctgggtctttgctgcttctttaat

SEQ ID NO: 9480 - DNA, 935 bp, Glycine max; identical to SEQ ID NO: 9272
  Clone ID: 700848963_FLI

SEQ ID NO: 9481 - DNA, 367 bp, Glycine max
  Clone ID: 700848964_FLI
ggcagatggaggttctgcaggcggagaacgggttgcttaggaacgccgtggaagatctccggcgagaaattgtcggcggccgaagcggaggctcgattttggggaaaaaccctaaaaagaacgagaggaaaacgacgtcggattacggtaattttcccgggaaatcgacggaggctgaagcgagtgaggaattgaagaaagcattaatgggagcagctggtggtagtagtgcttgaatttgaatctgtagaattgtgtttttctctgttgcaattttagtttcagttttgatgctgcgaaattttcttgtgtagtgttatatatattatgataatgatgatatataggttcattaggttggttcgtc

SEQ ID NO: 9482 - DNA, 820 bp, Glycine max
  Clone ID: 700849043_FLI
cattttctctctcatggtcatcatccacttggagtcttgatcttgtacttcattgccatcacctatgtactactatatatagcccaacaaagtcgttgatttatcagagttcacacaaggtagtttcatggttcaaaccaagaatggaactgttgcagtagcttctgcgtttgctggacataaggaagctatacagcaaagggaccacaaatttttaagaattgctgttgaagaagcctataaaggggtagactgtgaagatgggggtccctttggtgctattatagtatgtaatgatgaaatagttgctcgatgtcacaacatggttctgaggaacacagaccctactgctcatgcagaagtcactgttataagaaaggcttgtgaaaagttaaaccagatagaactttcagactgtgaaatatatgcttcttgtgaaccttgccctatgtgctttggagcaattcacctctcacgagttaagaggttggtttatggagcaaaggcagaggcagcaattgctattggattcgatgacttcatttcagatgcattgcgaggcactggattctaccagaaagcacaattggagattaaaagggctgatggcaaagcggcaaacattgctgaagaagtttttgagagaaccaaggaaaaattccgaatgtattaattgaatctccatgtttcctaagccgttaggtatttacacctgatgaaatctgagttcacataaataagctcattgctctcgtgtatcctaaatcctaatgaataaattgtatggggagaagagaatcaaagtgaaatttactttgtg

SEQ ID NO: 9483 - DNA, 1257 bp, Glycine max
  Clone ID: 700849062_FLI
cttgggtctattatgaatatggaaacatagaagagattctcaaatttgaatctaacatacccataccagacatcaaggaagaccaagtgctcatcaaggttgtggctgcggcgcttaatcctgcagattatatgagggctcttgggtttttcaaggacactgatgcacccttacctattgttccagggtttgatgctgctggtgtggtggtgagagtgggaagtaaagtgagcaaattcaaggttggagatgaagtttatggtgatatcattgagtatgcttggaataatccaaagaccattgggactttggcagaatatactgctactgaggagaaagtgttggctcacaaaccctccaatttaagctttattgaagcagctagccttcctgcagccatcatcactgcttatcaaggatttgataaaattgagttttctgctggcaaatctatacttgttctaggaggtgctggtggagttggatcccttgttattcagctcgccaagcacgtttttggcgcatctaaggttgcagccactgctagtactccgaaacaggatttgttgaggagcttaggagcagacttggctattgattatacaaaggagaattttgaagaactggtagaaaagtttgatgtagtgtatgatacagtaggagaaagtaataaggcattgaaggctgttaaagaagggggcaaagttgtgacaatagtaccaccggcgactccaccggctataaccttctctgcagtttcagatggtgcggtgttggagaaattacagccttacttagaaagtggaaaggtgaagccagtattggatcctaagggtccctttccattctctcagacagtggaagcatttgcatacttgaagactaatagagccattgggaaagtagttctacatcccatcccataaacatatttaattaagcatataaggagagagcacagccttttaattatgtaatatgaatattgttagtcaagaatgtttagatttagaaacagattgtccttataaggttgtattggtaaattttgtcatatctagttcaaatgaaggtggtgttatcgttcagcagatgaggcagcttctaaagacacaagtggatttgcaggtctcttttgtgagttggaaggctaacattgctttagctggattatgatcaatagagaatcctcaaattcacattttctattgtattaattccaactcaaactatgtttaagaaataaagtttgaagag

SEQ ID NO: 9484 - DNA, 1679 bp, Glycine max
  Clone ID: 700849068_FLI
tgcagctctatggaggatcttgagaacttggctcttggaggcatgagtgttgccaggctcaacatgtgccatgggaccagggagtggcaccgtgatgtgattaggaagatcaagaagttgaatgaggagaaagggttctgtgtttctgtaatgattgacactgagggtagtcagattcatgttgttgatcatggagctccttcctccgttaaagttgaggaaggttcaaattgggtgtttactgctgaacattatgagggttctcgtccattcactgttcaaacgaactatagaggtttttctgaaggtaccgaagtgggtgatgaacttgtaattgatggtggaatggcatgctttgaagtcacagaaaagactggtaatgatttgcattgcaaatgcatagatgctggtcttttcctgcctggagccaaatttagtttttggagagatggaaagcttgtgagggggaataacaagctccccactctatcgacaaaggattgggctgacattgactttggtatagcagagggagttgatttttttgccttatcctttgtcaatcatgctgattctgttaaggatctaaagatgtacctctctacgaagtcaactaaatccattaaagttttggcaaagatagaaagcttagaatcccttcataaactggaggaaatagtgcaagcttctgatgggatcatggtggctcggggtgaccttggtgtcgaaataccacttgaacagattcctacagtccaagaggatataatttacgtatgcagacaattaaacaagccagtgattgtagcttctcagcttcttgagtcaatggtcgagtatccaacgccaacacgtgctgaggtagcagatgtttctgaagcagttcgacagtatgctgatgctttgatgttgtctggagagtcagctattggatcatatggacgaaaagctttggcagtcttggatatggctagcagtagaatggaatcatggagtcgggaggaaaatagacaaagtcttgttagccaccatcaacttggagaatcattgccagaatgcataactgagcaaatatgcaattgtgccgttgaaatggccaacaaccttggtgtggatgccatctttgtgtacacaaagtatggacacatggcatcgcttctatcgcgcaaccgcccgaatcctcccatctttgctttcaccaacgatgacagtacccgcatggctctgactttgcaatggggtgttgtgcccattctggttgatttgtccgatgatgctgaatctaacatctcaaagtctgtgcaacttatgaaatctagagggttgatcagccaaggagatgttgttctagtggtctcagatgttgctccgacacgtgcctctcctatggctttccagtctattcaggtgaagactattatctaaaacacaaggttgcaaaaatattgaagaacacgtgtctgtgtattttctaggcttgggataggatagtattgtattattgtttttttttcttcggtattgtattattggtttcttgtccttttttttatatattggtttcttgtccttattcaaaacaacaaaagtttataaattctaaattgtagaactctagcaagttttggaacctctttcaagagatgcttatgaattacactttgtgaattgcccatcgt

SEQ ID NO: 9485 - DNA, 962 bp, Glycine max
  Clone ID: 700849139_FLI
cgacacgatacataacaccgctagctcttcaattcttctctccctcactactctctattcgttagtgttcttcaattcttcatcgcagacttagaatcatgggtttgcaaaaccaattaaacgacgtgtcgtcgggttcgattccgctgctggtcttggcgcagatagcgacctgcgtcaactacctccgctccatgcttttcgcgcttttgcaaacccttggtctgtgccgatttcactccgaccagatcgtcgacgagcgcttcctcgccgccgtcggatccggcctcgccggactcatcatgctctccgatcagctaaccctcagcagccaattcttccaccaccaccacgccggcgccggcggccacgaccaccacccctgcgtcgtgtgccaggccaccttcgaggacggcgaccaggtccgcatgctcccctgccgccacgtcttccaccgccgctgcttcgacggctggctccaccactacaagtttaactgcccactctgccgctcaccgctcttctccgacgagcgcgtggccgtcacagagcgccgcctcggccagcaactcatctcttggttctctcttcactgatgcgaagccgtttcgttttctgaactcccacttttacggttttacccctttctcgcgaccactttttacagagctggacgtgggtttctttttctgttttttcttttcctttttactttccctcctttttttaatactagggtttttttttttaattttttcctccccgtgtagggtattaggctagatttcttttcttttttttaacagtaattttgctgaaggtattttttgaagggttttctaccgtctgaaaatcctttttgagatgctgtaaattttggactctatgtgttcatggcaataatcggagatagtagatgtaaagttttcataaaagaatattcggtttaactttttcctttt

SEQ ID NO: 9486 - DNA, 1238 bp, Glycine max
  Clone ID: 700849208_FLI
gcaggtgaaaggcagggacgagtcgaaatggctgaagcagagagtgtgcagattcctcaagtcaaacttggaactcaaggccttgtggtttcaaagttagggttggggtgtatgacccttagtggacgctataatgatccacttcctgaagaggaaggcatatctgttattaagcatgctttcagccaaggaatcactttttttgacacatctgatgtctatgggctcgaccatgctaacgaatttttgctcggaaaagctttgaagcagttacctagaaaaaagatccaggtagccacgaaatttggcgttgcagtagcaaaatttcctaattttcaaatcaaagggacaccggagtatgtgcggtcgtgttgtgaagcaagcttgaaacgccttgatgttgaatacattgatctctattatcagcacaggattgaccaaacagtacctatagaggaaacagtgggtgaacttaagaaacttgtggaagagggtaaagtgaagtatatagggttatctgaagcgagtccagatacaataagaagagcacatgcagttcatcccatcactgctttacaaatagagtggtccctatggactcgtgacattgaagaggagataattcctctctgcagagagcttggcattggaattgtaccatatagccctcttggtcgaggcttttttggtggcaaaggagttctggaaaatatgcctgcaagtacagtcctgactttacatcatcctcggttccaagcagagaacataaacaagaacaagagaatatatgaacaaattgaaagccttgctaagaaataccagagcactcctccccaattggcattagcttgggtacttcaccaaggcaacgatgttgttcctattcctggaacaactaagattaagaacctggatcaaaacatcggtgcattatcactgaaatttacagaaagtgacttgagagaaatttccgaggcagttcccatacatgatgtggcagggtctcaatacttctttggaaatgataaagattcttggaaatttgccaacacacctccaaaagatccgagggtctccacttgaagcactctaaatcctttttagttggataattttctattttgtgagcggtcatatgtcagatgcaaaagctagtacgactataagctactaatgcattctgttgatgtagtagataaggatattaataaacttcaatttgagtttcttttctgttt

SEQ ID NO: 9487 - DNA, 1584 bp, Glycine max
  Clone ID: 700849240_FLI
tatattttctagatttttataataaagggtcctgcagttgcctccgggaacaagggggcttgtatcttccccaagggcttgaatctttgtccaatgaattgagatatcttcgttggacccattaccctttggaatctctgccttcaaagttttcagctgaaaatcttgttgaactgaacttgccctatagccgagtgaaaaaactttggcaagcagtgccagatcttgtgaatatgaggatccttatactccattcatccacacaactaaaggagctgcctgacctatcaaaggccacaaatcttaaagtaatggatctccgattttgtgtagggttaactagtgtacatccatcagttttctctctcaaaaagcttgagaaattgtatctaggtggttgcttttcccttagaagcctccgaagcaatatccatttggactctcttcgttatctctccctctatggctgcatgtcactgaagtatttctcagtgacctcaaagaatatggtaaggttgaatttagaactcactagtatcaaacaattgccttcatctattggacttcaaagcaagcttgaaaagctacgtctagcatacacttacattgagaacttaccaacaagtatcaagcatcttacaaagctgcgacatctagatgtaagacattgcagggagcttcgaactctaccggagcttcccccgtcacttgaaacactagatgctcgtggatgtgtatcattggagactgtaatgttcccttctactgctggagaacaactgaaggaaaataagaaaagggttgctttctggaactgcttgaaattggatgaacattctctcaaggctattgagctgaatgcacaaattaacatgatgaaatttgcacaccaacattgtccacatttggtgatgcccatcaaggtacctatgtgtacccgggaagcaaagttccagaatggttggtgcataagacaatacagcgtgattacgtgactattgatctctcttttgttcttgctccacactcctctgatcacttgggcttcatttttggcttcgttgttccggaagtccctaatgagggtttggttttggaatttaagataagcactggaggagaaggtgaaggtagcaatatcaatgtgtacttagacagaccacgtcatggtattaaatcggatcatgtgtatctaatgtatgaccaagcatgttctcgctacctaaatagtcgtgccaaacatcatccaaggttgaagattaaggttacagtagcatcgcgaacgcacacatccaagtatgtaccattgcagttaagagggtttggagtcagcacaatcaacactacacaatacctcagttttgttcgtaaagtagaattgggtgatggtattccaaatgccccaaatttgtttagatttttttggactttctgccttgctgttttttttgggacttctaggatttattttagaaggttagtagaataatgaaagaaatgttgtttttgcattaagaaataatagaatacaaagctacttgtgatgagaaggatatatattgacaggagctttttgacatggct

SEQ ID NO: 9488 - DNA, 1635 bp, Glycine max
  Clone ID: 700849245_FLI
ctcaaactcactcacatccatctaacttcaacttcctcatcctcacaactcacaatcctccttccttttcctttactttttcttacatacattcatgccaaaggaggtaagtgattgggttttaagctgttaaaatagcaaggaaggtgcaaaatggcttcagttggtgtggcaccaacatcatcaggcttgagagaatccagtggtgttgataggttgccagaggagatgaatgatatgagaattagggatgataaagaaatggaagccaccgttgtcgatggtaacggaacagagaccggacatattattgttactaccattgggggtagaaatggtcaaccgaagcagactataagctatatggcagagcggattgttggacatggatcatttggggttgtcttccaggctaaatgcttggagactggtgaaactgtggctatcaaaaaagttcttcaagacaagaggtataaaaaccgggagctgcaaacaatgcgccttcttgaccacccaaatgttgtctgtttgaagcattgtttcttttcaaccaccgaaaaggatgaactataccttaatttggtactggagtatgttcccgaaacagttaatcgtgtgatcaaacattataacaagttgaaccaacggatgcctctgatatatgtaaaactctatacataccagatctttagggcactctcttatattcatcgttgcattggagtctgccatcgggatatcaagcctcaaaatctattagttaatccacatactcaccaggtcaaaatatgcgactttggaagtgcaaaagtcttggtaaaaggcgaaccaaatatatcgtacatatgctctagatattatagagcacctgagcttatatttggagcaactgaatatactacagctattgacgtttggtcagttggttgtgtattggctgagcttatgcttggacagcccttgttccccggtgagagtggagttgatcagcttgttgagatcatcaaggttctgggaactccaacaagggaagagataaagtgcatgaatcctaactatacagaatttaaattcccacagattaaagcacatccatggcacaagatctttcacaagcgcatgcctccagaagctgttgatttagtatcaagactactacaatactcccctaacttgcggtgcacagctttagatgccttgacccatcctttctttgatgaacttcgtgacccaaacactcgcttgccaaatggtcgtttccttccaccattgttcaattttaaatctcatgaattgaagggagtcccagttgagattttgctgaaattgattccagaacatgcaaggaagcagtgcccgtttcttggcttgtgatattgtgaaaaatgtaacaaaactgcaatagtgtcgttcccatatgaatgttccgttatgtatccttcttgtatttcggtgcctagtaaaaactgatttagagatatatggttactcaatattacccaacactcgatgggtattcagaaaaaagccgtgtttcctgtttaacagaaggttgtaaacatcgaatagaagacaagtgtcatgttaaaccggtgttggtgtttgtgaatacaatgatgggtggttggctaattt

SEQ ID NO: 9489 - DNA, 833 bp, Glycine max
  Clone ID: 700849273_FLI
gggccattaacatgggaggtggttttcatcactgttctgcacaaaaagggggtggattctgtgcttacgcagatatttctctatgcatccactttgcttttgttcggttgaatatatcaagggtgatgatcattgatcttgatgcacatcaaggaaacggtcatgaaatggacttcgcttatgatagccgagtctatatcctggatatgtacaatcctggaatatatcctttggattatgaggcgagaaactacataaatcagaaagttgaagtaaagagtgggacagttactgaagagtacctgcaaaaattagatgaagcacttgaggttgctgggcataggtttaaccctgagttggttatttataatgctggaactgacatcctagaaggtgatccattaggaaggttggagatcagtcctgaaggaattgcccttagagatgagaaagttttccggtttgctcgtgaaaaaaacattcctatcgttatgctcacttcaggtggttacatgaagtccagtgctggagtcattgcagattcaatagtcaatctttcgaagaaatgcttgatagaaacgagtggagctccaaagtctacgtaaagtgcttctgtgttttactgatcatgaatggtcccttgtaagagttttccagatcctttgtgtatttgggtatagaatgtttccattttagtggaaactttgatgtacagtattttaatataaaaaagaacttagtgtagatgaaaatgtgttctacgtgagttgtaacaagtccgtaaatgctgctggtatattagtactacataatgcataaatgagttgtatatt

SEQ ID NO: 9490 - DNA, 1244 bp, Glycine max
  Clone ID: 700849333_FLI
cgagcatgaagttccctgcttcagtttcccctgggcaaaacatgcttagttcactttgtcccgaaggaagtggcagtctcttgaatttatccaggagtggtcagtccttgctgaccgaacagttaccccaacagcaatggactcaaaaatatgcacctgtgcaggtcaatgcctatggaagcactgtgtcacatccacaatattccggaaaagattctgtaatggtgctaccacattgtaactcagatgcccaaaattctactctttttggtgtcaatatcgattcatctggccttctcctccccaccaccgtccctggttacaccacctcgtccgctgacactaattcatcaacaatgccattagcggagtctggtttccagggttctctatatggttgcatgcaagattcatcggagttgttgcaaagtgcagggcatactgacccagaaaaccagactcaaacctttgtcaaggtttacaaatcagggtcagttggacgctcacttgacatatcccggttcagcagctatcatgaactgcgtgaggagttggctcagatgtttggaattgaggggaagttagaagaccctcttagatcaggctggcagcttgtgttcgtcgacagggagaacgatgttcttctccttggagatgatccgtgggaatcatttgtcaataatgtttggtatatcaaaatactttcacctgaagacattcagaaaatgggggatcaagcggtagaatcccttgctctaggttcaggacaaaggctaaacggcactggtgctgagtctcaggacattgtttctggaccaccatcaatcggctcacttgagtactgagaaaactgaaacatgtattccttcagaccaccatggtcaagagaatttctctacatgttttattacttaagttggaatatgttgtgtatgatctgttccccctttcagccctccttattattactatcagcattgaagaaaagtatacatttatgattaaaaaaaaacccttaggacatgcttctgtgccaatttgaacttggagcactgcaagctagagttagtgttaatgctattttagcataatatttgatcaaacttttgcatgaactaatgtactctagataggaaactagagaaggctgtttatgcttgagctgtctttgtattctacaatgccattagttcccagttaaggggtcgaacttttaactcaaaatgtatgagtagtattttact

SEQ ID NO: 9491 - DNA, 1314 bp, Glycine max
  Clone ID: 700849359_FLI
ctttggcaacatttatgatccctacctttgctcagctcactcctaattattatgacaaagtttgccctaaggcgttgccaatcataaagtcaattgttaagcaggcaattattcgtgaaaaacgcattggagcatccttgctgcgtttgcattttcatgactgctttgttaatggctgtgatggatcagtgctgctagatgacacaccttccttcttgggggagaagactgcacttccaaatcttaattcaattagaggatttgaggtggttgatgaaatcaaagtagcagttgacaaagcttgcaatcgtcctgtagtatcatgtgcagatatcttagctgttgcagctcgtgactctgtagctatattggggggtgcacaatattggtaccaagtgttactaggcagaagagatgcaatatatgcaagcaaggatgcggcaaatgccaatctccctcccccattcttcaacttcccacagcttcttgctagtttccaatctcatggccttgacctcaaggatctagtggtcctctctggtggccacacaattggactagcaaagtgcattaccttcagggacaggatcttcaatgacacccacatagaccccaacttcgcagccactttgcgcgattcatgccctcgaagaagcggtgatggagacactaacctaacaccattggatgcctcctctccttcacaatttgacaacacatactacaaggctttgttgcacaaaaagggtctcctccattctgatcaagagctattcaagggtggtgatgatggtggtgaaagtgatagattggtgcagctatacagctatgacccttatgcttttgctagagattttggtgtctccatgattaagatgggtaacttgaagcctcttactgggtatgagggagagatcaggtacaattgcagaaaagtcaactactagcactgcatatcataaggattatgattgaacaactgtttaatatatataaagtcatgtgtcaatttggcaatttttataatctctatacattatcttaaaatactttttattgattgtggcaataacactctctggttcaaccctactcaaacaggattgtctccgatgaataataatgtggtctaaataaaaacaaaataatgaaccgtggagtgtaagaagtctgtaaacgcgagatgcgttgctattactattattattttcatttgtttcgttgtgagaccaattggctcttgccttggaagtctttatatcaaaatgtatatgtaattcggttgtaatcacaatcaaaaagtgttattggttt

SEQ ID NO: 9492 - DNA, 2049 bp, Glycine max
  Clone ID: 700849362_FLI
actttatagtaataatataactggtaaaatcccagatgagcttggaagtttgagaaacttggtgagcttggatctttactcgaacaacattactggccccatttcagacaacttggccaaccttaaaaaactacgtttcctgcgtctgaacaataacagcttgtcaggaaagatccctgttcgtttgaccactgttgattcacttcaagttcttgatttatcgaacaacaacttaactggagacatcccaatcaatggttctttttcaagttttactcccatcagttttaggaatatccttcattgaataatacccttgtacctccaccggctgtcacaccgccacaaagttcttcaggtaatggtaaccgtgctattgtaatcattgctggaggagttgctgtgggtgctgcactgttgtttgcagctccagtaattgtacttgtttattggaaaagaaggaagccaagggactttttctttgatgttgcagctgaggaggatcctgaagttcaccttggtcagcttaaaaggttttcactgcgtgaactgcaagttgcaacagatacctttaataacaaaaacattcttggtaaaggtggatttggcaaggtttataaaggacgcttaacaaatggtgatcttgtagcagtaaaaagacttaaagaggaacgaactcagggtggggagatgcaatttcaaactgaagtggaaatgatcagcatggctgtccatcgaaatttgcttcgcctgcgtggtttctgtatgacacctactgaacgcttgcttgtgtatcctttcatgtctaatggaagtgtagcttcatgtttacgagatcgtccggaatcacaaccaccacttgaatggccaaaacggaagaatattgctctaggagctgctagggggcttgcttatttgcacgatcattgtgacccaaagattattcatcgtgatgtcaaagctgctaacatattgttagatgatgactttgaagcagttgtaggagattttggtttagcaaaacttatggattataaggatactcatgttactaccgcagtacgcggtacaattggccatatagcaccagagtacctctcaactggaaagtcttcagagaaaactgatgtttttggatatggtgtgatgcttcttgaactaataactggacagagggcttttgatttagcacgactcgccaatgatgatgatgtcatgttgcttgactgggtgaaagcacttctgaaagacaagaggttggagacactggtggatacagatttagagggaaaatatgaggaggcggaagtagaggagttaatccaagtggccttgctatgcacacaaagctcccctatggaaagaccaaagatgtctgaggtggtgagaatgctagatggtgaaggtttggcagaaaaatgggataaatggtggcagaaagaggatatgatccaaccaaacttcgacccctccaatctccacaatggttattggcggccattattagactcaacttcaaatattgcaccagatgaactgtcaggtcctagatgatctttgaacaatgaaacgtttagcaaagtaagagacgctttgtagaaacaaatatgtttccttcaaagctccaaaatgttggtttattaatgcaccgtataattagtatgccattattagactcaacttcaaatattgcaccagatgaactgtcaagtcctagatgatctttgaacaatgaaacgtttagcaaagtaagagacgctttgtagaaacaaatatgtttccctcaaagctccaaaatgttggtttattaatgcaccgtataattagtatgccatgcagtggtgataacagcttgtgtctaaatattccttagtctttgatcactgttacttcactgcatgttcaatgagtgttactacaacactttgaatacattctccatgaaccacgtagataccaggttatattggtgccatattttttacgtgtaaactgacactgatcattgcagaatatatatagtgatttatgaaacaaccagttaaaagg

SEQ ID NO: 9493 - DNA, 1351 bp, Glycine max
  Clone ID: 700849389_FLI
gttctcttctgttcattgaatctgtccctttgataggatgctttttttttaggattacaccggtgataatgtgacgacggagaacctctttgctgttattcttggagacaagagtaaattgaagggaggaagtggcaaagtgatcaacagcaaacccgaggacagaatatttatatactactctgatcatggaggtcctggaatacttgggatgccaaacatgccatacctttatgccatggattttattgatgtcttgaagaagaaacatgcatctggaagttacaaggagatggttatatacgtggaagcttgtgaaagtgggagcgtgtttgagggtataatgcctaaggatctgaatatttatgtcacaactgcatcaaatgcacaagagaatagttggggaacttattgtcctggaatggatccttctccacctccagagtacatcacttgcctaggggatttgtacagcgttgcttggatggaagatagtgaggctcacaatctaaaaagggaatccgtgaaacaacaatacaaatcggtaaagcaacggacttcaaatttcaacaactatgcgatgggttctcatgtgatgcaatatggtgataccaacatcacagctgaaaagctttatttataccaaggttttgatcctgccactgtgaacttccctccacaaaacggcaggctagaaactaaaatggaagttgttaaccaaagagatgcagaacttttgttcatgtggcaaatgtatcagagatcaaaccatcagtcagaaaataagacagacatcctcaaacaaattgcggagacagtgaagcataggaaacacatagatggtagcgtggaattgattggagttttactgtatggaccaggaaaaggttcttctgttctacaatccgtgagggctcctggttcgtcccttgttgatgactggacatgcctaaaatcaatggttcgggtgtttgaaactcactgtgggacactgactcagtatggcatgaaacacatgcgagcattcgccaacatttgcaacagtggcgtttctgaggcctccatggaagaggcttgtttggcagcctgtgaaggctacaatgctgggctattgcatccatcaaacagaggctacagtgcttgattttgggttttgtacacaaaagctttaaagcccggttgatgatgtaatatttctctattgcattctgcctactggtttctgctgcttgtgtcaaattttctctaaactagagtagcccaatagcatacgtgttatgtgcattggtcatgtatacaagtgtaatactaaaaccttctacataatataagattagttagtttacttgtc

SEQ ID NO: 9494 - DNA, 1139 bp, Glycine max
  Clone ID: 700849403_FLI
gtgggtgtttccgagaagaggaagacaattgaaattgaaattgaaagtggatgacattgccagtagcagccaccgttctttaagaaaaagtgatttttttttttttcattacaattacaaggctgaatttgtgattccaatttccacatattattagatctctccatggagtgggagatgaggcccggcggcatgttcgttcagagacgcgaggcagcggcggataacggcggcggcggcaacggcaacatgacgacgacggtgttgatcactgtcgtccacgcttcctcccactacgacctccacctccctaccaactccactttctgggatgttaagagtctgcttgtacatagaactggtttacagcctgaagagcaacaactcttctttggaggaaaagaaaaggacaatgaagataatttgcatgaggaaggtgtgagggacaagtcaaagcttttgcttttggaggatgcttctagtgaagagaggaaacgcgaggaaattagaaaacacaatgaaatgttaaaggcttctgaagctgttgctgaagtcagagcagaggtggataagctcgctgagagggtatctgtcttggaagtggctgtggatggagggaccagggtttctgacaaagagtttttgatgtccacagagttgcttatgaggcaattgctgaaactggatagtattgaggctgaaggtgaagtaaagctgcagagaaaagctgaggtgcgtcgagtgcagaactttgtagatacactagattctctgaaggcaaagaactccaatccttttacccccattggtaaagctgtctctgtagcaacccaatgggagacctttgactctggaatgggaagcttgaatgcccctacctcaatgtcatcttctagaaatgtaagtcaagattgggagcggcttgattagctaagaaatttctatgtaacataaaacgacaaagcatatagaacaccatatttttagaccttgattcctcaatcaaggttgaattttttgtagtttgctgaagacaaaatatctgtaaaccatttgactgccttagggggcatactttgaagttagaatttggaatgaagaagaaaatggaggagcataatctggttattcctttacat

SEQ ID NO: 9495 - DNA, 1005 bp, Glycine max
  Clone ID: 700849456_FLI
gatcaggatttggtcctcgcacaattataatttgtgatcagtgtgaaaaggaatatcatgtgggctgcttgagggatcataagatggcatatttaaaggagttgccagaaggggattggttttgttgcaatgattgcacaagaatacattctactttggagaatctcctgattagggtggctgagagacttcctgaatctcttttggatgttataaagaagaagcaagtgggaagatgtttagaaccccttaatgaaattgatgtacgatggaaacttcttaatggaaaaattgcatctcctgaaactaggccattgcttttggaggcagtgtccatgtttcatgaatgctttgatcctatagttgatccagctgccggacgtgaccttattcctgccatggtttatggaaggaatttgcagactcaggattttggaggaatgtattgtgcattattgattgtcaattcatctgtggtatccgcgggcatggttcgaattttcggtagagatattgccgaacttcctttagttgcaacaagatataagaaccgtggaaagggctacttccaaacacttttcgcgtgcattgagaggctgctggcttttttgaatgtgaaaaatcttgtgctaccagctgctgaagaagcagcatctatatggacagaaaaattcgggtttagcaagatgaaacccaaccagcttaccaactacagaatgaactgccatcaaatcatggcattcaaagggacaaatatgcttcataaaacggtgcctcaatgtcgggtcatcaatactcaattgtgagaaatttgtatacaaaaaagtgaatcgtgaaaggggaaaaccctagctttcttgtcgccatctttttttcattcaacctagtctgtacatgtatcgactttaggttatttgtagccaatcctgagccgcctatacttgatatttgtttgacgtttataatgtcattttcctattttaagttttggttagtcttgagcat

SEQ ID NO: 9496 - DNA, 1502 bp, Glycine max
  Clone ID: 700849459_FLI
ctctctcctccatggacccaacttcgatccctccccctccggccaccaccgtccccttcactgtcgaacccagcaatcacgtgacccccgccgacaacaccaacaccaaccaccctccttacgatgagatgatatacacagcaatcggggctctgaaggagaaagatggttcgagcaagcgagccataggaaagtacatggaacaagtgtacaaggaccttccacccacccactctgctttgttgactcaccatctcaaccgattgaaatccgctggtcttctcatcctcgtcaaaaaatcctacaagctccccggatctgatcctcttcccgtgctccaggcccaaaagccccgcggtcgccccccaaagctcaaatcccagcccaacactgagctcacatggcctgcgctagccctcaacgacaaccctgctcttcaatccgcaaaaagaggcccgggtcgtcccaaaaagattgcaggacccgtaggtgtgagcccgggcccgatggtgccgggcagaaggggtcgtccacctgggaccgggagatctaagctgcccaagaggcctggccgtcctcccaagcccaaatccgtgttggcgatctccagtgggctcaaacgacgtccgggccgcccacccaaagccgaatccaacgtaaacgtcatccccttcgcagcccctgttgctcccggcctgcccacagtgcagcccatcgttcctactgcttccgtgcccaatggatctcccaggcccagaggaaggcccaaaaagattgttgccggtgcgggggctccggcgctctcttccgttggtggtgcaccacgtggccgcggacggccccgtggggtcttgccgttggtgaggccgggccgccctcagaagctcgccgttggaaggcccaagaatcctgcaagaaggcccgtgggccgccccaagggatcgacagctgctgcaatcacagcacataaggctgctaatgatgatctaagaaggaagcttgaacacttccaatcaaaagtgaaggagtctcttggcacgcttaagccttattttaaccatgaaagtccagtcactgcaattgcggcaattcaagagttggaagtactgtcaactttggaccttaaagcaccattgagggatgagacccatcaacagccacagccacagccacaggtgtatgaacagcaatatccccagccacagccactgctgcagcaattttttcaaccacatacatcagccccaagctaggcctgaacttgatgaaggacaacttgtacaagtgtttttaacaagacacaagagataaaagatctgtaaagcggttaggaagtagtggtactgatttttctgagggtgaagtgactctgtctattttagtttgttgttgtgcaacatttagtttgacccctgaagtaattagcgggtactgttgattctgttgttatttatttgacttttacagtttactttagtcacattaatgtgtatgtttggttc

SEQ ID NO: 9497 - DNA, 1752 bp, Glycine max
  Clone ID: 700849474_FLI
ctataataaggttttgagttctgttagacaaaacaaaagtggagtgatagagtgagagatgcaaagaggatggtccttctacaaggattttctgccagttgtggtgattataggcaatgaattcaatgacatgggtacactcacactcttcaaagcagccacactgcaagggatgaacaaccatgtctttctggcctatgcttatgctcttgctaccattatactcattcctatcacttttttcagcagaaggttaagaattctttattgcaaatcataatcaaacatatatatcttgcatgattttatcaattatcatgcatgttttgtttttcatgtctctttgcagatcaagagtggttcctgttcctccacttagtttctccatagtatccaaaatagttcttcttggggtgataggaagttcatctcaggtactgggttatgcaggcattagctacagttctccagcacttgcttcatcaattggcaatctggtacctgctttcaccttcatccttgccgtaatttgcaggatggaaaagttagctgccaaaagtagaagtagtcaagctaaggtgattggaagcataatatcaatagcaggtgcatttgtattgactttctacaaaggaccatcaatcatcaatgctctcacacatcttcccttactacttcaacagccaattaactttcttaaatcagaggatgaaagttgggctattgctggcattctgctgatagctgactactttctggcttcagtatggtacattgtacaggtggatatcttgaaagtgttcccggatgaactaactacagttttcttttacaatgtgactgccaccatattatctactactgttggtttctttgcagttccaaatgctagtgcttggaaaataggactagatatttcactgatatccattgtttgctctggaatatttgggaagttaatgagcaatgtagtttatgcctgggcactgtatttaaaggggcctgtctatgtaacatccttcaagccactccaaattgttattgctgttgcaatgggtgttatgttccttgatgatagtctttacattggaagtgtagttggagccacaatagtatcaattggtctttatgctgtattgtggggcaaggcaaaagaagagatagaggaagatgttggtagccaagaatcaccaactattgagaatgttcctctattgcaaagccacagaactgaaacatcagaaaagaatgtttaaaagacaagtacaaactcttccacattcttatcatcataaaaaaacataaagaatccattttctaggcatacaacagcatagtacacatacatgactgagggtcaaagctttggattcattgtcccccaagatgatcctgtgctgcttatacctaagttgttgacttgttttcctctaaaataaagcgaatggaagattttcagtatatatgacattggatgggattgcattcagttaaagttctttcttgtctcctttcaccaatgagcaaactaagggtggttatacatagcatgctgttacttgtgatatatacgtactgtacacttgccttagaatggaaccgatactgttctttccacaaacggggagcaacctttcttcaagtgttttatggaaaaaatgacatctttctgtctagctagtagcctgtcagactcaatatgacgatgtatggatacgtatataatatgaatgtaggttaattgttgagaat

SEQ ID NO: 9498 - DNA, 738 bp, Glycine max
  Clone ID: 700849579_FLI
cttgcactccacaaacttattggagcagacaagaacttaagtctgtagccatggcaatagtaatcaaagtggcggctctctctggttcccttagaaaagcttcataccactcaggccttatccgagctgcaattgaactgagcaaaggggaaattgaaggaattgaaattgagttcattgaaatttcggagcttcccatgttgaacactgatcttgagatcaatgggacctacccaccaatagttgaagcttttcgtcaaaagattcttcaagctgatagtattctctttgcttctcctgaatataattactctgtcacagctctactaaagaatgcaattgattgggcctctaggcccccaaatgtttgggctggcaaagctgcttcaattgtaagtgccggtggggactttggtgggggaaggtcacactatcatcttcgccaaattggagtgtacattgatcttcgtttcatcaataaaccagaattcttccttcttgcattcaaaccaccaccaaaattcaatgatgatggtgacttaattgatgaagaggccaaggataagttgaagcaagttcttctgtccttgcgtgcatttactctaagacttcaaggcaaaaactaagcttgaagttactttaattccacgaattattgttgaaataagctgaggatttagaaataaaccaatgttattctgaacgtgaatgatgccactatgtataaggatggttttt

SEQ ID NO: 9499 - DNA, 2112 bp, Glycine max
  Clone ID: 700849602_FLI
agaaggtgaaccagaaggaaatttggatcatcctgccccccaagatccacctatttggtctgagataatgcgcttctttaccaaccctcgcaagcctatgatacttgctctcgctagaccagaccctaaaaagaacatcacaactttggtaaaagcatttggagaatgccgtcctcttcaagagcttgccaaccttacattaattatgggtaaccgagatggaattgatgagatgtcaagcacaaatgcttctgttcttctctcggtacttaagttgattgacaagtatgatctgtatgggcaagtggcatatcctaaacatcacaaacaatatgatgttcctgacatatatcgcctagcagcaaagacaaagggtgttttcattaatccagctttcattgagccatttggtcttaccttaattgaggcagctgctcatggtttgccaattgttgctactaaaaatggaggtcctgttgatattcatagggtacttgacaatggtctgctcgtagatccccatgatcagcagtctattgctgatgctcttttgaagcttgttagcaacaaacaactttgggcaaaatgtagacagaatgggttaaagaatattcatttattttcatggcccgagcactgtaagacttacctttctaaaatagccacttgcaagccaaggcatccacaatggcagcgaagtgaggatggaggtgaaagttcagaatcagattcaccaggtgattccttgagagatttacaggacttgtctctaaatctgaagttttcattagatggagagaagagtgagggtagtggaaatgacaattctttgaattctgatggaaatgctgctgatagaggggcaaaattagagaatgctgttttgtcatggtcaaagggcatctctaaggacacacgcaggggtggggctacagaaaaatccgatcagaatccaaatgctggtaaatttcctccattaaggagaagaaaacatctgtttgtcattgctgtggattgtgataccacttcaagccttcttgaaactattaaagccatctttgagtctgctggaaaggatagggcagagagcactgtaggtttcatattgtcaacatcattaacaatatcagagatacagtcatttctaatctcaggtggcttgagtcccattgattttgatgcttatatttgcaatagtggcagtgatctatactatccatccctcaatcccggagatcgcccatttgtggttgacttgtattaccactcacacattgaataccgttggggtggagaagggttgaggaagactttagtgcgatgggctgattcaatcactgataagaagggtgataatgacgaacaaattgtgagtcctgctgaacagctttctactgactactgttatgctttcaaagtgcgaaagccaggaatggctccccctgtgaaggagcttcgcaagttattacggatccaagctctgcgttgccatccgatatattgtcaaaatgggacaagactgaatgtcattccagtgctggcatctcgttcccaagccctcagatacctatatgttcgatggggttttgaactgtcaaagatggtggtgttcgttggagaatgcggtgacacagattacgaaggacttcttggtggcctacacaaaagtgtcatactgaagggagtgggaagcagtgcaatcagtcaactccataataacagaagctaccctctttcagatgtcacgccattggacagccccaacatcgtcgaggcaactgaggggagtagcggtgctgatatccaggctttgatcgaaaaagtgggatatctcaatggatgaaaaaatttgaaagtcatttctagttatatgcctcttagtgtgtgtctgctatgaaacctacttctgagcaagcagatatctgaattttatccacaatgttcataaagcttttttcctcctctcttctctgtaacttctatatcattctcttcctcacaaacttccccatgaaacatatttcctcttgtttctccacttatctccttgttggttctgtatctacatattacatttttaatgaaggccacttctcatttctcgtgcctcac

SEQ ID NO: 9500 - DNA, 2643 bp, Glycine max
  Clone ID: 700849627_FLI
gtccttccttcgtcaacacccctttttgctgatggcgcaaattctgctccatgggactcttcatgccactatctatgaagtcgataagctcaaaattggtggaggcaactttttaaccaagatcgtacaaaacatcgaggagactgttggtattggaaaaggtgtcactaaactatatgcaaccattgatctagagaaggcacgagtggggaggaccagaattattgaaaaagagattaaaaatccaagatggtacgagtcctttcatatttattgtgcccatatggcatcaaacatcatatttacagtgaaagatgataatcctattggggcaaccttaattggaagagcatatgtgcctgttcaggagatcttgcatggtgaagaaatagatagatgggttgaaatattggatgagcataaaaatccaatacatggacattccaagatccatgtgaagttgcaatattttgatgtttcaaaagaccgcaactgggctctaggcattagaagtccaaaatttcctggagttccttatactttcttttcacaaagaagaggatgtaaggtttctctctaccaagatgctcatgtacctgacaattttgtccctaaaatacaacttagtgggggccagacttaccaagctcatagatgttgggaggatgtttttgatgcaatcactaaagcacaacacttaatatacattactggttggtctgtctatactgagattagtttggtaagggattctaggaggccaaagcctggaggagatgaaacacttggtgagcttctcaagaaaaaagcaagagaaggtgtaagggttttaatgcttgtttgggatgatagaacttcggttcctttgttaaaaaaagatgggttaatggccactcatgatcaagaaacagaggagtatttccggggcactgaagtgcattgtgttttatgccctcgcaatcctgatgatggtggaagctttgttcaggatttagaaatttccaccatgtttactcatcaccagaaaattgtagtcgtggatggtgaattgccgagtggagattctaataagagaagaattgtgagttttgtggggggtattgatctctgtgatggaagatatgacactcaattccattcacttttcagaaccctggacacagcacatcatgatgactttcatcagcctaactttggtggttcttcaataaaaaaaggtggtccaagggaaccttggcacgacatccattctcgacttgaaggccctattgcttgggatgttttgttcaactttgagcagagatggaggaagcagggaggaaaggacttacttgttccactgagagaccttgaagatgtcattattcccccatccccggtaacttacattgatgatcatgagacatggaatgttcaattatttagatccattgatggtggagctgcttttgggttcccagagactcctgaagatgctgccagagtggggcttgtcagtgggaaggataatataatagatcgtagtattcaagatgcttatgttaatgccattcgacgtgcgaaaaatttcatctatattgagaatcagtatttccttggaagcagttatgattggagtgctgatggcattaagcctgaagccatcgatgctttgcatattatcccgaaggagctttcacttaagattgttagtaagattgaagctggggaaaggttcagtgtgtatgttgtggttccaatgtggccagagggtgtcccagaaagtgcatcagttcaggcaatattggattggcagaggagaacaatggatatgatgtacaaggatgttgttcaggcgctccgggccaagggaatagtggaaaatcctcgtaactatttgacattcttctgccttggtaatagggaggtgaagaaacaaggagagtacgagcctccagaaagaccagatcctgatacagattatatcagagctcaggaggcccggcgcttcatgatttatgttcatgccaagatgatgatagttgatgatgaatacataatcgttggatctgccaacataaaccagagatcaatggatggtgccagagattctgagattgccatgggtgcttatcaaccatttcatttggctgccaggcagcctgccaggggacagatccatggtttccgcatgtcgttgtggtatgagcaccttggcttgcttcatgactctttcctccaccctgaaaatgaagaatgtattaagaaggtgaaccaaattgctgacaagtattgggatatctattcaagtgagtcacttgagcatgaccttcctggtcacctgctccgatatcctattggggtttccaacgaaggagttgtcactgagcttccaggatttgaattcttccctgacaccaaggctcgtgttcttggcgacaaagttgattaccttccaccgatccttactacttaagtttcattttataagcttgttaataaaatatagtacttatgttgttagagtgagcaacaattgtaatggttctgtagagatggtttcattctgaagattgccttccagattttaacaatctgatgatgagaaggcaatcagcttgtatgactctatctgcattatgatacatgtttatcgggtttctt

SEQ ID NO: 9501 - DNA, 1216 bp, Glycine max
  Clone ID: 700851332_FLI
gggagaaggtacgtggatgcgtttggagggattgctacggtgtgctgcgggcactgtcaccctgatgtggtcgaagccatagtcaaccaaaccaaaaagttgcagcactccacagttctctaccttaacaacgccatcgccgatttcgctcaagctttgacttccaagcttcccggtaatctcaaggtggtgtttttcacaaactctggaacagaagcaaacgaattggcgatactgattgcaaggttatacacagggtgtcatgacataatatctctaaggaatgcttatcatggtaatgcagctgggacaatgggagctacagctcaaagcatctggaaatttaatgtagtacagagtggtgttcatcatgcagtaaatccagacccttatagaggcattttcggttctgatggagagaagtatgcaagagatgtacaagatatcattaacttcggaacttctggaaatgttgcagccttcatttctgaagccatacagggagtggggggtatcattgaattggctcctggttacttgccagctgtgtacaataccattaaaaaaacaggaggacttttcattgctgatgaggttcaggctggctttggtcgcactggtagccatttctggggatttgaggcccacaatgttgttcctgacatagtgacaatggctaagggcattggaaatggcattccccttggtgctgttgtaactactcctgagatcgcagaggtcttaacccgccggagctactttaacacatttggtggcaaccctgtttgtactgctgcagggttggctgttttaaaagtaatagagaaagagcagcttcaacaaaacgcgtttgtggttggatcctatttgaaagaaaggctcactgccctcaaggacaaatatgaattaattggtgatgtgaggggaagaggcctaatgctaggagttgaacttgtcactgatcgtgaacttaaaactccagcaaaaggtgaaacgctgcatgtaatggaccaaatgaaagaattaggagtacttattggtaagggtggttactatggaaatgtcttcagaattacacccccgttgtgtttcaccaaagaagatgcagactttgtagcagacgcaatggacttgaccttgtctagaatgtgaagctgagccaagatcctagctttaataaaagtctattatatcataaatgaaactgtattatctc

SEQ ID NO: 9502 - DNA, 1137 bp, Glycine max
  Clone ID: 700852843_FLI
tgttcgtgctttattcacacttgcagccaaggtctccccaactataatattcctggacgaggttgatagcatgcttgggcaacggaccagagttggggagcatgaagcaatgaggaaaataaagaatgaatttatgacccattgggatggacttttgacaaagcaaggggagcggatccttgttctcgctgcaaccaataggccatttgacttggatgaagctattattaggcgatttgaaagaagaattatggtagaactaccatctgtggagaacagggaaaagattttgaggactcttttggcaaaagaaaaggtggacaacgaacttgattttaaggaacttgcaactatgacagaaggatatactggaagtgatctaaagaacttgtgcacaactgctgcttatcggcctgttagagagctaattcagcaagagaggctaaagagtctagataaaaagcagaaagctgccaagggacagaataaagatgtccaagaaagtcaaggaggacaatccatattaggaaatactcaagatgctatagatggagaagaggaagttaaacaggaaagagttattacccttgggccattgaatatgcaggatttcaaagaggccaaaaatcaggttgctgcaagctttgcagctgaaggggctggaatgagtgagatgaaacagtggaacgatttgtacggagaaggtggttcaaggaagcagcagcagttgtcttacttcctgtgattttacggaggatgcaaagtacattttcaatgaaactgtaggaacattttcgcggctgcacgatttttcaatgatagtgaggaaaattttccactgaacaggcacctatcaagcaatatctctatattttccgagaatatcttgatgtttcttcattcattccctttagcttaggaactaagctatatacctatggtattttgcccaatatgctacgaatatgactagctataaactaaggtatgctgtccgataatatggtgttttggcagttttgcctacactgaaagcagaaagtggggttatttattagcactatttacgttgtattggtgtttatttgacatgtaatgtatacagtatactagaaataagatgtgatttaatgagac

SEQ ID NO: 9503 - DNA, 717 bp, Glycine max
  Clone ID: 700853784_FLI
actatttggatgctcactttaatgagctacatgggcttccaattgcaattgggagactgactaatcttgaagttctcaacctgagcagcaacttcagtgacctcaaagaacttcctgagacatttggtgatttggctaacctcagggaattggatctcagcaataatcagattcatgctcttccagacacatttggtcgccttgataatttaatcaagctcaacttggagcaaaatcctcttgaattgccaccaatggagattgtaaatcaagggcttgaagccataaagacttttatggccaagaggtggcttgatatattgttggaggaagaaaggaaaagcaaccaagaaatgcaagaaccagaacagggtggttggttaacacgaagcaccttctggttgaagaatgtttctggaaatgtaatcgggtatattggaactaccgttggatctcccatgtcacccaaatctcccagagatgcatatcttgatcagcagctatgaggtgaaggtccaacacattgggactgtcatacttgtaatttagaggaataatgtagatactatgtgctgctaagcaacaattctctgccactctctcttttggttctctgccccacccgaaatagcgtgggttgctttgcttacagatatttttgttttgcttaggttatatctggatgagaaatgccagtaaaatacactttcttccccc

SEQ ID NO: 9504 - DNA, 965 bp, Glycine max
  Clone ID: 700853788_FLI
gaaagaacttccttataaccaaaaccaacaacaactatggcaagttatcagaagcactacgatgatcagggtcgcaaggtcgacgagtatggcaatgttgagaggcaaactgacgaatatggcaacccggttcatgccactagtgtcacttatgtagccactaaaagtgttggtggctacaatgatgacactaataagcaacatgataccaccggtgtctatcctgagaaagataccggtaggcatcattttggtcgtggttacgatggtgacactaataagcaacaacatgatgctattggtgtttatcccggaatagacattggtagagatcatgagactaccggtgtttatggcctaaacaccgatagacatcatggaacgactggtgtcaatcccggaatagacacccataaccaacaacatgggactaccggtggttatgctggtgacactggaaggcagcatgggaatacaggtggcctttactatggaaccgacaccgcggacacaggaaccggtcctagaagtggaaacaccggtggcaccggttatggaggcactggtggtactgattatggaacagctggtggcactggttatggaagtggaactggctatggaatcaacactgggggtgcgcacactgaagcagggtatgggaaggagcatcgtcagcatgagcaatctcatggtggtcagcacgagaagaaagggatactggacaagattaaggagaagcttcctggaggacacagtgacaagtagatgcatcgtgcatgcatgcatatagtatatatataatattgttgtctttgaataaatttgctgcatatgtacttggaggatatagcatatggttatagtatattatatagaggaataaaaaatgtatgcctgtaatgtaagggttctcatatacatggctgaaatataaagcataataaaggcattgatgttgtgcc

SEQ ID NO: 9505 - DNA, 1148 bp, Glycine max
  Clone ID: 700853826_FLI
gatggctcttagcagcctttttgtcctaatgacccagtatggattggaatacccaaatttctatgaaaaactatatgccctcttagttccatctatcttcatggcaaaacatcgagcaaggtttttccagcttcttgattcttgcctcaagtcacctcttcttccggcttacctggctgcttcctttgcgaagaaattgagtaggttgttgctttcagttcctccttcaggggcattagttattacggctctgatacacaatattttgcgtagacatccttcgatcaactgtttggtgcaccgggaagatggtgttgatgaagggaaaggggatcatagaacagatgaaggaatggctactaactcggataatgcgaagactgttgccatgcccagccagaaatcaggcattgaccattttaacagtagtgaaactgatcctaagaagtcaggtgctatgaggagttctctttgggaaattgatactattcttcaccactactgtcctcctgcctcacggtttgctttgtctcttgggaatgatttgacagtcagggcaaaaacaactgaagttaatgttggtgattttagtgctggttcatatgcaacaatccttggagcagagatatcacggagggtaaagcaggttcccctagcattcttcaaagcaactccttcctctttattttcagagactgattttgctggttggactttcaaatgtgaagaaacccccaaaatgatcaatgacaacaatgacagcactaaggatttatcgtaacatgaatggtgttctgtgaaatgacacaacagagtgctcgccatcttggaaatatgtctgcttgttcttgtttgatttgtttatttttactcgaggaaacaaatcatataggaagagggttttgggttggggggagcgccaggggacatgctcgagatcccttgtggctcactattggaacataagcttaaattaaattgaagttttaaattaatggtttggatagaagtatggtacttgatagaacattatggcggaagttgatccatgtaaccgaccccacctagtgggataatgcgttgttgttgttgttgttgtatatgtaacagttagaagataagttttgccactttctttttactgcagc

SEQ ID NO: 9506 - DNA, 768 bp, Glycine max
  Clone ID: 700853905_FLI
atctagaactaggaatataagaactaagatggattggatcggagcgtaccgcggaggccagagaagcagggactggtgcgacccttcatcaccattcactgatttgtgggaccctcgtcgtgtcggtgacgctgatgatatcacctcctctctcgcccatgctcacgttgactggcgtgagactgataaagctcatatcttccgtgctgatcttccaggggtgaagaaagaggatctgaaggtgcaggtggaggagaataagatcctgcagataagcggggagagggtgaaggagaaggaggaccagaacgacaagtggcaccgcgtcgagaggcagtgcggaagcttcctccgccgcttccggctgccggaggatgccaaccccaaccagatcagctgcacgctcgaaaacggggtgctgaacgtcaccgtgcccaaggtggagaagaagccggagaacaagaacgtgaggcagattgatgtggtttgatgatgatggagcatcatgaggacttgtaatgtttgaatgagttttatgttatgtgtgtgtgcgcaactgtgcatattactgtacaagttagtaactacgtgtctgccatatgaatcaatgtaagtttgatatgaatgggaggaaactttgttgcatagtttgggaattttttttctttttcttttctttgttttcatcttattaattaaggtgggagttgtgcactgtggtctgtcttgatgcttgttctcttcaataaatggtcagtgagactttgt

SEQ ID NO: 9507 - DNA, 755 bp, Glycine max
  Clone ID: 700853910_FLI
gttctcttgaggttgaagattttaaagatgtcaaatcaggctactcaatcacctttaatttcaatgccaatccctatttcgaggatacaaaacttgtaaagacttatacctttcttgaggaaggaacaactaaggttactgctacacccataaaatggaaagagggcaaaggcatacccaatggagttaatcatgaaaaaaaagggaacaagcgtgctcctactgatgtcagcttctttagttggtttagtgacactgagcagaaagatgatattgatgacattcatgatgaggttgcagaattgatcaaggatgatttatggccaaacccacttacctatttcaacaatgaagaacctgatgaagaggaaggtgatgaggatgaagctgatgatgagggaaaggaggatgagtctgatgatgatgacgacaatcaagaggatgacgatgagggtgaggaggatgccaagtgaaaaatacattatggtcatattactttttttggggttgtaggagtatgtaagcgttctttaggggatgatcatggccaccctttgtggttgtcgtcttatgtcagcaggtggagctaccaaggccagttattggttctctctctgactatagtctatttattgtcctatgaagttatttctggtttcatcccttgtgtactttttcagatactaatgtttcagcggtttttttccataacccttcgtcgtggaactacatggtaaaattgcagtatttagtgt

SEQ ID NO: 9508 - DNA, 1473 bp, Glycine max
  Clone ID: 700853926_FLI
ttcaaaccttgctctatactacacagtacacacactagaagaataatggcttccatcctccactactttttagccctctctctttcttgctcttttcttttcttcttatccgactcagtcacccctacaaaaccaataaaccttgttgttctacccgttcaaaatgatggttccacagggctccattgggccaacctccaaaaaagaacccctctaatgcaagtaccagtcctggtggacctcaatggaaatcacttgtgggttaactgtgagcagcagtactcatccaaaacgtaccaagcacccttctgccactccacccaatgctctagagccaacacccaccaatgcctcagttgccccgcggcatcaaggccagggtgccacaaaaacacgtgtggcctcatgtccactaatcccatcacccaacaaaccggtttaggtgaactaggagaagacgttcttgcaatccacgccacacaagggtcgacccaacaacttggcccattggtcacagtcccacaattcctcttttcttgtgcaccttccttccttgttcaaaagggtcttcctagaaacactcaaggtgtggctgggttaggccatgcaccaatttctcttccaaaccaactcgcttcccactttggcctacaacgccaattcaccacttgcctttctcgctaccctacttcaaagggtgctataatattcggggatgcacctaacaacatgcgacagtttcaaaaccaagatattttccacgatttggccttcaccccattaaccatcaccctgcagggagagtacaacgtgagagtcaactcaataagaatcaaccagcacagtgtgttcccactgaacaagatatcatccaccatcgtagggtcgacctctggaggaaccatgattagcacctcaactcctcacatggttctccagcaatccgtgtaccaggctttcactcaggtgtttgctcagcagctaccaaagcaagcacaggtgaaatctgtggcaccatttgggttatgcttcaactccaacaagatcaatgcatatcctagcgtggaccttgtgatggacaagcccaatggtcctgtttggagaatctctggtgaggacttgatggtgcaggcacaacctggggtcacgtgtttgggtgttatgaatggaggaatgcaacctagagctgaaattaccttaggggcacgtcagttggaagagaacctggtggtgttcgatcttgcaaggtcaagggttgggtttagcacctcatcactgcactcgcatggagtcaaatgtgctgacctcttcaactttgccaatgcatgatgagccaagatcgcgagactttttataatatgcttatttataattaagcaagcatctactacatgttatggttaataaaagtaataatgtaagaataaagactttgaactaaataataatatgaacgattctctttcgttgttc

SEQ ID NO: 9509 - DNA, 1270 bp, Glycine max
  Clone ID: 700853988_FLI
gtagaagtggatgatagaggtgttcacaatctttacaagcagcttgttagctctggacatgcatttggtgcaaaacgttgggttgcaaccttagatcgacaatgtgaaagactcgctagtgccatggcaacaaacattcccactgtagatgttggcgtgataacaaaccaagacgggagaaagagcatgatgaagctggctgaaagaatggtgataagcttttgtgctggagtgagtgcttccactgctcacacatggacaacactctctgggaccggtgctgatgatgtaagggttatgaccagaaagagtgtggatgaccctggaagaccccctggcatagttctcagtgctgccacttctttttggcttcctgttccacctaaacgagtctttgacttcctccgtgacgaaaactctaggaatgagtgggacattctttccaatggaggagttgtccaagaaatggcacacattgcaaacggaagagacacaggaaactgtgtatctctacttcgagtaaatagtgcaaattcgagccagagcaacatgttgatattacaagagagttgcaccaattcaacaggctcttttgtcatttatgctccggtggacattgttgcaatgaatgtggttctaaatggtggagacccagattacgtggcacttcttccttcagggtttgctattctccctgatggaaccacatcgcataatggaagtggtggcattggcgaaactggccctagtggttctctcttaaccgttgcgtttcaaatattggtggattctgttccaaccgcgaagctttctcttggatctgtggccactgtgaacaatctcattgcatgcactgttgagagaatcaaggcttctttgtctggtgaacctgcttgatcagagcttcaagacttttggattctgcgttgcagtttacaagaaggatcaacgggacgcattgcattgtggaaaattaaaaagttggtgttgaacctcggcttatattacaaagacggggagaagtcaagagcgcaccttgcatgattccttctcagtgccccaaaagagttctgagaggattaaggttcgggaattgacttccctagctagatatagtaaacgttaagagcacattttaagatcttgctaccctttaccatttccaagactaaaatatatatatagctagctaggattaaccttttgagtaactagggtttaacattaatgtaaaactcttgtctttttcaatatctgattttgtgtgatt

SEQ ID NO: 9510 - DNA, 164 bp, Glycine max
  Clone ID: 700854057_FLI
ggtggactagctgtaataaaagatatttccaggttattagacaatcatattctgcagcatacaatactatatcttcacactacgtacagtacatatgattgtatgctgcagaatatgattgtctaataaggtggactagctgtaataaaagatatttccaggtt

SEQ ID NO: 9511 - DNA, 1067 bp, Glycine max
  Clone ID: 700854106_FLI
gccgtcaccactccaacacaggttctcttgagcgagatgaagtatttgtgccaaagcagaagtccagtatcatgtggtactctaaataccttaacaatccaccaggcagagtcctcactcttgccgtcaccctcacgcttggttggcccttgtacttggcttttaatgtttctggaaggccttatgatagatttgcttgccactatgacccttatggtcccatttactctgaccgagaacgacttcaaatatatatatcagatgcaggagtacttgcagtatgctatggccttttctgtcttgccatggcaaaagggcttgcctgggtggtgtgtgtttatggagttccattgcttgtggtcaatggatttttggtgttgattacatttttgcagcacactcaccctgcattgccacactacacttcctctgagtgggactggttgagaggagctttagcaacagtggatagagattatggaatcctgaacaaggtcttccataatattacagacactcatgtagctcatcacttgttctccacaatgccacattatcatgcaatggaggcgacaaaggcaataaagcccatcttgggagagtattatcggtttgatgggactccatttgtcaaggcaatgtggagagaggcaagagagtgtatttatgtggagccagatcaaagtactcagagcaaaggtgtattttggtacaacaataagttgtgatgattaatgtagccgggggcttcttgtccgtcaggtgggatggtttgaactttcctttgtgactgtttagtatcatgcttgcttattgggaataattttgttgaaccctgatgttggtagtagtatctagaaagtagcatagcgtttttgtttgcagaataagatatagcatctctgaacagtttgattattgcaccatgttttgcaatcagtgcatgtcgactaagtttctcaagattgtggggatgcttattcttgttccagttcttgaatccaagttgttatcatattctgttattgactcagaatctttaaccctttctgcttctttctcacgat

SEQ ID NO: 9512 - DNA, 2205 bp, Glycine max
  Clone ID: 700854111_FLI
gaactggtcgaggtccaacagttacagacccgaatactgagaaacaaggcgaagtattttatgttccaagagatgaaaatttaggtcacttgaagtctaaggatgctcttgagattggaacaaaatctttatctcaaattgtccagccggcgttcgaatctgcgttcgatttgaaatccacgccaattgagtttcatagcttccaagatgtgcatgacttgtatgaaggtggaattaagcttcctagagatgtaattagcacaattatccccttaccagtgatcaaagaactctatcgtaccgatggtcaacacatcctcaagtttccacaacctcacgtcgttcaagtgagtcagtctgcatggatgactgatgaagaatttgctagagagatgattgctggtgtaaatccctgcgtaattcgtggtcttgaagagttccctccaaaaagtaatctggatcctgcaatctatggtgatcaaagcagtaagataacagcagattcccttgatctagatgggtacacaatggacgaggcacttggtagtcgaaggttatttatgttagattaccatgatatcttcatgccatatgtgaggcagataaatcagctgaattctgccaagacttatgcgacaaggactatcctttttttgagagaagatggaactttaaagccagtggccatcgaattaagtttgccacattctgctggggatctgtcagctgccgtcagtcaagtcgtcttacctgctaaggaaggtgttgagagcacaatttggctactagccaaagcttatgtcatcgtaaatgactcttgctaccatcaactcatgagccattggttaaatactcatgcggcgatggagccattcgtcatagcaacacaccgacatcttagcgtgcttcacccaatttacaagcttctgactcctcactatcgtaacaacatgaacatcaacgcacttgccaggcaatctctaattaatgctaatggcataatagagacaacctttttgccctcaaagtattctgtggagatgtcttcggcggtttataagaattgggttttcactgatcaagcactacctgcagatcttatcaagagaggagtggcaattaaggatccatcaaccccacatggagttcgtcttctgatagaggactatccttatgccgctgatggactggagatatgggctgcaattaagacatgggttcaagaatatgtgcccttgtactatgcaagagatgatgatgtcaaaaatgattctgaactccaacattggtggaaagaagctgtagagaaaggccatggtgatttgaaagacaagccatggtggcctaagttgcagacacttgaagaccttgttgaagtttgcctcattatcatatggattgcttcagctctccatgcagccgttaattttggtcagtatccttatggaggtttgataatgaaccgcccaactgcttctagaaggttgcttcctgagaaaggcaccccagaatatgaagaaatgattaataaccatgaaaaggcttatttgagaacaattacatcaaagttgccgactctcattagcctttcagtgatagagatcttgtcgacacatgcttctgatgaggtctaccttggccagagggacaacccacattggacctctgattcaaaagcattacaagcctttcaaaagtttggaaacaagctcaaggaaattgaggaaaaacttgtgaggaggaacaatgatccgagtctgcagggcaatcgacttggcccggttcaactgccatacactttgctttatcctagcagtgaggaagggttaacttttaggggaattccaaatagcatctctatctaagggagcctgtggtttactctaattactctatatatagtgcatgtgtaccttccaataaaaaagatgcaagactagagatccgataaatcttgcatcttatctaatgtttcaattatcttgtgttttaattaatgttgtaattgagctcacagtttggttgtggtttgcaaataataagagcagtgagcactattagtttgtgtttagctcctgtcatcatgtttggtattatacattttgcagattacgtaacacaaatttatgttattagtaaaaaaactgtattgtacgaatattttgtattataagtatataagaaataaaaattattagtattagt

SEQ ID NO: 9513 - DNA, 1479 bp, Glycine max
  Clone ID: 700854609_FLI
ttcaaaccttgctctatactacacagtacacacactagaagaataatggcttccatcctccactactttttagccctctctctttcttgctcttttcttttcttcttatccgactcagtcacccctacaaaaccaataaaccttgttgttctacccgttcaaaatgatggttccacagggctccattgggccaacctccaaaaaagaacccctctaatgcaagtaccagtcctggtggacctcaatggaaatcacttgtgggttaactgtgagcagcagtactcatccaaaacgtaccaagcacccttctgccactccacccaatgctctagagccaacacccaccaatgcctcagttgccccgcggcatcaaggccagggtgccacaaaaacacgtgtggcctcatgtccactaatcccatcacccaacaaaccggtttaggtgaactaggagaagacgttcttgcaatccacgccacacaagggtcgacccaacaacttggcccattggtcacagtcccacaattcctcttttcttgtgcaccttccttccttgttcaaaagggtcttcctagaaacactcaaggtgtggctgggttaggccatgcaccaatttctcttccaaaccaactcgcttcccactttggcctacaacgccaattcaccacttgcctttctcgctaccctacttcaaagggtgctataatattcggggatgcacctaacaacatgcgacagtttcaaaaccaagatattttccacgatttggccttcaccccattaaccatcaccctgcagggagagtacaacgtgagagtcaactcaataagaatcaaccagcacagtgtgttcccactgaacaagatatcatccaccatcgtagggtcgacctctggaggaaccatgattagcacctcaactcctcacatggttctccagcaatccgtgtaccaggctttcactcaggtgtttgctcagcagctaccaaagcaagcacaggtgaaatctgtggcaccatttgggttatgcttcaactccaacaagatcaatgcatatcctagcgtggaccttgtgatggacaagcccaatggtcctgtttggagaatctctggtgaggacttgatggtgcaggcacaacctggggtcacgtgtttgggtgttatgaatggaggaatgcaacctagagctgaaattaccttaggggcacgtcagttggaagagaacctggtggtgttcgatcttgcaaggtcaagggttgggtttagcacctcatcactgcactcgcatggagtcaaatgtgctgacctcttcaactttgccaatgcatgatgagccaagatcgcgagactttttataatatgcttatttataattaagcaagcatctactacatgttatggttaataaaagtaataatgtaagaataaagactttgaactaaataataatatgaacgattctctttcgttgttcaatgag

SEQ ID NO: 9514 - DNA, 734 bp, Glycine max
  Clone ID: 700854789_FLI
actcactcttcactcaaaactcttgtctttcattttgataattcccacactatggctgagcttcactaccaacaacaacaccaataccctcaccgataccctaatgatccatacgaacaacaaactagctactccactcaggtcgtcaaggcggccaccgccgtcaccgcgggcggctccctcttgatcctcgcctcgttgatccttgccggcaccatcatcgccctcaccatcgtcacaccaccgctcgtcatcttcagtccggttctcgtccccgcggtgatcaccgtcgcgctgctgagcctggggttccttgcctccggcgggttcggtgtggcggcgatcacggtgctggcgtggatctacaggtacgtcaccgggaagtacccacctggcgcggatcagttggacagcgcgcctcacaagatcatggacaaggcgcgtgagatcaaggactatggacagcagcaaatcagtggggtgcaggcttcttaatcgtgtgcacgcacgcacccgatcaaatccatctcgtggatttctctctttgtctagttagttatatttacgatttatgaatgaatgaatgcaggaatgagcgttaaagttgaatttgaatctcctcttttctttgtattttcgtttattgtgggtgttcgatcatcatcacttgttgtagttgtaatgtcttaattttgtgtgcatgctgcgactattcaaggacgatccatttgtgt

SEQ ID NO: 9515 - DNA, 2653 bp, Glycine max
  Clone ID: 700854796_FLI
cagcttcttcatcagggtaatggtggtgctggtgctggtggtggcagaaccaacggcttcattccaagttctttccgtgctctctctagctacctcagaattgtttcctctggtgcttccactgttgcacgttctgctgcatcggttgcatcatccattgtggagagggatgatgaccctgaccatgatcaggttatctgggctgggtttgacaagttagagagtgagggtgaagttattcaacaagtacttcttctaggttatcgatctggattccaggtttggcatgtcgatgaatcaaacaatgttcgagacctggtttccagacatgatggtcctgtttcgtttatgcaaatggtacctaatccaattgcgtctaagaaatcagaagacaagtatgcaaacagccgccagctgttggtagtttgtactgatgggttttttgctggaagtaacaatgttcaggatgggtcgaccaccccttacaatggaagcactacaaactcccatgaccaaataaatggaagctatctgccaactaccgttcggttttattctatgaaatcccaatcttacgttcatgtactgaagtttagatcagttgtttattctgtgaggtgcagttctcgggtagttgcggtttctcagtccactcagatactgttttgatgctaccacattagaaagggaatatactttacttaccaatcctatagtaatgagttgccctggttccggaggcataggttatggaccacttgctgtgggaccaagatggcttgcttatagtggaagtccagttgcaatctccaattcaggacatgtgtgtccacaacagttgacaccttctggaagctttcctggtttttcttctaatgggagcttgattgcacattatgccaaagagtccagcaagcatcttgcttctgggattgtgacccttggagacatggggtataagaaactttccagatattgctctgatagcaatggttcattacaatctgtaaattctgtctctaagggcaatggaactattaatggccattcaactgatgcagataacattggaatggttattgttaaagatattgtctcaaaaaatgttattgcgcaattctgggcccacaagagtcctatttcagcattgtgctttgatcctagtggcaccattttagtgacagcttccattcaaggtcataatataaatgttttcaagataatgcctgcaagtgagaatttgccagcatctgttactggtccttcttatgttcatttgtataggttgcaacgcggctttacaaatgcggttatacaagatatcagtttcagtgatgacagcaagtggattatgattagttcttcaaggggaactagccatctatttgccataaatcctcaaggaggacatgtaaatatccagtcctttgatgatagttttatggcaaaaaatagtggattaggcactacaactaatcatgcagttcgtcggtctcatagttcggccatgcaaatgcctaaacagcagagcctgtttgttactggccctccaatcacactttctgtcgtaagcagaattaggaacggagctaatggctggagaggcactgtaagcggtgctgctgcagctgcaactggtaggaaaaatgccctttctggggccattgcttcatctttccgtaactatagaggcaatgaagggaactttcctaaggcaaagtatcagctgttggtcttttcaccctctggttccatggtacaatatgctttgaggacaataactggtcaagattcagctgttgtttctggattgtcccctgcttatgaatccattccacaggctgatacaagattagtagttgaggccatccataaatggaatatatgtcagagtcatagtcggagagagcgagaagataatgtagacatatatggtgagaatggaatttcagacgtcaataaaatatatccagaggaagtgggggaggagaaaaacactagcccgaaaatcaagaatggagttatgaaagtgaatctctgtcttgaggaggagcatcttttgtatatttcagaagctgaactgcaaatgcatgaagctcagacttcattgtgggcaaagccagagatatattttcattcaatgttgcaagaatctaccataatggatgaagaagcagctgcttcaggaggtgaatttgagattgaaagtatgccaacttgcatgattgaagctagatcgaaagacttggttccgattttcgaccatattcagactccaaaagtaccacaaacaaggactcctgctatggatagcaagacaaatgaacagctgttgcatcgcagttctaggctggccggaaatggcaggatttcacccaggactattttggaatctcctgagagtgtgactaaggctggtgatgctgtttctgaatttagaagtggaattgaaggaactgagtgggataatcatttggtggcatctgaaactttgaactttgtaaataacaatgacacctttagaccaaatactcagcatgagattgtaaataatagaatggagcacttaaacaccggggctcatctcatgtatgtaaatagtgacagaaagcctgaaaatgaagaatcattttgaagaaaatggaaaaaattt

SEQ ID NO: 9516 - DNA, 1269 bp, Glycine max; identical to SEQ ID NO: 9226
  Clone ID: 700854907_FLI

SEQ ID NO: 9517 - DNA, 837 bp, Glycine max
  Clone ID: 700865146_FLI
tggaaaatctccattcattgtgtgcaaggatgctgatgttgatgcagccagctccagagttactggcttcaggttgctgtgtgcagacagttcaagccagtaactctggagctgggtggaaaatctccattcattgtgtgcaaggatgctgatgttgatgcagccgttgaggcttcacattttgctttattttttaatcaggggcaatgttgctgtgctggttctcgcacatttgtccatgaaagcatatatggtgaatttgttgaaaaggctaaagcccgtgctcttaaacgagtagttggagaccctttcaaaaatggggttgagcaaggtcctcagattgattctgtgcaattcgagaagatcatgaaatacataagatcaggcgttgaaagtggtgctcaactggaatctggtggtcaaagaattggctccaaaggctactacatccaacccactgttttctcaaatgttcaggacaacatgttgatagcaaaagatgagatatttggtccagtacaatctatcttgaaattcaaggatctagaggaagtgataagaagagccaatgcaacttcctatggcctggctgctggagttttactaaaaatatggacactgccaacaccttgatgcgagcattgcaagctggaacggtatggatcaactgctatgatgtctttgatgcagcaataccttttggtggatataagatgagtggtcaagggagagtaaggggaatctacagccttagaagctaccttcaagttaaagctgttgtcactgctttgaagaatcccgcatggctgtagttttcccactacctgagtgttcatg

SEQ ID NO: 9518 - DNA, 743 bp, Glycine max
  Clone ID: 700865210_FLI
atttcctctcagaaccctcgatcactcccacgcgctcctatatcctctccttcaccgtcgctctctccaacgatcacaacaacatcgtcatcccatggcaaacgccgcatctggtatggcagtccatgatgactgcaagttaaggtttttggagctgaagacaaagaggacacaccgtttcatagtttttaagattgaggagcagcagaagcaggtcattgtggagaagcttggtgagccagcccaaggctatgaagatttcactgccagccttcctgctgatgagtgccgttatgctgtttatgattttgagtatctgactgaagggaatgtccctaaaagcagaatttttttcattgcatggtcccctgacacatcaagggtgaggagcaagatgatctatgcaagctccaaagacagattcaagagggagctggatggaattcaagtagagctgcaagcaactgatcctactgagatgggtcttgatgtgttcaaaagccgggccaactaaaatgattatagaaaatagtaggctttctggtgggagcagcactccttaagccttagttactcatggaaaatatcctagtttgtgggatggtcaacttgggtagttatggtcccaaactctcaattttccaagttgtggcataaattctattgcaccttttaacaagctttgcttgttccagtgtgttttattatgatttgtgatttatacgaccttgcgtttgagtgcc

SEQ ID NO: 9519 - DNA, 1491 bp, Glycine max
  Clone ID: 700872843_FLI
ggaagaccaccttgttgtgacaaagaaggggtcaagaaagggccttggactcctgaagaagacatcatattggtgtcttatattcaggaacatggtcctggaaattggagggcagttcctgccaaaacagggttgtcaagatgcagcaagagttgcagacttagatggacgaattacctgaggccaggaatcaagcgtggtaacttcacagaacaagaggagaagatgataatccatcttcaagatcttttaggaaacaggtacaagtcaatcttccaagcacctacttacttggagttttgtgttcaattcaagcaattaagttactaatgaaatcttttagcttataaaaaagaaaaaaactttgttttgaagatttattttttataactgtttttgagtattttgatttgggaagttctatcttttggatccacatgcttaactggatcacattggttattggtacagatgggctgcaatagcttcataccttccacaaagaacagacaatgacataaagaactattggaatacccatttgagaaagaagctgaagaagatgcaagcaggcggtgaaggtggtagctttggagaagggttttcagcctcaaggcaaatccctagaggccagtgggaaagaaggctccaaactgatatccaaatggcaaagagagccctcagtgaagctctttcaccagagaaaaagccatcttgtttatctgcctcaaactcaaacccttcagatagtagcagctccttctcttccacaaaaccaacaacaacacaatctgtgtgctatgcatcaagtgctgacaacatagctagaatgctcaagggttggatgaagaacccaccaaagtcctcaagaaccaactcgtctatgactcagaactcattcaacaacttagcaggtgctgatactgcttgtagtagtggagcaaagggaccactaagcagtgccgaattgtctgagaataattttgaatccttgtttgattttgatcagtctttggagtcttcaaactctgatcaattctctcagtccttgtctcctgaggccactgttttgcaagatgaaagcaagcctgatattaatattgctgcagaaattatgcccttctctttgcttgagaaatggctccttgatgaggcaggttgccaagagaaattagttggttgttgtggtgatgccaagtttttctaagttgggttcattttgtgacatatgagcctgtgggatttttttattttattttattttatttcataagttataggtagggcctcatcaattaatctcgcttcggccttattagagagagaagttttccagcctttggtgctagacgtgtatatgttaattattattgacattatgatgattattatcatactgtgttagttgccatacactggcaaacttgcttctcttatgtaaagttgatcttgcgacgagatcttgctttatgaattaattgtttttaaagt

SEQ ID NO: 9520 - DNA, 953 bp, Glycine max
  Clone ID: 700872894_FLI
attccaagccgttggttgcggagattgagatttcaaaacttcttgatccaaccaaaggcactgcaagtattagtgcagttgctggttcctttggttacataccaccagaatatgcatatactatgcaagtcacagcaccaggaaatgtttatagctatggtgttgttctgctggaaatccttacaactagactaccagttgatgaggattttggtgaaggtgtagatttggtgaaatgggttcatagtgctccagtaagaggggatactcccgagcagatattggatgctaagcttagcacagtttcctttggttggaggaaagaaatgcttgctgctttgaaggtcgcgatgctgtgcactgacaacacaccagccaaacgaccaaaaatgaagaatgtagtggaaatgcttcgagagataacacaaaattgagaacaacaagccactcaaagattctattctgtgctgtaatctacaccgttgaagatttgatgtatgcaaatctctcatggatacagaggaaatgatgaattacaacttacaacaactttaaatagtagacttgtatcaggaattatttcatgtggtgaagctggtgtgtcatagtaaaatcaggcattgatagaacttcacctttctagtttgtccaaagggttagttgtgaaatggcagcttatctatttgagttggatactatgttaggtttggggaggataaatgcaagaagaaaccttgaaatgggatatatcagttcctgttgcatataagctagtccacagttttcatattgtatttactcatttgggagatgtatgcacctatcaatcagtctcttcccattgaaactaaaagttctatttatttttgttgagatagcagactgtatatctggattgtgcacatgtataccgtaccttctactggatgttttactgttttaacatacatccc

SEQ ID NO: 9521 - DNA, 834 bp, Glycine max
  Clone ID: 700872896_FLI
cagagcgtggacacagtcttgaaagcatcaaggctagcattgaagcaaggaagcctgattttgaagcatatattgatccacaaaagcaatacgcagatgcagtgatagaagtgttgccaacccaactcattccagatgacaacgagggtaagattttgagagtgaggttgatacagaaagaaggggttaagtactttagcccagtttacttatttgatgatggctctaccatttcatggataccatgtggaaggaagcttacatgctcctaccctggcatcaaattcttctatggaccagagacttactacggaaatgaggtgtcacttgtagaaatggatggacaatttgacagactagatgaactaatatacgttgagagccacctaagcaacctctctacaaagttctatggagaggttactcaacagatgttgaagcatgctgatttccccggcagcaacaatggaacaggtctcttccaaaccatagttggtttgaagataagagatttatatgagcagctaatagccaccaaggctgagactccagtggctgcaaaagcttaggaattgaattgaacctgccataataatatatatacatatcgaccgagcgacgcagtcaaattgcattagttctcatcaaaatcatcattttctttcttctttcatgttttccacaatttcactgtgtttcatgttattttgtctattgttattaggctgttctgcatcataattaatgaaaaaaacacatatgtatgtatgtatgtacttatccgagaaaaaaaagtgaggctgagattcagttatgttgatacaagattgagac

SEQ ID NO: 9522 - DNA, 1018 bp, Glycine max
  Clone ID: 700872947_FLI
ggctgttgtatggaagaggatcaattgttactgatttatgaatacatggaaaacaatagtcttgctcatgctttatttgccaaaaatgatgactctgagaaatgtcaattgagattggattggcaaacaaggcataggatttgtgttggtatcgctaaaggtttggcttaccttcatgaagagtccaaactgaagattgttcatagggacatcaaggccaataatgtgttgctggataaagatctcaaccccaagatatctgattttggattggcaaagcttaatgatgaggacaaaacccatttgagcaccagaatagctggcacttatgggtacattgctcctgagtatgcaatgcatggttatttgacggacaaagcagatgtttatagttttggaattgttgcattggaaattgttagtgggatgagcaacaccattagccagcctacggaagaatgtttctctctcattgatagggtacatctcttgaaagaaaacggtaatctaatggagattgtggataagaggttgggtgaacacttcaacaaaacggaggcaatgatgatgatcaatgtagcccttttatgcaccaaagtctctctagcactcaggcccaccatgtctttagtggtaagcatgcttgaagggagaacacgtattcaagaggtggtgttagacaaaagagaggtattggatgatgacaaatttgagataatgcaacagtattatcaacacagaggagaaaataacataattgagtctcagaacctaagtgaccctacgggggaatcttctaaacttttcgctgatacaagttcttctggtgagcaaattgaaagttagagaacttatagaaatgaacatcttgtcgttgctctatatatatttagtgtttggcacaacttattttgcaaaaatgaagatacggttcttgtatctaaataagtaagggtttgaacaagtttgcataaccaattgtaatagaatttaatgagtggaagaatacttcgttttc

SEQ ID NO: 9523 - DNA, 686 bp, Glycine max
  Clone ID: 700872956_FLI
cggtgcgcggcagcaacatccacgggagggctgatgaacaaaatgaccgggcgcatcggtgattcgccgctgataggcgccgggacctacgcgtgcgacgtgtgcggcgtatcgtgcacgggtgaaggcgaggccatcatacgtggcacgctggcgcgtgaggtggcagcggtgatggaatacaaaggcttgaagcttcaagaagccgtggattttgtgatcaagcaccgtctcgatgaagggatggctggtctcattgctgtgtccaacgctggggaagtggcttatggtttcaattgcaatggcatgtttaggggctgtgccactgaaaatggcttcatggaggtcggaatctgggaatagcttcattattttccttcatggttgtttcgatgcaacttttggatttctgtaccatgttccactgtagtgtagggtctttctgctggtgcccgatttagataaaaaatggtaaccttgtttctaagaattagaaaaaaatgtgaaataataatatggtaactttgttgtctttctcttaaataaagacttgtggtagaccctcaacaaacccgtgtacctttttactatcacttacttaacttccttctctttttcttcaattcttatattatttgcaaggatcttaatgtgtacaaattgttaataattagtagcattttatt

SEQ ID NO: 9524 - DNA, 1572 bp, Glycine max
  Clone ID: 700872978_FLI
aaaaaacccacgctctgcagccgctacgttaaaacctacaaatacaccatggaaaacgacgccggtttccctctcatccccaacgtgttctccggcttcaactccctcgtggcctccgcggcacgtggctccctctccgctgcacgtttcttaacggggcagtttaaccccgctaacggcattggcctggccaacaccagcttagccttcttcgggaatcgtctcttcgcgcttggcgaatccgacctcccttacgtcgttaacgtaacccctgacggcgacatcgaaaccctcggccgtcacgactttgacggaaaactcacgttcagcatgacggcgcaccctaagatagaccccgacacagcggagtgcttcgccttccgttacggccccgtgccaccgttcctcacctacttccgtttcgacggtaacggcaaaaaacacgaggacgttcctattttctccatgctaacaccttcgttcctccacgatttcgccattacgaagaaatacgcgatcttctgtgatattcagctcggattgaaccctcttgacatgatctccggtggctcccccgtcggctccgtcgcctccaaggtcccaaggatcggaatcctccctcgtgatgctaaggatgagtcgatgatgaagtggtttgaggtgccggggttcaacatcattcacgcgataaacgcgtgggaggaggacgagggaagaacggtggtgctggtggcgccgaatattctttcgatggagcacgcgctggagagaatggagctagttcacgcgatggtggagaaggttcggatcgagctggacacagggataatcacgcggcaaccggtgtcggcgcggaatctcgatttcgcagttataaaccctgcgttcgtggggaagaagaacaggttcgtttacgcggcggtgggggacccaatgccgaagatctcgggggtggtgaaactcgacgtgtcgaagggggaggagcggagggactgcacggtggggtgcaggatgtacggcgagggttgctacggcggagaaccgttcttcgtggcgagggaagaagggggcgaggaagatgatgggtacttggtgagttacgtgcacgatgagaggaagggggagtcgaggtttttggtgatggacgcgaagtcgccggagctagatgttgtggcggcggtgaggcttccgcggcgggtgccgtacgggttccatgggctgtttgtgaaggagagtgagctgaggaaagtgtcgttgtcgtgaagctgagacatgatggttcgtgtgtggggcttgtcttccacgcttctgtccattatacatgtgtcctgtaatgtaatgtatagcaccattattgcttctcagaattaattgatgaggtgtaattagtaattacatgcaagtctatgccagctaaacaaagtaatcatcgttcatgtatgggtgaatcatgaaggaacagctgaataaattatttgtatttttcattattaccgttacatttgtttttgagttttatctgctacaattaagctactcaagttagttagaaatgaaatgaaatattgtaac

SEQ ID NO: 9525 - DNA, 1347 bp, Glycine max
  Clone ID: 700872990_FLI
gcatttttggaaatgtggccattgcagcccgttattctcagcgtgttcatggattgaagcgtgtgtttataattgactttgatgttcatcatgggaatggaacaaatgatgctttctatgatgatccagatgtatttttcctttcatttcaccaagatggaagctatcccggtactggtaaatttgatgaagttggaagtggagatggtgaaggaaccacattaaatctgcctcttcctggaggttcaggtgatactgctattagaactgtgttcgatgaagtcattgtaccatgtgctcaaagatttaaaccagacatcattcttgtttctgctgggtatgacggccacgtgttggatccactagctaatcttcaatatacaactggaacatattacatgctagcgtccagtatcaaacaactagcgaaagatttatgtgggggccgatgtgtgtttttcttggagggaggatataatctgaagtctctttcatattccgtggcagacacattccgtgctcttcttggggaccgaagcttggcatyctgagtttgataaccctaacattttgtacgaagagccatctacaaaagttaagcaagctattcagaagataaaacacattcattccctgtgaggtcaaaatagaaactgacatgacaagcatctaaatgtctagcattaataatttccttttctgtgggttcaatctataagtacatgtctttacactcttgggtgggcattctcccacttatcacatagaagcaaaaccattgtacaggattgcttgtggtctttgaacgagtctccagttacagtttctatatgccatgcagccatattgatcatgtggtcatagccatatacataaaggagtaaaccctaattttatatatttacttcattgaggaacactagcaacacaatttttaacacactcttattagcacattctctctatcaaatgaaacccatgtaagtctcaccaaatgatgcatgcctcgtaattttttttaatgggtttcactttccatttcgtgagtcatatgtagcttttacccaataataaagagttgaatgcattaataggatctctaagaactaccgaacatgttacttgtgggagaatttttataatgccattctttgtagattcaatagtggcatttactgtgtctgtgttgtaggaatctgctacttgagccttgttagatagatcaaaagcctcctcctattgggctaggtgggtgtatcaattatcatgtatgttagcttctttgatttttttttttattatcagcaaatcaaaatatattaaatagatgaccacctggctaatctc

SEQ ID NO: 9526 - DNA, 2223 bp, Glycine max
  Clone ID: 700849742_FLI
ctttaattggaagagcttatgtgcctgtttcggaggtcttggatggtgaggaaatagacaggtgggttgaaatattggatgaggaaaaaaacccaatacatgagggttcaaagatccatgtgaagctgcaatattttgatgtcacaaaagaccgcaactgggctcgaggcattagaagtcctaaatttcctggagttccctatactttcttctcacagaggcaaggatgtaaggtatctctgtaccaagatgctcatgtgcctgataattttgtacctaaaatacctcttgctggaggcaagaattatgaggctcataggtgttgggaggatatatttgatgcaatcactgatgctaaacacttcatatacattactggttggtctgtttatactgaaatttccttggtaagggattctaggaggcctaagcctgggggagaccaaacacttggtgagcttctcaagaaaaaggcaagtgaaggtgttaaggtattgatgcttgtttgggatgatagaacatcagttggtttgttgaaaaaagatggactgatggctactcacgatgaagaaactgcacagttctttgatggcactgaggtgcattgtgttttatgcccccgcaatcctgatgatggtggtagcattgttcaggatttacaaatttctaccatgtttactcatcaccagaagattgtggtggttgacggtgcgatgccaggtggagggtcagataggcgaagaattgtgagttttgttgggggtattgacctctgtgatggaagatacgacactgccttccactcactgttcagaaccctggacacagcacaccatgatgattttcatcagcctaactttcctggtgctgtaatcacaaaaggtggtcccagggaaccttggcatgacattcactcccggcttgaaggacccatagcttgggatgttttgttcaactttgagcaaagatggagaaagcaaggtgggaaggatgtacttgttccattgagagagcttgaagatgtcattatctccccatccccagtaacatttcttgaagatcatgagacatggaatgttcagttgtttagatctattgatggtggggctgcttttgggttcccagagactcctgaagatgctgccagagctggtcttattagtgggaaggataatatcattgatcgtagtattcaagatgcttatattaatgctattcgacgtgcaaagaacttcatctatattgaaaatcagtatttccttggaagctcttttgcctggagtgctgatgatattaagcctgcagacattggtgctttgcatctaatcccaaaggaactttcactcaagattgttagcaagattgaagctggggaaaggtttgctgtgtatgttgtagtcccaatgtggccagagggtgtcccagaaagtgcatcagttcaggcaatattggactggcagaagagaacaatggagatgatgtacagggacattattcaggcactcagagctaagggaatcgaggaagatcctcgaaactatctgacattcttctgccttggcaaccgggaagtgaagaaaccaggagaatatgagccttctgaacaaccagatcccgattcagattatcagagagcccaagaggcccgacgattcatgatttatgttcataccaagatgatgatagttgatgacgaatacataatcgttggatctgccaacatcaaccaaaggtcaatggatggtgctagggactctgagattgccatgggtgcttatcagccctatcatttggctaccaggcagccggcacgtggccagatccatggtttccgcatgtcattgtggtatgagcaccttggcatgcttcatgactccttcctccagccagaaagtgaagaatgcattaataaggtgaaccaagttgctgacaaatattgggatctgtattctagtgagtcacttgagcatgaccttcctggtcaccttctccgctaccccatcgggattgccagtgaaggagatgtcactgagctgccaggatttgaattcttccccgacaccaaggctcgcattcttggtggcaaagctgactacctcccccctatcctcactacttagtttgattttgtactttgttacaaacttgtgattgcttacatcctaatttgtgtttttattactacttagtaataatcttaatatagtctgtgatgtcttgtgg

SEQ ID NO: 9527 - DNA, 947 bp, Glycine max
  Clone ID: 700849791_FLI
atagtacagaacataaagtcatataccgtgactttaaaacgtcaaatatcctactcgatacaaactataatgccaaactttctgattttgggttggccagagatggtcctactggtgataaaagccatgtctctactagggtcatgggaacccgtggatatgcggcaccagagtatttagcgacaggtcatctcactaccaagagtgatgtgtatagttttggagtagttcttctggaaatgatatcaggaagacgagctattgacaagaaccagccaactggagagcataaccttgttgaatgggccaagccttatctatctaataaacgaagagtcttccgtgtaatggatccccgtctcgaaggtcaatattcacagaatcgagctcaagcagcagctgcgcttgctatgcaatgtttttccgtagagcctaagtgcaggccgaatatggatgaggtggtaaaagcattggaggagcttcaggaatcaaagaacatgcagagaaaaggcgctgatcataaacagcatcatgtacgcaattccggccccggccgtaccaatggtggcgatggtggttcagatgcccctagaaaggcttctgcttatcctagaccttctgcttctctcctccgcggttgagagaattttgtgatgcggcaagtagtaaagcatataacaaaattcggaggtttaggtgtggctggcatgaaccatgtttatgtaagcaatgtatagtttgctttatttccatgttacattttgtgctatatataatttttttttctcgttgtggttctgattgttagacattcaagggtctaatgtgggtccttaaggtgttcattaattttgaaccctgtaaacaactgcaacactacccatgtggttgattctctacatttttatcttttgctttataatatgtaaaaaagtcttctccatgtt

SEQ ID NO: 9528 - DNA, 1774 bp, Glycine max
  Clone ID: 700849806_FLI
cttctctcatttttcatctcacccttcctctatttccatcatttcgtgacaacaacaacataaccctctcgcccccaacacacacctcttctttttaagggtttatcttaaaccaggatttttggcactaatttctctatgggagaagcaccagcattgcttgttgatgacgtgcaggatggggctctgaatggccttgaattgaaaaatggaacttgcaaaacaactgctactgttggcgataagatgtatgtcattggtggagctgatgatggaactttgtccattgaagttcaaatttttgacggtagtcttggagaatgggttcgtcccactgtgcgtggcaccaaacccgtgttgtgcaatggcctctcagcagtgcctttggaagaccgaatactgattcttaagaagggttctaagcctgatgatcggatatggttcctggagattgacacccaatatgttaggcagcagcaaaaaattttggggactgaggtagttgcatggagtaaaggtgtgataggcaatgctgagaagcctgttgttattagtggtccttctggagtaggcaaaggaacactgatatcaatgcttatgaaggaatttccatctatgtttggtttttccgtgagccacaccacccgtgctccaagaggtatcgagaaagatggggttcattaccattttactgagaagagtataatggagaaagagatcaaagaaggaaagtttcttgagtttgcttctgtccatggcaatctgtatggaactagtgttgaggctgtcgaactggtagcagatgcagggaaaagatgtattcttgatattgacgttcaaggtgcaagatctgtgagggctagtacgcttgaagctatattcatctttatctgccccccatcaatggaggagctggagaagcgccttcgtgaccgggggacagagactgaggaacagatcctgaagcgactacgaaatgctgatgctgagattgagcaagggaaatcttctcaaatatttgatttcatcctatacaatgacaatcttgaggagtgtcatgagagacttaagaaactattgggacttgacggttttgtcactgctccacctatatcaggccctatagagattgatttaccaatggatcattcagtgtcaaaaattgataacaaaatcatcataaactgcatctcctcaggagagaaggaatcaaagaatttggtcattttggatgtttcctcactaaaagggggtgcacctggacggacaagaggcctaaatttccaagccattggctctttctcaaatggcttgaatgggatagatcaacttagctaacattcaatgcacttggccaactaacttggtattgaagaaatgggacacattgataaggcattagattcacttcttaaacatttttttaagcattcggtaagaacttctataagcattctttgattattatgactattgagttgacttgagagatggcaattgctaaattattattccctacataggcaatgagattacttgtgtcttttgtgtgtcaaggaaggcaaaatatggtgtacgtttctctattccccccaccccaagatctgttatagtaagggaatatgaagggggcctacaacatgaatacttcaaattcaaagatgtctgtcagatattaggtgttatactaggcatggctattcattgattcaagccatatgttttacacattaaatttgttggatacatgttttatgtcattaccatgttcatt

SEQ ID NO: 9529 - DNA, 514 bp, Glycine max
  Clone ID: 700849819_FLI
gtgcgctgttcctctgtctgtcgtttttgttttcagaccaaaccctagctccgcatcgcaaccatgtcgaccaagcaaggtggaaaagctaagcctttgaagaaacccaagtctgataagaaggattacgacgaggttgacatggctaacattcagaagaaaaaggaagaggagaaggcgctaaaggagttgaaagccaaggcgcaacagaagggaagctttggaggttctgggctcaagaaaagtggaaagaaataagggctctttatcatgattgtatacatccaatattgagccctgtagtttattaccatgataacttctgtcttattgtggccttctttattgctctaatgttagtactgaactgaggtatttcgtgatgtaagctgcaacaagttacttgtttgtagctttattgtgtggcccttcatggggttctgataattacatcctattagtagtgctgtggatttggcatagacttgttcaagtaataatgacttggcttgcg

SEQ ID NO: 9530 - DNA, 2332 bp, Glycine max
  Clone ID: 700849822_FLI
cttcaatttgattccttcgttgtttcgtcctgagagggtcagccatgacccaaaccctctcattctctctctcaccttcccagaaaaccctagaaattaattaaaaccatccaatcttcttttctccatttccccgatttttttttttttcatttctatttcaatcgcaacctcctcctccttccaagtcaacgcggatttcagaattctcgatccatgtcgtccgagatcgaggttgtcgaggaggtgcagtcccgcgacgagcaatcgggggcggaggagagcctccgtaatgacgtgtacacggcggcggcttacggggatttggagaggctgcagagattggtggagcaagagggttgccccgtctccgagcccgacggtttgggctactacgcgcttcagtgggccgcacttaacaaccgcactgccgctgctcagtacatcattgagcatgggggagatgtaaatgcaacagatcatactggwcrgmckkmcwtwsrwkkgmgkkysgkkskgskwkyyakkcwgsmkrsmkwkywytymmksmrggwgskygmkygagtgmkkscgatatgaatggatatcagacaacacatgttgctgcacaatatggtcagacagctttcctttaccacattgtttcaaaatggaatgctgaccctgatgttcctgataatgatggaagaagccccttgcattgggctgcatacaaaggttttgccgattctatacgtcttctgttatttcttgatgcacacaggggacgtcaagatacggggggttgcactcctcttcattgggctgctattaggggcaacttggaggcctgtaccgtgctagtacaggctggcaagaaggaagatcttatgctggctgataatacaggcctgactccggcacagcttgcttctgataagaatcacagacaagttgcttttttccttggaaatgcccgaaggttgcttgacaaacgctgtgacgggaacagccgccttggaaagatttccaaattaggacttgctcccgtcctttggtgcataattcttgtgctattggttacgtatattcattcagtcatcttggcaacaaaaatgccaaagctgacagctgcagctggccttcttgcatggtttggagtttttcttgcaagtgttggtttggtgatgttttacaggtgtagcagcaaggatcctggttatatcaggatgaatatgcatgacaatcaggatacaaaagatgacgagcctctcttgaagattgagataaataatcctgctttgctagctggaaattggtcccagctttgtgcaacatgcaagattgtcaggcctcttcgagcaaaacactgttccacctgtgatcgttgtgtggaacaatttgatcaccattgtccttgggtatccaattgcatcggcaagaagaacaaatgggatttctttgtttttcttgttcttgaagttctggcaatgttggttactggtggagtttgtcttacaagagtgttaactgatccacttgcacctcattcatttggggcatggattcagtatgttgctaacaatcacattggtgcaatatcatttctaatagccgattttttcctcttctttggtgtgtttactttgacagttgtgcaggctagtcagatatcacgcaatattacaacaaatgaaatggcaaatgcaatgcggtatagttacctcagaggtccaggtggtagatttagaaacccatatgatcatggtatcaagaagaactgttctgatttcttgatcaatggttacaacgaagacgttgagtgcattgaagaattaggtaactcagaggagggtataggaatgatgcatatggcaagaagctcgaacttggcaaatggagactcgcacacccatactgaatatgcaagaggcaatggaaatggccatcatgctattaatgtggattccaattccaacagtaccaactccaaaatacatcatggtcatattaatggtcatgttcattcttcgcattgtagccataataaccatggcaaaaccagaaatgacaacgttcccttgggcttgggtcttggccttggacggaacagatctgttacagcctcatcatgatatttacatacatgtctggtgtttgaacctaacctgtaatgtaacataggcacacatctgggttggtttacgttaattcaatttattgtggctcttttctaccacacccccatgtgcaattttgtgctgttacatttagtcgtcctcttatcgttttttctttctactttttgtaactaatttaagttgcattttaaagatgataagccttgaaatct

SEQ ID NO: 9531 - DNA, 620 bp, Glycine max
  Clone ID: 700849826_FLI
cgaaggcgaagattgtggatatttgtgagaaaggggattcatacattagagagtaagcttataatattcataaatgaaggagcattgcctgttcttaacatatattgatatggcatgccatatagatggattcatcactgcggtagctcacacccatgttcttcaggaaggtcctgttgctgccacaaatactgctgctgaggtggccttgaggcttgtcaggccgggaaagaaggtaatcaattgtaacaatttttttttactggatctgcatttatataatacaagttgatttggattttactacatgttgcctttcttgatttatttcattggttaataggtgtaaggtcatacactattataagcaattcagcttagtaaaatcggagagaaattaggttgcttcatgtgtatcgttttctttgcctaaacacatgccttgtggattttgatctctaaatgatgaaaactatcttgggctacggataaactccgatgaagctttattgtcatagttacactgatagaggtcattcatgtttcttcttgtgttgtctatcacattgctcttttttggaactcctcttgtctataatgtgtatttctcaccttatgct

SEQ ID NO: 9532 - DNA, 1473 bp, Glycine max
  Clone ID: 700849916_FLI
ccttgctctatactacacagtacacacactagaagaataatggcttccatcctccactactttttagccctctctctttcttgctcttttcttttcttcttatccgactcagtcacccctacaaaaccaataaaccttgttgttctacccgttcaaaatgatggttccacagggctccattgggccaacctccaaaaaagaacccctctaatgcaagtaccagtcctggtggacctcaatggaaatcacttgtgagttaactgtgagcagcagtactcatccaaaacgtaccaagcacccttctgccactccacccaatgctctagagccaacacccaccaatgcctcagttgccccgcggcatcaaggccagggtgccacaaaaacacgtgtggcctcatgtccactaatcccatcacccaacaaaccggtttaggtgaactaggagaagacgttcttgcaatccacgctacacaagggtcgacccaacaacttggcccattggtcacagtcccacaattcctcttttcttgtgcaccttccttccttgttcaaaagggtcttcctagaaacactcaaggtgtggctgggttaggccatgcaccaatttctcttccaaaccaactcgcttcccactttggcctacaacgccaattcaccacttgcctttctcgctaccctacttcaaagggtgctataatattcggggatgcacctaacaacatgcgacagtttcaaaaccaagatattttccacgatttggccttcaccccattaaccatcaccctgcagggagagtacaacgtgagagtcaactcaataagaatcaaccagcacagtgtgttcccactgaacaagatatcatccaccatcgtagggtcgacctctggaggaaccatgattagcacctcaactcctcacatggttctccagcaatccgtgtaccaggctttcactcaggtgtttgctcagcagctaccaaagcaagcacaggtgaaatctgtggcaccatttgggttatgcttcaactccaacaagatcaatgcatatcctagcgtggaccttgtgatggacaagcccaatggtcctgtttggagaatctctggtgaggacttgatggtgcaggcacaacctggggtcacgtgtttgggtgttatgaatggaggaatgcaacctagagctgaaattaccttaggggcacgtcagttggaagagaacctggtggtgttcgatcttgcaaggtcaagggttgggtttagcacctcatcactgcactcgcatggagtcaaatgtgctgacctcttcaactttgccaatgcatgatgagccaagatcgcgagactttttataatatgcttatttataattaagcaagcatctactacatgttatggttaataaaagtaataatgtaagaataaagactttgaactaaataataatatgaacgattctctttcgttgttcaatgag

SEQ ID NO: 9533 - DNA, 1479 bp, Glycine max; identical to SEQ ID NO: 9513
  Clone ID: 700849923_FLI

SEQ ID NO: 9534 - DNA, 909 bp, Glycine max
  Clone ID: 700849930_FLI
ccaccccgcgcgctaccgcactcagccttgcaaggatggcaccagttgtcgccgccgcgtgtgtttcttcgcgcacacgccggatcaacttagggttttgccacagcagagtccgcgcagtgctgattcctacgacgggtctcctttgaggcacgcgattgagtcgtcgtgtgcaaagtcgcatccgtttgtggcttctcccggttcggcctcgtcgccggtggagtctccgccgatgtcgccgatgactgtgagtgttaatgagatggtggcttcgctaaggaacttgcaactggggaaggtgaagtccttgccttcttcgtggaatgttatggggtcttccgggttcgggtctcctagaggacccatgatccgacccggatttttcagccttccgacaacgccgacccaggctccgactcgcggtggggtcaactactttgaccagtgggatcagagttgttgcgaggaggagcctgttatggagagggtggaatctggacgaagcataagggcgaggatgtttgaaaaactgagcaaagagaatcatctggacgggtcgggttccgaatcgggtcaaatcggggttcccgatgttgggtgggtttcggagcttgtcagtcgctgatttcattttgttgcacttccctcggtgtgtatagaatgcgggggagaagaaaagtaagatttattttggaagaaggagcatcaactcaacttgtggtttctgtaaatagcttattctcaaggtaaggtatggtatgggtgaagaagttaattaagagaaagagtagaatctttttttggggttattttcttggtcgatcaagaagtgatttgcaagaatcaggatcgtaagcttttgtataggtagctgcggatgatgaaattatattattcccacgtgtt

SEQ ID NO: 9535 - DNA, 608 bp, Glycine max
  Clone ID: 700849946_FLI
caatagagagaaagagagagaaatggctttcacgatttccagatctcaatctgctttgacagatagagagaaggagaatcttgacaacttagttgacaaggagtgtgcaacaacagagggtatgatatcgagccagctcaagttgaagtcttctttgtcatccaaagcgtcttctcatcaaagcatggacaaacatgcaatccttcgacgtatcaggcaacgcaggtttaataacaaagccaaaaccgctctggaagctctcataggcacctcagaagccaacaataccggcactgcccaagaacagaagtggcttcaactgggtgactctttctcatctccttaactggaaacacaatctccccccagtttgcaacccatctataaattccctctttagtttccttcacccaacaaagtcatcttttccatacgcttgcatggctaggaaaggaaatccaacccgatctttatcggcatgcttaagaaatcccactatgtatctattaactgtagtagaccttgtcggtttgctactttaggtgtgaccttgtgaataccacgttcaattgttatataaatatattatattatgatgttatatatct

SEQ ID NO: 9536 - DNA, 1275 bp, Glycine max
  Clone ID: 700849962_FLI
aatgataaattattctttttatatattttctttcttacataaaaagtatacaattttatatattatagaaatacaatttgtcaataatatgagaggtagggctgggcagctatcaactaccacaactaatctgaccaatctatcgatccatccacccgttttgtcaagcttatgccctcttttttccttttcaactgtgtttgatatctccccatcacagtgaaatgtatatatataaacttctttccacacacctctttgacaaattaaccatccaatccctcatttcttccttcaactctaaaaatcacaacactaaaaaatgaaccatgttgagcatatcgcttatgacatggtcatgatcactctttccatgtctctcatcgtcctcgccatcatcctcttccttgcttgcaagaagaagcccgttgaatccgaagaaacactccccgtgaagctttgtgctcgtgcacaccccttgatggaaatcgatgctgccaccgatggcttcaaccccaggagaatcattggccagggtcgcttaggaaccgtgtatgcagggacactggacaaagaaaaagaacaacttgtagccttgaagcgtattcacccttttcttgtgttgagcaatgcagggtttggtttctcatccgtgttgaagtggctctccttggctcaacaccccaacgtggttccaatcatagggttctcagaagcacccggtgagagagttattgtgatggagtttgtgcacatggcaagcttggacttctacttgcaccaaaaccaagatggggcttcacttttggattggaacaagaggttcaggattgcagctggagtagcaagagggcttcaatacctgcatgaagtggtggcaccaaacatagtacatgggtgtgtcaagtcctctaatattctcattgatgttaacttttgtgctaggatttgtgattatgggcttaactttttggcacctgtggaaaagagggggatagtggggtatgtggatgatgagtattggagtgaaagaaggggtggtgtagctaccaaggaaagtgatgtttatgggttaggggtggttttgttggagcttttaagtgggaaagggtgtgagggagggttgttggtgaagtgggctttgcctttgataagagaaaccagtttcagtgaacttttggatcctaggttggttattccttctgacatgaagcctttggttagattagccaaagttgtttcagcttgtgttggtaattcacggaaatgtaggcc

SEQ ID NO: 9537 - DNA, 680 bp, Glycine max
  Clone ID: 700850020_FLI
cgtcgagtagataataaagagcaaagacgggaggagcaagggctatgccttcgttactatggcttccggggaagaggctcaggctgctgttgataaatttgactcttatgaattatcaggacggataataagggtagaacttgcaaagagattcaaaaaacctccttctcctccacctcctccaggtccccgtcctggagagacacgtcatgtaatttatgcatccaaccttgcatggaaagcaagatctacccatctcagacaactcttcgctgagaatttcaaaacaccatcttcagccagggttgtctttgacagcccttctggacgatctgctgggtacggatttgtttcttttcttaccaaggaggatgcagaggctgccatttctactgtggatgggaaggagttaatgggacgaccgcttcgcctaaaattcagtgaaaagaaagataaagctggaagggaaaaagatgaagaccaagataaagatgctggaagtgaagaagatgaagacgaaggttctgatgctcgaccggaagaatcataaattttagatacacatttactgatttttggtcgtggtatgggattgagtggaaacctctacgagctagaagtatacctcatgtatgaagaactatgatggatggttttttgcattcacaatatttttcact

SEQ ID NO: 9538 - DNA, 1478 bp, Glycine max
  Clone ID: 700850069_FLI
gaccaagtcaaccaccaccacgaagtcctccctcccctccgatctatgccgccacttctccctcccggagatcaagtccgccaccaacaacttcgacgacgtcttcatcgtcggcgtcggcggattcggccacgtgtacaaaggctacatcgacaacggctccacccccgtcgccatcaagcgcctcaagccgggttcacagcaaggcgcgcacgagttcatgaacgagatcgagatgctctcgcagctccgccacctccacctcgtatctctcataggtttttgtttttgtctatgaatgttaatttgttcgttagaaatatccgtttttttttttttaccgtaacctccacctcgtgtccttcgtaggttattgcaacgagaacaacgagatgatcctcgtctacgacttcatggcgcgtggaaccctacgcgatcatctatacaacaccgacaacccccctctgacgtggaagcagcgcttgcagatctgcatcggcgccgcgcgtggacttcattacctccacaccggcgcgaagcacacgatcatccaccgcgacgtgaaaactaccaacattttgttggatgataagtgggtggccaaggtttcggacttcgggctttcgagaatcgggcccacgggcaacgccaaggcccacgtcagcaccgttgtgaaaggcagcattgggtatttggacccggagtattataaacgacagcgtttaactgagaaatctgacgtgtattcctttggagtggtgctgtttgagttactctgcgctcgtccgcctctgatcagaactgcggagaagaaacaggtgtcgcttgctgattgggcgaggcactgctgccaaaatgggaccataggccagattgtggaccccactttaaaggggaggatggcgccagagtgtttgaggaaattctgcgaggttgcggtgagttgtttgttggacgacggaacgctgaggccgtcgatgaacgacgtcgtttggatgctggagtttgcgttgcagttgcaggagagtgctgagcagcgtgaaaatactaatattgttgataatgaaattaatgagagaagagaggaggaggctagtgatgatttgtttagtactggaaccagtgtgggccaggtttcggattttaacaagagtagcggtgtggtgagtgtgagtactgatagcgaagagcttagtagtagctacaaagagagtgataagttgatgtctgggactgttttctctgagattgtggatccaaagccacgttgagagaatcaaattgatctcaagaatgaagacctaatactactagggctagcttgaggctcgcaagttatgtgtttagtttcataatatatagttgtaatattacaatgtctgtgtacagaaatcaagttgcttctatctcttgggaatctagacaagtgcaaaggttaattggttggtaagtcataaatttcaatcatttttgtaacc

SEQ ID NO: 9539 - DNA, 1090 bp, Glycine max
  Clone ID: 700850117_FLI
ggagaagcaagctgtgacatgaaattggttctggagaaattggatcatgccatgcctatggacatggtcattgtgggtgatgagagaggctcttttgactttgtacacaaaagtgggaatgattctagaatcatttgtagtaaaaaaggaaacatagaagctgttgctcttgtatttgctcaggacagggacaggtctttgggaactattaggtttcatgttgcattgtcaaatggtgtttccactgtgggtcccagatacaaggcagcctcagttaaatcaaacagtgctgattgttcaacatggctaactgctaggagggaagggcaacaggaaaatcttgacggtcagagtattctacttgatatcaacaatttgctggacaatcatattgagtctcctgatttgtacattggggtaattaaacataggaaattatccactggagcagagaagccaatgccaagaacttgtattgcatatcatggagttgtgggaggtgatgaagagtatctatatgttgatggcattggcataaaaacaggagatatctttcagttctactattcagatcctaatactgccttagcttcattaaccaaggtccatgatgccctcaagagtattcatctggaaaaaaattccaagagttccaagggtgatggagacaacgctaccaatgtttttgggggtattgtttttgcttgttacggccgtggtgaatccttctttggacgtcacaatgttgacagctctcctttcctagagaattttccaggagtgccagtgtctggaatattttgtggtggagaaatggtgcgtccttgtaccactgtgattggtcaatgtgaaggagcaagccccattagttgctgtctgcatgtttacagcactgtctacttagcaatgtcatatactcctccctctgtggaagattagatgccgttcatattttttttcttttcaaaatgtaaatttcttattaagtcggatgcctttttttaccctctgccgtgcacatggatctgagtatcttttggtgtacgagatattttatagtatttgatgattatggaatttttgttgtgct

SEQ ID NO: 9540 - DNA, 695 bp, Glycine max
  Clone ID: 700850128_FLI
cacagataacagtggaacaatcactcttgaagagttgaaagctggtctgccaaaactgggtactaaggtttctgagtctgaagtaaggcagttgatggaagcggctgatgtagacggaaatgggaccattgattacattgaatttataacagctaccatgcacatgaatagaatggaaagagaggaccacctatataaagcttttgaatattttgacaaggatagaagcgggtacatcacaatggaagagttggaatctacccttaaaaaatataatatgggtgatgagaaaacaataaaggaaatcattgtggaagtcgatacagacaatgatggaagaattaattatgatgagtttgtagccatgatgaggaaaggcaaaccagatttagtaaccaacagacgtcgcaaataattacgttgatcataaattgcctgtctaactgggttcgtagacagacaggaggaggctcaggctctacacgtttttgtgatacggaatacgttgcattcaattcggcactctttactcacatgttgtttttgagagctgttctataacaaagtatttctgcttctttgcctgctagtttgcgggtctcgtgggacaatttactctcgagtttgtaattttttaacatagggaattaaattttaacttggctctttagtaaatgattttttcccttccatat

SEQ ID NO: 9541 - DNA, 1014 bp, Glycine max
  Clone ID: 700850145_FLI
gtagctactgaaggagagtctaacactccaatttcaagaaagattgatgaagaaataataactagtactagatggtggcaaaaagtgtttagtccaccgcctagaggtgaggactatactatacttcaagcactattcagcttagacatgatactgctattcttcgctggcacatgtggtgttggtggaaccttgaccgcaattgataaccttggtcagattggaacatcgctagggtacccaaaggctagcataagcacgtttgtgtcgttagtgagcatttggaattatatgggaagggttttttctgggtttgtttcagaacactttctaaaaaagtacaagttccctcgaccactcatgctcacgctaaccctcctcttatcctgtgtcggtcaccttttgatagccttcgatgtggccaacggactctacgtggcctcggtgatcattggcttctgctttggcgcgcaatggcccctggtcttcgccataatctcggagctctttggactcaagtactattcaacgttgtacaactttggcggtgcagcgagcccaattgggctttatgtgcttaacgtcagggtaacggggtacttgtatgacaaagaagctctgaagcaattggcagccacggggatctctagaaagattgacaccgaattgacttgtgttgggtccagttgcttcaaattgtccttcattattatcactgcagccaccttttttggcgccttaatttcactgattttggtggctaggacaattaagttctacaaaggggatatatacaagaggtaccgggagcaagccgaggaagaagccaccgctgtcactgagatggctgtggtccaaaatcgcgccgagaaattagaagaaaccaaagttattggagcgtaattggtatagggtatagatagtcatcaattcctcctcagccactcccacatcgactggaaaccaaatcaaagttgttgttcatgatatatgtagaaaaataaaatagaaaat

SEQ ID NO: 9542 - DNA, 1677 bp, Glycine max
  Clone ID: 700850156_FLI
cgctaatatctcaaaccaggcaaacttcatgcgtttgatgttcgacaccatgaacgaaacagcagatgaagcagctattggtgccaagaaatacgccacgaagcaagcaaacatatctgggtttcagaccctctattgtctggttcagtgcacgccggacttgtcaacccagggttgcagaagttgtcttagtgatgccatagggctccttccatggtgttgtgaaggaaaacaaggagggagaattctaaatcccagctgtaatgttaggtatgatttgtaccctttctaccgcaccaacgtctctgcaccaccagcgtctgtccctccaaccgattcttctaattcgggaggaggaggtagtgaaatttcaccggggacaattgttgcaattgtggttccaattacagtggctgtgctgctatttattgttggaatttggctcttaagtaaaagagcagcaaagaagcgtaactctgcgcaagaccccaaaactgagactgagatcagtgccgtggaatccttgagatttgatttcagtacaattgaagcagccacagataaattctctgatgctaacaagctaggcgaaggtggatttggtgaggtttacaagggcttgcttcctagcggccaagaagtagctgtcaagagactctctaaaaactctggacaaggtggaacagaatttaagaatgaagtagaggttgttgcaaagcttcaacacaaaaatttggtgaggcttctaggattttgcttggaaggagaagaaaagatacttgtttacgaatttgtagccaacaaaagccttgactatattctttttgatcctgagaagcaaaaatcattggattggacaaggcgatacaaaattgttgaaggaattgctcgaggcattcaatatcttcatgaagattccaggcttaagattatacatcgtgaccttaaagctagcaatgtcttgttagatggagatatgaatccaaaaatctcggattttggcatggcaagaatatttggagtggatcaaactcaagcaaataccaacaggattgtagggacatatggttacatgtctccagagtatgcaatgcatggagaatactctgctaagtctgatgtatacagttttggggtcctcattttggagattataagtggcaagaggaacagctctttctatgaaacagatgttgctgaggatctgttgagctatgcctggaaactttggaaggatgaagctcctttggagttgatggaccaatcattaagagaatcatatactcgaaatgaagttatcagatgcatccatatcggtttactgtgtgtccaagaagatccaatagatagacctacaatggcatcagtagttcttatgcttgatagttactctgttactctacaggtacctaatcagcccgcattctatataaacagtagaactgaaccaaacatgccgaaggggcttaaaattgatcagtctactaccaattcaacatcaaagtctgtcaatgatatgtcggttagtgaagtagatcctcgataagtctgaaattgtgaggaggttttagagaagatatgtatccatctacattctaaatttttgttagccgtggcttcttatgaccgaattacaattgctgataacattttatgattgtttatttttcaacgagg

SEQ ID NO: 9543 - DNA, 418 bp, Glycine max
  Clone ID: 700850269_FLI
cttcttccatcgcagacaggttcctgacagttgagagcttattatgctagctttgtggactgtaaattgggttatgaattgacaccattgctctgaagccagtgaagttatatatcaaatagcatgaattcacctttacaactttgtatatccctgtaaggtgaattttggcatcatttttaacaagtatacactcgaccaaatgtccaaatccatgggagatgggaatatgcaagtatacacacatcaatacctcttcacaggtgtcacaattctttaactggtgccacctttacaacatgcatgttggtatatgaatttgttttacactgacgattatttgttacatgtgatttctgcaaatttgtgtacagtttgattttacgatatatacaacgactctactatgtgttactcc

SEQ ID NO: 9544 - DNA, 1819 bp, Glycine max
  Clone ID: 700850275_FLI
aaagatgaaaggtgctggaaacgtgagcagtaaggatatgattttcagagctgataagattgatctcaagagtttggatgcacagctggaaaagcacttgagcagggtttggtcgaggagcattgagactaaacggcctagagaagagtgggagattgatttggccaaattggatctgcgatatgttgtggctcatggggcatatggtactgtatacaggggtacatatgatacccaagacgttgcagtgaaagtgttggactggggtgaggatggtgtagctactgctgctgaaactgctgctttgcgggcatcttttaggcaggaggttgctgtctggcaaaaacttgaccatccaaatgtgacaaaatttgttggagcttcaatgggtacttcaaatcttaagattccgccaaaaaaccctatgaatgccgacgaagagtcccttccttctagggcatgctgtgttattgttgagtttgtctctggtgggacactaaagcaatatttgtttaaaagtaggaggaggaaacttgcttataagattgtgattcagctggctttggaccttgctagggggtatgtcccatttttaacatctctacaattaccaactgcatatcttctactaatataaataatttgttttccccaatatgtgcagtcttaattatctacattcaaagaagattgttcaccgagacgttaagacagagaatatgttactagatactagtcggaatctaaaaatagctgattttggagttgctcgggttgaagctatgaatccaagtgacatgactggtgaaactggaaccctaggatatatggctccagaggtaagtgtttccatgggatcgcctccctattctattagtcctttattatttcaaatacaacttgcaacctttcaagttactttggtataatgggaatacaaaggtttggacctgtgacctcataaaaattatgtaaacccctcagcactagcccaattctagtggcttatggtgctatttctattactatttgtgtgcatacattcagggttgttctgaaacagtcacttccagttattaactttaatcttaagatcacgccacatgtaggttctggatggaaaaccttacaacaggagatgtgatgtctatagctttggcatttgcttgtgggaaatttattgctgtgatatgccttatccagatctaagctttgctgacgtgtcatctgcagttgttcgccaggtcagttcacgcgacaaactattcatatatggaaacacacttccatatcatgtttgcctatatgttgcccatgatacatacatgaattttgtgttcttgcacagaatttacgaccagatattccgagatgttgtccaagcgccttggcaaatatcatgcggaaatgctgggatgcaaatccaaacaagcgtccagaaatggaagaggtggtgaggatgctggaagcacttgatactagcaaaggtggtggtatgatacctgaagatcagagttcaggttgcttttgttttgccccaacccgtggtccctaatccgtgaacccaacataacatcattttgttgcgtgttcaagagattatatcaagcactgcaactggcaattgatattttatggttttgccagttcacagctcaatttcctttccttatggccagaatattgtgaaaactaaggaagggaattgtattttattttttaaatttttggctaaaggagcgatttcattgcttcttacatattgtatctagtactgaaaactggtttcttttgagcatgaaaatgggttattaattat

SEQ ID NO: 9545 - DNA, 1162 bp, Glycine max
  Clone ID: 700850325_FLI
gacacgccagaaaacatggctatatggacagggatgataacagagtggaatctcacagaagtttcaagtgcaacagattttcagcatcacacagtcagaggcatgaacaggatttaaggactacagaagcaattgattgtagtcagcaggcgatgcttatgacaactccagtagatgctgaaacctgggaaggctgtcctgtgcagtctctagatggggttgaaatcaaaagagctaaaaaacgcaagcgcaaaagccgatgggatcaaccagccgatacaaactcgcattctgatgctgttatgagctctatcggtgaaagccagaacattcccgaggatggtccaccagggttttcatgtccagtaggttcattaaatgcttccctaaactctggtaatcttgccttgcaaaatgcaagccgttctggatgcccctctgatatagttattggtcatccaaaagagaaatttaactctcacttgcctgtctcatatggaatgccatggtctgcccagcaatatggaacacctcatgctgaatttcctgagtgttgggtcactgcacctggcatgcctttcaacccatttcctccactacccccgtatccacgggacaacaaagactgtcaaccttctaatacaactaatgctatgataattgatcagcctgctgaagttaagcagggggataccagtggtatggttaattgttgctcagatgatatgattcccagcacaactggtgttaactctgaagactccaacctactgtttgaggacgataaacacataagtaaacgattgaagggtgattccaatgatttgggaacgaggtactttagacagcagaaaatacaccgaccatggttcaagaggaatgcatggaaatgtgatgagaacaactcttgtggtgatatgtgcagtatagatgtaggagatgtaccaaaagagtcaaaagttacttgtgacgcggaggatgcaatctgtagagaggagtaaggtggcgatattatttattagcatgcacagcagcaatatcaatattgttcacaggaaaaagaaatatttttgttttcttttttcttccttatacattaatgtactgtcaattcatttgttcctgaatctattattcaatgaaaatatcattcaatttcagc

SEQ ID NO: 9546 - DNA, 1058 bp, Glycine max
  Clone ID: 700850359_FLI
tgtgtgtttgtcacgagacccatagtgctgccaaattatagtaactctctttctctatctgaagaagaagaagttctgaagaagcatgtgtggaggtgctatcatctcagacttcattggtgtgaagcgtggccgcaacctcgccgcgcaggaactgtggtccgagcttgaccctttctctgacctccttggcttcgataccaccaccaccaccaccaaccaaccaccccttccagacaaaaaagtggtgtcatcatgtgagaagaagaagaagaaaagtgtgagtgcagaaaagaagagtggtgggcgagctcggaagaacgtgtacagaggaatcaggcaaaggccgtggggcaagtgggccgcggaaataagggacccacataagggcgtccgcgtctggctcggcaccttccccaccgccgaggaagccgcccgagcctacgacgacgccgccaagcgcatccgcggcgacaaggccaagctcaacttcccggccaccgctccgccaccctccaaaaaacaacgctgcctcagccctgacaccaccaccgaacaaagcagcagctcacaatccaccactggatccaccggatcgccgccttccgccgccttccacggcggaggagatgaactcgacctgaaacaacttgaacggtttctagggttggacaacatgggtgctgagtgggacaacatggatgacctgtggatgctggacgacgtcgttgtgcccaaccgtcacttaatttactagaagggagataattaattaattaataaatggcgttttcttaagttatagttttataaaactatgttggtgtatgtgttcttagttttctgttttgtcttgtcctctcgctttggtaatttctgttttgtacggtcgaatgatttcaaaattatgtgcaacgtatcatgagagggatgattatatgttatgattatgattataaataaaggccaattagggtgtgttagcgtttgggtcgtgcatgtttatatgtagtttatgcgttgtatataatatatttggcatgacattatttggttct

SEQ ID NO: 9547 - DNA, 1643 bp, Glycine max
  Clone ID: 700850388_FLI
agaaggcgacgctcgaaagcgcggcgaggcggctagggggaggaaaagaagccatgaagcagttgctgaagctgattcttgagtgggttcaaaccagccatcttcagaataagcgccgaaaggagaataatggtagtagtattagcagtgtacttcaggcacagtttcaggatcctagtggccagaacacacaaagtggttcatttgcacctgaatcaaacacttgtttcaacaaccaaacaccatggttgagttctcaaacttttgcaacagatcaggctcctctcatggtgcctccccagcaatttccacaacccatggttgggtatgtgggtgacccttacactagtggtgctgcttcaaataacatatcagccactcataaccataacaacagcaacccttatcaacctggtgcagaacaataccacatgttggagtcagcacattcatggccacattctctgttcaatgttgcttctaactatagtcagtcttttggggacaataatggtcttaacccacatgggggtttcggtggtggaggctatggcaataaccagtacccttatcagttttttcatggccctggtgataggttgatgaggttggggccctccgcgacgaaggaagcgaggaagaagagaatggcaaggcaaagaaggtttctgtctcatcacaggcatcatagtggtaatcaccagaatcaagggtctgaccctcatgcaagattggggggtgataattgcaacactgctttggctgcacctcatcacgcaaatccttcagccaattggatgtactggcaggctatgattggcggcgcggcaggtcctttggctccggtgattccggccgagccgccggtggtacaaccggtcgtggaccggtcggccatgcagacacagaattgtcatcagaatcgagttgcatcagataggagacagggttggaagcctgagaagaacttgaggttccttctgcagaaggtgttgaaacaaagcgatgtgggaagtttggggagaatagttttgccaaaaaaagaggcagaaacccatttgccagagctggaggcaagagatggaatttccataacaatggaagacattggaacttcacgtgtttggaacatgcgctatagatactggccgaacaacaaaagcagaatgtatttgctcgagaacactggtgactttgtgagagccaatggactccaagagggagatttcatagtgatatactcagatgtgaagtgtggcaaatatatgataagaggagtgaaagtgaggcaacaaggtgtgaaaccagagaccaagaaagcaggaaaatcgcagaaaaaccagcatgggacagggactaatgcatcaagtacagctggtactgctgctaataatggcacgtcatcgtcaccgaaaaccaaatctgaaaaaagtagtaaattaatataatatatagtatatgtatgtacaatatatattatggcatatataataaaataagagactctcaagtctgaacacggtgctcacatataatgttgtgaagtttgagcatgccctgcaatggaggctgtcaaggatttgtataacagtattttgggtaatatttcttttagtagtttattttgcgattgttattatgtg

SEQ ID NO: 9548 - DNA, 1379 bp, Glycine max
  Clone ID: 700850465_FLI
ggatgtcccatctcaatacctggctttggcttctctttattattccttccttccttcttcgcatcaacaaaccctaacatagcatcctaagatacagagactatcaccatcgtcctgctcatttggcacatgtttctccccctgaatactttgtccgcctggagaacacaacttacaaagacgatctatatttaaggaagaggacaaggatgcgtcggtggctttgttgtacttgtcaggtggaagagtcttacccatcaaatgaaaatgaacacctgaaaagcccaaggaattatggagatggcaaccaaaaaggctcaaaggtgtcagctcctgtcaaacctgaaacacaaaaggcacctccacctattgaagctccagccttgtctttagatgagctgaaggagaagactgacaactttggttcaaaggcattaataggtgaaggatcgtatggaagggtgtattatgcaaccttaaacaatgggaaagcagtggctgtgaaaaagcttgatgtttcatctgaacccgaatcaaataatgagtttttgacccaggtttccatggtctcaagattgaaggatgacaattttgttgagttgcatggttactgtgttgaaggaaatcttcgtgtacttgcatatgagtttgctactatgggctctcttcatgacatattgcacggtagaaagggagttcaaggtgctcaacctgggccaactcttgattggatacagcgagttagaattgcagttgatgcagcaaggggattggaatatttacatgagaaagttcaaccgccgattatacacagagatatccgatcaagtaatgtgctaatatttgaagattacaaggccaagatagctgactttaacctttctaatcaggcccctgacatggctgcacgtcttcattcaactcgtgtattgggaacttttggttatcatgctccagaatatgcaatgactgggcagttgactcaaaaaaagtgatgtctatagttttggtgttgttcttcttgagcttcttacaggaagaaaacctgttgaccataccatgcctagaggacagcagagtcttgtcacatgggctactccaagattaagtgaagataaagtgaaacagtgcgttgacccaaaactgaagggagaatacccccccaaaggagttgctaagcttggagctgttgcggcactgtgcgtgcagtatgaagctgagtttaggccaaatatgagcattgttgttaaagcactccaaccacttctgaagtctcctgctcctgctcctgctcctgttccagaaagttgaagcaaataaattcgctttggtttctgcatcttctgcacagttcgattcagttatctccagatttcacc

SEQ ID NO: 9549 - DNA, 1038 bp, Glycine max
  Clone ID: 700850469_FLI
ggtatggtcagccgcatagagcaccagatttgcagaaagaagctatatatggattaacagaggttttaagggaggaaataaagaatgcacgtctagttgctaatcctggttgttatccaacttctgttcaacttcctcttgtcccattgataaaggctagtcttattgagcttaaaaatattatcattgatgctaaatctggtgtgagtggagcagggcgcagtgccaaagaaaatttattgttcactgaagtaactgaaggtctcaattcttatggtgttaccctacatcgccatgttcctgaaattgagcagggacttgctgatgcttcaggttcaaaagtaactgttagttttacaccacatctaattccaatgagccgtggtatgcaatcaactatttatgtggaaatggctccaggagtgagaattgaggacctgtaccagcaactgaagctctcatatgagaatgaagaatttgtttttgtgttggaaaatggagtcattcctcgaactcacagcgttaaagggactaattactgtttaatcaatgtttttccagaccgaattcctggaagagcaatcattatatctgttattgataatctagtgaagggagcttcaggtcaagctttacaaaaccttaatttgttaatgggatttccagaaaatttgggacttcattacctgcctctttttccatagagtagttgtcttgtccaactagagctccaattctgcagtcacagttccaccaaaatacttgatggagcagaggaaatattttcaagttatgtattttcgttctctagattgtaatgtgagattcttcaagaatttagaagggaattgattatggcattggcagggatactatagcaatttctgtcttttttgtcctttgttttgatctgtaatgttagaaatcactgaaggtggtggcgtgtagttttccaagtttgggttttggtttatttgtaatgccaatattttagtggactatgaaatcaccatctcaagtttttgagatttttgtttc

SEQ ID NO: 9550 - DNA, 1641 bp, Glycine max
  Clone ID: 700850490_FLI
gcaattggccaaccttgccaatcttcttaccttcaatttatctcacaacaaccttcagggtgagctgccggctggtggttttttcaacaccatttcgccttcctctgtttctggcaatccatctctttgtggcgctgcagtaaacaaatcatgccctgctgtcctcccaaagcctattgttctaaatcccaacacctctactgacactggtccgggttcattgcctccaaatttgggtcataaaagaatcattctcagcatttctgcactcattgccattggtgcagctgctgtcattgtaattggtgttattagcatcactgttctcaatctccgtgttcgctcctctacacctcgtgatgcagctgccctcacattttctgcaggggacgaattcagccgttccccgactacagatgctaactctggcaagcttgtcatgttttcgggtgagcctgatttcagttctggtgcgcatgctttgcttaataaggattgtgagcttgggcgtggaggatttggagcagtgtaccaaactgttcttagagatggacattcagttgctataaagaagctcactgtgtcaagccttgtcaagtctcaagaagattttgaaagagaagtgaagaaattaggaaaaatcagacaccaaaacctcgtggaactcgagggttattattggactacatcgctgcagctgctcatatacgagtatgtctccggtggtagtctgtataagcatctccatgaaggatctggtgggaacttcctctcatggaatgagaggtttaatgtgattctcggaacagcgaaggccttggcacacttgcaccattccaacattattcactataacattaagtcaaccaatgtccttcttgatagttacggtgaaccaaaagtaggggactttggcctagcaagactgttgccaatgcttgatcgatacgttttgagcagcaaaattcagagcgcactcggctacatggcgccagagtttgcctgcaagacggtgaaaatcaccgagaaatgcgatgtatatgggtttggtgtcttggtcttggagatcgtcacagggaagaggccagtcgaatacatggaggatgatgtggtggtactatgcgacatggtgagaggggctttggaagaaggcagggtggaggagtgcattgatgagaggctccaagggaagttcccagcagaagaagctattcctgtcatgaaactaggcttaatatgtacttctcaagtgccatctaacaggcctgacatgggagaggtagttaacatattggagctgataagatgtccctcggaaggacaagaagaattggcatgaattaacttgcgattttcttaattaggaggatagacaatgggatgtccggggaagaagaatccggctttatttattagaaaagcgaggaattattttgttgcaaaatgtttactttttcattgtaattttcttccttgttagttagtctctagttgttgtttgtttttaagatttctcttatgttatgctactacacctaggatgccggattccttttcaccgggtttcgttttggaccccccttgaaaattgttgctcaaatactgatctttcatgttctagtttgtttgttttggtgtcgc

SEQ ID NO: 9551 - DNA, 1090 bp, Glycine max
  Clone ID: 700850494_FLI
agtggatgatgctggattggaagccgcggcgccccgacatgctcattgacccctttgggattgggaagatcgtgcaggatgggcttgtgttcaggcagaacttccccattaggtcctatgagattggcgccgataaaaccgcgtctatcgagactttaatgaatcatttgcaggagactgcacttaatcatgttaagactgctgggcttcttggtgatggatttggttccacgcctgaaatgtgcaaaaagaacctgatatgggtggtgactaagatgcaggttgtggttgataaatatcccacatggggtgatgttgttcaagtagacacttgggtatctgcatcagggaagaatggtatgtgtcgtgattggcttgtgcgtgacgcgaaatctggtgaaatcttgacaagagcctccagtgtttgggtcatgatgaataaagtgacaagaagactgtctaaaattcccgaagaagtcagggcagagataagctcttattttgtggactctgctccagttgtgccagaggataacagaaaactaaccaaacttgatgattccgctaatttcattcgcactggtttaagtcccagatggaatgatctagatgtgaatcagcatgttaacaatgtgaagtatgttgggtggattctggagagtgctccacagccacttttggagagccatgagctgtgtgccatgacattggagtacaggagggagtgtggcaggaacagtgtgctggattccctctctgatctctctggtgctgatgtaggaaacttggcagatggtggattttttgagtgcaagcacttgcttcgacttgatgatggtgctgagattgtgaggggtaggactcaatggaggcccaaacctttaagcagcaactttggtcatgttttgagtcaggttccagttccagcagaaagcacctgaatcttatcttattgattggcatcactggaggaggagtggcataaattcatagagagctttgcttgtttttatcaaatctacgtatcttaaaatatatataaaagaaagtgtgttactttggctaaaaaaggggaggggaagtagaaagt

SEQ ID NO: 9552 - DNA, 2254 bp, Glycine max
  Clone ID: 700850709_FLI
gttcaaaaggatgaggcgattgaaaattctgcgttccgcgttccgagtgatggaggaaagttgggacgcaatatctggagttctcgaaattcagagcacttctatggatgcagcaattccagcaacaagtttcaaaaagctcaagtgattacacagccgaatcggtatttgatgatcacaacaagtggaggcttgaatcaacaaagaactgggattacagatgctgttgttgctgcgcgaattttgaatgctactcttgtagttccaaaattggatcaacgatctttctggaaagactctagtaacttctcagagatctttgatgttgattggtttatatcatttctgtcaaaagatgtcaaaattatcaagcaacttcctactaagggtagtaggaaagcattatctgcatacaatatgcgggttccaaggaagtgtaatgaaagatgttatataaatcgcatattacctgtactccttaaaaaacatgctgttcagctcaacaagtttgactacaggcttgcaaacaggttggataccggaatatcagaagctgagatgtagagttaattaccatgctttaagatttaccaacccaatacttgcaatgggtgaaaaattggtccatcggatgaggatgagaagcaagcattatattgcactgcacctgagatttgaacctgatatgcttgcattttctggatgtgattatggtggaggggagaaggagcagaaggaactgggtgtaataaggaggaggtggaagacattacataaaagcaatcctgatagggcaaggaggcagggaagatgcccattaaccccagaagaagttgggctcatgctaagagcattgggatatgggtctgacattcatatttacgttgcatcgggggaggtatatggagggaaaagaacattggcacctctcagagcattatttcctaatttccattcaaaagagaccattgctaccaaggaagaattagaaccattttcttcattttcttctcgcatggctgcactcgacttcattgtttgtgatgaaagcgatgtttttgtaaccaataataatggaaatatggcaaaaatattagctggacgaaggagatactttggccataaaccaaccattcgtccaaatgctaaaaaactttatcgattgttcttgaatagaagtaattcaacatgggaagcttttgcttctagtgtccgtactttccagaaaggcttcatgggggagccgaaggaggttagaccaggtagaggcgggtttcatgagaatccatcgacctgcatatgtgaagattctgcagcagccaaagtggacaaaaattcacaatctagaaaatataggaaggataatacaacgaagaaaaatgtagcaaatgatgaaccggatgttggcaatgtgtctgagtggccagacatggatgatgatgatgatgatgatcagaatgatctagcagagaagggtacatttaatgaaacaatttcggactatgatgctctgacttcgaggatcctgagttggaggaaattatatcagattagtgaaggtgccttattcagtgttgatgtacctgttgacttattatggctctttgcccccatcacttaagcagctcgatttgacagctgcttataaagctaaaaaacaggaacagaaaaggcacgtctttctcaatactggccgaactatagtaaaaagacatctcaaaaatttaatcgtacgatcatcttctgcatttttaaggacataatggtctcagtttgatgctgaatttttggagtgtttagacttgtacgaatctgtaaagaggttatcagaagtgagcaagtagagttagacgacaaccatccgaatatagctgcacacaaaattgagtttgttaagtaggaaaatctgtatatcttgaggaaaatcgttgcagttgatagactgtacacctttgttcctgtctttctttgacatcgaagcagtcaacttcacttttagaagcaactagatgccaactacagtttttgtgcctaaaggtaacatatcaatagtgatgaccagacactttagccgttttaagaacatggataaattctttcatataagcagtcactataaaaagtagatttgatttcgcaaattgcgtgcgtgttgtgtgtgagggtgtaaaatgataattgagtgaactctggtccctgtctgactgaggaagggaaagcaattcaagatctgaaagggctggcattttgatac

SEQ ID NO: 9553 - DNA, 993 bp, Glycine max
  Clone ID: 700850745_FLI
cttttggaagaggaggtggcttttgagggaaaggagggaacttttagtgtgggagggtggaaactggaattgggtttggttgggggtaaagagaatgaagattcagtgtaacgtgtgtgaggctgcggaggccaaggttctgtgttgtgctgacgaggctgcgctgtgttgggagtgtgatgagaaggttcatgcggctaacaagcttgccagcaagcaccagagagtgcctctttctacctcttcctctcatatgcccaaatgtgacatttgtcaggaagcattaggctattttttctgtctagaagatcgggctctgctctgcagaaaatgtgatgtggcaatacacactgcaaatgcttatgtctctggtcatcagaggtttcttctcactggtgtaagagtaggccttgaagctatagaccctggtgcttccttaacttctttgaagtcagattctggggagaaagtttcagatacaaagtcttcttctgtctctagaaaggtttccacagtgccccagccatcaaattacaatgaagtgctacccattgaagttggaggagttggggagtttccaccagccaaggtgtcttttggtggtggttctacagatggaaatatctcacagtggactattgatgaatttattggcttaaacgagttcagtcagcattatgattacatggaaggatcatcaagggccgatggtggtaagcttggggattctgattctcctgttttaaagtctggtgaagaggatatggaggaggaggatgactatttggaacgtgttccagattcgtcgtggacagttcctcagatcccttccccacctactgcttctgggttatgctggccaaaagaccctcaatattcatctgatagtgttctgtttgttcctgacataagcttctctctcattcaacaatctcagattagtagtatttgtttgagacgctggaggcagctttaatttgtttactctttgct

SEQ ID NO: 9554 - DNA, 790 bp, Glycine max
  Clone ID: 700850765_FLI
aaaaaaagcttcatcatcatcttcttcttctctgcatcatcacaatggctgaagtacgttcacaacaacaacaaccccagcatgtgcaagtccacgcaaccacaacacacaccccacaacaccatggcggggaaggtggcagcggcattctgaacctcatcccggagatgtccctcacgggttcccaactcctagctctcctcgccggcgttccccttggtgcaatgctgctcctcctctccggcatctcgctcatcgccagcctcttggggctggcggtggcgacgccgctcttcatcttcttcagcccgctgctggtccccgccgccttcgccataggaatggcggtgaccgcggtgctggcggcgggggcgtgcgggctggcggggctcgtgttgttctcgtgggtggtgaactatctccggcagatgccacgggggacgacgatgatgacggtgctgccggagcaagcgaagcggcacgtggcggacatggcggagtacgtggggcagaagacgaaggaggttgggcaagacattcagacaagggcacatcatgcccagggaacaacaaggatgacagtgcattgagttatcatgagacaagaaaatggtttcaatttatatcgcttatgtatgacttgtgagatatactagtatgtaattaacctttggtacgtgtgttttggactttggaggagttccattttcagtgttccatgttgtgtcactttctgtatttgctcatgtacgtgtaatcagtaatattaatgcatttttcttttgggttc

SEQ ID NO: 9555 - DNA, 1420 bp, Glycine max
  Clone ID: 700850850_FLI
tgaagatgctgaaggacaatggcattcagaaggtgaagctttttgatgctgatgctggtatcttggatgctctcaagaagtctgggatacaggtcatggtggggattccgaatgacatgctttatactctggctaacagtgtggaagcggctgaaaaatgggtttccaagaatatctccaaacatgtctcttctggaggagtggacatcaggtacgttgcagtggggaatgaaccattcttgtcaacatacaacggttccttcgaagccacaactcttccagctctccaaaacatccaggcagctctcacaagatctggtttgagcaaccgtgtcaaagtcaccgtccccttaaatgccgacgtataccaaagctcatccgaaaagccatccgacggcggtttcagacccgacatcaacaatgtcatgctgcagattgtcaagttcttgaatgacaacggcgctccgttcacagtgaacatctatcctttcatcagcctctacgcagaccccaatttccccgttgactatgccttctttaacggctaccagcccaccataaacgacaacggaagagcctacgacaatgtgtttgatgccaaccatgacactctagtatgggcactgcagaagaatggctttggaaacttacctataattgtgggggaaattgggtggccaacagatggggacagaaatgcaaaccttcaatatgcacaacgttttaaccaaggtttcatgtcacgttacatgtctggaaaaggtaccccaatgaggcctggtcctatagatgcttatttgtttagtctcatagatgaagatgccaaaagcattcagccaggtaactttgagcgtcattggggcatgttttactttgatggccaacccaaataccaacttaaccttgggtcagcacgaggtaatgggttagtaggtgctagtggcgttgatcatttggctaaaaagtggtgcgttttgaaaccctcagcaaaccttaatgatgaccaacttgcacctagtgtggcctatgcttgtcaaaatgctgattgcactagtcttgggtatggaacttcgtgtggcaatttagatgttcatggtaacatttcttatgcgtttaatagctactatcagataaatgaccagatggatagtgcatgcaaattccccggcctttccatgatcactgacaaggatccttctgttggagattgcaagttcagaatcatgatccagacagattctgcggagccacatggaaaagttggatatctaacaacagtgctatgtttttttgttcttttgctattctgtaatctttggttttgatttgcttgctttttgacttttctcggatcaggtaaactttgtagcaactagcaagtgtaagaaagaaaacgcgttagattgtttatcactgcact

SEQ ID NO: 9556 - DNA, 1464 bp, Glycine max
  Clone ID: 700850956_FLI
caaaccttgctctatactacacagtacacacactagaagaataatggcttccatcctccactactttttagccctctctctttcttgctcttttcttttcttcttatccgactcagtcacccctacaaaaccaataaaccttgttgttctacccgttcaaaatgatggttccacagggctccattgggccaacctccaaaaaagaacccctctaatgcaagtaccagtcctggtggacctcaatggaaatcacttgtgggttaactgtgagcagcagtactcatccaaaacgtaccaagcacccttctgccactccacccaatgctctagagccaacacccaccaatgcctcagttgccccgcggcatcaaggccagggtgccacaaaaacacgtgtggcctcatgtccactaatcccatcacccaacaaaccggtttaggtgaactaggagaagacgttcttgcaatccacgccacacaagggtcgacccaacaacttggcccattggtcacagtcccacaattcctcttttcttgtgcaccttccttccttgttcaaaagggtcttcctagaaacactcaaggtgtggctgggttaggccatgcaccaatttctcttccaaaccaactcgcttcccactttggcctacaacgccaattcaccacttgcctttctcgctaccctacttcaaagggtgctataatattcggggatgcacctaacaacatgcgacagtttcaaaaccaagatattttccacgatttggccttcaccccattaaccatcaccctgcagggagagtacaacgtgagagtcaactcaataagaatcaaccagcacagtgtgttcccactgaacaagatatcatccaccatcgtagggtcgacctctggaggaaccatgattagcacctcaactcctcacatggttctccagcaatccgtgtaccaggctttcactcaggtgtttgctcagcagctaccaaagcaagcacaggtgaaatctgtggcaccatttgggttatgcttcaactccaacaagatcaatgcatatcctagcgtggaccttgtgatggacaagcccaatggtcctgtttggagaatctctggtgaggacttgatggtgcaggcacaacctggggtcacgtgtttgggtgttatgaatggaggaatgcaacctagagctgaaattaccttaggggcacgtcagttggaagagaacctggtggtgttcgatcttgcaaggtcaagggttgggtttagcacctcatcactgcactcgcatggagtcaaatgtgctgacctcttcaactttgccaatgcatgatgagccaagatcgcgagactttttataatatgcttatttataattaagcaagcatctactacatgttatggttaataaaagtaataatgtaagaataaagactttgaactaaataataatatgaacgattctctttc

SEQ ID NO: 9557 - DNA, 1099 bp, Glycine max
  Clone ID: 700850986_FLI
caagaactaaccgtgcaacacaagctggatactggaaagctacagggaaagataggccagtgcactctcaaaagaagcaagttggcatgaagaagacattggtgtactatagaggtagagcaccacatgggattagaaccaactgggttatgcatgaataccgtttaattgaatcagttcctggtactgctctctcatctttgaaggattcctattcgctgtgtcgcattttcaagaagacgattcaaattccagccaaacctaataataacgaagaagaacaacctgagattgcaaataagaaggaatcaatgtggatctcagaagaacaaatgttaggggaagactcaagtggcactgagatttctagagaaatggaaaatgtggatgaaaaaattctcaatcatgaacaccctaaatttccttgtgatgcttcttcctctgatctcactcaaggagcatgtacacccacagataccggcatagcagaagattttcaaccacaatttgcatgtgatgaagcaaacagtgcagctaattcatatacaatgggaataggatactccacaaatatatttcaggatgtagaaatgcctagctatgctgacatgcattatcaactcccatacacacctttggtgatggaagatttcccacaaataaatttaccagagacaaagacaacgaagccagaagtcaccgatgactgcatgttatatgacagatacagggactgcatgaatggaacactagaagagatcatctctttgtgttgcactcaagataattccgtcccttttcctatgctagaatgattacactaaccaagatgactcaaactatagcatcaaaatattcattagacacagagaaacttgtgttggctaaaataacgacacaaatgggggattgtttttccagccacatagaaaaggctacacatataatgtactaaacatatagtagaatatgctgagccaaggggggctcgcatacaattggttttcaatttttttttgttttatcttttttcattctgtgttcttcgttttttgtaggggttgttcttcctacttttataggagttcttccttctttt

SEQ ID NO: 9558 - DNA, 1601 bp, Glycine max
  Clone ID: 700851195_FLI
gccattgcagcaaaaatcgccgcaaccgccaccacgaaccgccaccatcctcgggaagtaccagctgacgcgcttcctcggccgcggaagcttcgccaaggtctaccaggggagatccctcgtcgacggctccgccgtcgccgtgaaaataatcgacaaatcgaaaaccgtggacgccggcatggagccacgtataatccgcgagatcgacgccatgcgccgcctccaccaccaccctaacatcctcaaaatccacgaggtgctcgcaaccaagaccaagatccacctcgtcgtggagctcgccgctggcggcgagctcttcgccaaaatctcccgccgcggaaagctaccggagtccaccgcgcgccgctacttccagcagctcgtttcggcgttgcggttctgccaccgcaacggcgtggcccaccgcgacctgaagccgcagaacctcctcctcgacggcgacggaaacctcaaggtctccgacttcgggctctccgcactgccggagcagctcaagaacggcctcctccacaccgcctgcggcacgccggcgtacaccgcgccggagatactccgccggagcggcggctacgacgggtccaaggccgacgcctggtcctgcggcctcatcctcttcgtcttccttgccggacacctcccgttcgacgacaccaacattccggcgatgtgcaaaaaaatttcccgacgagattaccagttcccggagtggatttcaaaaccagcccgttttgttatccacaaattactcgacccgaatccggaaacccgaattagcctggagtccctgtttgggaacgcgtggtttaagaaatcactaaacccggaaacggcggaagaaaacgcgttggggctgagttatgtgaagagtagttataattacgaagggagtaaaaaaagttcgggagtgacagcgtttgacataatatcgatgtcttcgggtttggatttgacgaggttgttcgaaacgacgtcggatttggggagtaaaagagagaagaggtttagttcgagtgcgagagttgaggtggtggaagagaaagttaaggaagtgggtggggtattggggtttaagattgaggttgggaagagtaacggtgcaattgctttggtgaaagggaaggtggctttggtgtttgaggtgcttgagattgtgcctcatgaacttctttttgtggcggttaaggtggtggagggtgcgttggagtttgaggaacatcattggggggattggaaagatgcgttgcaagatctcgtgctctcttggcacaaccaagaatcgtgatcatcagttaatgataggtatagttagttcttctcaagtgaaggatctacatgaggtttgatgttgaaggactaattgcagaacatgacatgcacactcacatcgtgctcgtcctgatgagaagaaacaaacaaggttgatgatgcttgttttgtgatttgattttgattttgtgttgaagcttagttataggtgtattaatttatatatgatggtttgaaaaataaaagttgttgttatgtatacatgagaatggtggctaaatgtattcaattctccgtttttgagttcatag

SEQ ID NO: 9559 - DNA, 1431 bp, Glycine max
  Clone ID: 700851377_FLI
ggcttccatcctccactactttttagccctctctctttcttgctcttttcttttcttcttatccgactcagtcacccctacaaaaccaataaaccttgttgttctacccgttcaaaatgatggttccacagggctccattgggccaacctccaaaaaagaacccctctaatgcaagtaccagtcctggtggacctcaatggaaatcacttgtgggttaactgtgagcagcagtactcatccaaaacgtaccaagcacccttctgccactccacccaatgctctagagccaacacccaccaatgcctcagttgccccgcggcatcaaggccagggtgccacaaaaacacgtgtggcctcatgtccactaatcccatcacccaacaaaccggtttaggtgaactaggagaagacgttcttgcaatccacgccacacaagggtcgacccaacaacttggcccattggtcacagtcccacaattcctcttttcttgtgcaccttccttccttgttcaaaagggtcttcctagaaacactcaaggtgtggctgggttaggccatgcaccaatttctcttccaaaccaactcgcttcccactttggcctacaacgccaattcaccacttgcctttctcgctaccctacttcaaagggtgctataatattcggggatgcacctaacaacatgcgacagtttcaaaaccaagatattttccacgatttggccttcaccccattaaccatcaccctgcagggagagtacaacgtgagagtcaactcaataagaatcaaccagcacagtgtgttcccactgaacaagatatcatccaccatcgtagggtcgacctctggaggaaccatgattagcacctcaactcctcacatggttctccagcaatccgtgtaccaggctttcactcaggtgtttgctcagcagctaccaaagcaagcacaggtgaaatctgtggcaccatttgggttatgcttcaactccaacaagatcaatgcatatcctagcgtggaccttgtgatggacaagcccaatggtcctgtttggagaatctctggtgaggacttgatggtgcaggcacaacctggggtcacgtgtttgggtgttatgaatggaggaatgcaacctagagctgaaattaccttaggggcacgtcagttggaagagaacctggtggtgttcgatcttgcaaggtcaagggttgggtttagcacctcatcactgcactcgcatggagtcaaatgtgctgacctcttcaactttgccaatgcatgatgagccaagatcgcgagactttttatatatgcttatttataattaagcaagcatctactacatgttatggttaataaaagtaataatgtaagaataaagactttgaactaaataataatatgaacgattctctttcgttgttcaatgag

SEQ ID NO: 9560 - DNA, 926 bp, Glycine max
  Clone ID: 700851401_FLI
caaaaccaaaacagtaaagctaacttcaacacctttaattttctaaaagtaattcagcggctgaataccaagcggagaagatgagtcaggagcagccacggcgtcccaaaggccaaaaccccatcaaatacggcgacgtttttgtcgtctccggcgaccttgcacagaagcccgtcgcaccggaagatgctgccatgatgcaaagcgcggaagctcgagtgctcggacaaacccaacccggcggagcagcttccgtcatgcaatctgccgccaccaggaatgaacaggctggccttgtcggtcaccgggacgtcaccgacgttaccggcgaccgtggcgtcacagtcacagaaactaaagtccctggaagacgcattataaccgaggctgttggtggccaggttgtggagcagtatgtggaggcaactccggttgaggcagggcgaagcagtgcaattaaggagaatgccataacaataggagaggcattggaggcgacggcacagactgtgggtcagaaagcggtggatcagagtgacgcctccgcgattcaggcggcggaggtgagagcaacgggaagtaacgttataacgccgggtggacttgcggctatggctcaatcagctgctgcttataatgctgactgcaagcttgaccaggacaaggtcaagctcgccgacgttttggccggagccaccgccaagttgcccgcggacaaggccgccacactgcaagatgctgaaggtgtagcgtgtgctgaggtgaggaacaaccctgatgccaccgccactcccggtggcgtagccgcttctgttgcggctgctgctaggctcaatgaaaatgttaagtaacgagtcatgttatgtgtcttgataatcatacttttgtttcatgatgtgtggtgttgatgtgttatagtctatagt

SEQ ID NO: 9561 - DNA, 770 bp, Glycine max
  Clone ID: 700851424_FLI
ctttgtgattggtgtggcacctggaaaggagacaagctttgtagtagttgcagacaagcacggtattgctctgagaaacaccaggctatgagttggcgcacagggcataaaactgcttgccaacagatgaaagtttcttcacctgtttttggacccaacaaaagtggaaccacctccttggagtctcataaagttggaagcaagaatctgtggcctgaatttgagatcagcattgaagatgaaagtgaatataatagggacatatctgaggaaaatagcttagctaattccttgatctctaggaacaggaatgatgacacaatgaattcacttatggataactttaagggtgatgatgacaaaaagagctgggcctccttccaggaacgcattgccgaggctcctgaacaagtgttgaggtattataggaatactaatgccaagccaatatggcctgtttcaagtggtcgaccatccaatgctgatatccctaaatgcagttactgcagtggaccaatgtcttgtgaatttcagattttgccacaactgctctattacttcggcgttgacaacgaagtggactctctggattgggcttcaattgtggtgtatgcgtgtgaagcctcttgtgaagcaagtttgccttacaaaaatgaatttgcttgggtacaaatttattcactttccacaaccttatagagaaatgtctttttttttttttaatttttttatataaattattatcgtttttaaattttgggctcagaagt

SEQ ID NO: 9562 - DNA, 1288 bp, Glycine max
  Clone ID: 700851455_FLI
gcagaccgagctagctagctagcaagcaagcacagagatggaggcaaagcgaggccatgccctcatgtgcttggcacgtgtttcactcttcctctgcgctctaaccctatccgctgctcacggaagcaccacggttcaagacatcgcgagaaagttgaaactcggggacaacgagcttctgcgcacggagaagaagttcaaggttttcatggagaattacgggaggagctactccacagaggaggagtatttgcgccgtttggggattttcgcccagaacatggtcagagcggcggagcatcaggcgctggaccccaccgccgtccacggcgtcacgcagttctccgatctcaccgaggacgagtttgagaagctctacactggcgtcaatggcggcttcccgtcatcgaataatgccgccggcggtattgcgccgccgttggaggtggacgggctgccggagaattttgattggagagagaaaggagctgtcaccgaagttaagttacagggtagatgtggatcatgctgggctttcagcaccacaggatctatagaaggagccaattttcttgccaccggaaagctcgtcagtcttagtgaacaacagctccttgactgtgacaacaagtgtgacataacagaaaagacttcatgtgacaatgggtgtaatggaggtcttatgacaaatgcctacaattatttgctcgagtctggtgggttggaggaggagtcttcatatccctacactggggagagaggtgaatgcaagtttgatccagagaaaatagcagttaagatcacaaatttcaccaatatccctgctgatgagaaccaaattgccgcatatttagtaaaaaatggtccacttgctatgggcgtgaatgcaattttcatgcaaacatacattggtggtgtctcatgccctctcatatgtagcaagaaaaggctgaaccatggtgtgttacttgtgggatatggtgcaaaaggcttctcaattcttaggcttggcaacaaaccatactggatcatcaagaattcgtggggggagaaatggggagaagatggctattacaagctctgcagagggcatggcatgtgtggaataaacactatggtttctgctgcaatggtgcctcaaccacaaacaacacctacaaagaattatgcttcttattagctatgcacttaaggaaatctaaataaatatttttcattctaggtgatgtatcatgtatgtaccaaaatattttggtacgtaagtcttttaaaaagtttgcatctcctc

SEQ ID NO: 9563 - DNA, 438 bp, Glycine max
  Clone ID: 700851527_FLI
ggcaattgaatagtgaggtgatggtgaaagtgtcatcaatggagaaagagggtgaaaagcaaaaactgggggaaggaccccaaatctcaagaatggagccggtaacacatggtgcctatggtggtggaatgtacggtaccgagaaagggcaaccggagaaacaaacaaagccaccggcaagtgagagccagagtgctgatggccccgttgataaggacgctatcaagcccaaacacaatcctcccccttcaactggggacagagatttagatatcactggccagtcttatatccagtaacaaaatatatgtaaatacaatcactataataatcagggtgtagcttcctcttttatgtttttttttttcctattgttgttcgtgacttaatgggtacatctttatgttggttttcttttaggcagccaactttttaatc

SEQ ID NO: 9564 - DNA, 1455 bp, Glycine max
  Clone ID: 700851647_FLI
aattctccagggaggaactggaattccaaatgtcagatggtttggagtggagggagattacaatgttttagtgatggatctgcttggaccgagtcttgaagatctttttaacttctgcagtagaaagctatcactaaagacagttctcatgcttgctgatcaaatgatcaaccgtgttgagttcattcattcaaaatcgtttctgcatcgggatatcaaaccggataattttctaatgggattaggaaggcgtgcaaaccaggtttatgctattgattttggtttggctaagaaatacagagatagttcaacacatcaacacattccttacagggaaaataagaatttgactggaactgcaaggtatgccagcatgaacactcaccttggcattgaacaaagcagaagagatgatcttgagtctcttggttatgttttgatgtacttcttgagaggaagtcttccttggcagggtcttaaagcgggaacaaagaaacagaagtatgagaaaatcagtgaaaaaaaggtttctacctcgattgaagccttgtgtcgaggttatccaacagaatttgcatcttacttccattactgccgatcattgaggtttgatgataagccagattatgcgtacctcaaaaggatatttcgtgacctgtttattcgtgaaggattccagtttgattatgtctttgactggaccattttgaagtatcagcaatcacagctagccactcctccaacacgggccattggtcctagtgctggaaccagttctggaatgccccccgctgttactaatgctgataggcatacaggaggggaagaaggtagacctcctgctttggtttcagtggattcctcgaggcgcagaatgtcagggcccattttaaatactttatcaagtgccaatgccttgggtcagtcaagtggatcatctaggagggttgctgtctctagtagccgtgatgcatttgttggtgctgagtcagatatccgtactcgcactgctgaggctagccctggagcagcacatcgagctttgagtgggcaaagaagttctccaattggatcttctgatcctaagagagttgtatcatcagggagaaatgcttctcatgtgaaaaattatgacactgcacttaggggcatggaaggtttgcaattagaaaatgatgagaggacccattattaatttcacaacttctctcctattaatttgtgagttgataggcactgccaacgttgcttgtgttgctaagttgagctgtgagaaaattcggatctgaacttgaaattctggctttgtattgttaacccatctggtcaaaccgatgaagctgtgaagctgaaataatttgagccaaaccagggattgtgcttgctgtaaagctcagttttaattggttcttctagctggaactcctaagttttataacatttttctgagttatt

SEQ ID NO: 9565 - DNA, 971 bp, Glycine max
  Clone ID: 700851854_FLI
acaaaattgaactgtaattgtagtagtagacagtagcaccatgagccaggaacagctcaagaaacctcaaggggagcaggaccccatcaaatacggcgacgttttcaaagtctccgacgaactcgctttcaaacccatcgcgccaagagacgcagctctcatgcaagccacggagaaccaagcattgggccaaactcaaaaaggaggtcccgcctcggtgatgcaatccgccgcaaccgaaaacctccgcgccggcgtcgtgggccgccaagacatctccgacgtggcgaggaacgaaggcgtgagcgtgaccgaaaccaaagtgggctgccaccgcgtcatcacggagttcgtgggaagacacgtggtggggcagttcgtggagcccgacgtccccatgaacaccccaggcaccgcgctggagcgtgacgccataaccatcggcgaggctctcgaggcatcggcgatagccggagcaagcgacaagccggtggatgaaagcgacgccgccgcgatacaagctgcggagatgagagcgacaggaaagaacgagacagagcctggcgggctgggcgccagggcccagtcagcagccacgcggaatactcgtactgtgtcccactctcacaagacaaccttgtctgatgtcttaacggatgcgaaggagaagctaccagcggataaggcggtgacgcgagaagatgcggagggagtgattggagctgagcttaggaacaaattggacatgagaaccacccctggtggggtcgctgcatccatggctgcagcagccacacttaatcaaaacagacaagtgactgatgcgtgaagatctcaagtttccatgcatccagtggagttaagtgccataccctgtggctgctggggcatccatggcgatagtgtgtatgtttaaataaatcaagtcactctgagtttgactaataaaagtacaatagtcttagtgtgtc

SEQ ID NO: 9566 - DNA, 1974 bp, Glycine max
  Clone ID: 700851869_FLI
ttcctctctctctctttctctctcatcactttctctctctacagacacacacgcctcgttttctctctctaaaaccccagtggaattttgcaatttggattaatgggttccgacatttgcgttgtgaatggttcgtgcactcacgaatggagaaaggggtggcctctgcgatctggtggattcgctcaactatgctgcaagtgcggatttatggaggagtggaagggtgacatccttgaccggttatctgcctacgagaattcagttttctgtaataaattccaccgccaacaaactggttggagggagtgtaacttttgcaacaagcctatccacagtggatgcatagtatctagatctttgttcgggtatcttgactttggtggcataggttgtgtcagctgtgtaaatactacccaacttagtatgatgaggaatactgaaaatccaaatgtgtcagtttcgtcaataaaaaataatgcgagtgatcggcattctgctcattttgatggcagactgcttgtgggtggtgttgatgaaggaaaacttatgcaattctgcaaaattattgaagctagtgaatccagccactggaatcatgctcaaagtgatggcataattgcacatcatgggcaaaacaaccaagaagccaagtgttcattcagggaaggggacattggattttcaaatccatctttcagtatgtatctgggaaatgcatcagggaacgactccgtcccaccttctgctggagaggctgtagaaggaagactcgagggaaaaacatctcctccctttcaaagatctcgccctatatgtcctaaaccattgaagagtgggcttaccatgaatgtggagacagataaaggtgcaatttctcaatcacgtgttgctcggccacctgcagatggcaggggcaagaatcagttacttccccgatattggccgaggattactgatcaagagctggagcgattggctggagatttgaaatccactgtagtgccattatttgagaaggtgttgagtgccagtgacgcaggtcgaattggccgtcttgttctcccaaaagcctgtgctgaggcatattttcctcctatttcacaatctgaaggtgttcctttgcgaatgcaagatgtgaaggggaatgagtggacatttcagttcagattttggcctaataacaacagcaggatgtatgtattggagggtgtgaccccttgcatacaggccatgcaattatgtgctggtgatactgtaacatttagtcggatagatcctggaggcaaactagttatgggtttcagaaaagcatcaaattctacagatacacaggatgcctccacatctgcacaatctaattcagcaaagggaaccatctcttctggtactgagaatctgccatcaggaagtaatcatgccaatcttctccattcattgacagggaatgttgaaactcacttaaatggacatacagaacatctgcacttgggtactggaactgctggattgcttaaaactgaaaataatgagatgacaaacagcagttcaccacaacaacaaatttcggttttagagaagaagaggactcgcaatattgggcctaaaagtaagaggttgctaattgataatgaagatgccatggagttgaaacttacatgggaagaagcacaagatttgcttcgtcctcctcctagtgtcaagccaaacattgtcacaattgaggaccaagtattcgaagaatatgatgaaccccctgtttttggaaagagaactatattcagtgcctgttcatctggggggaaggaacaatgggctcagtgtgatgattgctctaaatggcgaaagctgcccgttgatgctcttcttcctcccaagtggacatgttctgaaaatgtttgggattcaagcaggtgttcatgctctgtgccggaggagttaagttcaaaggaattagaaaatcttctgaaaacc

SEQ ID NO: 9567 - DNA, 1271 bp, Glycine max
  Clone ID: 700851887_FLI
cttttcttcagcccatagcttacctgattctcacgcatggtctcactctcaacccaacgatgatgattatgtctcattcaatgatgatgcatcatcatcatcattcatacccatcatagacctcatggatccaaatgccatggaacaaataggccatgcatgtgagaaatggggtgctttccaattgaagaaccatggcatacccttttgtgttattgaagatgtagaagaagaggctaaaaggctctttgctcttcccactgaacagaagttgaaggctcttcgatctcctggtggtgcgacggggtatggcagagcaaggatttcaccgttcttcccaaagttcatgtggcatgaagggtttaccatcattggttctccctctcatgatgccaaaaagatatggcctaacgatcatgcagggttttgtgatttgatggagaattatgagaagcaaatgaaggttctagcggagagactaacatagatgatgttcagcttaatggacataagtgaggagaaaacaaagtgggttggtgcaagcaacataagtggagctgttcagttaaatttttacccaagttgtcccgagccaaaccgagccatgggcttagcccctcacacagacacttctctcttcacaattcttcaccaaagccgaatcactggtcttcaaatcttcaaggaaggaaaagagtgggttcctgtgcaccctcaccctaacaccctggtcgtgcacactggagatctcttgcacatcatttctaacgccaggttccgtagtgcacttcaccgtgtaacggtgaatagtacacgggaacgttactctgtggcttatttctattctccaccgttagattatgtggtttctcctttagttgactctgtcgctcgttttcgtgatgtgactgtgaaggagtatattgggatcaaagccaagaattttggagaagcattgtctttgattagtacttgaaattatatgtatcttaattatgttatgtattaattccttaagcatttatctagttagatgctttattaatttaatttgcttcttataattttgtttctttgtggatttcctatttttgttggttgttaggaagtggtagatatatgatgtacgtggtaggaaggattgggaacagcttcacattttaagtgcaaagttgatgtctcattaactttacaccaagttttgcttctagcacattcaaatttctgaccttctatgccatagtggaaaatagattatgctagcctttgtt

SEQ ID NO: 9568 - DNA, 1738 bp, Glycine max
  Clone ID: 700851896_FLI
ggaattgtcaattccaggttggtaaatgagttggcagatgtcaagttattagcaaaacgctacatgcaggattatgagaaggaaaggaaggccagagaattgattgaagaaatttgtgatgagcttgctaaggaaattggagaagacaaggctgaaattgaagcactgaagagggaatctatgaaacttagggaagaagtggaagaggagaggaggatgttacagatggctgaagtatggcgtgaagaacgtgttcatatgaaattgattgatgcaaaagttgctcttgatgagaagtactcacagatgaataaacttgtagcggatttggaaacctttctcaaatcaataaatgtgaacccaaatgcaaaggagatgaaagaagcacggtcacttcaacaggctgcagctgctgtagacattcaagacatcaagggattttcgtacgagccagctaatccagatgatatttttgccattttcgaagatttaaattttggcgaatccaacgagagggagattgaaccatgtgttgctcactctccagtgagtcatgcctcaaagattcacacagtgagtcctgaagccaaattgattagtaaggataactttcaaagatgttctgatgtatttatggatgacaatggggatatagaagaagatgaaagtggatgggaaactgtgagccatgttgaggatcaaggatcaagttgttcgcctgaagggagtgccctattggtgaacaagaatcgtcgagagagtgatgtttcagggaggagtgtgcttgaatgggaagaaaatgcaggtttagagaccccaataactgaaattagtgaagtctgttcagtaccagctaagcaatcaaagaaggtatcctccatggcaaggctttggaggtctggcccaaacagcggggataattacaagataatctctgtggaggggatgaatggtaggctttcaaatggaagggtatctagtgggggcataatgtctcctgattgggaacttggtaacggtggactaagccctcaagaccatctgtaccagttgagttcgcctgagtcagcaaatctgcaaaatcgaggcatgaaagggtgcattcctcgcaccgtgcagaagagtagtctgaaagccagacttttggaggctaggatggaaagccagaaggttcagttgcgccacgttcttaaacagaagatttagatgtgatgtgagcatagacagagattcctcacctgtataactgaagaatgaccctcaagcagcagatttgttttgaattgtgaaagtataaatctactgctgctagaaaaactgctcagaaatgatgggggtcatgaataaatgcacctttcctgcctcagactttggccatgttgcagttcttcgacatcactcatatttaaagcattgagaagataatctttcacccccttgtgccaatgcctcacttgtatttatgacgaccggccttgcttcattttgtgtagtatcctataaaagttatgagaagcatgttgcttgtattgtatcatttaagtctgaggacaaatatgcagggaaattaaatcatcataagttatagatttatcttttcagcattttgattttctatcttagtagatgcggcttagaatttgtcaaatagattgtagaccacgaggatgatttctggtcccaggactgaaaattcataacagtgataaaacttaatacttaaaggttgggatggacc

SEQ ID NO: 9569 - DNA, 1424 bp, Glycine max
  Clone ID: 700851941_FLI
aggctacttaaagggcttggaaagaagaaaggaaataattgatcaccaatctgcctggaggagagttgtttgccttgctatcaattccggtattagcactccaggttatttcagggataggattttgttcctgactgtattgcagtcaccgaatatggagcaactaaggacggatatttgggggtatattatgggcaacgagaggttggatgcgaattacgtggttccccaatggatgccacaatttaagtgcagaagtgaagctcaaactctaattgttttgatgatgtgtggacactctccgtggtggatcagcttatgtgtagaataccaggttgcaagtttcttgtggtgtcaaggcctaaattccaaacggtgttgagttatgaaatggaattgctgattgaagaggatgccctgtctttgttctgtcaccatgcttttggacagaaatcaattcctttagctgctaatgagaattcggtcaagcaggttgtgactgaatgtggaaggcttcccttggctcttaaggtgattggagcttctttgcgagatcaaactgagatgttttggttgagtgttaaaaataggctatctcagggacaaagtattggggaatcccatgaaatcaatctgattgacagaatggcaattagtatcaattaccttccagagaagatcaaggagtgctacttagacctgtgctgttttcctaaggataagaaaatccctctggatgttctcatcaatatgtgggtggaaatccatggtattcctgaaacagaagcttatgccattgtgattgagctctccaacaaaaaatttcctcaccttattgaaagaggctcgtgctgcaggcacgtatagtagttgctttgagatctcagttactcaacatgatgaactgagagacctggcccttaatttgagaaaccatgagagcattgatgaacgccgactattagttatgccaaaaaaagagaatggaatgcctaaagagtggttgagatacaggcagaagccatttgaggctcagattgtttcaattcacacaggtgaaatgaaggaaatggactggtgtaatttggaatttccaaaggctgaagtgttgaccataactacaccttgaggacaaggtgtttgtgaagaggggtggaattgttaggaacctagcctaagtaaattagttactgtaagggtattaaaggaattacaattaaatatggaatagtttgttatagcaattctgttataacaatagtaatgttgtctgccaacaaattaacaattctgtcataactagtgttgtctgtagtggggtaggtttgttaattgctgctgcttgattcttatctttaggacttgggaatactatatataggtatgtaattgaagcttgtgatgatatgaaggaattatcaatc

SEQ ID NO: 9570 - DNA, 997 bp, Glycine max
  Clone ID: 700851947_FLI
ttatgatttggcagctctgaagtactggggtcccactgctaccaccaacttccctgtttccaattattcaaaggaagtggaggagatgaaacatgtaacaaagcaggaatttatcgcatcattgcgaaggaaaagtagtggtttctccaggggagcttccatatacagaggtgttacaaggcatcatcaacagggtaggtggcaagcaagaattggccgtgtagctggaaacaaagatctttacttgggaacattcgcaaccgaggaggaagcagcagaggcatatgatattgcagccattaagttcagaggtgcaaacgcggtaaccaactttgagatgaatagatatgatgtggaagctataatgaagagttctcttccagtgggtggggcagcaaagcgcttgaagctttcccttgaatcagagcagaaagctcttcctgtgagcagcagcagcagcagcagtcaacagcagaatccacagtgtggaaacgtgagtgccagcatcaatttctcatccattcatcagccaattgcttctatcccttgtggaattccctttgattcaacaacagcatattatcatcacaaccttttccaacattttcaccctaccaacgctggcacagcagcgtctgctgttacttctgccaatgcaaatgcactaactgcactgccaccaacagcagcagctgagttctttatttggcctcatcagtcttattgatctaatcaaaactagaaatcatcttttgttaatttcctggttatgctaacaaatcaaaagctatagtctctggcacagtttagctgacccccctcctctattattaacccctttaggctgctaaaaaagaaaaaaaatgaggtttttgagttggctagtcttagttactgtaggaagctggatatgtaactaactgctcaagaaatgagaaatatttcgtgcatcataattttgcacaagaatttccttaatggcttatagcttgcagtg

SEQ ID NO: 9571 - DNA, 1656 bp, Glycine max
  Clone ID: 700852028_FLI
gaggaagagcacgagcagaaggaggaacacgaatggcatcgcaaggaggaaaaacacggaggaaagggaagtgaagaggaacaagatgaacgtgaacacccacgcccacaccaacctcatcaaaaggaagaggaaaagcacgaatggcaacacaagcaggaaaagcaccaaggaaaggaaagtgaagaagaagaagaagaccaagacgaggatgaggagcaagacaaagagagccaagaaagtgaaggttctgagtctcaaagagaaccacgaagacataagaataagaacccttttcacttcaactctaaaaggttccaaactctcttcaaaaaccaatatggccacgttcgcgtcctccagaggttcaacaaacgctcccaacagcttcagaatctccgagactaccgcattttggagttcaactccaaacccaacacccttcttctcccccaccatgctgacgctgattacctcatcgttatccttaacgggactgccattcttaccttggtgaacaacgacgaccgagactcttacaaccttcatctggcgatgccctaagagtccctgcaggaaccacatactatgtggttaaccctgacaacgacgagaatctcagaatgataacactcgccatacccgttaacaaacccggtagatttgagagtttcttcctatctagcactcaagctcaacagtcctacttgcaagggttcagcaagaatattctagaggcctcatacgacaccaaattcgaggggataaacaaggttctgtttggtagagaggaggggcagcaacaaggggaggagaggctgcaagagagtgtgattgtggaaatctcaaagaaacaaattcgggaactgagcaaacatgccaaatctagttcaaggaaaaccatttcttctgaagataaacctttcaacttgagaagccgcgaccccatctattccaacaagcttggcaagttgtttgagattaccccagagaaaaaccctcagcttcgggacttggatgtcttcctcagtgttgtggatatgaacgagggagctctttttctgccacacttcaattcaaaggccatagtggtactagtgattaatgaaggagaagcaaacattgaacttgttggcattaaagaacaacaacagaggcagcaacaggaagagcaacctttggaagtgcggaaatatagagctgaattgtctgaacaagatatatttgtaatcccagcaggttatccagttgtggtcaacgctacctcagatctgaatttctttgcttttggtatcaatgccgagaacaaccagaggaacttccttgcaggttcgaaagacaatgtgataagccagatacctagtcaagtgcaggagcttgcgttccctgggtctgcaaaagatattgagaacctaataaagagccaaagtgagtcctactttgtggatgctcagcctcagcagaaagaggaggggaacaagggaagaaagggtcctttgtcttcaattttgagggctttttactgaataagtatgtagtactaaaatgtatgctgtaatagctcatagtgagcgaggaaagtatcgggctatttaactatgacttgagctccatctatgaataaataaatcagcatatgatgcttttgttttgtgt

SEQ ID NO: 9572 - DNA, 1085 bp, Glycine max
  Clone ID: 700852044_FLI
caaaacagtaaagctaacttcaacacctttaattttctaaaagtaattcagcggctgaataccaagcggagaagatgagtcaggagcagccacggcgtcccaaaggccaaaaccccatcaaatacggcgacgtttttgtcgtctccggcgaccttgcacagaagcccgtcgcaccggaagatgctgccatgatgcaaagcgcggaagctcgagtgctcggacaaacccaacccggcggagcagcttccgtcatgcaatctgccgccaccaggaatgaacaggctggccttgtcggtcaccgggacgtcaccgacgttaccggcgaccgtggcgtcacagtcacagaaactaaagtccctggaagacgcattataaccgaggctgttggtggccaggttgtggagcagtatgtggaggcaactccggttgaggcagggcgaagcagtgcaattaaggagaatgccataacaataggagaggcattggaggcgacggcacagactgtgggtcagaaagcggtggatcagagtgacgcctccgcgattcaggcggcggaggtgagagcaacgggaagtaacgttataacgccgggtggacttgcggctatggctcaatcagctgctgcttataatgctgactgcaagcttgaccaggacaaggtcaagctcgccgacgttttggccggagccaccgccaagttgcccgcggacaaggccgccacactgcaagatgctgaaggtgtagcgtgtgctgaggtgaggaacaaccctgatgccaccgccactcccggtggcgtagccgcttctgttgcggctgctgctaggctcaatgaaaatgttaagtaacgagtcatgttatgtgtcttgataatcatacttttgtttcatgatgtgtggtgttgatgtgttatagtctatagtgtattaataagtgtaagtggtgcaacatcttgtttttctttcttgtactctttgtgagttatattaattactggttttaaggactctacttaaggtgatgtatgtatactatgcgctatatgcatttctgtggttatcagttaataatatgtgctccaatcttgt

SEQ ID NO: 9573 - DNA, 2570 bp, Glycine max
  Clone ID: 700852080_FLI
gtccgttacacgcctgagcaggttgaagccctagaaaggctctatcacgattgccccaaacctagttccattcgccgccagcagctcattcgcgagtgccccattctctccaacatcgaacccaagcaaatcaaggtttggttccagaacagaagatgtagagagaagcagagaaaggagtcgtcgcggctccaagctgtcaataggaagctgactgctatgaacaagctgctgatggaagagaatgataggttgcagaagcaggtgtctcaactcgtctatgaaaatggctattttcgtcaacacacccagattactacgcaggcaaccaaagacacaaactgtgaatcagttgtgacgagtggtcagcagcacaatttgataactcaacatcccccacgggatgcaagtcctgcagggcttttgtccattgcagaagagactttagcagaatttctttctaaggctactgggactgctgttgagtgggtccaaatgcctggaatgaagcctggtccggattccattggaatcgttgctatttctcatggttgcactggtgtggcagctagagcctgtggtctagtgggactagaacccactagggttgcagaaatcctcaaagatcagcctttgtggtttcgcgattgccgagctgttgatgttctcaatgtgctgcccacagcaagtggtggaaccattgagctgctttatatgcagctatatgcaccaaccacattggctcctgctcgagacttctggttgttgcgctacacttctgttttagaagatggaagcctagtgatctgcgagaggtctcttaaaaatactcaaaatggtccaagcatgcctcccgtgcagcattttgttagagctgagatgctgcctagtgggtacctgatcagaccttgtgaaggaggtggttcgatcatccacattgttgatcatatggatttagagccatggagtgtgccagaggtgctacgtccactgtacgaatcatcaacagtactggctcagaagacaactatggcggccctacgtcatctaaggcagatttcacatgaagtttctcagtccaacgtcactgggtggggtagacgaccggcagcactacgagctcttagccaaagattgagcaggggttttaatgaggcactcaatgggtttactgatgagggatggacaacaattggcaatgatggtgtagatgatgttactattctagtgaattcatcccctgacaagttaatgggtctgaatctttcctttgccaatggatttccgtctgttagtaatgcagtgctatgtgccaaagcatcgatgctattacagaatgtgccccctgccattctcctaaggttcctgagggagcatagatcagaatgggcagacaacaatatggatgcttacacagctgctgctattaaagtcggcccttgcagcctatcaggatctcgtgttggaaactatggaggtcaagttatactccccctagcacacacaattgagcatgaggagtttttggaagtcattaaattggaaggaatagctcattctcctgaagacacaataatgcctagagaaatgtttcttttgcaactctgcagtggaatggatgagaatgctgttggcacctgtgctgaacttatatctgctccaattgatgcttcgtttgctgatgatgcccccctcctaccttctggatttcgcatcattcctcttgaatctggaaaggaagcttccagccccaatcgcacacttgaccttgcatctgcccttgacgttggtcccagtggaaaccgagcttcaaatggatgtgctaattccagctgtatgagatctgtgatgacaatagcatttgaatttgcatttgaaagccatatgcaagagcatgtagcatctatggcacgccaatatgttcggagcattatatcatcagtccaaagggtagcattagcactttctccttctcatttgagttcacatgcagggcttaggtcaccattgggtactcctgaagcgcaaacccttgctcattggatctgcaacagttataggtgctacttgggtgtggagctacttaaatctaacaacgaggggaatgaatctttgctcaagtccttgtggcatcactcagatgcaatattgtgctgcactctaaaggcattgccagtgttcactttctcgaaccaggctgggcttgacatgcttgagaccaccctagttgcattacaagatataactttagagaaaatatttgatgatcatggacgaaaaattctcttttcagagtttccacagattatccaacagggttttgcatgtcttcaaggtggcatttgtctttcaagcatggggcgacctgtctcatatgaaagagttgttgcttggaaggtgctgaatgaagaagagaatgctcattgtatttgctttatgtttgtgaactggtcttttgtttgacatcttgttctgagtacacttgggcttattgtatccaagtgttagataaagttttactctaagactcttgtgtgctttgttggttggtgttttactgtatttgcact

SEQ ID NO: 9574 - DNA, 992 bp, Glycine max
  Clone ID: 700852128_FLI
taacttcaacacctttaattttctaaaagtaattcagcggctgaataccaagcggagaagatgagtcaggagcagccacggcgtcccaaaggccaaaaccccatcaaatacggcgacgtttttgtcgtctccggcgaccttgcacagaagcccgtcgcaccggaagatgctgccatgatgcaaagcgcggaagctcgagtgctcggacaaacccaacccggcggagcagcttccgtcatgcaatctgccgccaccaggaatgaacaggctggccttgtcggtcaccgggacgtcaccgacgttaccggcgaccgtggcgtcacagtcacagaaactaaagtccctggaagacgcattataaccgaggctgttggtggccaggttgtggagcagtatgtggaggcaactccggttgaggcagggcgaagcagtgcaattaaggagaatgccataacaataggagaggcattggaggcgacggcacagactgtgggtcagaaagcggtggatcagagtgacgcctccgcgattcaggcggcggaggtgagagcaacgggaagtaacgttataacgccgggtggacttgcggctatggctcaatcagctgctgcttataatgctgactgcaagcttgaccaggacaaggtcaagctcgccgacgttttggccggagccaccgccaagttgcccgcggacaaggccgccacactgcaagatgctgaaggtgtagcgtgtgctgaggtgaggaacaaccctgatgccaccgccactcccggtggcgtagccgcttctgttgcggctgctgctaggctcaatgaaaatgttaagtaacgagtcatgttatgtgtcttgataatcatacttttgtttcatgatgtgtggtgttgatgtgttatagtctatagtgtattaataagtgtaagtggtgcaacatcttgtttttctttcttgtactctttgtgagttatattaattactggttttaaggactc

SEQ ID NO: 9575 - DNA, 1336 bp, Glycine max
  Clone ID: 700852179_FLI
cacaggaggagcttcctgtttccatttcctctcacaaaaatcacttattatgaacacacgaaaagacatggaccggatcaaaggcccatggagcccggaggaggacgaggctctgcagaagctggtggagaaacacgggcccaggaactggtccctcatcagcaagtccatcccgggccgctccggcaagtcctgcaggctccgctggtgcaaccagctgtccccccaggtggagcaccgggccttcacccacgaagaggacgacaccattatccgggcccatgcccgcttcggcaacaagtgggccaccatagcccgcctcctccacggcagaactgacaacgccatcaaaaaccactggaactccaccttgaagcgcaagtgcacttcaaccatgattgacgacgacaacactcccccgctcaaaagatccctcagtgccggcgctgctattccagtctccactggactctacatgaaccctcccactcctggtagcccctctggatcagatgtgagtgagtccagcgtactggttgcatcctcctcacatgttttccgacccgtgcctagaacaggcgcggttctaccacccgtagaaacaacaacgactttgtcttccaatgaccctccaacctcactttccctatccctccccggtgttgactcatccgaagtttccaatcgaacaactgagccgattcatgccgcacctcctccgccgccacagccacagccacagccacagccgttgaatactatccctttgctcccaatgatgacggtgccctcggtttctccgacggggatggcgccgtttaattttagcgcagagtttctggcggtgatgcaggaaatgataaggaaggaggtgaggagttatatggagttgcacaatcagaagaatgggatgtgttttcaggctgcggtgaatgatgggtttaggaacgcttcggtgaagcgtattggaattagcagggttgattcgtaaatattatcatcgaagaatggaacaacacaagtagagatgaggaaaaaaactaagaacctgtttttttccctgtttttttttaatcaatgttcttaggcaataattttggttgatgtacagcgagacagaactctcgatccctaaagaggctgaatggaaattggaacgaaagagggagatagatgttacccattagataaaatctgaaatctctgttgtaactttttgtatcctctctattggtcctgttctcttttgaaaacaaaaagaaaaaataatcttggaataaacaaattcctccaaatctccttgtaataataaatctattttcttctttctaaacat

SEQ ID NO: 9576 - DNA, 1473 bp, Glycine max
  Clone ID: 700852191_FLI
ccttgctctatactacacagtacacacactagaagaataatggcttccatcctccactactttttagccctctctctttcttgctcttttcttttcttcttatccgactcagtcacccctacaaaaccaataaaccttgttgttctacccgttcaaaatgatggttccacagggctccattgggccaacctccaaaaaagaacccctctaatgcaagtaccagtcctggtggacctcaatggaaatcacttgtgggttaactgtgagcagcagtactcatccaaaacgtaccaagcacccttctgccactccacccaatgctctagagccaacacccaccaatgcctcagttgccccgcggcatcaaggccagggtgccacaaaaacacgtgtggcctcatgtccactaatcccatcacccaacaaaccggtttaggtgaactaggagaagacgttcttgcaatccacgccacacaagggtcgacccaacaacttggcccattggtcacagtcccacaattcctcttttcttgtgcaccttccttccttgttcaaaagggtcttcctagaaacactcaaggtgtggctgggttaggccatgcaccaatttctcttccaaaccaactcgcttcccactttggcctacaacgccaattcaccacttgcctttctcgctaccctacttcaaagggtgctataatattcggggatgcacctaacaacatgcgacagtttcaaaaccaagatattttccacgatttggccttcaccccattaaccatcaccctgcagggagagtacaacgtgagagtcaactcaataagaatcaaccagcacagtgtgttcccactgaacaagatatcatccaccatcgtagggtcgacctctggaggaaccatgattagcacctcaactcctcacatggttctccagcaatccgtgtaccaggctttcactcaggtgtttgctcagcagctaccaaagcaagcacaggtgaaatctgtggcaccatttgggttatgcttcaactccaacaagatcaatgcatatcctagcgtggaccttgtgatggacaagcccaatggtcctgtttggagaatctctggtgaggacttgatggtgcaggcacaacctggggtcacgtgtttgggtgttatgaatggaggaatgcaacctagagctgaaattaccttaggggcacgtcagttggaagagaacctggtggtgttcgatcttgcaaggtcaagggttgggtttagcacctcatcactgcactcgcatggagtcaaatgtgctgacctcttcaactttgccaatgcatgatgagccaagatcgcgagactttttataatatgcttatttataattaagcaagcatctactacatgttatggttaataaaagtaataatgtaagaataaagactttgaactaaataataatatgaacgattctctttcgttgttcaatgag

SEQ ID NO: 9577 - DNA, 1432 bp, Glycine max
  Clone ID: 700852258_FLI
cggaaatggcgtggccaaagctgttaaaaatatcaatgacaagatatctgaggcgttgattggtatggatcctacgcttcagtcgcagattgatcaggccatgattgacctcgacaaaactgagaagaagggggaacttggagccaatgctatattagctgtgtccattgctgcctgtaaagctggtgctgcagaaaaggaggttccactttacaagcacattgctgacctgtctggaaaaaccagcccaacacttcctgttcctgcctttactgtcataagtggtggaaaacatgctgggagtaatctggccattcaggaaatcatgattctcccaattggagcaagcaaatttgaggaagcattgcgaatgggcactgagacctatcatcacttaaaggctgtcattacagaaaaatatggtgcacataactgtaatgtgggtgaagatggtggctttgctcctaatatatccagctttagagaagccctggatcttgtgaaggaggccattagcagagctggttatgatgagaaaataaagatagctcttgatgttgctgctacagatttttgcataggtaaaagatatgatctggactttcaatctcctcaaaagtctggacagaattttaagtcagcagaggatatgatagacttgtacaaggaactatgctctgaataccctattgtgtcaatagaagatccatttgacaaggaagattgggaacatatcaagcatatctcaagtctggggatttgtcaggtagttggggatgatctcttgatgtcaaatgcaaaacgcattgagagagcaataactgagtctgcttgtaatgcccttcttcttaaggtcaaccaagttggaactattacagaggtcattgaagtggtgaagctggcaaaagaagcacattggggggtggtaacgtctcatagatgtggagaaactatagactctttcattgctgatttatctgttggccttgcttctggtgtaattaaagcaggagctccttgcagaggagagcggctagaaaagtacaaccagttacttcggattgaggaggagctcggagatcaagcagtttatgccggtgaagattggaggcaataagaatgaaaaaattcttcatattggtctgtgatatgcttttcttctttaagtttgatacgtgtggttgaagttcatcactgtaccatattcatcaactgctgatgttctattgccattacgtcaactttgatcatttcgtgctattgggctttggagaatgtttcaacgagtattcaacaatctgtacaagatagtgcggcttgtttatttgtctattgttataggggataccaaattacactaattcaatgctttagttaaaattgttctgggcaagtgatattgattatagttatccaattcttcgcattgctt

SEQ ID NO: 9578 - DNA, 1150 bp, Glycine max
  Clone ID: 700852282_FLI
cgactacagatgctaactctggcaagcttgtcatgttttcgggtgagcctgatttcagttctggtgcgcatgctttgcttaataaggattgtgagcttgggcgtggaggatttggagcagtgtaccaaactgttcttagagatggacattcagttgctataaagaagctcactgtgtcaagccttgtcaagtctcaagaagattttgaaagagaagtgaagaaattaggaaaaatcagacaccaaaacctcgtggaactcgagggttattattggactacatcgctgcagctgctcatatacgagtatgtctccggtggtagtctgtataagcatctccatgaaggatctggtgggaacttcctctcatggaatgagaggtttaatgtgattctcggaacagcgaaggccttggcacacttgcaccattccaacattattcactataacattaagtcaaccaatgtccttcttgatagttacggtgaaccaaaagtaggggactttggcctagcaagactgttgccaatgcttgatcgatacgttttgagcagcaaaattcagagcgcactcggctacatggcgccagagtttgcctgcaagacggtgaaaatcaccgagaaatgcgatgtatatgggtttggtgtcttggtcttggagatcgtcacagggaagaggccagtcgaatacatggaggatgatgtggtggtactatgcgacatggtgagaggggctttggaagaaggcagggtggaggagtgcattgatgagaggctccaagggaagttcccagcagaagaagctattcctgtcatgaaactaggcttaatatgtacttctcaagtgccatctaacaggcctgacatgggagaggtagttaacatattggagctgataagatgtccctcggaaggacaagaagaattggcatgaattaacttgcgattttcttaattaggaggatagacaatgggatgtccggggaagaagaatccggctttatttattagaaaagcgaggaattattttgttgcaaaatgtttactttttcattgtaattttcttccttgttagttagtctctagttgttgtttgtttttaagatttctcttatgttatgctactacacctaggatgccggattccttttc

SEQ ID NO: 9579 - DNA, 884 bp, Glycine max
  Clone ID: 700852284_FLI
ggaatgatcgcctaaagatagctcttggttctgcccagggtttggcatacctgcaccatgaatgcagcccaaaagttgttcattgtaacataaaatccagcaacatactgcttgatgaaaacatggagcctcatatatctgattttggtcttgcaaagcttttggttgatgaaaatgcccatgttaccacagtggttgcaggcacatttggttatttggcacctgagtatctacaaagtgggagagcaactgagaagtcagatgtatatagctttggagttctattgctggaacttgtaacaggaaagaggcctacagatccttcctttgtaaaaagaggtttaaatgttgttggttggatgaacacgttactgagagaaaacagaatggaggatgtggttgacaaaagatgcactgatgcagatgcaggaactcttgaagtaattcttgagctggctgcaagatgcaccgatggaaatgcagacgatcgtccttcaatgaaccaggtgttgcagttgctggaacaagaggtcatgtctccttgcccaagcgagtattacgagtctcattcagatcattaatgacaaaaatgatcctattctggatgtcattgctagttccactgcaccaagggatatatgatgcgtctcttgttttgtttaactgatttgttggtatttcttaccctttctgtgtggctttgtggattattttgtagcaaatgtgcgacagaatatttgtcaattgtgaatagattagtcaattgtctgaaccacttgtccccttcaagaagtcacgggacaacttggacattgcagtgggttttggttattggaatgacctcctttcttgctatgaaatctcatcactttcttatccaacat

SEQ ID NO: 9580 - DNA, 1798 bp, Glycine max
  Clone ID: 700852313_FLI
aaaaatctctatcttctcctcatccaaatggccgactccacccctctcctctcccaacccaacccatcatcatcatcgtctcccgacacacaagaagcaccgccatcgaaccaacaccatccctctctggggtccacagtagaactctgcataggcgagttcaactggtcccagttcctccagtcgattctggtctccctcgcatggatattcgacgcccagcagaccttcatctccgtcttcaccgacgccctgcccgagtggcactgcaccgagcggggcgccaatgcatgcaagactgccaccacagtctgcagcctcccaaagggctcgtgggcctgggacgtgcccacgcaggcctccatcgtgtcggagtggggcctggaatgcgccaactccgcgatcacgggcctccccgcttcgatgttcttcttggggtgtttgattggcgggttcgtactggcctcgctagcggactcgtcgctcgggcgcaagaacatgctcttcttctcgtgcctcgtgatggccatcacttccttgctcgtcactctctcgcccaacgtttggatctattccgctctcaagtttctctgtgggtttgctcgtgctaccattgggacctctgcgctcgtgctggcctctgagctcgttgggaaacggtggcgcggccagattagcgtcattggcttcttttgttttactatagggttcttgtccctgccagccatggcttacataaacaggagttcttcatggaggaacctttatctgtggacatccatttcaaccatgttctactgcatactggtgaagttgttcgttacggagtcccctagatggcttctagtgcgaggtaaaacagaagaagcggtggaaacactaaagtgcatcacatcaatcacccaaagcaacctcaatttggccataaataacatgtcccacaaggaagaaacatggaacgtggacatattctcagccctcaaaatcttgctacaaaaaaaatggtcttcgagaaggctgtcattaattatggcaatgggaataggcattggattggtgtattacggaatgccactgggcctccaaaatctatccttcaacctctacttgagtgtcacattcaacgccttatcggagttaccatcagcattgattgtgctcttcttcgtagacaagttcaataggagagttgcactcctcctcttcacaatcctaagtggtgttttcagtgtgatgtcaatcatggaaatgaagacatcatcgtggaccaacaacatccaaatagtgtttgagttagtatcgttcttcagcgcttgttcttcgttcaacgtgtacctaatttacaccacggagctgttcccgacctgcgtgaggaactcggcgctgtcgatggcgaggctggcagtggtgctcggtggcacgttcagcccgttgctggtgagtgctgcaagagggaacaagtttatgtgttatggggtttttgggttggtgatagggtttagcggggtcttcggaatattcttgcctgagacaaaaggaagggcactgtgtgatacaatggatgaagaagaaaacaaagagaaaaacatgacttgtgacatgttcctggcttgaattcagcggattttgaaaaggaaaaaaaaaaacatcgggtatgtttgtttgatggatttgccccaattggcaagtgtgaacagagagttgttatataaggtcaaataattagagctttaataattaatgcatgggaatattgatgttacatgtgttgtataaagtgaggttccttttgttgatt

SEQ ID NO: 9581 - DNA, 1370 bp, Glycine max
  Clone ID: 700852387_FLI
ccgactcagtcacccctacaaaaccaataaaccttgttgttctacccgttcaaaatgatggttccacagggctccattgggccaacctccaaaaaagaacccctctaatgcaagtaccagtcctggtggacctcaatggaaatcacttgtgggttaactgtgagcagcagtactcatccaaaacgtaccaagcacccttctgccactccacccaatgctctagagccaacacccaccaatgcctcagttgccccgcggcatcaaggccagggtgccacaaaaacacgtgtggcctcatgtccactaatcccatcacccaacaaaccggtttaggtgaactaggagaagacgttcttgcaatccacgccacacaagggtcgacccaacaacttggcccattggtcacagtcccacaattcctcttttcttgtgcaccttccttccttgttcaaaagggtcttcctagaaacactcaaggtgtggctgggttaggccatgcaccaatttctcttccaaaccaactcgcttcccactttggcctacaacgccaattcaccacttgcctttctcgctaccctacttcaaagggtgctataatattcggggatgcacctaacaacatgcgacagtttcaaaaccaagatattttccacgatttggccttcaccccattaaccatcaccctgcagggagagtacaacgtgagagtcaactcaataagaatcaaccagcacagtgtgttcccactgaacaagatatcatccaccatcgtagggtcgacctctggaggaaccatgattagcacctcaactcctcacatggttctccagcaatccgtgtaccaggctttcactcaggtgtttgctcagcagctaccaaagcaagcacaggtgaaatctgtggcaccatttgggttatgcttcaactccaacaagatcaatgcatatcctagcgtggaccttgtgatggacaagcccaatggtcctgtttggagaatctctggtgaggacttgatggtgcaggcacaacctggggtcacgtgtttgggtgttatgaatggaggaatgcaacctagagctgaaattaccttaggggcacgtcagttggaagagaacctggtggtgttcgatcttgcaaggtcaagggttgggtttagcacctcatcactgcactcgcatggagtcaaatgtgctgacctcttcaactttgccaatgcatgatgagccaagatcgcgagactttttataatatgcttatttataattaagcaagcatctactacatgttatggttaataaaagtaataatgtaagaataaagactttgaactaaataataatatgaacgattctctttcgttgttcaatgag

SEQ ID NO: 9582 - DNA, 1443 bp, Glycine max; identical to SEQ ID NO: 8138
  Clone ID: 700852388_FLI

SEQ ID NO: 9583 - DNA, 769 bp, Glycine max
  Clone ID: 700852414_FLI
caaataaaaacagtcaaattctaatatataccgtgcatcacacaaggaaaaaaaaaaaaaaagaaagaaaaaactagtcctacatagagagaggtgcgttgcgtgttggtgccgccctaatcgtgagaagaaaggaaaggcaaaagggaaagatggtgtgcataaggaaggcgacggtgaaggaccttctggcgatgcaggcgtgcaacctgttctgcctccctgagaactaccagatgaagtactacctctatcacatcctctcctggccccagctcctctacgtcgccgaagactacaacggccgcatcgtcggctacgtcctcgccaagatggaggaagagaccactgactgccacggccacatcacctccctcgccgtcctccgcacccaccgcaagctaggcctcgccactaagctcatgaccgccgcccagaacgccatggaacaggcatgccattgcccactttctttccctttagatgccacttaattacctttttgtttggattctctcactgacgcaggtgtttggtgccgagtacgtgtccctgcacgtgcgcaagagcaaccgcgcggccttcaatttgtacacggagactctagggtacaagattcatgatgtggaggccaagtattatgcggacggggaggatgcttacgacatgaggaagcagctcaaggggaagcagcaccaccatcatcaccatcaccaccaccaccgtcacgagcacggcggtggctgttgttccggggagcccaagggga

SEQ ID NO: 9584 - DNA, 2452 bp, Glycine max
  Clone ID: 700852435_FLI
gtcttttcatttctttcttttgttctgcaattagacattgctagggttctggagtactggattagctcattaaggattgagtactccatctatcttctgtcttcatggataaagacaaatctctaggtttgccacctccgtctggacgttattctggttactcgtccaccggaagtgttttcaacgtgaaatctgaaccgtccccgtcgtcgtcgaccacgttgtatccgccattggctccgggaaccaccagttccgagtctagccattttggacatggattgtccacggattctagtggttttagtcatgatattagcagaatgcctgataatcccccgagaaatagaggtcataggcgtgctcattcggagattctcactttaccggatgatattagtttcgacagtgaccttggtgttgttggaggtggtgatggtccttccttctccgatgatgccgaggaggacttgctgtccatgtaccttgatatggataagttcaattcatcgtcggcaacgtccacgtttcaaatggttgagccgtctaatgctgtgggagcatcggcttcaacaccggcgtcaggggcacccacctcttctaccgagaatgttgttattgggactaatgaaaggcccagagttagacaccagcatagtcaatccatggacggctcaaccaccatcaagcctgagatgctggtttcaggttcagaagacatgtctgcggctgattccaaaaaagcaatgtcagctgccaagcttgctgaacttgccttgattgaccccaaacgtgcaaaaaggtttgctttatgatttctgggtacattgtttcttgttcattaattaggcaatatgctagttgtaaatgtcatgtcatgtttatcactattctcaatccgttgcatatttattacctcatttctagttcatgctgcttttgaccaaatgagatgatgttgtataagaatgtttttatctaggatctctaaaatgagggaagtgtgtattttttgaagataaaatacagttataactctgttgtttgaatcatgatgcaactcgtgagattgcatgagtttatgcgccaatgttgggcttctgtgctggatcggacctgggatcattggtggcaaggattgtagtgggattgtgatctatcatgcgaaaacgtgagatcggcaatccttgcaagttatgtagaagtaaggattgggttgggtccctttaacccagtttcaaaaaccttgaatttcttttttccttcttgaaaaacactttcattctcttccccataagtgtttgaccctttctccccatcattcgcgactttcttgcaattgtcgggcgttgacgctgcactgcccttgtcgctgtgcgctgctgatgtcagtcacacctctgttttgacttttgacaacagagcatcctgtggaagctctcgaatattccttcatgttgggtgggaccaaatagatttgcatcattaaatagaaacccaaacgcccaatccagttttattttcaaaataaatatatattaacttagcttggacctgaaccaaaaacaataatgaagccgtatcttaaatttgggccgctatgcaaattataatttgtaatttacaaatatagaattaagctacttaactttgtttattattataactataattataatttaaagtttgttttctttatctctgttgtttttttatgcatatgtaataagtattttatataaaggaaggtaagatcttacaatctgagttacgatccctgagttatgagtttctgccccccttctgatcctaggaaaaatctcaattttaacaaccattataactgttggttataaaatctcacgaactcaactgttcatttttgttttttttaccaatgtttataacttctggaagtacacattttttcactttataggagccaatttcttttaactaatatttgtttgttgctagatgttgcaatcctttgtgattgtcatgattgatatctatatgcatttgacttacatgacactaaatctagttaactttatgagttatcacttctctttgtgacttgaaatagttaaggtgggcacaaattgaaggaaatagtgaaagataggaaggcttatagctgtcagttttttggagcatgatagtcaaaatcgcgttttggagcataggatcgtacaggtttacgatcattaccactctctctgatttcggttgcaattttggcggattgcactggatcaccattgaagatcgagacttgcagcggcacgacactttttttttgagtttgtttctaggttatttgcgggtcgggtttgcgacccaatactttaacccggattgcttcagcccaaaaaacctaattatttaagtccaaagcccagcttttctattccccctgcgtccaaataatcctgcgcccctttgacct

SEQ ID NO: 9585 - DNA, 1336 bp, Glycine max
  Clone ID: 700852454_FLI
acctacctctttttcttctctctcaacaacttcaccttcttcctcctcgatcatgtctcacttcaagggcaagtaccatgatgagcttattgccaatgctgcgtacattggcactcctggaaagggtattcttgctgctgatgagtcaacagggacaattggcaagcgtttggccagcatcagtgtagagaacattgaatccaacaggcgagctcttagggagctgcttttcactgctcctggtgttcttcaatatctcagtggtgtcatcctctttgaggaaaccctctaccagagcacagctgcaggcaagccctttgtgaatgtcttgaaggaagctggtgtgcttcctggcatcaaggttgacaagggcacagtcgagcttgctggaactaatggagaaaccaccactcagggtctagatggccttggtcagcgttgtgccaagtactacgaagctggtgcacgttttgccaaatggcgtgcagtgctgaagattggtcccaacgagccatctgagctgtctatccatgagaacgcctatggcttggctagatacgctgtcatatgccaggagaatggcctggttcccattgttgagcctgagatccttgttgatggacctcatgacattcacaagtgtgccgccgtcaccgagcgtgtccttgcagcatgctacaaggctttgaatgatcaccatgtccttcttgagggtaccctattgaagccaaacatggtcacccctggatcccaatctgctaaggtttcccctcaggtggttgccgagcacactgtcagagcccttcagagaaccgtgcctgccgcagttcctgctgtcgttttcttgtctggtggccagagtgaggaggaggcatctgtcaacctcaacgccattaaccaggtcaatgggaagaagccatggtcactctctttctcctttggaagggcacttcaacagagcacccttaaggcatggggcggaaaagaagagaatgtgaagaaggctcaggaagcccttttggtaagagccaaggctaactcagaggcaactctgggaacctacaagggtaactcacagcttgctgatggtgcctcagagagcctccatgtttcgaactacagctactgatcaatcgaagttggtgttgtttgaagagactagtgcgagtaggaatcggtattatgggtacgacaaccgaatttcttgttgataagtattattgtggtttgactcttcccagaataatcgtttggaattttgctttttgttttcctagtgttccttttatgtcaattttagtaattcagtgtatttggtcaaacctgtgcaacaggg

SEQ ID NO: 9586 - DNA, 1266 bp, Glycine max
  Clone ID: 700852465_FLI
gaccgagctagctagctagcaagcaagcacagagatggaggcaaagcgaggccatgccctcatgtgcttggcacgtgtttcactcttcctctgcgctctaaccctatccgctgctcacggaagcaccacggttcaagacatcgcgagaaagttgaaactcggggacaacgagcttctgcgcacggagaagaagttcaaggttttcatggagaattacgggaggagctactccacagaggaggagtatttgcgccgtttggggattttcgcccagaacatggtcagagcggcggagcatcaggcgctggaccccaccgccgtccacggcgtcacgcagttctccgatctcaccgaggacgagtttgagaagctctacactggcgtcaatggcggcttcccgtcatcgaataatgccgccggcggtattgcgccgccgttggaggtggacgggctgccggagaattttgattggagagagaaaggagctgtcaccgaagttaagttacagggtagatgtggatcatgctgggctttcagcaccacaggatctatagaaggagccaattttcttgccaccggaaagctcgtcagtcttagtgaacaacagctccttgactgtgacaacaagtgtgacataacagaaaagacttcatgtgacaatgggtgtaatggaggtcttatgacaaatgcctacaattatttgctcgagtctggtgggttggaggaggagtcttcatatccctacactggggagagaggtgaatgcaagtttgatccagagaaaatagcagttaagatcacaaatttcaccaatatccctgctgatgagaaccaaattgccgcatatttagtaaaaaatggtccacttgctatgggcgtgaatgcaattttcatgcaaacatacattggtggtgtctcatgccctctcatatgtagcaagaaaaggctgaaccatggtgtgttacttgtgggatatggtgcaaaaggcttctcaattcttaggcttggcaacaaaccatactggatcatcaagaattcgtggggggagaaatggggagaagatggctattacaagctctgcagagggcatggcatgtgtggaataaacactatggtttctgctgcaatggtgcctcaaccacaaacaacacctacaaagaattatgcttcttattagctatgcacttaaggaaatctaaataaatatttttcattctaggtgatgtatcatgtatgtaccaaaatattttggtacgtaagtctttt

SEQ ID NO: 9587 - DNA, 439 bp, Glycine max
  Clone ID: 700852469_FLI
gggtggttctggtgtgcatggctagttttactaagttggcatgggtggttctggtgtgcatggttgtgatgggtgcacacaacactgtccaaggcatcacgtgtgggcaagttcagggtaacctagcaccgtgcctagggtttctccataacggtggagctgttaccagaggatgctgcaacggggtcaggagtattgtgagcaatgctaggaccactgctgatcgccgtggtgtgtgcaactgcttgatggttgctgctggtgctgttcgtaggttcaacacttacaatgcgcaggctctccccgggaaatgtggggtctacataccctacaagatcagcacctccaccaactgtaacagcatcaggtgaaggacaaaaagatttggatagtgatttggccgcgatgaactatgcatatggtactacgtatacgtgct

SEQ ID NO: 9588 - DNA, 1477 bp, Glycine max; identical to SEQ ID NO: 8549
  Clone ID: 700852486_FLI

SEQ ID NO: 9589 - DNA, 1163 bp, Glycine max
  Clone ID: 700852504_FLI
cttcacttttctccgagtttttattatcatcatctctctcgtgtccctgtccccatctccatctcttagtttcttcttcaaatggcagaagttgaagacatagacaaccctcatcacgaccaccatcattacctttcttcttctacaacacaaactccaatgatcaatttcccgcgagatctgttaagaaccttcgtgggagtgaacaataataacaataacaacagtcagcaccttccttccttgttcaaaagggtcttcctagaaacactcaaggtgtgactgggttaggccatgcaccaatttctcttccaaaccaactcgcttcccactttggcctacaacgccaattcaccacttgcctttctcgctaccctacttcaaagggtgctataatattcggggatgcacctaacaacatgcgacagtttcaaaaccaagatattttccacgatttggccttcaccccattaaccatcaccctgcagggagagtacaacgtgagagtcaactcaataagaatcaaccagcacagtgtgttcccactgaacaagatatcatccaccatcgtagggtcgacctctggaggaaccatgattagcacctcaactcctcacatggttctccagcaatccgtgtaccaggctttcactcaggtgtttgctcagcagctaccaaagcaagcacaggtgaaatctgtggcaccatttgggttatgcttcaactccaacaagatcaatgcatatcctagcgtggaccttgtgatggacaagcccaatggtcctgtttggagaatctctggtgaggacttgatggtgcaggcacaacctggggtcacgtgtttgggtgttatgaatggaggaatgcaacctagagctgaaattaccttaggggcacgtcagttggaagagaacctggtggtgttcgatcttgcaaggtcaagggttgggtttagcacctcatcactgcactcgcatggagtcaaatgtgctgacctcttcaactttgccaatgcatgatgagccaagatcgcgagactttttataatatgcttatttataattaagcaagcatctactacatgttatggttaataaaagtaataatgtaagaataaagactttgaactaaataataatatgaacgattctctttcgttgttc

SEQ ID NO: 9590 - DNA, 670 bp, Glycine max
  Clone ID: 700852535_FLI
ggccctcacgtggcgacagtaacgaagtgggaccaagtgttgaaaatgcaaaggcctataacgggaacctgattgctcatcttagatcattggttgggacacctttgatgcctgggaagtctgtggacacttacatttttgcactctatgatgaggatctaaaaccaggcccaggatctgaacgtgcatttggtatgttcaaaactgatcgcaccgtgttgtacgatgttggattaaccaagtctagccagcagactccaacaactccggtaactccagcaccaaacactgctggatggtgtgtagcgaaagctggagtttctgatgctcagttgcaggccaacattgactacgcctgtagccaaggtatagattgcgggccaattcagccaggaggctcttgttttgagcctaacacaatagcatcccatgctgcatttgccatgaatctctactatcaaacttctggcaaaaatcaatggaactgtgatttctctcaatcagcaacactcacatcccaaaatccaagttacaatgcttgcatttacactggtgggagcacctgaaaacagaggcttcggcttgatgttaactaataagttttgtggatagaggtgtatttagaattaaattaatgaataagggcttatactttgccctctttttagtt

SEQ ID NO: 9591 - DNA, 1514 bp, Glycine max; identical to SEQ ID NO: 8323
  Clone ID: 700852561_FLI

SEQ ID NO: 9592 - DNA, 1060 bp, Glycine max
  Clone ID: 700852624_FLI
caaggctccacagacaagtacagttcccgcttcaacccctccagtgtcagtagcgcctcaagctcctgctcctgctgcaactggggcactgcctgcatctgttactgcacctgtatcttcaccttctccagctccagccccagctcctgctcctatatcttcaggaactgctgtggaagggtctgatatctatgggcaggctgcgtccaatctggttgctggaagcaacttggagggaacaattcagcaaattcttgatatgggtggagggagctgggacagggatactgttgtccgtgctcttcgagctgcctacaacaaccctgagagagctgttgaatatttgtatacaggtatccctgagcaagctgaagctccacttgtagcccgggcgcctgtaagtgctcaacctacaaatcctcctgctgatgctccacaaacagcacaacctgctgcagttacctcagctggacctaacgctaatcctttagacctttttccccagggtctccctaatgtgggttctggtgctgctggtgctggttcattggactttttacgcaacagtcaacaattccaagccttgcgagctatggtgcaggctaatccacaaatattgcagccaatgctacaagagcttggcaagcaaaatccccatcttatgagattgattcgagaccatcaagctgacttccttcgcttgataaatgaacctgctgaaggtggcgaagggaatatattggggcagatggcttctggaatgccacaagcagtaactgtcacccctgaggagcgccaagcaattgaacgtcttgaagcaatgggttttgatcgtgcaatcgtattggaggtgtacttcgcttgcaacaaaaatgaggaattggctgccaactaccttttagatcacatgcatgagttcgaggaacaatagatctacttttgaatttgccaaattatttcttgtcatctttttctctcgatgggtctttgttacactctatgtttaatgaggtaatgcttgataatgtcaaatctcaagtggataagggatgttttagtc

SEQ ID NO: 9593 - DNA, 536 bp, Glycine max
  Clone ID: 700852639_FLI
gcagaggcagcagctagagcatacgatgaagctgctcttcgtttcagaggcaacaaagccaaactcaattttcctgagaatgtcactctccgacaacctcaattcactgtttccaattctccatcttctcttgtatctattacaacatcaacagacccagttgttcacagtactcgacctcttcttcttccttctcaggcttcaactgcgaccaatgtttacgagtattttcaactctcgggcttccccaccaacaccaacctttatgatggtaataggatgtttgtgacgtctaatgccatggcttctcatcatcttcaatcttcgtcttcgttgttgtcgtcttcttcttctgcgtttgtttcttctgtaacttctcaggacacttcactttcttcgttgtattctggccagttgccaccatggtcaaaggtttctggtcacagctcgtcttcctccggatgatcctttttgtttaatgtttatggaatctgtatttttcttctttcattatcataatctcttcattttttttt

SEQ ID NO: 9594 - DNA, 2772 bp, Glycine max
  Clone ID: 700852649_FLI
cccttcttcttttgcgttcattctgttttcatagtgaggatcttctgaagaaatggcaaatcaccctttgacacactctcactctttccgcgagaggtttgatgaaactctcactggtcacaggaatgaaattttggcccttttgtcaaggcttgaagccaagggcaagggaatcctgcaacaccaccaggtggttgcagagtttgaagaaatccctgaggagagcagaaagaaactccaaggtggtgtctttggagaagttttgagatctacacaggaagccatagtgctgccaccatttgtggctctggctgttcgaccaaggcctggtgtttgggagtatctgcgggtgaatgtgcacatgcttgttgttgatgagctgcttcctgctgagtatctgcgtttcaaggaggagcttgttgagggaagttctaatggcaactttgtgcttgagttggactttgaaccgtttaatgcatccttccctcgcccaactctgaacaagtccattggaaatggcgtcgagttcctcaaccgccacctttcggccaagctcttccatgacaaggagagcatgcagccactgcttgaattcctcaggcttcacagttataagggaaagaccatgatgttgaatgacaaagttcaaagcctggattctctccagcatgttttgagaaaagcagaagagtatctgacttcagttgctcctgaaacaccctactcagaattcgaaaacaaattccgggaaattggtttggagagggggtggggtgacatcgccgagcgtgtcctcgagatgatccagcttctcttggaccttcttgaggcacccgacccttgcaccctcgagacattccttggaagagttcctatggtcttcaatgttgttatcctttctccccatggttactttgcccaagataatgtcttggggtaccctgacactggtggacaggttgtttacatcttggatcaagttcgtgccttggagaatgagatgctcaaccgcatcaagaaacaaggccttgatatcacccctcgtattctcattattactcgtcttctccctgatgcagtaggaactacctgtggccaacgtctagagagggtatatgatactgaatattgtgacattctccgagttcctttcagaaccgaaaagggaattgttcgcaaatggatctcaagattcgaagtctggccatacctagagacttacactgaggatgttgcccttgaacttgccaaggaattgcaagccaagccagatctgatcgttggaaactacagtgatggaaacattgttgcctcgttgttagcacataaattaggagtaactcagtgtaccattgctcatgctctagaaaagaccaagtaccctgagtctgacatttactggaaaaaatttgaagagaaatatcacttctcatgccaatttactgctgatctttttgcaatgaaccacacagactttatcatcaccagcaccttccaagagattgctggaagcaaggacactgttggacagtatgagagtcacactgccttcacccttccaggactctaccgtgttgttcacggtattgatccctttgatccaaagttcaacatcgtctctcccggtgccgacatgagcatatacttcccatacactgaaactgagcgtaggttaacagagttccaccccgacattgaagagcttctttacagctcagtggagaatgaagaacacatatgtgtattgaaggaccgcaacaagccgatcatcttcaccatggcaagacttgaccgtgtgaagaacatcacgggacttgtggagtggtatggcaagaatgcgcgcctccgcgagttggtaaacctcgtggtggtggccggagacaggaggaaggagtccaaggacttggaagagaaggccgagatgaagaagatgtatggcctcatcgagacctacaagttgaacggccaattcagatggatctcctctcagatgaaccgtgtgaggaacggagagctctaccgtgtcatctgtgacacaaggggtgcctttgtgcagcctgcagtttatgaggcctttgggttgactgtggttgaggccatgacttgtgggttaccaacatttgccacatgcaatggtggtcctgctgagatcattgtgcatggaaaatctggttaccacattgacccttaccatggtgaccgtgctgctgagatccttgttgagttctttgaaaagagcaaggctgacccatctcactgggacaaaatctcccagggtggactcaagcgtattcatgagaagtacacatggcaaatttactctgacaggctcttgacactcactggtgtgtatggcttctggaagcatgtgaccaatcttgaacgccgtgagagcaaacgttaccttgagatgttctatgctctcaagtaccgcaaattggctgagtctgtgccccttgctattgaagagtaaaatcatgtttgaagagaacatgaatggagaaaccggcttttggtcgtttggagtcttatggagctttcataaataaagccattgaattttgattgtgatctgtttttggatttaaagagtctaaaaaaaaaagtgtcgttgatttttgatattttgcgtaggttttgtgtaaaacaaaaaacaaaaaaatagttttttttattcttttcttttttgttgttgcaatattgagtatggttggaaatctttaaatttgggtgttccaccccatcaattcaatttaaagatatgccttcttc

SEQ ID NO: 9595 - DNA, 1180 bp, Glycine max
  Clone ID: 700852650_FLI
ggatctggtatggacctcagaagcaaagccaggactcttcctgggccagtgagtgaccctgcaaaacttccgaagtggaactatgatgggtctagcacagatcaagctccaggggatgacagtgaagtcattctatacccacaagctattttcaaggacccctttaggagaggaaacaatattcttgtcatttgtgatgtgtacaccccagctggtgagccacttccaaccaacaagaggtatggtgctgccaaaattttcagtcaccctgatgttgctgctgaggaaccatggtatggtattgagcaagagtataccttattgcagaaagatgtaaattggccacttgggtggccccttggtgggtttcctggaccacagggcccatactactgtggaattggtgctgataaagcctatggccgtgatattgtagatgcacattacaaagcttgtatttatgctggcattaacattagtggcatcaatggagaggttatgcctggccagtgggaatttcaagttggtccttctgttggtatctctgctggagatgaggtgtgggctgctcgctacattttggagaggattacagagatagctggagcaattgtttcatttgatcccaagcctattccgggagattggaatggagctggagctcactcaaactacagcaccaagtccatgagagaagagggtggttatgaggtgatcaagaaggccattgaaaagcttggattgaggcacaaggagcacatcgcagcatatggagaaggcaacgagagacgtctcacgggaagacatgaaactgcagacatcaacaccttctcttggggtgtggcaaaccgtggaagctccattagagttggaagagacacagagaaaaatggcaaaggttacttcgaggacagaaggcctgcttctaatatggatccctatgtagtcacctccatgatcgcagagactaccatcctctggaaaccatgaaaacacagtcatatgtctctagatttggaccacttaaaattgtgtgttcaatagtcatttgatctaaaattttatatttgcaaggtgttgtttagttaggaattgccaagtggtcttttgagcctccatgtaccatgtgtatggtagagaataatctcttcattaataacaagaattgcttcttgatttc

SEQ ID NO: 9596 - DNA, 1002 bp, Glycine max
  Clone ID: 700852695_FLI
cctacacctaccagagctgaagttgcagatgtttctgaagcagtcaggcaacgagctgatgctttgatgctttctggtgaatcagccatgggccagtaccctgagaaggccttaactgttttaaggagtgtcagtttgagaattgagaaatggtggagggaagagaaacgctatgaagctatgttgctcccatcggttgggtcttatttttcagagaagatatctgaagaaatctgcaattcagctgctaagatggccaataatttagaggtggatgcactttttgtgtacacaaagacagggcacatggcatctctattgtcacgctgccgtcctgactgcccaatctttgcttttactaccacttcatctgtgcgtaggcgtctgaatcttcagtggggcttgatacctttccgcttgagcttcacagatgatatggagagcaatctcaacagaaccttttcattgctcaaggccagaaatctgatcaaatcaggtgaccttgtcgttgccgtctctgacatgttgcagtcaatacaagtgatgaatgttccttgagaacatgttcatttcttctgaaagccaacatagccgtttgttcaaaacctgggatgctgctagaggactaaaatgggcagagactacacgaatgaattttgtcgttctgtcattttaatttataggacgctactgaagtttgggagagttaatattatggccttgaagttctttattttattgcatacaccttcaagctctagatgtcttttttagtcgagtgagatagtatagcgtagttacccttttaaattgtaaggcacatatgcatttcctatgtttatatcatgatattagctgtccacttcaatgttgactaaaatgtgaaggttgcaataaagattccattgtagttgcctatcattatgcacaatgtatttgtcctgtgtaaactaaatgttacagtgcatatccgcagcagttaaatgaagcagtatttggtac

SEQ ID NO: 9597 - DNA, 811 bp, Glycine max
  Clone ID: 700852775_FLI
gttagtagacagaaattggaccgtgaaggtctgtgattttggattgtccagatttaaggcaaatactttcttatcatcaaaatccgttgctggaacagttgaactttcacttcatggtgccacatcttcaataagtgtgtaactctcttaattttattttcagcctgagtggatggctccagaatttcttcgaggagaaccttcaaatgagaagtctgatgtttacagttttggggttatcctgtgggaacttgtgactctgcaacaaccatggaatggacttagtcatgcccaggtggttggagctgtcgctttccagaataggagactagctatccctccaaacatctccccagcattggcctccctcatggaatcttgttgggccgataaccctgctgatcgtccatcttttggtagcatagttgagtcgctaaagaagctactgaagtcaccagcggatgcaataaaaatgggtggggcaataacataaggagtactctgcccatgactggggtttttggttgctgaaatttattaattaacctaattgatggcatgaagccctttggttgttgcaatttgtatatcgatcggttgattcatgcaaacccatttcgtaagggcacttaaagcaatctttggattcttctgctaaaatgatgacctcaagctcttttatctatagctttgagatcaataaaaatagtgacttgctccctccaagctataattatttggagcttgctattgtttttcagattgtatatatgtaataaattatttgacaatatatatctgatatctcgtc

SEQ ID NO: 9598 - DNA, 1118 bp, Glycine max
  Clone ID: 700852795_FLI
aaaggaacatggaaagtgagagagagattatgatgattccatgttttgattttggcaaggcattagaagaagggagtgaggagtggaaagaaatgagcaagaaagtgagagaagcatgtgagagtcacggttgcttcctcttggtttgtgatgagatgattcctaagggtgtacgtgaagagttttttagtaatatggaagcattgtttgatttgcctgaagaaagaaagatgaagcacataagtccaaagccttatagcagctacagtggcaagagccctgtcattcccctcagtgaaacctttgggatcgatgatgttcctctctctgcttcggctgaggccttcaccaacctcatgtggcctcaaggaaacccacctttctgcgagacactaaagatcatgagctcaaagatgttaaaattaagttctctcatcctgaaaatgattgtggaagattatggcattcaacaacattacatctcagatgttgaaaagatgaaaagctctagcaattcacgattgatcaaatacaaaattcctgaaaataataatgactccaatactggcctggtgtctcacacggacaaaaatgcgttaaccattatatgccaaaacgaagtccaaggactccaagtactgtccaaaacagacaattggattgaattggagatacctcagaatggctttgtggtcattgttggtgatatactaaaggcgtggagcaatgggaggcttcatgcagctacacacagagtgatgatgagtggagacaaagaaagatattcatttgggctttttacaatgccaaaggaagagatggacattgaggtacccattgagttggtggatgagaaaattcatccccttcgttatcattcattcaaatatggagagtacatctcttactttgtttcaaatctcaaagaaaatgctcttgaagtgtttgcaggtctttgaaagccctttatgcattatactagttgtttatgaataaatacaggagcaaggcaaaatatacaagagattgctatatatagaactccttttaattgtgtaatgcagaataatatttagatcgactttacattaataaaactctccgtatgtgttatacat

SEQ ID NO: 9599 - DNA, 1396 bp, Glycine max
  Clone ID: 700852828_FLI
ggaatctgtccacaaaaattagaatggcaattcaggtggttgataagatttctatgactataaataagataagggatgaagaactgtggccacagctgaaggaattaatccaggggttgaccagaatgtggaaatccatgcttgaatgtcatcatgatcagtgtgaagcaattagagaagccagaatactgggttccattggatccaggaagaagagcggtgatagtcatctccaggcaaccaagcagctcgaacaagagcttatcaattggacattccaattctctggctggataagtgctcaaaaaggttatgttagagcattgaataattggctgttgaaatgtctcctgtatgaacctgaagaaacaccagatggcatagtccccttttcccctggtaggattggggccccgcaaatatttgtaatatgtaatcagtggtcccaagctttggatagaatatctgaaaaggaagttgttgattccatgcatgtatttaccatgagtgtgcttcagatatgggaacaagataagctagaaatgcataggcaggtgatgaagaacaaggatcttgagagaaaagtgagaaatatggatagagatgaccagaagctgcagaagcaaattcaagcattagagcgaaaggtggttctggtatctggagaaggcaaaggtctctcagtttctgagaatatcatatatcagagtgacaaaagcagtagtctacaggctagcttgcagcgcatttttgaggccatggagagatttactgatgaatctgtgagagcttatgaggagttgctacaacggagcgaagaagaaagtgctgcccgaaatcatgagagagtttcataggggtggtgtagctgatggaagttggaatgatattatctttgccatttgccgagaatagaaactagctgatctccctctactaactattctttacaacagagtcttgggaggaggggttgggtttgatttctcactacgctaagctaactgcattggagctgaagatactactgagatgggacagtggagtttattgtcaaacgaaaagagaagtgtgaggtattaggcgcacagttgctttttgggtatgcagcgctataaggctacaagtgaagttgtgctgctaaaagacaggggaaggggagcccacaaattgtaacatctaaatggttcttctttctgcatttgaaaatagaaatgaaggagaaggacggactttcgggtatagaacccctgcaactggcaagtcatgtgatagaaggctcaaattgaatcagtaaaattggagtaacgcacgccactgaatgcatgggtgttattggttcctgtataaaaacattcgtttttaagttaaattattgtacagattacctattaac

SEQ ID NO: 9600 - DNA, 782 bp, Glycine max
  Clone ID: 700852844_FLI
caatactagcgatagctgataagagagataccaacaagaaaagaaaaaaagaagagttgagattccctttgaagaaaagatggcatcccataggcaaagctatgaagctggtcaaactaagggccgaactgaggaaaagacgaaccagacgatgggcaatattggagagaaggctcaagctgcaaaggagaagacccaggaaatggcccaagctgcaaaggagaagacccaacaaacagcccaagctgccaaggacaagacttgcgacacttcccaagcggcaaaggagaaggcccaacagaatacaggagctgctcaacaaaagacctcagagatgggccagtccacgaaggaatcggcccagtcagggaaggacaacacccaagggttcctgcagcagacaggggagaaggtgaagggcgcagcccaaggtgctacagaggctgtgaagcaaacccttggcttgggcgagcatgatcaagacaaccgcagaaattactaatactataatttgaagtgctttcttgtagtagtggtttacgcagcatggctttttaaataagctgctattccctacactcctacctaaggagtgtactattatccgcagtttctattctctctagctactttcatgtatgttcaatgctatatatagccttgaattaatgtcaactatgttctaattaatgctatagcttcggtttgtgttactttttaggtgcattacactttttgtgtctcacgaatggtaaactaaaatcagtgtagttatacactac

SEQ ID NO: 9601 - DNA, 1493 bp, Glycine max
  Clone ID: 700852895_FLI
caaaccttgctctatactacacagtacacacactagaagaataatggcttccatcctccactactttttagccctctctctttcttgctcttttcttttcttcttatccgactcagtcacccctacaaaaccaataaaccttgttgttctacccgttcaaaatgatggttccacagggctccattgggccaacctccaaaaaagaacccctctaatgcaagtaccagtcctggtggacctcaatggaaatcacttgtgggttaactgtgagcagcagtactcatccaaaacgtaccaagcacccttctgccactccacccaatgctctagagccaacacccaccaatgcctcagttgccccgcggcatcaaggccagggtgccacaaaaacacgtgtggcctcatgtccactaatcccatcacccaacaaaccggtttaggtgaactaggagaagacgttcttgcaatccacgccacacaagggtcgacccaacaacttggcccattggtcacagtcccacaattcctcttttcttgtgcaccttccttccttgttcaaaagggtcttcctagaaacactcaaggtgtggctgggttaggccatgcaccaatttctcttccaaaccaactcgcttcccactttggcctacaacgccaattcaccacttgcctttctcgctaccctacttcaaagggtgctataatattcggggatgcacctaacaacatgcgacagtttcaaaaccaagatattttccacgatttggccttcaccccattaaccatcaccctgcagggagagtacaacgtgagagtcaactcaataagaatcaaccagcacagtgtgttcccactgaacaagatatcatccaccatcgtagggtcgacctctggaggaaccatgattagcacctcaactcctcacatggttctccagcaatccgtgtaccaggctttcactcaggtgtttgctcagcagctaccaaagcaagcacaggtgaaatctgtggcaccatttgggttatgcttcaactccaacaagatcaatgcatatcctagcgtggaccttgtgatggacaagcccaatggtcctgtttggagaatctctggtgaggacttgatggtgcaggcacaacctggggtcacgtgtttgggtgttatgaatggaggaatgcaacctagagctgaaattaccttaggggcacgtcagttggaagagaacctggtggtgttcgatcttgcaaggtcaagggttgggtttagcacctcatcactgcactcgcatggagtcaaatgtgctgacctcttcaactttgccaatgcatgatgagccaagatcgcgagactttttataatatgcttatttataattaagcaagcatctactacatgttatggttaataaaagtaataatgtaagaataaagactttgaactaaataataatatgaacgattctctttcgttgttcaatgagaaattaatgttgttgc

SEQ ID NO: 9602 - DNA, 1219 bp, Glycine max
  Clone ID: 700852907_FLI
ggttaactgtgagcagcagtactcatccaaaacgtaccaagcacccttctgccactccacccaatgctctagagccaacacccaccaatgcctcagttgccccgcggcatcaaggccagggtgccacaaaaacacgtgtggcctcatgtccactaatcccatcacccaacaaaccggtttaggtgaactaggagaagacgttcttgcaatccacgccacacaagggtcgacccaacaacttggcccattggtcacagtcccacaattcctcttttcttgtgcaccttccttccttgttcaaaagggtcttcctagaaacactcaaggtgtggctgggttaggccatgcaccaatttctcttccaaaccaactcgcttcccactttggcctacaacgccaattcaccacttgcctttctcgctaccctacttcaaagggtgctataatattcggggatgcacctaacaacatgcgacagtttcaaaaccaagatattttccacgatttggccttcaccccattaaccatcaccctgcagggagagtacaacgtgagagtcaactcaataagaatcaaccagcacagtgtgttcccactgaacaagatatcatccaccatcgtagggtcgacctctggaggaaccatgattagcacctcaactcctcacatggttctccagcaatccgtgtaccaggctttcactcaggtgtttgctcagcagctaccaaagcaagcacaggtgaaatctgtggcaccatttgggttatgcttcaactccaacaagatcaatgcatatcctagcgtggaccttgtgatggacaagcccaatggtcctgtttggagaatctctggtgaggacttgatggtgcaggcacaacctggggtcacgtgtttgggtgttatgaatggaggaatgcaacctagagctgaaattaccttaggggcacgtcagttggaagagaacctggtggtgttcgatcttgcaaggtcaagggttgggtttagcacctcatcactgcactcgcatggagtcaaatgtgctgacctcttcaactttgccaatgcatgatgagccaagatcgcgagactttttataatatgcttatttataattaagcaagcatctactacatgttatggttaataaaagtaataatgtaagaataaagactttgaactaaataataatatgaacgattctctttcgttgttcaatgag

SEQ ID NO: 9603 - DNA, 1320 bp, Glycine max
  Clone ID: 700852922_FLI
cctgatgtcatcatgggtcagggaacaattggcatggaaattgtccgccaaatgcaaggtccaatttatgcaatctttgtgcctgtgggaggtggtggtctcattgctggtattgctgcttatgtgaagagggttaacccagaggtgaagatttttggggttgagcccactgatgcaaatgcaatggcgttgtcactccaccatgaccagagagtgattttggaccaggttgggggatttgcagatggcgtagctgttaaagaggtcggtgaagaaactttccgcatatgcaaggagttgatagatggcattgttcttgtaagccgtgattcaatttgtgcgtcaataaaagatatgttcgaggagaaaaggaacatattagaaccagcaggagcacttgcactagctggagctgaggcatactgcaagcatcatgggatccaggggaaaaatattgtagcaataaccagtggagcaaacatgaattttgataaacttcgggttgtaactgaacttgctaatgttggtcgtaaacaagaggctgtgctggcaactgttatggcagaggagcctggcagtttcaaacaattttgtgaattggtggggcagatgaacataacagaattcaaatacagatataactcaaatgagaaggcagttgtcctttacagtgttggggttcacacaatctccgaactaagagcaatgcaggagaggatggaatcttctcagctcaaaacttacaatctcacagaaagtgacttggtgaaagaccacttgcgttacttgatgggaggccgatcaaacgttcagaatgaggttctttgtcgtctcacctttccagaaagacctggtgctttgatgaaatttttggactccttcagtccacgttggaatattagtttattccattaccgaggggagggtgaaactggagcaaacgtgctagttggattacaggtacccaaaagtgagatagatgagttccatgatcgtgctaacaaacttggatatgattataaagtggtgaataatgatgatgacttccagcttctaatgcactgatgggggttttaggcacttgtcattattgtgtattttagtggacaagattatcatatttaatatttccactgtcgcttcaaaaggttagatgtcattagttgattagaggaacaactagtgctttttacctagtgaggtgtcttatcacatttttataatcggtagtttatgttttttttttttttttgggaagcattggaatcttatatgttgttgcctggtcttttgtgtctgtaatataagtgtcttcaaaag

SEQ ID NO: 9604 - DNA, 2601 bp, Glycine max
  Clone ID: 700852943_FLI
cgttcattctgttttccagttgaagtctttccctagccaatggccactgatcgtttgacccgggttcacagtctccgtgagaggcttgatgaaaccctcactgccaacaggaacgaaattttggcccttctgtcaaggatcgaagctaagggcaaggggatcctgcaacaccaccaggtcattgctgagtttgaggaaatccctgaggagaacaggcagaagcttactgatggtgcctttggagaagtcttgagatctacacaggaagccatagttttgccaccatgggttgctctggctgttcgtccaaggcctggtgtgtgggagtacctgaaagtgaatgtgcacgctcttgttgttgaggagttgcaacctgctgagtaccttcacttcaaggaagaacttgttgatggaagttctaatggcaactttgtgcttgagttggactttgaaccattcaatgcagccttccctcgcccaactcttaacaagtcaattggaaatggtgtgcagttcctcaaccgccacctttctgccaaactcttccacgacaaggagagcttgcacccacttttggaattcctcaggcttcacagcgtcaagggaaagactttgatgttgaatgacagaattcaaaactcagatgcactccaacatgttctgaggaaagctgaggagtatctgggcacagtgcctcctgaaactccctactcagaatttgagcacaagttccaggagattggtttggagagagggtggggtgacaacgcagagcgtgttcttgagtcaattcaacttctcttggatcttcttgaggcccctgacccttgcacccttgagactttccttggaagaattcctatggtcttcaatgttgtcattctttctccccatggttactttgcccaagataatgtcttgggataccctgacactggtggccaggttgtttacatcttggatcaagttcgtgctttggagaacgagatgctccatcgcattaagcaacaaggattggacattgtacctcgtattctcattatcacccgtcttctccccgatgcaatcggaactacttgtggccaacgtcttgagaaggtgttcggaaccgagcactcccacattcttcgagttccctttagaactgagaagggaattgttcgtcagtggatctcaagattcgaagtctggccatacttggaaacttacactgaggatgttgctcatgagcttgccaaagagttgcaaggcaagccagatctgattgtcggaaactacagtgatggaaacattgttgcctctttgttggcacataaattaggagtcactcagtgtaccattgctcatgcacttgagaagaccaaataccccgaatccgacatttactggaaaaaattggaagagagataccacttctcttgccaattcacagctgatctatttgccatgaaccacacagatttcattatcaccagtaccttccaggagattgctggaagcaaggacactgttggacagtatgagtctcacacagcctttacccttcctggactctaccgtgttgtgcacggcattgatgtctttgatccaaaattcaacattgtctcccctggagctgatcaaaccatttacttcccccccaccgaaactagccgtaggttgacctccttccaccccgaaatcgaagaacttctttacagctctgtggagaatgaagaacacatatgcgtgctgaaggaccgcagcaagccgattatcttcaccatggcaaggttggaccgtgtgaagaacatcacaggactcgtggagtggtacggtaagaacgcgaagctgagggagttggtgaaccttgtggttgttgccggagacaggaggaaggagtcgaaggacttggaagagaaggccgagatgaagaagatgtacggcctgatcgagacctacaagttgaacgggcaattcagatggatttcatctcagatgaaccgtgtgaggaacggagagctgtaccgtgtgatctgcgacaccaagggagctttcgtgcagccggctatatacgaggcttttggtttgacagtggttgaggccatgacttgtgggttgccaacattcgccacatgcaatggtggtcctgctgagatcattgtgcatggcaagtctggcttccacattgacccttaccatggtgaccgtgctgctgatctccttgttgacttctttgagaagtgcaagcttgacccaacccactgggaaacaatctcaaaggctggtctccagcgtattgaagagaagtacacatggcaaatttactcacagaggcttctcactctcactggtgtctatggcttctggaagcatgtgtctaaccttgaccgccgtgagagccgccgctatctcgagatgttctatgctctcaagtaccgcaaattggccgagtctgtgccccttgctgttgagtaaactgaggatgaagagttggataaagaaatggaggaaccggctttttgtttctcatttggagtttgtcttacttgagttctataaataatatgtccctgatgattttaattttgtgattaagctttcgataagagacagagagag

SEQ ID NO: 9605 - DNA, 1788 bp, Glycine max
  Clone ID: 700852965_FLI
tcacctgctgagcgagaacgtggtggcaggtgaagctaccaaacaagttgacccaattatagagtttgccacctgctgagcgagaacgtggtggcacatccaaacttgcagaagccatggagaggagtataccagtggttagggaggcttggttgattgacagcattgaaaagcaagaaccacaacctttggaagcttatgatcttgtctctgatctttctgtggatggcaagggtatcccctgggacaaacaagatcctggggaagaggctatcgaatcactctcagcagaactcaagctttatgggaagagaggagtctataaagataccaagttgcaggaacaaggtggaaagatatttgaaagagatgggatactatacaactgtgccttctctgtttgtgaccaagggcgaggactgaatgactactgtgtcatgcaactgattgttgtcccagagaatcgtttgcatctgtactttaagaaagggagagttggggatgatccaaatgcagaggagcgattagaagagtgggacaatgtagatggtgctctgaaagagtttgtgaggctctttgaggaaataacaggaaatgagtttgaaccttgggaaagagagaagaagttccaaaagaaacctttgaagttttaccccattgacatggatgatggaattgaagttagacatggggcactaggtcttcggcagctggggatagcagcaacacactgcaaacttgagcctttggttgcaaattttatgaaggtcttgtgcagccaggagatatataagtatgcattgatggagatgggttacgactgtccggaccttccaataggaatggttacaaatcttcatctgaaaaaatgtgaggacgttctcttagaattcatagacaaggtgaaatcattgaaagagactgggcccaaggctgaggctgtgtggactgattttagccaaagatggttcactctgatgcactccacaaggcctttcaattttagagattaccaagagattgcagatcacgctgctgctgcgttagagggggtgagagacataacccaggcttctcacctcataggagatatgactggctcaaccattgatgacccgttatcagagacatacaagaaattgggttgctcaatttctgccttggacaaaagttcagatgattacgagatgattgtgaaataccttgaaaaaacttatgagccggtcaaagttggtgacattgaatatggggtgtcagtggaaaacatttttgcggttcaaacaggtggttgcccttcctatgaagacattataaaactaccaaataaggttcttctatggtgtggatcacgaagctcaaacctcttgaggcacttgcaaaagggattcttgccagcaatatgctcattacctattccgggttatatgtttggcaaagctattgtctgttctgatgctgcagcagaggctgcaagatatggttttactgctgtggacaggccagaaggattcttggttttggccattgcttctctaggaaatgagattaccgagttgaaaaccccacctgaggatgcatcatctttggaggaaaagaaggttggagtgaagggaccggggaagaagaaaacagatgaatcggagcattttgtttggaaagatgatataaaagttccttgcggtaaactagttgcctcagaccatcaagatagccccctggaatacaacgagtatgctgtctacgataaaaagcgggcacgcataagctacttggtgggagtgaagtatg

SEQ ID NO: 9606 - DNA, 1167 bp, Glycine max
  Clone ID: 700852966_FLI
attccaacaaaaaattggccctttgagggttcagtcagtggcaacaaccactccaggagtcaccaaggcttcaccagaaggcaagaaaactttgaggaaaggcagtgttattgtcactgggcttcctctggattaggcctggccacggccaaggctttggctgagacaggaaagtggcatgtgattatgacctgcagggatttcctcaaagctgagagggctgcaaaatctgctggcattgctaaggaaattgtgtctcttgatagtgtgaggcaatttgtggataacttcaggcaatcaggcaggccactagatgtgcttgtttgcaatgctgcggtttacttgccaactgctagggaacctacatacactgctgatggctttgaactcagtgttggaacaaaccatttggggcatttcctcctttcacgccttttgcttgaggacttgaacaaatctgactacccttcaaagtggttgatcattgttggctccatcacaggaaacaccaacaccttggctggaaatgtgccacccaaggctaaccttggtgacttgaggggactagctggaggcttgaatgggctaaacacttcagccatgatagatggaggatcctttgatggcaccaaggcttacaaggacagcaaagtctgcaacatgtttacaatgcaagaattccacagaagataccatgaagaaactggaatcacatttgcttccctttacccaggttgcatcgccacaacaggcttgttcagagagcacatgtgttgtgagtgatccaagcctgacaaaatcaggtgtttactggagctggaatgcagcctctgcttcgtttgaaaaccaattgtcccaagaggccagcgatgcagataaggcttgcaaggtttgggagattagtgagaaacttactggtttggcttaagtggcactatggcagcttctaatatttcagggacatttgtcatggagttcaataacatcttagaagagtttagacccttttctgatgcgtttgttagattctttttctagctgctaactcctcttgttctgatgactactgtcgatgaatccttcacctgaggccaagtgcacatgaactatagagaaataataactatgcacattgactgtgatcaatgtcattgcctatctttggcc

SEQ ID NO: 9607 - DNA, 624 bp, Glycine max
  Clone ID: 700852989_FLI
caccaccaatgtatgtttgcatgaaaattgcattcacgcccatagcaagtggaccattttttactaaatatgcggcaatttggttctcatcagcagggatattggtggtgtctcatgccctctcatatgtagcaagaaaaggctgaaccatggtgtgttacttgtgggatatggtgcaaaaggcttctcaattcttaggcttggcaacaaaccatactggatcatcaagaattcgtggggggagaaatggggagaagatggctattacaagctctgcagagggcatggcatgtgtggaataaacactatggtttctgctgcaatggtgcctcaaccacaaacaacacctacaaagaattatgcttcttattagctatgcacttaaggaaatctaaataaatatttttcattctaggtgatgtatcatgtatgtaccaaaatattttggtacgtaagtcttttaaaaagtttgcatctcctctttggttttccttagttctgaaagttatctcctaagaagacaatcatatgtactgtacgtagtgtgaagatatagtattgtatgctgcagaatatgattgtctaataaggtggactagctgtaataaaagatatttccaggtt

SEQ ID NO: 9608 - DNA, 1212 bp, Glycine max
  Clone ID: 700852990_FLI
ctaatcttgatggattaacacctgatacttttctctcaagagggtatgattctcaaaaggatcttcaaaacttgctgtctaattatggtggtgctccaagagacattgaaactgagctgtccactgctgctcttagtccacagccgtttggggtgccaggcattccttttaagcctggatgctcaagtgatattgccatcaatgatcctggggttttgaataatggcttgtgggctaatcagactcaacgaatgcgaacatatactaaggttcaaaaatgtggctctgttggaagatgtattgatgtcacccgttacaaggggtatgatgaactccggcatgatttggctcggatgtttgggattgaagggcagctagaagatcctcaaaggactgagtggaaactagtatatgtcgatcatgaaaatgacattcttcttgttggtgatgacccttgggaagaatttgtaagctgtgtccagagcataaagatattgtcatctgctgaggtacagaaaatgagcttggatggggatttaggtcatgttccagtccccaatcaagcttgtagtggaacagataacggcaatgcatggaggggacagtatgaggataactcggcagcctcatttaatcgataaagatgtcattttggagcagtcaacttgtatattttgagacatggaggactaacttaacccttaaaatttcttgttggtgcttctatatatcactagtggaaaggagacatattcattgcaacttgtaagagatgcagttgatggggtagtgtagaagagggttgatacatggctgcatccggttcaatgtcaacacgtttttaatggtagagaagttagatccctagatgtaccaaaaccagattcctttactaaaatgatgcagattctatcttgggatctgcttttcttgtggctgctattgcatgctcaggaatcttttttctttcattttggcaaggtacagccatataggtcagctggtgtataatatatatgattgttattataaagaaaacgctttacttacaattctgtaaatcttgtggttgttaaagttaggtaaccaagtagtgacagtaagaatcaacagtacatgccaattctagcttttgtacaagtgcccacgatgtttcatggtggaaactatggagaagtttattatggatgaaagaaaattcagttctttttc

SEQ ID NO: 9609 - DNA, 2557 bp, Glycine max
  Clone ID: 700852993_FLI
atgagaatgcacttcttcagctgaaagatgggttaggggatgatgatattgaggtcatttatgttggatgccttaaggaggaggttcatccaagtgaacaagatgaagtttcacagacacttcttgagaccttcaagtgtatcccgacttttctccccgctgaccagtttactaagtactatcatggtttttgcaagcagcagttgtggccactgttccattacatgttgcccttgtcacctgagctcggtggcaggtttaataggtcactgtggcaggcttatgtgtcagtcaataaaatttttgcagataggattatggaagttattaaccctgaagatgattatgtgtggatacacgattatcatctgatggtgttgccgactttcttgaggaagagattcaacagggtgaaactgggcttcttccttcacagtccattcccttcatcagaaatatataaaacattgcctgttagggaagagatcctgagagccctccttaattcggatttgatcggcttccacactttcgattatgcgcggcatttcctctcctgttgtagccggatgcttggccttacctacgaatccaagcggggatatattgggattgagtactatggtaggactgttagtatcaaaattcttcctgtcggtattcacttgggtcagcttcaatcggttttgaggatgcctcagactgaagaaaaagtttgcgagctcattagacagttttctgataaaggcaggacattgttgcttggtgtggatgacatggatattttcaagggaataagtttgaagttgttggccatggagcagcttctcattcagcatcctgagtatcgggaaaaggtggtgctggtccagatagctaatcctgcgagggggcgagggaaagatgtgaaagaagtgcaagccgagacgaaggccacggtgaaacgaattaatgaaacatttgggaaacccgggtatgatcccgtcattctgatcgaggagcctctcaagttttatgagagagttgcttactatgttgtcgcggagtgttgtttagtcactgcagtaagggatggaatgaatctcataccgtatgaatatatcatcagtcgtcaaggaaatgaaaccttggataaagttttgggtctagcttcctcccctaagaagaaaagcatgttagttgtgtctgaattcattggctgttccccatctttaagtggagcaatcagagtgaacccctggaatattgatgcagtagctgatgcaatggactcggcgctggaaatggctgatttggagaaggagcttaggcatgaaaagcattatagatatgttagtactcatgatgtcgggtactgggctcgaagcttcttgcaagatttggaaaggacctgtagtgatcatgtgcgacgaaggtggtgggggattggttttggattaagctttagagttgttgcgcttgatccaaacttcaagaagctctcaatggagcacataatttcagcttacaagcggacggcaactagggcaatccttcttgactacgatggtacactaatgcctcaatcatccaccattgataagagtccaagcagtaaatccattgaaattcttagtagtttgtgtagagataagaacaacatggttttccttgttagtgctagaagccgaaagatgctttctgaatggttttgtccttgtgagaatctgggagttgcagctgagcatggttactttctaagaatgaagcgagatgaagagtgggaaacacatgttgcggcaacagacactagttggaaacaaattgcagaacctgtaatgaaactttatactgaaacaaccgatggatccaccattgaagacaaagagactgcacttgtttggtgctatgaggatgcagatccagactttggatcatgccaagctaaggaacttctcgatcatcttgaaagtgtgcttgcaaatgaaccagtaacggtcaagagtggccagagcaatgtagaggttaaaccacagggtgttagcaagggactagtggccacacgcctactttctgccatggaagaaaaggggatgtgccctgattttgttttgtgtataggcgatgacaggtctgatgaagacatgtttgaggtaatcaccagttcgatggggagtccgatcgcggcaaaggccgaggtattcgcgtgcacggtttgtcgaaaacccagtaaggctaagtactacctggatgatacaactgaaatagtgagattgcttcagggcttagcctgtgtttcagaacaaatagacaaatagtttcattttcttcggaacaaaaaatagtttgttaagctctgggaacaaaggtggtggtggtgatgagaggtattataaatacattgtactttgctttactttgtcattgaggatgtaggctcagttgtgctgctcttaaaatcttaatacacaattaatattattggtttccttgatattccatgtatattatccctagtttttactgagaaaagttctgtatcggattctgctccttaaaatgcttgatttctatcagg

SEQ ID NO: 9610 - DNA, 1309 bp, Glycine max
  Clone ID: 700852996_FLI
cttatttggagaacttggcattaatgatcggttacaatggaaggagcattctatgatttttgctatgccaaataagcctggagagtttagtcgatttgattttcccgatgtccttcccgccccattaaatggaatatgggcaatattgaggaacaatgagatgctgacctggccagagaaagtcaaatttgcaattgggcttctaccagctatgcttggtggacagccgtatgttgaggctcaagatggtctttcagttcaagaatggatgaaaaagcagggcgtacctgagcgagtaaccgatgaggtgttcatagcaatgtcgaaggcactaaacttcatcaatcctgatgaactttcaatgcaatgtatattgattgctttaaaccgatttcttcaggagaaacatggttctaagatggcctttttggatggcaatccccctgaaagactttgtatgccgatagttgatcatattcagtccttgggtggtgaagttcatctaaattcgcgcattcaaaaaattgagctaaatgatgatgggacggtgaagagcttcttactaaataatgggaaagtgatggaaggagatgcttatgtgtttgcaacacctgtggatattctgaagcttcttctaccagacaactggaaagggattccgtatttccagagactggataaattagttggagtcccagtcataaatgttcacatatggtttgacagaaaactgaagaacacatatgatcaccttctctttagcagaagtccccttctgagtgtatatgctgatatgtcagtaacttgcaaggagtattatagcccaaaccagtctatgttagagttggtttttgcaccagccgaagaatggatttcacgtagtgatgaagatattattcaagccacgatggctgagcttgccaaactcttccctaatgaaatttctgcagaccaaagcaaagtaaagattctcaagtaccatgttgttaaaacaccaaggtcagtttacaaaactgttccaaattgtgaaccttgtcgtcccttacaaagatctcctttagaaggtttctatttagctggagattacacaaaacaaaaatatttagcttcaatggaaggcgctgttctttctgggaagctttgtgcacaggctattgtacaggattctgagctactagctactcggggccagaaaagaatggctaaagcaagtgttgtgtaacaaaaacaggaattgaaaatgagtcatggtagaatacaggagcatcaattcaagattggtattctttatgtggtcaggactcaggag

SEQ ID NO: 9611 - DNA, 1805 bp, Glycine max
  Clone ID: 700853019_FLI
gtttcaaattcagaaataattgtggaatctgttcgaatagcgtgaagacagggcagggaactgccatttacactgcagagtgcggtcacgcgtttcacttcccatgcgtcgtttccgtttcccatgcacgcaccaacgtctgccccgtatgcgacgccacgtggaacgacgtgccgcttctgcaaaacaacgccgagaaacaaaatcaaccgattcatcatcatcgttccgattctgtctcctcctacgatgacgacgagcctcttccttctcctctcacatgctccgcacaaatcgctccaatccccgaagatgaagaaaacgacgacgtatccgagttccctggctttttcgtcgatccaaagcctcaatcctcgttgagacaaaacgacggtggtgattcgaggagcgttcgagtgaagctgatgccggagtgcgcggtcatatcagtttcgcaaagccacgaaacacgtgctttggttttaagagtgaaagctccaccggtgctgtcgccgccgcgatggcggcggcctccgatggatctcgtgacggtgcttgacgttggaaacagcatgagcggcgcgaaacttcacatgctaaagcgcgcgatgcggttggttatatcttctctcggcgcggctgaccggctcgccgtcgtggcttccgcggctgattccaaacggttgctaccgctgcggagaatgacagctcagggacaacgcgcggctcggcgcgtcgtagataggctcgtgtgtggccatggaaacagcgttggtgaagaagcaatgaacatagccgcgaaggttctcgaagatcggagagagagaaacactctcgctaagattttgctcttatcagacggtcacgataacgccaacaacaaaaatcaacggagattcttaagccacgtgtcttcttccatccggttcgattgtatcaaagttccggttctttcgtatggcttcgagacgaagagaaccggcttaatgcacgaaccgttagaggatgattttgcattatacgttgatagaacattgagtgtggcggtgcatgatttgagaattcagcttggtttctcggcgccggcggaaatccgagccgtttattcatgcagcgggggacccactgcgctgagtactagcgcggctcggcttggtgatttatacgccgaagaagagaaggaattgttagtagaggttagagtgcccacgtcagcattggggacccaccacgtgatgacattgcggtgtgttaatattaacaaagaccctgtgtctcaagagtttgtatacggtgcggaacatgtgtttacggtggtgccgccgcctaagagtattccaatttgtggcggtagggtggagcggcttagaaatgtgtttattacgagccgagccgtagccgagtcgcggaggctggctaagcacaacgatttttcgagtgctcatcatttgctttcttcggctcgggcgcttttggctcagcttggctcggctgaggaatacgtgcgtggcttggaagccgagcttgtggagcttcagtggcagaagcagcagcaacgggttgagagggaggcgaggtgggtggatgagagtggtgaggttttaacgccgacgtcggcttggagagccgctgagaagctggctaaaatggctaggatgaagaagtccttgaacaaagtgagcgacttgcacggcttcgagaatgctaggttttaataatgcttagttgtaatttgtatttttataaaaagaaaatgtaggttcccgaaaatgtataaaataaaataaaagtatggaattgtagtt

SEQ ID NO: 9612 - DNA, 1196 bp, Glycine max
  Clone ID: 700853030_FLI
tccttctctacttttcaagaagcccattattcgcttcaagattctctagaccagctgtagatcctcagtacaaggatttaaggcattttcagtggcattgggaaaagggggagcctgtcattgtcagcaatgtgcttgaatgtacatctggtttaagctgggaaccgcttgtcatgtggcgtgcattacgtcatgtaactaataccaagcatggccaacatttggcggagaaaacaattgattgcttagattggactgaggtattggttaaatgcagggggaaattaatatccaccaactttttactggctatacaaatggtcgtagtgattggcttgcttggccacagatattgaaattaaaagattggcctccttctaatttatttgaggaacaattgcctcgtcattgtgctgagttcatatcttccttacccttcaaggaatatactgatcctcacaaaggttctcttaaccttgctgtgaagttgcctaatggttctctaaagccagacctggggccaaaaacatatattgcttatggatttcctcaggagcttggacgtggtgattcagtgactaagctccattgtgatatgtctgatgcagtaaatgcgttgactcatattgctgaagtgaaactggattctgatcaacttactgtcattgagaagttgaagcaaaagcatctcgagcaagagaaaagggagctacttggtgatgatcaaggatggagaaactaatgttgacatgcttaatataattcatcttctacaataaatgctttggacaggcaaactagtgttgaagtcatggaacaagaaggtggattatgtgatgggaaagaagttgatcagtttcatcaaccgtctggtagtaatgaggttgccattgctaatgaggatggtatttcatatggatcagagctcatagaggttgacaaagtaaaagtaaatcaaggtgatttgttgtttgggggggatgcttcagatggtgctctctgggatattttttggagacaggatgtccctaagttgcaggaatatctgaagaagaatttcagagagtttaggcatgtccattgctgtcgtttaaagcagggatgattgacttttggatgtataggtctttacgcctttatcttattttgcaatggctctgttagagaggaagaataaaagggaatggaagtttggg

SEQ ID NO: 9613 - DNA, 1676 bp, Glycine max
  Clone ID: 700853065_FLI
ggaaaagctgcgccttgtgttgacactactttgctgtgttcattttcatgtccaaagttctcttggatttgaagatggaatcagcagatctcaattcccagaagggttcctcttcggaacatgcacttcctcataccagattgagggagcacctcttgaagatggcaaaggtttaagcaactgggatgtttttagtcatataccaggaaatataaacaatgatgagaatggtgacattgcagatgatcactatcatcgctatttggaagacatcgagttgatgtcctctcttgggataaatgtgtatcgattttctatttcatgggcaagaattctacctagagggatatatggggacataaatccaagtggggttatgttctacaacaagatcatagacaatctgcttcttagagggattgagccatttgtgacaattcatcaccatgactacccgggagaattggaagaaagatatggtgcttggcttagtcccctaatacagagagatttcgttcattttgctgaagtttgttttaagagctttggagacagggttaagtactgggctaccatcaatgagcccaacctgtttgcagacatgggttttataaggggaacatatcccccgggtcattgttcgccgccttttggaaattgtaatactggtaactctgatgttgagcctctcattgccgtgcacaatatgatactgtcgcatgccaaggctgttgaattataccgcaagcactttcaggcaaagcaaggtggaatcattggcattgttactcataccttcatgtatgaacctcttagagatgaagaatgtgatagacaagccgtgaaaagggccttggcttttgttgtagcctggtccttagatcccttggtttttggtgagtaccctcctgagatgcactctattctcgggagtcagttgccaagattctctcctgaggagaagagtctcataaaaggcagcatagacttcattggcatcaataactatggaactctctatgccaaggactgctccctcactgcttgtcctcttggaacagatcgtccaatacgaggcttcgtagaagcaactggaacaagagatggcattccaattggtgatctgacaggaaacccaagattttttgtggttccaaggggcttagagaagattgtagactacatcaagataagataccataacatgcccatgtatattacagaaaatggatattcgtcaccgcacaaaccaaatgtgacaatggatgatctactacaagatttcaaacgaatagattatcataaagcctaccttgcagctctgcttagagccataaggaaaggcgcagatgtaagaggatatatgatatggtcattgatggacaactttgaatggacaagcggctatggcgtgagatatggactttattatgtggatagacacactctcgaacggattcccaaacgttctgttcaatggttttctagttttctcaacgacacaatccacagcaataaacaagacttgagtgagcagtatgtcagaagcaaagatgtgacaactgctggtttcaaagttgtttgaacctgctgaaatgtatggattcttgtgtaaactaagattctttatttatgataaatgctagcagcatacactataacattgttatttgctg

SEQ ID NO: 9614 - DNA, 1138 bp, Glycine max
  Clone ID: 700853090_FLI
attctttgacactagacaggcatttctgagtctctgccagggaaatcattaccagtatgatacactaaggcgggccaagcattcctcaatgatggttctctatcatcttcataatccaacggctccagcatttgtgacaacttgcaatatatgctatcttgacatagaaactggtcaaggttggcgttgtgaggtttgccctgagtatgatgtatgcaatgcttgttatcaaaaggatggaggtattgatcatcctcataagttgacaaatcatccatccatggtggaccgtgatgctcagaacacagaagcaagggaggttcgagtagtgcagctacggaaaatgcttgatctccttgttcatgcatcccaatgtcgttctgcacattgccaatatcccaattgtcgcaaggtgaaggggcttttccgccatggcatgcactgcaaaacacgggcttctggaggttgtgttctttgcaagaaaatgtggtatttacttcaacttcatgctcgtgcttgcaaagaatctgaatgccacgtaccacgttgcagagatttaaaggaacatctaaggaggctgcagcaacagtctgattcacggcgtagagctgctgtgatggaaatgatgaggcagagagccgcagaagttgctaacaatgctggatgagcaatttatacttgtaaatatgtggcactttgaagaaatgctctagacagaggtataccttagtttcacctatgctccgacagcagtgattgtttttgtgaatggaatacgtagggtacatgtagccttgcgtccatctcgacatctttgtcccagaaaaagatctgagttcagccatttagtgctgctgtcctcttctgcaaaggactaacaaggtccggcggggatatttggtggttcgtctgtttttgtaattctttgattttgttaagttacttgttttatgtcagatgccattcttcggtggcgggtgtactatagtcctaaataggtcacaaatttcttacaaatctgtgggagtgagggagggagggatgtcatcaagtcgtttttagttgaccgttttaaagattcaatgcattttgtagaatcttttatttaaagatgaaagtaaataattagaatatgcgc

SEQ ID NO: 9615 - DNA, 729 bp, Glycine max
  Clone ID: 700853112_FLI
aaaccatttcccagaaataaacacgagaaaaaaaatttcacataaaaaagttagtaatatgtttccctgagtcactatatatgtgaacctcaataatcaagtatccgctcttaaagattcagattctcaatagagagaaagagagagaaatggctttcacgatttccagatctcaatctgctttgacagatagagagaaggagaatcttgacaacttagttgacaaggagtgtgcaacaacagagggtatgatatcgagccagctcaagttgaagtcttctttgtcatccaaagcgtcttctcatcaaagcatggacaaacatgcaatccttcgacgtatcaggcaacgcaggtttaataacaaagccaaaaccgctctggaagctctcataggcacctcagaagccaacaataccggcactgcccaagaacagaagtggcttcaactgggtgactctttctcatctccttaactggaaacacaatctccccccagtttgcaacccatctataaattccctctttagtttccttcacccaacaaagtcatcttttccatacgcttgcatggctaggaaaggaaatccaacccgatctttatcggcatgcttaagaaatcccactatgtatctattaactgtagtagaccttgtcggtttgctactttaggtgtgaccttgtgaataccacgttcaattgttatataaatatattatattatgatgttat

SEQ ID NO: 9616 - DNA, 1086 bp, Glycine max
  Clone ID: 700853130_FLI
ccaaaacagtaaagctaacttcaacacctttaattttctaaaagtaattcagcggctgaataccaagcggagaagatgagtcaggagcagccacggcgtcccaaaggccaaaaccccatcaaatacggcgacgtttttgtcgtctccggcgaccttgcacagaagcccgtcgcaccggaagatgctgccatgatgcaaagcgcggaagctcgagtgctcggacaaacccaacccggcggagcagcttccgtcatgcaatctgccgccaccaggaatgaacaggctggccttgtcggtcaccgggacgtcaccgacgttaccggcgaccgtggcgtcacagtcacagaaactaaagtccctggaagtcgcattataaccgaggctgttggtggccaggttgtggagcagtatgtggaggcaactccggttgaggcagggcgaagcagtgcaattaaggagaatgccataacaataggagaggcattggaggcgacggcacagactgtgggtcagaaagcggtggatcagagtgacgcctccgcgattcaggcggcggaggtgagagcaacgggaagtaacgttataacgccgggtggacttgcggctatggctcaatcagctgctgcttataatgctgactgcaagcttgaccaggacaaggtcaagctcgccgacgttttggccggagccaccgccaagttgcccgcggacaaggccgccacactgcaagatgctgaaggtgtagcgtgtgctgaggtgaggaacaaccctgatgccaccgccactcccggtggcgtagccgcttctgttgcggctgctgctaggctcaatgaaaatgttaagtaacgagtcatgttatgtgtcttgataatcatacttttgtttcatgatgtgtggtgttgatgtgttatagtctatagtgtattaataagtgtaagtggtgcaacatcttgtttttctttcttgtactctttgtgagttatattaattactggttttaaggactctacttaaggtgatgtatgtatactatgcgctatatgcatttctgtggttatcagttaataatatgtgctccaatcttgt

SEQ ID NO: 9617 - DNA, 1203 bp, Glycine max
  Clone ID: 700853241_FLI
cgaggagccagggcagcttgtcagaatttcgttaaacattcacggcactcgtgtggtacagaagctgattgagactctcaaaactaggcagcaaatttcattagttgtagcagctcttgaaccaggattcttggccctcatcaaagatcttaatggaaatcatgtggttcagcactgtttacaatgcctaagcaatgaagataacaaattcatatttgttgctgctgcaaagtattgtgttgacattgcaactcatcaacatggatgttgtgttctgcaaagatgcattggtcattctagaggggagcacagagaaaaactggttgaagaaatatctgctaatgcacttctgctagctcaagatcaatttggaaattatgttgttcaatttatcttggacttgaggattccttcggccactgcaactttaagcttgcaatttgagcgtaaatatgtgcacctgtcaatgcagaagttcggcagccatgttgttgaaaaatgtcttgcagtattcaatgatgagaatcaatctagagtcattcatgaactgctctctgctcctcacttcgaacagttgcttcaagatccacatgcaaattatgttattcaatcagctcttcgacattctgagggccatgtgcataatttactagtcgaagccattgagtcccacaaagcaatttcacggaatagcccatattccaagaagattttctcgcagaagcttttgaagaaatgatgtataatattcgctccttagcaagaactgttattgttctgcattaaaaatcattttggagtttactactgaacaaatgcgttgcgtggttatttaactgtaagttgggatgctaataaccatacaaaggagtcaatctgtttagacttgtttatccttctgctcagctaatatttaaaaaaaaaaaaaaagaaaagtagggaaaaagaaagagcagacaattttgctcacatttaaaatttacttttgaatgtactattatgttgtcttgtatctcaacttcatgatattattatcatcctgttaattatggcattctcactggctgagaatgtacagtgtatattgtttaggacgatttggtgttactgtaaaatactacgaggaatctctcagaataagtttcctttgtcttgtgcaagggaatgaatgacgccagttgtttaattgtatttacaattatt

SEQ ID NO: 9618 - DNA, 918 bp, Glycine max
  Clone ID: 700853279_FLI
gaaagaaagaaagccatgcaagcatgttcctcctcagacgctccactctccaagaggttagatggcaaagtagcactcataaccggcggagccagtggcatcggtgaagccaccgccaagcttttccttcgccacggtgccaaggtcgtcatcgccgacatccaagacaacctcggacactccctatgccaaagtctcaattcctccgacaaaaacaacaacgacgacatttcctatgttcactgcgacgtcaccaacgacaaagacgtcgaaaccgccgtcaacgctgccgtctcgcgacacggcaagctcgacatcctcttcagcaacgccggcatcacgggccgttccgactgttctaactccatcacggccatcgacagcggtgacctgaagagggtcttcgaggtgaacgtcttcggtgccttctacgccgccaaacacgccgctaaggtcatgattcccagaaagaaagggagcattgttttcactgctagcatcgcttctgtgtcgaatgcgggttgggcgcacccgtacgcggcgtcgaagaacgcagtggtgggtttgatgaagaacctgtgcgtggaattggggaaacatggaatcagagttaactgtgtttcgccctatgcggtggggactccaatgctgacacgtgcgatgaggatggagaaggagaaagcagaggagatatatttggaggcggcgaacttgaagggagtggttttaaaggaaaaggatgtggcagaagcaactttgtttttggctagtgatgagtcaaaatacgtgagtggagtgaatctagttgtggacggaggttatactaccaccaattcttcttccaaacaagctttcacaaagttttcttttaatgtttaagcccaaattgtaagtttcaatttcagggttacttcgacc

SEQ ID NO: 9619 - DNA, 627 bp, Glycine max
  Clone ID: 700853285_FLI
atcagataacctctgtcaacacctgtctgtggcgcgcgagagagaaatcggagatgtcatcaaaccctaacgatcctcgtcagccctcggcggcgagaccctacgtggcgccgcagatttcgccgcaggaccttccgatcgactacgccggcttcatcgccgtcatatttggcgtcgccggcgtcatgttcaggtacaaactgagctcttggctggcgctcatattctgcgcgcaatccgtcgcgaacatgcggaatgtcgagaacgatctcaaacaagttatgatggctatgatgttttctttaatgggattgataacaaactactttggacctcctagacccggcaaacaaagttgagatctcaagattttgaggcagaaaaaacctttttgtggggtcttttcgggaattaaccaacaagcgtgaaaggaagttttagagtgtcattgaaatgtttcactgttcttcgtgttaaagatgcttgcgaagactggatacctgcgtatttggataattttatagtttattgatatttatatattagagatggagatggtctgaaatatgaggagagctatatttcctctttatgctactggaatatttttaatggtaaattatttga

SEQ ID NO: 9620 - DNA, 1437 bp, Glycine max; identical to SEQ ID NO: 9176
  Clone ID: 700853302_FLI

SEQ ID NO: 9621 - DNA, 1706 bp, Glycine max
  Clone ID: 700853357_FLI
ctgctgccaagcctgaagaacaagagaagttcaattttgattttgttttgccaaagtctgctgatattgggaatacaaacacacctggtagacaagcttctccactttacatccaacgcatgagttctagtcaggataagagcaggacatcacaatcaggacggatttctttcaagggtttaaaagggagatctctgagttctgcagaggagaagtccatagttgaacctgaggttttgatgaccaaggaaatagagtggtctaacaatttggagcattcactaagagagagggacataaggcagggaattgatctagcaaccacattggagaggatagaaaagaactttgtgatttctgatcctagacttcctgataacccaattatatttgcatctgatagctttcttgaacttacggaatatacacgagaagaaattttgggacgaaattgtcggtttcttcaagaaccagaaacagatcaggcaactgtttccaggataagagatgctatcagagaacaaagggaaatcactgtacagttgataaactatactaagagtggaaaaaagttctggaatttgtttcacttgcaacctatgcgtgaccaaaagggtgaacttcaatacttcattggtgttcaactagatggaagtgatcatgtagaacccttaaaaaaccgcctgtctgagacaactgagcaacaaagtgctaagttggtgaaagccacagcagaaaatgttgatgaagctgtccgagaacttccggatgccaacttgagaccagaagatttgtgggcaattcattcccaacccgtctttccacgacctcacaagaaggaaaatccttcttggatagcgatacaaaaggtagctgcaagaggtgaaaaaattggcctgcaacattttgtgcccataaggccgttgggttgtggagacactggcagtgttcatttggtggaactcaaaggtactggtgaactatatgcaatgaaggcaatggaaaagtctgtgatgctaaatcgtaataaggttcaccgctcatgcattgagagagagattatatcattattggatcatccttttcttccaacactatacacctcatttcagactcctacacatgtatgtttgattactgacttctttcctggaggagagttgtttgcattgcttgacaagcaaccaatgaagattttcaaagaagaatcagcgagattctatgcggcagaggttgtcattggtttggaatatctccactgtttaggtataatttaccgtgacttaaagcctgaaaatatcttacttcagaaggatggtcatgttgtattagctgattttgatctatcatatatgacatcttgtaaaccacaggttgtgaagcaagcgatacctggtaaaagaagatcacgaagtgaaccaccaccaacatttgttgcagagccagttacacaatcaaactcattcgttggaactgaagaatacattgctccagaaattataactggagctgggcatactagcggtatagattggtggacccttggtaagcacttccatccttttgtttgaatacaaattctgtagcatggtttttattattattatagataactaaattagcttctgtagcttcctggttatatttttcaacattaaggactatgtctattgtgaggagattattaacagatagctttcattacc

SEQ ID NO: 9622 - DNA, 1471 bp, Glycine max
  Clone ID: 700853383_FLI
ccttgctctatactacacagtacacacactagaagaataatggcttccatcctccactactttttagccctctctctttcttgctcttttcttttcttcttatccgactcagtcacccctacaaaaccaataaaccttgttgttctacccgttcaaaatgatggttccacagggctccattgggccaacctccaaaaaagaacccctctaatgcaagtaccagtcctggtggacctcaatggaaatcacttgtgggttaactgtgagcagcagtactcatccaaaacgtaccaagcacccttctgccactccacccaatgctctagagccaacacccaccaatgcctcagttgccccgcggcatcaaggccagggtgccacaaaaacacgtgtggcctcatgtccactaatcccatcacccaacaaaccggtttaggtgaactaggagaagacgttcttgcaatccacgccacacaagggtcgacccaacaacttggcccattggtcacagtcccacaattcctcttttcttgtgcaccttccttccttgttcaaaagggtcttcctagaaacactcaaggtgtggctgggttaggccatgcaccaatttctcttccaaaccaactcgcttcccactttggcctacaacgccaattcaccacttgcctttctcgctaccctacttcaaagggtgctataatattcggggatgcacctaacaacatgcgacagtttcaaaaccaagatattttccacgatttggccttcaccccattaaccatcaccctgcagggagagtacaacgtgagagtcaactcaataagaatcaaccagcacagtgtgttcccactgaacaagatatcatccaccatcgtagggtcgacctctggaggaaccatgattagcacctcaactcctcacatggttctccagcaatccgtgtaccaggctttcactcaggtgtttgctcagcagctaccaaagcaagcacaggtgaaatctgtggcaccatttgggttatgcttcaactccaacaagatcaatgcatatcctagcgtggaccttgtgatggacaagcccaatggtcctgtttggagaatctctggtgaggacttgatggtgcaggcacaacctggggtcacgtgtttgggtgttatgaatggaggaatgcaacctagagctgaaattaccttaggggcacgtcagttggaagagaacctggtggtgttcgatcttgcaaggtcaagggttgggtttagcacctcatcactgcactcgcatggagtcaaatgtgctgacctcttcaactttgccaatgcatgatgagccaagatcgcgagactttttataatatgcttatttataattaagcaagcatctactacatgttatggttaataaaagtaataatgtaagaataaagactttgaactaaataataatatgaacgattctctttcgttgttcaatg

SEQ ID NO: 9623 - DNA, 1658 bp, Glycine max
  Clone ID: 700853396_FLI
cgcaacgagttcatctctcttctctccaggtatgttgctgggggcaaaggaatactacaaccacatgacctgctgtacgaggtagaaaagcttcttgaagaggatgaagggatgcagaaactcaaagatagcccttttgtcaaagagctagaatctgcaaaggaagcaatagttctgcctccttttgtgtctatagctttgcgtccaagacctggtgtttgggagtatgttcgtgttgatgcatttgaactcagtgtggataatctgagtgttgcagaatatctccgactcaaagaagaacttgtagatggacagtgcactgacaaatatgtgcttgaactagactttgagccatttaatgttacgctccctagaccaactcgatcatcctccattggtgacggggttcaatttctcaaccgacatctgtcatcgttcatgtttcgtagcaaagaaagtttggaacctctccttgcatttcttcgcacacacagatatgatggtcatgcaatgatgctaaatgaccgcatttataacttatccaagctccagtcttccttggcaaaggcagaagaattactttctagactactacccaatgcaccatattctgactttgaatatgaactacaaggattgggatttgagagaggttggggtgatacagcagagagggtgtcagaaatggtgcatcttctcctagaaatccttcaagctcctgatccaaacaccttagagtcatttctaggaagaattcctatggtgttcaatgtcgtagttgtatcaccccatggttactttggccaagcaaatatcctgggtttgcctgatactggaggacagcttgtttatatacttgatcaagtacgtgctttggaaaatgaaatgctgatcaaaattcaaaaacaaggacttgatgtgtctccaaaaattctaatcgttactagattgataccagaggcaaaagggacaacatgcaatcagagactggaaagagttagtggaactgcacactcatacatactgcgagtaccttttagaactaagaatgggattttgagaaaatggatttcaaggtttgacatgtggccttatctagagacatttgcagaggatgcatcacacgaaattgcgggtgagttacaaggaattccagatctgataattggcaactgcagtgatggaaatcttgttgcaaccttgttatcttataagctaggaatcacacagtgcaacatagctcatgccttggagaagactaagcatcctgattctgatatatattggaaaaaatatgaagacaagtaccattttacttgtcaattcacagctgaccttattgcaatgaacaatgcagattttataatcactagtacataccaagaaattgcaggaagcaagaataatgttggacaatatgagagctacactgccttcactcttccaggactgtatcgtgttgttcatggcattgatgtttttgatcccaagtttaatatcgtgtctcctggtgcggacatgtgcatatattttccatactcggacagagaaaggagactaacttctctacatggttcaattgaaaaactggtatatggtgctgaacagaatgaagagcacatgtgaggatttatcaataagataaatgtttgcatgat

SEQ ID NO: 9624 - DNA, 1595 bp, Glycine max
  Clone ID: 700853408_FLI
tcacgaacaagaactctactattactattaatcaaccaaaatctctcttcactccaaacagaacacactagcgagaaaaaaagtgataagcccaaaaactctgcgttctctcacaaattaaacagcgtcactatcgcatagtgattgagttttgcggtgtactgtgttgcgaagtctgtgtatcagatttgtggacatgggtgcttatgatcaagtttctcttaagccattggattcttctagaaagaggaaaagtaggagcagagggtatgggactagatccgtggctgagactattgcaaagtggaaggaatacaacgaacacctttattctggcaaagatgatagtagaacaactccaaaggcaccggctaaaggttcgaagaaagggtgcatgaaagggaagggaggacctcaaaactctcagtgtaactacagaggagttaggcagaggacatgggggaaatgggttggtgagattagggagcccaatagaggaagcaggctttggttgggtaccttctcttctgcccaggaagctgctcttgcctatgatgaagctgctagagctatgtatggtccttgtgcacgcctcaattttcccggcatcacagattatgcttcttttaaggaatcgttgaaggaatctccgatggccgcatcgtcctcttgttcttcggcagaaactgcaacatctgacactactactacatccaaccaatcggaggtttgtgcagctgaggatgttaaggagaatcctcgacttgtcaatgtgaatgataaggttaacgattgtcataaggcttatgaagctgcctcaccaactagcagaatgaagcaagagcctaaggatgaggctgtggatcacatggtccccggggctgggaaaattctagatgtcagaccagaaggaacacatgatgccgggcaggttgcagaggatgtaaacaaagatcagatggacttgccatggattgatggctttgattttagtgacaattacttgaacaggttttccacggatgagttatttcaggtggatgaacttttggggcttatagataataacccaattgatgagtctgcgttgatgcaaagtttggattttggacaaatgggttttcctggagatggtaatcctcaggtggatgatacgctttcaagctttatttatcagttgcaaaatccagatgccaagttgttgggaagtttgccccatatggagcagacaccttcaggttttgattatggattagatttcttaaaaacagtggagtcaggggattataatggtggaggggaagaaccgcgatttcttaatttggatgatgatctgaaccctgattcaaagggcatgcaagcaaggaaggatgactagagaaggcgacgtgcataagtctatcatctgcctcattttcaactggttcgagcatctgctagtaatctgtctcttaggttgttgtcccctttttagctatatacaggtgcataagaggaatacaactatacaactaatacaagaaatttgatttgtttatgttcttttaatatgctaattctctgtaagattttttaaaatggagaatttagctgtg

SEQ ID NO: 9625 - DNA, 1726 bp, Glycine max
  Clone ID: 700853507_FLI
cttgcattgtatttcgtttgttgttcaatctaacaaacttctctatatcgtttactttttcaacacaccttacacacttctttatttgagcctttcatataaatatcatggcttcgagggtggtttcggttttggtgatagcgatgatgttgtttgccatgaactgtaactgcactagtgttggccacatgccttcaaccaaagaggaaggtcacgattttcaggaggctaaagccaagacaacacaaactgcgaacaaggccatggaaactggtaaagatgggaaagaagccgcagagtcatggacagaatgggctaaagagaaactcactgaaggtcttggcttcaaacatgatcaagaatccaccactaagaaagtctctgactatgccggtgatgctgctcagaaatcaaaggactatgccggtgacactgctcagaaaaccaaggactatgccggtgacactgctcagaaaaccaaggactatgccggtgacactgcacagacatcaaaggactatgccggtgatgctgctcagaaatcaaagggctatgtcggtgatgctgcacaaaagaccaaagaatatgttggtgatgctgctcagaagaccatggattatgccactgatgcagcacagaagaccaaagattatgctactcagaagactaaggactatgcaagtgatgcaactgatgctgcaaaaaagactaaagattatgctgctcagaagaccaaggattatgcaagtgatgcaactgatgctgcaaaaaagactaaggattatgctgcgcagaagaccaaggactatgccagtggtggtgcgcagaagaccaaggactatgccagtggtgctgcgcagaagaccaaggactatgcaagtgatgctgcgcagaggaccaaggaccatgcaagtgatggtgctcaaaagagcaaagaatatgcgggtgatgtagcacagaatgccaaagattatgctcaaaagagcaaagattatgcgggtgatgctgtacagaatatcaaagattatgcaaatgatgcagcgcacaagagcaaagattatgctggtgatgcttctcacaagagcaaagaagcttctgattatgccagtgagacggctcagaagaccaaagactatgttggtgatgctgctcagaaaagcaaagaggcttctgaatatgctagtgatgcggctcagaggaccaaagagtatgctggtgatgccaccaagagaagcaaagaggcttctgatcatgccaatgacatggctcggaagaccaaagactacgccagtgacactgctcagagaaccaaggaaaaactccaagacattgcatctgaggctggtcaatacagtacagagaaggccagagaaatgaaggatgcagcagcagagaaggctagtgacattgcaaaggctgcaaagcaaaaatcacaagagctgaaagacaaattaggtggacaacaccgggatgctgagctttgagaattgagacggtttttaatcactttgtaccttttaattatgccacaatagttgtccaattctgccagaaataatattgtgtgcgtatatatataagggagtgtccgtctttgtgttatgtacggggtgtggtctgatatattagcaactacatagtcgaggttggaatattttgtattgaatatgatgttttctttatgtatagttaaaatataatagatactcagcatgtcatttctctg

SEQ ID NO: 9626 - DNA, 633 bp, Glycine max
  Clone ID: 700853650_FLI
gaggagatgagatcgctctgcaacaatatattcaatctcatgtcgaattacgctaacgttcaagcggacggtggttccgcgggggtggcggcgcggtgcttcggcgaggatgcggtggaggagatgaatccgaagctgtttggggtggtgattggtacgaagcgagcgagagaagagaatgatacggttttgagtctgcatcagccgttccatgcggacgtgaaatccgaagcgttggatttcgcaagacgtggcgaaaataaaaaaacgccgtggctaaatcaatgtcatagagcaaatcagagagtgtgtaattgacacacgacgttgtaacagcagctaggaacacgttaggttaagctaggggcgtcgcagagaatcagagtcctgagcacggagacgcgcgtggcaaatgtacgtcgttaaccgtttgggacttttttcgtagaagcttctcagaagaaaacgatactttcgcgttcatttccttttgatgtttctattttttatttttttaagttaagggcatatattggacttggcatgtatatttgccttggaagggaaaaaaataattatttctctatcatattttgttttctttccaactgaataaataaataaaatacacag

SEQ ID NO: 9627 - DNA, 1022 bp, Glycine max
  Clone ID: 700853714_FLI
cggaacaccaactcccatcttcgccttcgggttagggttagggttagggaattagggcttcgaacttcgacgcaatgtcgtccattaacccctcacgagctaccgctccctccgccttcgccacgcgccggccgtgggaggagttcttcgcgctccactcgttcacgcgcccctacaccctcggcgagaccacgctccgtgtgaagcgcaacctcggccacttccgcgtgaactacgccatggtcgtgctcctcttcgtgttccttagcctcctctggttccctatctccctcgtcgtcttcctcgccgtcttcgccgcgtggttcttcctctactttttccgcgatggccccatcgtcgtgctccgccgcgagcttgacgaccgcctcgtcctcgcggcgctctccgccgtcaccgtcgccgggcttgtccttaccggcgtctggctcaacgttgtggtggcgctgctcttcgcggcggcggcggtggcgctgcatgcggcgcttcggaacaccgaggatttgtacgtggatgaattggaagtttctgatggaggtttggtttcggttgttggtggtagccctacgaaacgaacagggtacgctagaatatagtaatagttagttatgagatataactgattttcgttttcgttttcgtttaatcgttttttgtgttactcgcattgcatatatttgaagaaaatagaggttcgagttttaggttttggtttcgcggaaatatgaattgtgtccatatgatagatttacataccgtgttgttagcttggaattggaatagatttcttgcttgttgcttggccccttcttcttatgtttttagaatctcttgtaaattctaagatataggttgaagcattcaatttgtgtatttagagttccaattcaatgtattgtctggcttgatatgctttggtatttgtaataggtttagcaatggtgggtaagatttgttttattttatatcaagtgtaaatgaagagataaccattttggttattc

SEQ ID NO: 9628 - DNA, 592 bp, Glycine max
  Clone ID: 700853718_FLI
gtcaaagatagagagtcgtcctttgaagcagcgctcattgagggttgtggatcatttaaatgaagggagtgccacgtactttgactacctcttctatattgatattgaagcttctatggcagaacctcgtgcacaatatgctttaggacagttgcaggaatttgctagatttcttcgtgttcttggttgttatcctatggatacagtattatagaagttcagtgtcttaactaggagcaacagtcatgctgttcattttgctgataacataagtggctactaccccagaggttcatcttcaatcagagaggtgggcaagaagtatcctttaaaagcattgcccctgtcacctctttcaaaaatcttttcatctcctaaggaggtgctttgaagtatatcatcatagttttgacagtggagtgaatgctgctacaggaatcttcattgtgttttattccttcatttagattttagaactcttcatattaaagagaattccaatgcaaacttagtgaccaaagtatgtacatatggctctattgagctatggcaaataaacgaaggaccaagccacccaaaattttcttctacc

SEQ ID NO: 9629 - DNA, 711 bp, Glycine max
  Clone ID: 700854132_FLI
ctaacaacaatggtggttggtgcaaccctcctttgcaacactttgatatggctgaacctgccttccttcaaattgctgaatatagagctggaattgtgcctgtggccttcaggagggttccttgtgtgaaaaagggaggaataaggttcacaatcaatggccactcttacttcaacctagttttgatcaccaatgtggctggagctggtgatgtgaattcagtgtccattaaagggtccaaaactgggtggcagcccatgtcaagaaactgggggcaaaactggcagagcaactcatacctcaatggacaatccctctcttttcaagtcaccaccagtgatggcagaactgtgacaagcttcaatgtggcaccagccaattggcaatttggccagaccttccaaggaggccaattctagagacattattgcaatgagggatagaaaatagtgcaaaaaaaaaaaaatgtttgtatacctattattaatcacctcattggaagaaccattaagtgtcattaataggtattgattcttgtaactgtgattctgaaaggccagtgttttttattttattggtctaaaaagtagctgaggtgtttatatggcacccgctggtcacttcgcatataatatacatatatggagagttatgtgttatcctgtgtgtggtggtgctgcttttcttcaatccaagttaataattatattc

SEQ ID NO: 9630 - DNA, 654 bp, Glycine max
  Clone ID: 700854135_FLI
ggaaaatccagtgcatgctgttaagaaagcatgtaaagccacggatgatgagattttagaaaacatagctgattcacgtggaggatcaacagctgttgcagcaatactaattaatggagtaaagctactggtagccaacattggtgattctcgagcaatatcgtgcaaaaatggtcgagcaaaaccacttactgtggatcatgaaccagagaaggaaaaagatcttattgagagtagaggaggttttgtgtctaagaagccagggaatgttcccagagtggatggccaattagaaatgacacgagcatttggagatggaaaactgaaggagcacattacggcagaaccagatgtgacgattcggaagattgatgaagacactgaattcatcattttggcaagtgatggcctatggaaggtgatgacaaatcaggaggcttgtgactgtatcagggatgaggatgatgcgcaaaaagcatccaagaagttagtcaaagaagctaaatctcagggaagctatgatgatatttcatgcatagttattatattctagcttaagtcctccacaatgctcctgcatgttatacatagtttcctttgtctgctctgctgtaaaatattttaaattcctttaactcgaggaaatgtctcttt

SEQ ID NO: 9631 - DNA, 1597 bp, Glycine max
  Clone ID: 700854216_FLI
gaaggaggaatttagtgggttggagtatgtatatgtgtggcatgcgttttgtgggtactggggaggggttaggcctaaggtgccggggatgccggaggccacggtggttccgaccaagttgtctcccggagcggagatgactatgacggaccaggcggtggtgaagatcatggagattggggtggggttggtgccaccgcatcgggcgcatgagttgtacgaggggcttcactctcatctggaatcggtgggaattgatggtgtcaagattgatgtcacgcatattctagagatgctatcggaggaatatggtggtcgtgtcgaactcgctaaagcatattacaaagcactcactgcttccgtgaggaagcatttcaaaggcaatggtgtcatttcaagcatgcagcagtgcaatgatttcatgttccttggtacggaaaccatatcacttggacgagtcggtgatgatttttggtgcacggacccagctggagatccaaacggtacctattggctgcaagggtgtcacatggtgcactgtgcttacaacagcttgtggatgggaaatttcatacacccagattgggacatgttccaatctgatcatgcttgtgccgaattccacgctgcttctagagccatttctggtggaccaatttatgtaagcgactctgttggaaaacacaacttcaagttgcttaagaagcttgttctacctgatggctccattttgcggtgtcaacattatgcacttcccacccgagactgcttatttgtagatcctttacatgatgggaaaacaatgctcaaaatttggaacctcaataaatgttccggggttttgggtctgttcaattgccaaggaggaggttggtgccctgttactaggcgaaacaagagtagctctgactattcacactccgtgacttgctttgcaagtcctcaagacattgaatggggcaaagggaagcacccagtttgcatcaaaggggtggacgtatttgctgtgtacatgtttaaggacgacaagttgaagctgctgaagtacacagagagtgtagaagtttctcttgagccttttagttgtgagcttttgaccgtttctccagtggtgatcttacccagaaaatcaatccaatttgccccaattggattggtaaacatgctcaactctgggggctctattatgtcattggaatttgatcaacaggaaaatttggcgaggattggggtgagaggacatggggaaatgagggtatttgcatcagagaagccagagagtgtcaagattgatggagaatctgtggaatttgattatgttgatagaaccgtgaggctccaagtctcgtggccttgttcttcgaggttgtccgtagtcgagtatttgttctgaatcatgatttggtgtccgagagagccgtgtaatgttcacataaactgacttaagtgcattaagcaaatccaccttaaataatagtgcataactttgttttatttttttgaagaaaaaaaaataatgctaatgcacgttaaacaatagtaggtttgtcctgacatgggtttcacacggaataatagatttttattttatttttat

SEQ ID NO: 9632 - DNA, 789 bp, Glycine max
  Clone ID: 700854246_FLI
caagaaattgagaaggttactgattttaagaaccacagtcttcccctggcaaggatcaagaagattatgaaggctgacgaggatgttaggatgatatcagctgaagcaccagtcatttttgcaagggcatgtgaaatgttcatattagagttaaccctgcgctcttggaatcacactgaagagaacaaaaggcgaacacttcagaaaaatgatattgctgctgctatcacaaggactgacatctttgatttcttggttgacattgtgcctcgtgaggacttgaaagatgaagtgcttgcatcaatcccaagaggaacaatgcctgttgcagggcctgctgatgcccttccatactgctacatgccgcctcagcatccgtcccaagttggagctgctggtgtcataatgggtaagcctgtgatggacccaaacatgtatgctcagcagtctcacccttacatggcaccacaaatgtggccacagccaccagaccaacgacagtcatctccagaacattagctgatgtgtcgtggaaattaagataaccaggcactggaatcagttgtgaatgtcaaactgaatggttgggaaggtcgatactacatagcgagcagaagctgtagctgatagtttacatgcaatgcagactataaacatatgtagataatgtgctagggaaaacttaaccttatctttgatttagctggaaaaaatggtatttttcattttaattcacaggtcatcagatgataatatttatttactggtgcatagcaggatttttacttg

SEQ ID NO: 9633 - DNA, 683 bp, Glycine max
  Clone ID: 700854393_FLI
ctagcgatagctgataagagagataccaacaagaaaagaaaaaaagaagagttgagattccctttgaagaaaagatggcatcccataggcaaagctatgaagctggtcaaactaagggccgaactgaggaaaagacgaaccagacgatgggcaatattggagagaaggctcaagctgcaaaggagaagacccaggaaatggcccaagctgcaaaggagaagacccaacaaacagcccaagctgccaaggacaagacttgcgacacttcccaagcggcaaaggagaaggcccaacagaatacaggagctgctcaacaaaagacctcagagatgggccagtccacgaaggaatcggcccagtcagggaaggacaacacccaagggttcctgcagcagacaggggagaaggtgaagggcgcagcccaaggtgctacagaggctgtgaagcaaacccttggcttgggcgagcatgatcaagacaaccgcagaaattactaatactataatttgaagtgctttcttgtagtagtggtttacgcagcatggctttttaaataagctgctattccctacactcctacctaaggagtgtactattatccgcagtttctattctctctagctactttcatgtatgttcaatgctatatatagccttgaattaatgtcaactatgttctaatt

SEQ ID NO: 9634 - DNA, 1499 bp, Glycine max
  Clone ID: 700854421_FLI
ctccactataaattctccttcactttctttctcgtaatcttcgcctcccttcaactccaccctctctccttcttacctccttgaccatgatgagtttcgccatggattcagtttcggtgttaaaccctaaactctcccactcccattcctctctcccattcagcaggttcccccattccctcaacttccaccccttactcaaaccccgcgcagttaacgccgccgtcccccgtaacggcctcgccgcctgcttcctcaccctccaccgacggaaaccgttaaccgtcgctttcacagcttctcaccaagactcggaacacagagagattgaagtggagaaggagcgtgacgtccatgcaggctctgaagaatctcaggaagcgtggaagcaggttctggagacgtttagggaacaggcagagaagtttcagggcgtttctcaagaggcttatgaggtgtattctaagaaggctgctgtcattctgacagatgccacggagcagttaaaggtgctggcagataagacaaagaacgagttgagtgtggcagcaaaggaaatcactgacgaagggaaagagtatttgtctgcagcggcggatagttcaccagaggtgaaggagattgtggaaacgtttacctcaccgcctgaggatattcagaaattgtctggagtgagggacttctatgttggtgtaccttatggtttgatgctttctcttggtggcttcctttcctttatggtaactggcaacactgcagcgataaggtttgggatgattttaggtggtgtcctcctggctttaagcattttaagtctgaaatcctacaaaaaaggacgcacctctcctctcgctttgaagggccaagctgctatagcaagtatattgtttctgcgggagataagctcaataggcaaaggatcatcttatttcactgccttgatcagtggtgcagtggtggcattctatatctatagaatagtactggaacgtaatcatcaaaagagctcaaacttggaaactgaaccaggaaactagttctatgatgagtgtaaaaaattgaagatctgcatgaagatcaggtaaaatactgaagatcgagttgaagatagtcagtaaattttggtgatcattttttatcatagtttttcacgggctgggtcatcaagactagagactcactgctaagggttatggtttcataccttgaaaaacggagctcggagaatctggaaataatttctagttgtggtttttttctggaaaattactaatatcatattatgagtaaccttaaccggttacagattctaatgtacaagaaaaaattagatatggtgtttagggctttgtcttcttcaaattgcacttataaaacattaaaataagtacctgctgcttgcatttttaaccccacaagtgagtgaaatttaaacacttaatagttacgtaagcctggaattgtgaactaataagataagattagatctccattttatt

SEQ ID NO: 9635 - DNA, 1087 bp, Glycine max
  Clone ID: 700854439_FLI
cttcaccacctttttgtaagtggatatttatgtgtctaagaacataaactaaaaaaccaaggcgagtgaaagaaaaaaaatgtcaggtgtgtctctagcagtgtctggtccaccagcagcaacagtggctgaagcagcaggtacaaagcctaaacgaagaacagaacaggcaccaatgggtggcatgatgggttcactgcgcgtgatagaacttcagctggtggccttcatcttggtgttctcagcaagtggcctcgtcccactccttgatctagtgttccctgcattcgcctctgcatacatcttggcactttcacaattcgcatttccatcggcgtcttcgtcggggactgagatcttcaaagggagcagattgttccgaatgtatgttgtttttggcaccaccgtggggctgttcttgccgctggcttacgtgcttggtgggtttgcaagaggggatgagcatgcagtgcgttctgccaccccgcacttgttcttgctatcgtttcagatactcactgagaacattattggtggtttgtctctgttttcgccacccgtgagggcgttggtgccaatcatctacacaattcggaggatctttgtggatattgattggattcatgatgtctggctcaacaagactttgcctgtcaatgccaaatttcaggacttggcatggtattggttcggaaagggtctggcagtggccaatctggcttatttctccattaatctatttgggttcttgatacccaggttccttccaagagcttttgagaggtatttccaagagaagggagagatctataccaagtcagcagaggataaaagatctgtggttgtcaacagaacccaattatcagaaaagaagacagattaagagctatagccaattttgacttcacttgcaattttaaacactttcagcattttttttccttagaaaatagtaatgaatgtgtatgatgatatgtgagcctggacttaaaaatctggctctccgttacattatgaaactatatatggcttttggataaattttatgtatcatacaggttaattcaatatttggtgatttcttctg

SEQ ID NO: 9636 - DNA, 1479 bp, Glycine max; identical to SEQ ID NO: 9513
  Clone ID: 700854458_FLI

SEQ ID NO: 9637 - DNA, 950 bp, Glycine max
  Clone ID: 700854478_FLI
caaaacaacaatgggagtttagtaaagtgcctggagaggctttccatgtagttgcttatgattttggaatcaagcataatatacttaggcgcctagcatcttatggctgcaaaatcactgttgtgccatgtacatggtcagcatcagaaactttgaagatgaagccagacggggttcttttcagcaatggccctggagatccgtctgctgttccttatgccgttgaaacagtgaagaatattatcggaaaggtgcctgtttttggaatttgcatgggccatcaattgctaggccaggctttaggaggtaaaaccttcaagatgaaatttggtcaccatggaggaaatcaccctgttcgtaaccttcgaagtggccatgttgaaattagtgcccagaaccacaactatgctgttgaccctgccacactgccggaaggagtggaggttactcatatcaatctaaatgatggaagttgtgctggtcttgctttccccgctcaacaacttatgtctcttcaataccaccctgaagcatcccctggacctcatgattctgactatgcttttagggagtttgtagagctaatgaagcaaggaaaaaacagaacaaaagaaagtctacaccaactatcagcagcacaggctttggatgcataagtggttgaagggagctgctcttgttcgttcggggcaaaaagaataatgcatctgctgaaaaattacgaagttatgagtccatttctatgattttgtagatgagtttaaggttttctagggatctataagattaagattttctcatgttcatttcctttgcaagggtaagcacggccatgattgtcataaacctcaatgaggcctaatgtactactgctcatcgcagtcaacaccaaaagtttggttgctggcatcaccaattttatgagtaatagataatgatagtttcctgtt

SEQ ID NO: 9638 - DNA, 493 bp, Glycine max
  Clone ID: 700854493_FLI
atgaggccaaggctgatggatttcttcccggtggtgcaagtctccataattgtatgactccccatggtcctgatacaaagtcatatgaggctaccattgcacgaggaaatgatggaggaccttgtaagatcacggacacaatggcttttatgtttgaatcgagtttgataccccgtatcagtcaatgggccctggaatcaccgttcttggatcaagattattaccaatgttggattggcctgaaatctcattttacagttactgagacatctcctgaaaacacgaactagcggaatggacagtgaggagtgaaatgggtgttaaaagtgaactcaaccaaaagattgtggaatggacaattagaccaccaaaagattgggttgttttgtacatgtaattaaagaaatataatcgagtttaatgtttatatactaaatattggaaaataattttatattatcatttaattataaattatcatttgaattacttt

SEQ ID NO: 9639 - DNA, 999 bp, Glycine max
  Clone ID: 700854533_FLI
gtcttatgacattacagctgcatgtagtggatttgtgttgggtttaatatcagctgcttgtcacattaggggaggtggatttaataatgttctagttattggggcggatgctctctcacgatatgttgattggacagacagagggacctgtattctttttggggatgctgctggtgctgtactagtacaggcctgcaacagtgaagaagatggtttatttggttttgatttgcatagtgatggcagtggtcaaaggcacttgaatgcttccattaaagaaaatgagtcaaataatgcattggattcaaatggttctgtgtttggctttcctcccaagcagtcctcatattcatgcattcaaatgaacggcaaagaagtctttcgctttgctgtacgatgtgtaccacagtcaattgaatctgcccttgaaaaggctggtctccctgcatctagcattgattggctacttctccatcaggcaaaccagaggattattgatgcagttgccactcggttagaactcccctcagaacgggtgatatcaaacttagctaattatggtaacacaagtgcagcttccattcccttggctttagatgaagcggttcgaagtggtaaggttaaggcaggccaaactattgcaacggccggcttcggtgccggtcttacttggggttcagcaattattcgttggggctgaatgcttttcttttacggcagaattgcaaatagagaagaatcagttgcaagtgcagctgtccaaataccccacattcttacacaattgtagaaaatggggtttggggaatttgcaaaaggattgatatcattaacatccagcactccctgaaattgtccctttcttttgtcttaaatttattttgtcttaaatttacattttccttgggcttcctttctcaattaccaatttttctttttccgagtcatgtatttgtcattcagatttattttaaacgaggcttactatttatgtttgtc

SEQ ID NO: 9640 - DNA, 644 bp, Glycine max
  Clone ID: 700855064_FLI
gatggagtcttcttggtttaagaaaccggtgccgaggaagcttgctgccgaaaaggtggatttggaggaggagaagattgagagccagctggagaccatcaatgctttccacataatttccttgtcggaggggttcaatttgtcgcccttgttcgaggacaagaggagggaggagatgaggttcgccaccgcggggacgcccagcaccgtcatttcgcggctggaggaggtggccaaggccgggaagttcgacgtcaggagtagcgagaccaaggtgaggcttcagggtcaggagcgtgggaggaaggggaagctggcgattgccgcggatatctacgccgtgacgccgtcgtttatggtggtggaggtcaagaaggacaatggggataccttggagtataaccagttctgcagcaaacagcttcgccctgcgcttaaggatatcttctggaattcctcccagaattccgcacctgctagtgcttgaatgatgtctgattctcgtttttgttcaggaactttgagttgttgataagatctttctctctgtcgcccagaattgtgattgaggatataaaaagagaatcaacaacggatgattcgatatgcatgaaggttaattgattctctcatgtttgtgttcc

SEQ ID NO: 9641 - DNA, 501 bp, Glycine max
  Clone ID: 700855128_FLI
cgggggacgacgacgaagacgacgatgatgcggccggagcaggcaaagcggcacgtggcggacatggcagagtacgtggggaagaagacgaaggatgttgggcaagacattcagacaagggcacatgcacagggaacaaccgggatggtatagtgcattcagttatcatcagagaagaaaatggtttcagtttatgtttatgtctatgacttgtgagataaacgtactagtatctatgtgttttgaattatggagagtttcattttgtgttccatgcacggttttaaaattgcatgcggttagctaaaacaaatctttgtgattgctaaaatgtgactgatgcaatcatgggattgccattgcggttgcagatctcagtttaaaaccatgttttcatgttgtgtcatcactttgaatctgctcatttacatgagttgttgaatattccgtcatgtgtaatcagtaataatattaataatgcatgcatttttctttcggttt

SEQ ID NO: 9642 - DNA, 428 bp, Glycine max
  Clone ID: 700855209_FLI
caaatgtgaaggttgttgtgtctgagagtggttggccatctgaaggtggagttggagcaactgttcaaaacgcaggaacctattaccgcaatttgattaatcatgccaaaggtggaacccccaagaggcctagtggacccatagagacttacctctttgccatgtttgatgaaaaccagaaggatggtcctgaaatcgaacgacactttggtctcttcaggcctgacaaatcacctaaataccaactcagtttcaattgaaacagtggatcataaactcggtgctgattactcagaataattaagggtatctcattacatatatatggttttaattagtttaatttgcaccgacctcaatgtactacgtactagtacgcaagtgatgcttctaattattaataaatgcatctctaccactttatatct

SEQ ID NO: 9643 - DNA, 1283 bp, Glycine max
  Clone ID: 700855257_FLI
cgatatctttcatcgcctacggcaacgcttcatttgaatcaacactccttcctcttcctctctctcgtccattttagttgtaagactaagatctcatcttagattccattttgtctcttcattgcccccaaaataactttattttctctgaattattgcctacagcaactttgaataattctccttcgtatcaagtcttcctcatcttcaccacctttttatatttatgtgtctaagaacataaactaaaaaaccaaggcgagtgaaagaaaaaaaatgtcaggtgtgtctctagcagtgtctggtccaccagcagcaacagtggctgaagcagcaggtacaaagcctaaacgaagaacagaacaggcaccaatgggtggcatgatgggttcactgcgcgtgatagaacttcagctggtggccttcatcttggtgttctcagcaagtggcctcgtcccactccttgatctagtgttccctgcattcgcctctgcatacatcttggcactttcacaattcgcatttccatcggcgtcttcgtcggggactgagatcttcaaagggagcagattgttccgaatgtatgttgtttttggcaccaccgtggggctgttcttgccgctggcttacgtgcttggtgggtttgcaagaggggatgagcatgcagtgcgttctgccaccccgcacttgttcttgctatcgtttcagatactcactgagaacattattggtggtttgtctctgttttcgccacccgtgagggcgttggtgccaatcatctacacaattcggaggatctttgtggatattgattggattcatgatgtctggctcaacaagactttgcctgtcaatgccaaatttcaggacttggcatggtattggttcggaaagggtctggcagtggccaatctggcttatttctccattaatctatttgggttcttgatacccaggttccttccaagagcttttgagaggtatttccaagagaagggagagatctataccaagtcagcagaggataaaagatctgtggttgtcaacagaacccaattatcagaaaagaagacagattaagagctatagccaattttgacttcacttgcaattttaaacactttcagcattttttttccttagaaaatagtaatgaatgtgtatgatgatatgtgagcctggacttaaaaatctggctctccgttacattatgaaactatatatggcttttggataaattttatgtatcatacaggttaattcaatatttgctgatttcttct

SEQ ID NO: 9644 - DNA, 1467 bp, Glycine max
  Clone ID: 700855340_FLI
ccttgctctatactacacagtacacacactagaagaataatggcttccatcctccactactttttagccctctctctttcttgctcttttcttttcttcttatccgactcagtcacccctacaaaaccaataaaccttgttgttctacccgttcaaaatgatggttccacagggctccattgggccaacctccaaaaaagaacccctctaatgcaagtaccagtcctggtggacctcaatggaaatcacttgtgggttaactgtgagcagcagtactcatccaaaacgtaccaagcacccttctgccactccacccaatgctctagagccaacacccaccaatgcctcagttgccccgcggcatcaaggccagggtgccacaaaaacacgtgtggcctcatgtccactaatcccatcacccaacaaaccggtttaggtgaactaggagaagacgttcttgcaatccacgccacacaagggtcgacccaacaacttggcccattggtcacagtcccacaattcctcttttcttgtgcaccttccttccttgttcaaaagggtcttcctagaaacactcaaggtgtggctgggttaggccatgcaccaatttctcttccaaaccaactcgcttcccactttggcctacaacgccaattcaccacttgcctttctcgctaccctacttcaaagggtgctataatattcggggatgcacctaacaacatgcgacagtttcaaaaccaagatattttccacgatttggccttcaccccattaaccatcaccctgcagggagagtacaacgtgagagtcaactcaataagaatcaaccagcacagtgtgttcccactgaacaagatatcatccaccatcgtagggtcgacctctggaggaaccatgattagcacctcaactcctcacatggttctccagcaatccgtgtaccaggctttcactcaggtgtttgctcagcagctaccaaagcaagcacaggtgaaatctgtggcaccatttgggttatgcttcaactccaacaagatcaatgcatatcctagcgtggaccttgtgatggacaagcccaatggtcctgtttggagaatctctggtgaggacttgatggtgcaggcacaacctggggtcacgtgtttgggtgttatgaatggaggaatgcaacctagagctgaaattaccttaggggcacgtcagttggaagagaacctggtggtgttcgatcttgcaaggtcaagggttgggtttagcacctcatcactgcactcgcatggagtcaaatgtgctgacctcttcaactttgccaatgcatgatgagccaagatcgcgagactttttataatatgcttatttataattaagcaagcatctactacatgttatggttaataaaagtaataatgtaagaataaagactttgaactaaataataatatgaacgattctctttcgttgttc

SEQ ID NO: 9645 - DNA, 1186 bp, Glycine max
  Clone ID: 700855394_FLI
atttaattctagtttccactctccttatgttgcttcaactccacttcaccccatcaaaagccgccatcaaaggaggctactggtactccgaaagtggccttgcagtttccaacattaacccctctcatttcacccacctcttctgtgcatttgcccacctcgaccccaacaccaacaaagtcaccatttcctcgtcagactcatctcagttctcaaccttcactcaaaccctccaagcaaagaacccttcagtgaagacccttttgtccataggcggcggtttcggtccttctttggctgcaaatttctccagaatggcaagacaagccaacaccagaaaatcattcatagactcttcgatccaacaagccagatcgaacaacttcctcggacttgacctagattgggagtacccttcctcggacacagacaagaccaactttgcatcactcatcaaggagtggaaagaagctgtgaccaaagagtctagaacctctggaaaggcaccactgttcttatctgctgctgtggctggctctgaccagatcacacctttaaaatactacccaggaaaagacgtagccaacaacttggactttgtcaatgttatggcctatgaccttttcacctcagaagggtaccccacagtgacacagccacctgctccttggaacaaccctagaggccaattcagtgcagaacaaggggtcacggaatggaacaaaactttaggggtgcccttaaacaaactgaatctgggtttgcccttttatggttacaagtggagtttgtcagattctaataaaaatggactctttgcaccggccaagcagggacttggggcagtgaagtacaaggatatcaagaatgttgcggcgcaggttgtgtttgattccacttatgttaccaattactgcttcaaagggaccgattggtttggctatgacgacactcagagtatatctgcaaaggttgttaatgcaaaacaaaagggattggttggatattttgcttggcatattgaacaagatagcaactgggctctttctcaagccgcttctcaagcatggggaatgtagctatggatttcggacacagacagctaataaattgaacttaacaaataaaactgtattacaatctgcgtgcgcagtacattcataaatatgaaataaacttcaatctc

SEQ ID NO: 9646 - DNA, 1256 bp, Glycine max
  Clone ID: 700855530_FLI
gatttccattgaggtccaccaggactggtacttgcattagaggggttaactgtgagcagcagtactcatccaaaacgtaccaagcacccttctgccactccacccaatgctctagagccaacacccaccaatgcctcagttgccccgcggcatcaaggccagggtgccacaaaaacacgtgtggcctcatgtccactaatcccatcacccaacaaaccggtttaggtgaactaggagaagacgttcttgcaatccacgccacacaagggtcgacccaacaacttggcccattggtcacagtcccacaattcctcttttcttgtgcaccttccttccttgttcaaaagggtcttcctagaaacactcaaggtgtggctgggttaggccatgcaccaatttctcttccaaaccaactcgcttcccactttggcctacaacgccaattcaccacttgcctttctcgctaccctacttcaaagggtgctataatattcggggatgcacctaacaacatgcgacagtttcaaaaccaagatattttccacgatttggccttcaccccattaaccatcaccctgcagggagagtacaacgtgagagtcaactcaataagaatcaaccagcacagtgtgttcccactgaacaagatatcatccaccatcgtagggtcgacctctggaggaaccatgattagcacctcaactcctcacatggttctccagcaatccgtgtaccaggctttcactcaggtgtttgctcagcagctaccaaagcaagcacaggtgaaatctgtggcaccatttgggttatgcttcaactccaacaagatcaatgcatatcctagcgtggaccttgtgatggacaagcccaatggtcctgtttggagaatctctggtgaggacttgatggtgcaggcacaacctggggtcacgtgtttgggtgttatgaatggaggaatgcaacctagagctgaaattaccttaggggcacgtcagttggaagagaacctggtggtgttcgatcttgcaaggtcaagggttgggtttagcacctcatcactgcactcgcatggagtcaaatgtgctgacctcttcaactttgccaatgcatgatgagccaagatcgcgagactttttataatatgcttatttataattaagcaagcatctactacatgttatggttaataaaagtaataatgtaagaataaagactttgaactaaataataatatgaacgattctctttcgttgttc

SEQ ID NO: 9647 - DNA, 1211 bp, Glycine max
  Clone ID: 700855670_FLI
aacactcatgcagttgttgagccattcatcatagcaacaaacaggcatctcagtgttgttcaccctatttataaactccttcaccctcactatcgtgacaccatgaacataaatggccttgctcggttatcactggtcaacgacggtggcgttatagaacaaacatttttgtggggaaggtattctgtggaaatgtctgctgtagtttacaaggattgggtttttacagatcaagcattgcctgctgatcttataaaaagaggaatggcaattgaggatccatcgtgccctcatggcattcgccttgtgatagaggactacccttatgctgttgatggacttgagatatgggatgctatcaagacatgggtccatgaatacgttttcttgtactacaaatcagatgacacacttagagaagatcctgaactccaagcctgctggaaagaactcgtagaggtgggtcatggagacaagaaaaatgagccatggtggcctaagatgcaaactcgtgaagagctagttgaagcttgcgctatcatcatatggactgcttcagcacttcatgcagctgttaattttggacagtatccctatggaggtttaatcttaaaccgtccaactcttagtaggcgattcatgcctgagaaaggttctgctgagtatgaggagctgaggaagaatccccagaaggcttacttgaagactattacaccaaagtttcagacccttattgacctttctgttatagaaatcttgtcaaggcatgcatctgatgaggtgtaccttggggagagggacaatccaaattggacatctgatacaagagcgttagaggcttttaaaaggtttggaaataaactggcacaaattgagaataaactctcagagagaaacaacgatgagaaactgagaaaccgttgtggaccagttcaaatgccttatactctgcttttgccttctagtaaggaaggattaactttcagaggaattcccaacagtatctctatctgaagaggtttgtggttccttaagttttgtggctttgaataaaagatagaagagaaggaatctgaatttcttcatccaacctgcacatggtaatctagtgtgtttgagtgctttcatgtttggctttaataaaataaaagcagttgttttgtaaaatgttcagaatcaataaaagcatttactgctatgctttgtgcgct

SEQ ID NO: 9648 - DNA, 899 bp, Glycine max
  Clone ID: 700855772_FLI
atggcgtggtttcactttgcaagaatttgcaaaccagttattttccaatatatatgattatgggaaaggaaggcagatgccagctcattatgggtccaaaaagcacaattactttacagtagcatcaactattgctacacaaatttcccatgctgttggagccgcttattccttaaagatggataaaaaggatgcatgtgccgtcacttacttcggtgatggtggctcaagtgagggtgatttccacgctgccttaaattttgcagcagttttggaggccccagttatttttatatgccggaacaatggatgggctatcagcacacccatttcagatcagtttcgaagtgatggtgttgttgtgaaagggcaggcatatggagttcgtagcattcgtgtagatggcaatgatgccctggctatctatagtgctattcaagctgctcgtcaaatggcaattactgaagagagaccaattctaatagaagctcttacatatagagttggacaccacaccacatcagatgactctaccaagtatcgtccagcgaatgagattgaatggtggagagtggcacgtgatcctgtggttagatttagaaagtggatagaaaagcatggctggtggaatgatatggctgagtcagagcttataaacaatttgagacagcagcttctacatacaattcaagaagcagagggtgtagaaaaacctccacttgcagatagttttagtgatgtttatgatgtcgctccttctaatctccgtgaacaggagcaatggctgaaggagattgtaagaaaacaaccacaagagtatccaacaaatatttctgtgtagacttcaatatgctaatacacattacattgcttctaataaaaaattctcttcaaacttg

SEQ ID NO: 9649 - DNA, 1129 bp, Glycine max
  Clone ID: 700855803_FLI
cgaagacctcaaagtctccgacttcggactctccacgctgccggagcagcgccgcgccgacggcatgctcgtaaccccgtgtgggacccctgcttacgttgcacccgaggtcttaaagaaaaaaggttacgacggttcaaaggccgatttatggtcctgtggggtaatcctcttcgctttgctttgtggctatttacccttccaaggtgagaacgttatgagaatttaccgaaaggctttcagagctgaatatgaattcccagaatggatttctccgcaggccaagaatcttatttcgaatctcctcgttgctgatcctggcaagaggtattccattcctgatataatgagggatccttggtttcaagttgggttcatgaggccaatcgcgttttctattaaggagtcttacgttgaagacaacattgatttcgacgatgtggagaacaaccaggaggaggaggttacaatgaggaaacctgccaggccgttttacaacgcgttcgagataatatcgtccttgtcgcacggctttgatcttaggagtttgtttgagacgaggaagcggtcgccgtcgatgttcatatgcaagttttcggcttcggcggtgttggcgaaggtggaggcggtggcgaagaagctgaactttagggtgacggggaagaaggagtttgtggtgaggatgcaggggacggaggaggggaggaaggggaagctggcgatgacggtggaggttttcgaggtggcgccggaggtggcggtggcggagtttactaagtctgccggagatacgttggagtatgttaagttctgtgaggagcaagtgaggccttccctcaaagacattgtttggagctggcagggtgattgatactaataataactccaacagtagttactaagtcatttctcatttctgtgtctttttttttttatagtactagtactttctatgatccatcatggtcgtggtttaatttagtttgtctttgatttgcttaatttgatttcatacatactatgtaaatttggactgtggagtttgtgacggtgtttgatttgaatatactacactacagtagtatatatatatactagcaaaaataatcccgcaaatcatggaaaagtg

SEQ ID NO: 9650 - DNA, 1130 bp, Glycine max
  Clone ID: 700855863_FLI
agtaaagctaacttcaacacctttaattttctaaaagtaattcagcggctgaataccaagcggagaagatgagtcaggagcagccacggcgtcccaaaggccaaaaccccatcaaatacggcgacgtttttgtcgtctccggcgaccttgcacagaagcccgtcgcaccggaagatgctgccatgatgcaaagcgcggaagctcgagtgctcggacaaacccaacccggcggagcagcttccgtcatgcaatctgccgccaccaggaatgaacaggctggccttgtcggtcaccgggacgtcaccgacgttaccggcgaccgtggcgtcacagtcacagaaactaaagtccctggaagacgcattataaccgaggctgttggtggccaggttgtggagcagtatgtggaggcaactccggttgaggcagggcgaagcagtgcaattaaggagaatgccataacaataggagaggcattggaggcgacggcacagactgtgggtcagaaagcggtggatcagagtgacgcctccgcgattcaggcggcggaggtgagagcaacgggaagtaacgttataacgccgggtggacttgcggctatggctcaatcagctgctgcttataatgctgactgcaagcttgaccaggacaaggtcaagctcgccgacgttttggccggagccaccgccaagttgcccgcggacaaggccgccacactgcaagatgctgaaggtgtagcgtgtgctgaggtgaggaacaaccctgatgccaccgccactcccggtggcgtagccgcttctgttgcggctgctgctaggctcaatgaaaatgttaagtaacgagtcatgttatgtgtcttgataatcatacttttgtttcatgatgtgtggtgttgatgtgttatagtctatagtgtattaataagtgtaagtggtgcaacatcttgtttttctttcttgtactctttgtgagttatattaattactggttttaaggactctacttaaggtgatgtatgtatactatgcgctatatgcatttctgtggttatcagttaataatatgtgctccaatcttgtaatttcttgtttgcaaccattctagatcccaaaatgcttgtcaagaggatt

SEQ ID NO: 9651 - DNA, 828 bp, Glycine max
  Clone ID: 700855915_FLI
atctctgcctcagtcccaacccatcaccattctcatggctgctctagctctagcacttcttcttctggctttcaccggcacttcaagtgctacatggtgcgtttgcaaggatggaagcgacgcgatcctgcagaagacgttagactatgcttgtggagctggtgctgactgtaaccctcttcacctaaacgggccttgttttcagcccaacaccgtcagggcccactgtaactacgccgtgaacagctacttccaaaagaagggtcaagctcaagggtcatgcgagtttgcgggaacagccactgttactgcatctgaccccagctctagcggttgtgtctacccttctagcgtcagcgctgcaggcactggtacaactcctgtgactactacaccaacaatgggcactactcctacaactggaactccatcaacaagcaccggcaccggcactggcaccggcaccaccactggtaccactccatacagcacaacacctggagtattaggaggcattggcagtggcatgggaccttcaggatccggcatgaacgatgaaagtcacggtggcattagatttgttcacagcagtagtttcttctcgatcgcgatcgccctcatctctgccttcatgatgctctgctggggttgagaatgaaaatggcttgacctgggtatatggtgcaaaatgccttatttcactgtattaatgtgaatgctatttttctaggtgttgaacttgggacgttagtttttggggttcttatataatatttttctccaccttccactagctattggttttttgattaattaattgaatatggt

SEQ ID NO: 9652 - DNA, 1116 bp, Glycine max
  Clone ID: 700856117_FLI
cgaagaacaaactcatagacaacctcaaacttcaaacccagaaaaagaaaataaaatcaactttcattccgtttctttctttctttccctttgccaaattttacattaattacatgacatggcataatacacatcacaccaccctctctctctatatataccgtacctctcagattcagacagaaactcaattgcttcttctttttgtttcctgtaatccaggaaatgaaattgctagcttaatattgatctgtagagaagacaagggaacttgcttgctatggcaactctgagcaattcaactaatatcttttggcaagattgtcaagtaggaaggcttgaaaggcagaagctacttaaccaaaagggatgtgttgtatggattactggactcagcggatcaggaaaaagcacattggcatgttccctaagcagagaactgcactcaaagggaaagttatcttatgtccttgatggagataaccttcggcatggactaaacaaggatcttggtttcaaagccgaagatcgcgctgaaaatattcgcagaactggagaagtggcaaaactgtttgctgatgctggcttaatatgtgttgctagtctgatatctccttacagaagagaccgagacacttgccgtgccatgttacctgatgcaaattttattgaggttttcatgaacatgcctctagaattgtgtgaggcacgagatccaaaaggcctctataagcttgctcgtgcggggaaaatcaaaggttttaccggcattgatgatccttatgaaccacccataaactgtgagattgaaataaagcaggaaaatggggattgtccaacacccactttgatggctggacaagtagttacttacttggagaataaaggatttcttgaatcctagggtttttaagtttaatcacatttgtaatgggattattctctcataatgatgtttcttctaaatgaagttaaaaaaggaatcctaggaagtgcaggtagcagagtggtgagaggataaatggactgataaagttcatcaatcataaataataattaataattgttgcaattcattctataggttggtcaagaatttcagcgtatttttcagct

SEQ ID NO: 9653 - DNA, 1119 bp, Glycine max
  Clone ID: 700856237_FLI
attcaccgctgaaatggagactattgggaaaatcaagcacaggaaccttgttcccctgttgggatactgcaaggtaggggaagagaggctcttggtttatgagtacatgaaatatggaagtttagaggatgttctacatgatcagaagaaagctgggatcaagctgaactgggccattaggcggaaaattgctattggagctgctaggggattggcttttcttcaccacaattgtatcccccacatcattcatagagatatgaagtcgagcaatgtgttacttgatgaaaacctggaagccagagtctctgattttggaatggctaggcttatgagtgctatggatacacatttgagtgtgagcacattggctggcacaccggggtatgttcctcccgagtactatcagagcttcagatgctccacaaaaggtgatgtctacagttatggtgtggttttgttggagctgctaactgggaaaaggccaacggactcggctgattttggagataataatcttgttggatgggttaaacaacatgccaagctgaaaatcagtgatatttttgacccggagctcatgaaggaagaccccaatctggagatggagcttttgcagcacttgaagattgcggtttcctgtttggatgatcgaccgtggaggcgtccgacgatgattcaagtgatggcaatgttcaaggagattcaggcgggatccgggattgattctcagtcaaccatagccaatgacgaggaaggtttcaatgcagttgaaatggtggagatgagcattaaagaagcccctgaattgagcaagcattaggcattaaagtgtcgtgtggattctttgggaaacagacaagaagagaggaggagatgacggattcagctcccctcagttttttccttctttgccgcttcaaattatttcagacataagggaaaacggttaaaaggggaatgaatgcttttgatgtatgtattcttgttattttatacataaaaaaaagttgtttaacttgtatataaacagcttcagttgttaccatctgtgttttcctagaattttcaaagtacttttctcattcaaatataatccctgaaaagggtcctctgttc

SEQ ID NO: 9654 - DNA, 1403 bp, Glycine max
  Clone ID: 700856414_FLI
ttaggcaacgacgagacgcctctcttatcctccacttccagtttcaaccatgtcctgccggaaaagacaaaagacttcgccggacaaaacctccgacgacttcttcgactctctccccgacgaccttgtcctctctatcctctgcaagctcagctccaccgcaacttccccctccgatttcattagtgtcttaataacgtgcaagagactaaactccttaggccttcactctcttgtgttatcaaaagcttcccacaaaacattctcagtcaaagccaaaaactggtgcgactctcttcaccgtttcctcaaacattgtgcagatgccggaaacattgaagcctgttacactctcggcatgattcggttttactgcttgcaaaacagagggagcggcgcgtcgctgatggcgaaggcggcgatgaactctcacgcgccggcgctgtactcgctcgcggtgatacagttcaacggaagcggcggcaccaaaaacgacaaggaccttcgagcgggtgtggcgctttgcgcacgcgctgcgttcctcggtcatatcgacgcgctgcgtgagcttggtcattgcttgcaagacggttacggcgttaagctaaacgtaacggagggacgacggtttttggtgcaagcaaacgctcgtgaactcgccgccgtgctctccgccgggaataccaagcgcccctggctgacctggagccaccaccctgtcacccacccgcggctccggtcgggttgcccgttgatgagtgattacgggtgcaatgttccggcgccggatgctcacccggcgagtcagtttatgtcggagtggtttgatatccggggcgggtttccgggtccggatatgaggctttgttctcattcgggttgcgggcgacccgagacaaggaggcacgagtttcgaaggtgttcggtttgcggtttggtgaattattgctcacgcgcttgtcaggcgcttgattggaagttccggcacaaggcggaatgtgctaccgttgagaggtggctcgatgacgacggcgaaggcgtcgccggtgagaatgacggcggcggagatgacggggtaatgatggttaatagttagaagactagactatttttacaaacgttaacggtaaatgaagtctgtttggaagtttcaacgggtatgaatttattttttacatggggtaaaagaaaaaaatctcattttttgccgtggttatgcgaagtgcaaacttcaatgacagtgttttgcttcgacctctgttccttttactttttctgttactgttgtatagaaccgtaaatgaattctcctgaaaaacaaaatgaaggagatagtttttgttatagagcaactatcatccttgattaattgttaattctggtaaattatagtgtatgaactt

SEQ ID NO: 9655 - DNA, 1307 bp, Glycine max
  Clone ID: 700856474_FLI
caccctctcttctctctttcaattccttcccagctcttcattgaagaagctatggactttctaaacttcttgcttaacttgttggtccctccaggcagtatgatcaccttggctttctcatggcctgcactttgcttcctcaatttttgtgagtggctttgtaatagtatatatggtgaggatatggataataaagtggtcataatcaccggcgcatcttcaggcattggagagcaaattgcatatgagtatgctttgaggagagcaaatttaacgttggtggcccgcagagagcacaggctaagagggatcgctgagaatgcaaagagattgggtgcaagacatgtgatgattatggcagcagatgttgtgaaggaagatgattgtaggagatttgttaacgaaaccataaatgtctttggccgtgtagatcatcttgtaaatacagtgagtttgggacatacattctgctttgaagaagctacagacacatcagttttccctgttctcctggatattaatttttgggggaatgtttatccaacatttgtggctcttccttaccttcatcaaagcaatggtcgtattattatcaatgcatcagttgaaagttggttgcctatgccaaggatgagtttatatgctgctgcaaaggcagcattagtgaacttttatgagacactgagatttgagttgaaagatgaggttggaataacaatagccacacatggttggattggaagcgaaatgacgaggggcaagttcatgctggaggagggtgctgagatgcaatggaaggaagaaagagaagtgcaggtgacgggtggaccagtagaggagttcgcaaggttgatagtatcaggggcatgtagaggagatgcatatgtgaagtttcctagctggtatgatgtattcctactatacagggtgtttgctccaagagttcttaactgggcattcaggcttcttatttcgccacaagggacaagaagagcttcttcttatgtagggactggcaaacacatcgaagctgtgggtatggtgagacctatggctatgctggagggaacctcacctacacacaatgccattggtcctcttaccttctctggccagctgatcagccagcacaagctcgattaattccaacatcatatcctccagaaaattatgaagccatctactttttctatacatatatatgcttttatcatttattgcattcttgctatcaccatgcttcgtgaaactatgtcatgttgttggactttgttgtcaaaaatgaaaataaacttgtcttgattgcc

SEQ ID NO: 9656 - DNA, 535 bp, Glycine max
  Clone ID: 700856501_FLI
gtgagaaagagggtggatcacaaatgaaattgactgtgacatgggcccctgatgtgtctgatccggtacctacattgttatcacatactgtaaaaaacaagaaacagcagaaacccaggatcaagaagagtcaaaagaaaaatggaaagggccaaaaggtcagttactccaaaagaggcagcagcaaaggcaaactgtatcgaaataggtggttgcattctcatgatgaagtgtttgaagcttcctctgaattagatgatcttaatgctgttaaccatgattcctactatggaactagttactacttaaaaacatcattcacacaaaggttcactggcctattggagacgcgctgtaacatgcttggttgtgtcgtatactgagactgcataaatagataatttcctgttatattgtgatatgaatagatcgatcaaggctgttagaacatccaatgtaccactaaaagcagcctaatgcacgattcataccttttttgttaaataattcgtggagcaattttttttataccatc

SEQ ID NO: 9657 - DNA, 3455 bp, Glycine max
  Clone ID: 700856585_FLI
ggtgtgttgaggagggaatcaaggaatcttttgaagggtgaagagagtaaagaggtgaagtgttggtgggttttgctcagatttcttctctgtgttgagggtttgaatgctggggaatgggttatgctgcacttgaagtttctgtttactcagatgctgattacttagacttttaggggatgatattctgattagtgattttgggaggaaactggacatgagtatgcttgtggggatatgctcgaaccgcgagaatctgatatacctgtcctgtttctggtcctggttgtgcttcccttggtggcttacatcttacttggaaaatggagtgaaactagtaagaagagagataggataaatttgcttgcccatttggctgctgaagaagctctaagagctgaagaaatggccgtggctgatgtaattcctccagtgtctgcttcaaaaaatgaacatcatgtgtgtgctaggtgctctgctccagccagaactcgctgctccagatgcaaaattgttagatattgctctggaaattgtcaaataatccattggaggctaattcacaagcaagaatgccagcaactggaacctcataaatcaagctcatttcctctggctgtttcagttgaggaatttggtcatggggatggtagttacttttatgaaaatttgaacaaccagttcttaggtccctctttgaagcagactttaagggagagtgcacctttggactatttggttcaccctctgacaggcactgctgcttctactacagctgatttttctgtatttaataactttcaacattctgcttttgaaagaacttcccataaatccaacagagaaacattgagaagagataatggctctatatatgaatcttctattgaatcttctgattataaagctagcagttctctctcaagtgtggtaccaaaggaggcgtttatgagacagaagtcaagaaagagcagtgattctgtgttggaagaagaaatttcaaatgtcagttctggtggctttggagtttatattaacagatttgatgcatcaaaaaacatgatccatgagaatgacagccatcaaagtcaatatggaaatgcattggtaacaagacacaaatatggacgctcaaatgtgtcaagtgctgcaaacaatgataacggtgtagatgaatttgaaacggacatcaccactaaaggtgtaagtgtagtcaaagggggaaattatcattctgatgaagcagcacaatacaaacgcccttctgaatcgacaatcaaaggaagcatgaaagctaaaaagatattacatactcccaagaccaaatcttctaaatcaccaaagtcaacatcaaagacatcagctgacttttgttgctcagaaatagagaagaaaggaaaaactgcagatgaacttaaagttgctggaaatagtgataccatccctttacatggtaatggtagcaatgggactgcaaacactggaattatgaaaatgatgggcttgaggaaatcaacaaagcctactcctctagcctctacagaaagcatggacgtaaagtgcaagaaggtgaagaaaataaagatgttgtttccttatgatgaatttgtaaagatttttcagagtgatgtctttggcatataccccaggggccttttaaattgtgggaacagttgctatgccaatgctgtcttgcagtgcttaacttctacaaagcctctagttgtctatttgctttatagatcacactcaaaagcttgttgtgctaaagattggtgtctcatgtgtgagttagagaaacacataatggttttaagagaaaatggggatcctctatctcctagtaggatactttggcatatgcggagcattaactgccacatgggtgaaggaaatcaagaagatgcccatgaatttttaaggcttctaattgcatcaatgcaatctatatgcttggaggcacttggtggtgagaaaaaggttgatcctagactacaagaaacaactttcatacaacatacttttggtggtcgtcttcaatccaaggttaagtgtttgaaatgtaatcacgaatcagaaagatatgagaacattatggacctgaccttggagatattgggttgggttgagtcactggaagatgcactgactcagtttacttcccctgaagatttggatggagagaatatgtacagatgtggaaggtgcacatcatatgtcagagctagaaagcaactgagcatacatgaggctcctaacatcttgactatagttctgaagagatttcaggaaggaagatatgggaaaattaacaagtgcataacttttcctgaaatgctggatatgattcctttcatgactgggacgggtgatattccgccactttacatgctttatgctgttgttgtgcacctggacacactaaatgcgtctttctctggacactatgtttcatatgtgaaagatctgcaaggcaattggttcagaatagatgatattgaggttcagccagtactagttaatcaggtcatgtcagaaggagcatatatcttattctacatgaggtcttgtccccgtcctccggtggaacatactgtgaaagctgtgcagcaatcagtttatgattcttcaaagcacaatccaatggaaatgcagaaacctaataaaccaggacatagcaggcatggcagtcatcagttttttgtctcagagtcatcacccaatgcgaggccagaaatttccactcacattattgacaccaccaatggcttccttagaaaaagcaccaataggaatgccctgccggtgacccaaacttacgccaaaaatgtcaggagtgagttctctgacaccacctcaagcgactggtcccttttcacaagctcggatgaggcttctttcacaactgagagcaccagggactccttcagcactgtagactatggtgattcaggcaacatggatccaatttcatcaatcttcaactacaccccagaaaagtcctacttgaagttttcacatagtaggccagttaccagggtcttccctgaaaagggtcatgttgaacaagtacagagaattgatcactccaaaagggtcggccattcttcaaatgaacatccaccaaatgggaattgtggcttgtatgtatattatgggagtaatcctgtgtgtggtactacccggacttctagtcagtgtgaattttagtctttggagaatcctaacttgttgaactgattattagatgcagtaggtgctgtgcctcaaagttttcagtatttagttgattgaggcatatagttcttttaagcgcagatgtatttttttttttactattgataattgtaaagatgacggcatcgatcctttagttaactatcaatccatcccagtcttttcctagtggtatcactgttcaatttcatatttgagactatttttaaacttgagtt

SEQ ID NO: 9658 - DNA, 1133 bp, Glycine max
  Clone ID: 700856629_FLI
gagattatctatctatcattgctatattcaatccaatagtttatcaattcaccatggaagaaagggaaaacaaagagataaagatagccaggttttcaagttgtcgtggggttgcatttgaaatcaatccaaatagaagcaacccctttgcaattggatcaccaccaaagcaggaacggattggaacttggctatggcttccatggactcgaaacagttcattcaaagttcttcctcagcctcataccattagtccaactcggagccgtgccagcagccacttctgtgacattgacattgatgcaagtgattttgaggtagagttcatagccgaagttcaagatatagaaaaaccggataaagctaatgtggttaaggtgcaaaagctacttcccaaaagtgatccaccaaggaggtcaaggctctccataattttgcttgatcaagggttcacatgctacaaagggctatttctggtttgcatggccttgaatgtggtggcattggctctttcagcagcagggtgtttcccttatgccaagacaagagctgcattgttctctattgggaacattctagctctaacactgtgtagaagtgaggcagctttgagagttattttctggttgactgtgcagactcttggaaggccttgtgtctctcttagaatcaaaactgccaccacttcattccttcaaagtgttgggggaatccatagtggttgtggtgtttcttctatagcctggcttgcttattccctagttcttacattgaaaaacaaagacaaaacttccccagagataattggagttgcattcaccatcctctcactcattctactctcttccttcgcagctttccctcttatccgtcaccttcatcacaatgttttcgagagaattcaccgtttcgccgggtggatggctctcatccttctctggctattcattcttctctccataagctatgaaccttactcacacacctatgacttgaccatgtctaaggtggtcaagaagcaagagtgttggttcactttagccatcacaattctcattatcattccttggctgagtgttagaaaggtgcaagttaatgtatcatctgcttcaagccacgcctcgatcatcaag

SEQ ID NO: 9659 - DNA, 610 bp, Glycine max
  Clone ID: 700862801_FLI
gcagcaaccagcaccgccaccaccgagtggtgtccacaaaattgaatgttacgaaatggaagacgtgaagccggagtatacggcggcggattgcctgtacttcgaggcttccgactcggtgccgcggctgcacacgacggagtcgagctgttcggagcaggtggtgtcggcggagtttgcgagcgaggtgcagagcgagcggaagaggcagggcaacagcgagttttcgtataattacatggatgccactctcgggaataatcagatgtcgccgctccaggatatcttcatgtacctctccaggcccttctgaaatcaacacgcacgagacggcacgacgtcgttctttgctttgtgtgtgcatgatgcatttttgacgtgcctgctgcattgcatggaagcacgagactgagtgaatgtccgtgagtgtgtccgtgctggtgcgcgtagatgattattattataaaaaaacaaaaaaacaaaaaagagaagcattcatatatgaacatgatgaatccaactgtttacatgatctagtcgcaattaatagtttgatattaaataaattgtgtggaaacaaaatatttatcttatttgtctttaaggtttt

SEQ ID NO: 9660 - DNA, 1273 bp, Glycine max
  Clone ID: 700862838_FLI
agttatgagaacttgattggaaaaggtggtcacgctgaagtgtacaaaggctacttacccgatggtcaggttatagctgtaaagaggctaatgaagaatgaaaaggatgctgcagacagagctggtgatttcttgacggagcttgggatcatagcacacataaaccacccaaatgcgacgcgccttgttggttttggggttgattgtggcctatactttgtcctacagcttgctccacatggcagtctttcttctttgctttttggttctgaatgcttggactggaagataagattcaaggtagctattggggtggcagagggattgcattatctccataaagagtgcccgagacgaatcattcatagggacatcaaggcctccaatatattactaaacgaaaacttcgaagctgagatatccgattttggactggcaaagtggctcccaagtaagtggacaaaccacgttgtcttcccaatagaaggaacatttggatatttggccccagagtactttatgcatggagttgtggatgagaaaactgatgtatttgcttttggagttttgctgttggagctcataacaggtcaccgtgctgttgattcgaatagtagacaaagtcttgtcatctgggcaaagccactgctggacacaaacaatgtaaaggatttagcagaccccagattaggagaggaatatgatcttactgaaatgaagcgcaccatgttgacggcttccatgtgtgtccaccatgcatcctccaagcggccatacatgaatcaggttgtgcttctactaaagggtgaagagacaattatagaaccaaagaaaaatttagttgcacagaaatctctcatgttagaggcatgtgacctagaagattatacttgctcaagttacttgaaggacctcaatcgccacaggcaattaatcatggagtaaactaaacaaattataactcattagtgggattttattgttttcccctatgtatatttgttgaaaggatggagtgatattttgtagcagtgtgtgtggtctaatccgaagtcacaagccaagttggcttgttatttagccttgaaatttagggagcgttactcaagaagcaaaatcatagtttttggctttggattaatgcctgagaaccactggttttcaagcaacaatgtagtgttagaaatgatgcagtagggtttgtgtaacttttttattctgcagtgccattcaacacatggatgttccacccatatgaaagtagtctgcgatg

SEQ ID NO: 9661 - DNA, 1664 bp, Glycine max
  Clone ID: 700862952_FLI
gatcacataacatggcatcattggcatgcaacacgtttattgttagcagcacgttaagatcagttgttactcgtgcggaaccacctaaacctggtcctcttttcgatcttagttcattcaatcgccacagctttccggcaggcttcactttcggggcatcatcttccgcgtaccagtttgaaggtgcggcaaaagaatatggtagaggaccaagtatatgggatactttcatcaatcaacatccaggtaagatagcagatggaacgaatggagatcgcgcacttgaccaatatcaccgctacaaggaagacgttcagatcatgaaaggtatgaatttggatgcatataggttctctatctcttggtcaagaatcctcccaaatggaaaacttagtggaggtataaatcgagaaggaataaattattacaacaatctcatccatgaattgcagactaaaggtttaaaaccttttgtgaccctttttcattgggatctcccccaagctttagaaaatgagtataaaggcttcttatccgagtccattatagatgattttggagactatgcgaaattttgtttcgaagaatttggagatagggtgaagcattggattacttttaatgaaccgcatatttttagctcgcatggctatgcatatgggacgaaggcaccgggtcgtaagtctcaggggctccgtccagacagtggagggacagagccttatcgtgtttcacataacatacttcttgctcatgcaaaagctgtccaattgtataggaattcctataaggaatctcaaaatggagagataggcataaccctcgattctagatggttcgtgccctattcagatgcttcttcagacatagaagctaccgaacgagcacttgacttcgagattggatggttcatggaaccattgacatcaggaaagtatccagaaagcatgcagctttatgttggtagacgattgccagagttctctaaagaggaagccgagcttgtccgtggatcatttgattttattggactaaactattacaccaccaataccgcgcgcgttgccactggctatacggactcagtgcatcatcatccagatctatctactgatcctaatgtcgaacttggattaactcgtctcaacgggtcgtctcctataggtccagtgccaggtttaggatggttatgtgtttatcccaaaggaattagagaattgctgctccgtatcaaaaacctgtacaacaatcccttgatttatataactgaaaatggaataaatgaattagatgatccaacactatcacctgaggaatctcttatggatttttacagaattgattatcattatcgtcatctattgaatgttgattatgcaataagggatggcgtgagagtaaagggatattttgtctggtcactgctggactgctttgaatggagtaatggttatatacctcgatttggattgatttttgtggatcacaaaaataatttgaaccgatctccaaaactctctgcaaaatggttccggaaatttttacaaaatcgactgctttgaatggagtaactcttaacaatgtaataaatttaactatgaattattatatgtttgtattttctccaaaaggaaaatatattccttaaattattcgtcctctat

SEQ ID NO: 9662 - DNA, 690 bp, Glycine max
  Clone ID: 700863157_FLI
gagaaaagtagtgtattaagactacaaattttcaatttttcaatggcgtcgaggcaacaaaaagaggatcgagctgaggcagctgcgaaagttgctgcgaaagaactcgaacaactcaaccgagaaaaagaccgtgatttcagtgttggtgttgcagaccaacaccaacaagaagaacatcagttagatcaacaaaagcgtggtgtaatcggatccatgttcaaggcggtgcaagacacctacgagaacgccaaggaagctgtcgttggcaagaaagaaccttcgacgacgactaactcgtacagtaccagagaggttattcacgacgttgacattcaacccgatgacgcggctgcagcgagggaagtgagagacaaatcagcctcaaagtcaccaggtatctacaattctgccactgctgacaacaaaaccggttccaaggtcggagagtacgcagattatggttctcagaaggcgaaagaaacaaaagatgcaacgaaggaaaaagctggagagtacacagattatgcttcgcagaaggcgaaggaaacgaaggacaagacaatggaaaaggctggagagtacactgattatgcttcgcagaaggcgaaggaaacgaaggacaagacaatggagaaggctggagagtacacagattatgcttcgcagaaggcgaaagaagccaaggac

SEQ ID NO: 9663 - DNA, 1657 bp, Glycine max
  Clone ID: 700863165_FLI
gaagatttgatcgaagcaatcattaacaagacggagactccagctatagtgcatgcggttccagagaagcgaaatattgtccaggagctggaggcttcgtttcttaaaaactttttaggcgttgggtccaactccaagaaactcgaaacatacaacatctttgagcatgaccctgacttcaaaaatcccattggttggagcacagcagtgaccaaaaagcaactaaagtcattgaagcggaccaacattggatttctgatggtgaatttgaacatgggatcaatattggggcctcattggaatgcaaaggcaacagagttgacagtgggagtggatggggaaggcatggtccgagtagtatgtggaagcggcaatgaaaatgagacagaatgccaaaacatgaggtttaaggttaaggaaggtgatgcttttctggtgcctaggtttcatccaatggctcagatgtcattcaacaatggaccatttgtttttctcggcttcagcacttcagcaaagaaaaaccaccctcagtttttggcgggaaagggatcagtgcttcatattctagacaaaaagatactggccaggtctttgggtgtgagtaacagaaccattgatgagcttctgcgttctcccgaggactccatcattttcagatgcagttcctgcgcagaggaagaggagaagataatgaaggaggaggaggaggaagaggagagcaagaaagaagaagaagagaggaagaaaaaagaagaggaagaggaggaagaggagaaaaagaaaaaagaggagaggaagagagaggaagaggaagctaaaaggcaacaagaagagagggaaaagaagcgaggggaggaggaagctaagagagaaagagaggaagaaaaagctaggatggagaaagaaagggaaaggaaaggagaagaggaagcagaaagggaggaagaagaagctagaagagagcaagaatggagaagaaaaaaggaagaagcagctgctaaaagagagcaagaaaagagggaaaggaggagacaggaagaagaagctaaaaaatgggcagaagagaaggctgaaagggagcaagaacaagctacgagagaagcagaagaagcacagagggaacaagaacaagctaaaagagaagcagcacagagggaacaagaacgggcaaaaagagagcaagaaaggaggcggcgagaagaagtagctggaaagggagaagaggaggaagaacacgcaggaagagggcacgaaaggagaaaagaagaagaagaaacagcacggagggaacaagaacaagaacaggctgaaagacagcaacaaaagagagaaaagaggagacaaaaggaggaacaaggagaaggagaagaagaagaagaagaagatgaagaagaaccaacatggtgggagagaagagaaagaagaaaacagaaggggaaaagtccagaagaaggagtagaatgggagcaagaagaagccaggacagcaagcagggagggagagaagaaaacaccgagagagtgatagacaagttgaaaaacaaagccacaggaacagctttgaaggaaggagagttttgaaaataaggaacgtttgattccctcttgagacttagactcctggtgtgtatttttacaataagaacttcttttatgtc

SEQ ID NO: 9664 - DNA, 860 bp, Glycine max
  Clone ID: 700863593_FLI
gaagcttcaaaacattctcgttttccagaatggggatgttaaaatcgcggattttgggcttgcaaaggagaaaggggaaaaacaggggaaattggagtgccggggaacaccgctgtttatgtctccggaatcggtgaacgacaatgagtatgaatcgccggcggatatatgggcccttggctgcgccgtcgtggagatgctgactggaaaacccgcatgggatgttcgcgggtcgaatatctggtcgttgttgattcgaattggagcgggagaagaattgcccaagattccagaagagttatcagaagagggaaaagattttcttttgaagtgtttcgttaaggatccaatgaagaggtggagcgctgagatgcttttgaatcaccctttcgtcaacggtgaaaccgtttcgtttcagaaagttaatgagccgttgccgttaccgtcgccgtcaccgaggacacactttgatttaactcactgggcttccaccgtaacggcgttgcttccgtcttccccggattctgatgagtggcgtatgtgggaatccgggtcgtcgtgttcgccggagaatagactccggcggcttgtaaccgttcagacgccggcgaattggtcagaatcggatggctggacaagcgttaggtgaagtacttggaagtgcagcgttgattgttccatggtcatcagatcttacggctcacattcgatcacgttcgttgattctttgtatttcattagttctgaattaagtagagataggaggattgctagccgccacctttggccaagtgtacagagattcatttggttaatatcacaattttgtttctttaattctttagttgttattcccttgc

SEQ ID NO: 9665 - DNA, 1493 bp, Glycine max
  Clone ID: 700863673_FLI
cgagacttaagaaaatggagtctgaatatgactcagaaccaatcacttttattattaattgatcatctaatactaatcccttgtttgaatgcacagggaaaattatgaatcccgataagttcacccacaagacaaacgaagctctggtgagtgcccacgaaatagcaacaagcaacggtcacgcgcagttcacccctcttcacctggcgtcctctctgatttccgacaaggatggcattttctctcaagcgctttcaaacgccgccggcgaagaatccgcgcgcgcggcggagcgagtcatcaacaatgcactgaagaagctgccgtctcagtctcctcttccggacgaggttcccgcgagcaatgccctcgtcaaagccatccgcagagcgcagactctgcagaagaaacgcggcgacacgcacttggccgtcgaccaactcatcctcggccttcttgaagattctcagatagcggagttgctcaacgaagctggcgtggcggcttcgaaggtcaaatctgaagtggagaggcttcgtggcaaggaagggaagaaagtggaaagtgccactggtgattcaacctttcaggctctgaagacctatggaagagaccttgtggaacaagcaggcaagcttgaccctgttattggaagggatgaggaaattcgaagggttgtgaggattttatctagaaggacaaagaataacccggttttgattggagaaccgggagtgggaaagaccgcagtggttgaagggttggcgcagagaattgttaaaggtgatgtacctagcaatctttgtgatgttaaactcattgcattggacatgggtgcattggttgcgggcgcaaaatacagaggggagtttgaggagcggttgaaagcggtcttgaaggaggtggaggatgctgaggggaaggttattttgttcattgatgagattcatttggttcttggtgcggggaaaggtgaaggttccatggatgctgctaatttgttcaagcctatgcttgcgaggggtcagttgaggtgtattggtgccaccacgcttgaggagtataggaagtatgtggagaaggatgctgcgtttgagagaagatttcagcaggtgtacgtggcagaaccgagtgttgttgacactattagtatacttcgtgggttgaaagagagatatgaaggtcaccatggtgttcggattctggaccgtgctttggttgtagcggctcagttgtctagtcgctacatcactggtcgacatcttccggacaaagcaattgatttagttgatgaggcttgtgccaatgtgagagttcaactagatagtcatccagaggaaattgataaccttgaaaggaagagaatgcagctagaagtggaacttcatgcactagagaaagagaaggacaaagctagtaaagctcgtttagtggaagtgcggaaagagcttgatgacttgagagacaagttgcaacctttgatgatgaagtac

SEQ ID NO: 9666 - DNA, 876 bp, Glycine max
  Clone ID: 700863674_FLI
ccttcatccgcttcaagtccttgtccgcatcggcaccatcggagccgccgcggacaaggacttgaagcggatgaaggcgaatttcgaggagctttgcgatgaggataagattctggtgttctttaagaagctgttgaatgagtggaagcaggagttgcgcgagatgcctgaggcggagaagcgcacggccaaggggaagtccatggttgccactttcaagcagtgtgcgcgttacttgaacccgctgtttaagttttgcaggaagaaggttcttccggatgacattcgacaggcgttattgttgatggttgaatgctgtatgaggcgagattatctggctgcaatggaccattatatcaagctggctatcgggaatgcaccctggcctattggtgtcactatggttggtattcacgaaagatctgcccgtgaaaagatctacaccaacagtgttgctcacatcatgaatgatgagaccactcgcaaatacttgcaatctgtgaagagattaatgacattttgccaacgccgttatccgacattgccttctaaagccgttgagttcaatagtttggcaaatggcagtgatttgcattcacttctagcagaagagagatttagtgggggcaatcaggcggcatctgaagagaggcttaggataatgcctgctccaagagacagctagtcatttatgttttgctggaatgacatcatcgtatgatgcatactatatatatgtttaattgctagatacaatctgtttgtgtttcttactgattgtataaaagaaaatgcatcttttaaaatggcaaaacatgaaaaattctgatgttgtgtacgtcgccaatatttttgttccagccagcagctgcccct

SEQ ID NO: 9667 - DNA, 877 bp, Glycine max
  Clone ID: 700863770_FLI
ggaatgtccagtttgtaagggagaggtgacacttaaaagtgttaccccaatatatggccgtgcgaacaatgtccgtggtcctgaggaggattctgcacttaagatccctcccaggccccaagcgaagagagttgagagtctgagacaaaccattcagagaaatgcatttgcactccctgtggaagagatgattcggcgtcttggaagcagaattgagcttacacgcgatttggttcagccacctgaaccggatgctgcccgtgaaacagctgagagaactacttccttgctaaggttcttgactgcgcaagggatacgtagagagcatcagaatctagtggcacccccagaggatgtaatgggtttggcacaaaacaatgttaatacttctgaggcaggggatccccggactagggtgcagtcccatttgcttcgaagaacacaatcacacagagcaacactttctactctttcatcagcactaacttccgctgaaaggttagttgaggcatatttccgtagcaatccattaggtaggaaccaagaacaacctcctcctccagttgaagacagagattccttttcaagcattggtgctgttataaattcagagagtcaactggacactgctgtagagattgattccatggtatccttgtcaacatcctcttctaggaggaggaacgatgcttcaagagtgtctgatgtggatagtggagattctcgtgctccaaggcggagacgtttgaactgataaaagtctgttagatgctcaagttttactattctatcatgtatcacatatgataataatcttccaacacctatgtaagtgcttcatgctttcttgttaccttatattatgaagttttccccc

SEQ ID NO: 9668 - DNA, 922 bp, Glycine max
  Clone ID: 700863840_FLI
tggaaaatctccattcattgtgtgcaaggatgctgatgttgatgcagccagctccagagttactggcttcaggttgctgtgtgcagacagttcaagccagtaactctggagctgggtggaaaatctccattcattgtgtgcaaggatgctgatgttgatgcagccgttgaggcttcacattttgctttattttttaatcaggggcaatgttgctgtgctggttctcgcacatttgtccatgaaagcatatatggtgaatttgttgaaaaggctaaagcccgtgctcttaaacgagtagttggagaccctttcaaaaatggggttgagcaaggtcctcagattgattctgtgcaattcgagaagatcatgaaatacataagatcaggcgttgaaagtggtgctcaactggaatctggtggtcaaagaattggctccaaaggctactacatccaacccactgttttctcaaatgttcaggacaacatgttgatagcaaaagatgagatatttggtccagtacaatctatcttgaaattcaaggatctagaggaagtgataagaagagccaatgcaacttcctatggcctggctgctggagttttactaaaaatatggacactgccaacaccttgatgcgagcattgcaagctggaacggtatggatcaactgctatgatgtctttgatgcagcaataccttttggtggatataagatgagtggtcaagggagagtaaggggaatctacagccttagaagctaccttcaagttaaagctgttgtcactgctttgaagaatcccgcatggctgtagttttcccactacctgagtgttcatgttcataatgtcttatctagaaaaaaaactacatctttcatggaacattcctaaggcattgaattagccaaagttattacacaact

SEQ ID NO: 9669 - DNA, 1100 bp, Glycine max
  Clone ID: 700863849_FLI
ggggtggagtttgctgtgaagcgcatttctcatgaaaatgatggtttgcgagagtttcttgctgaagtttcaagccttgggagactgaagcaaaggaatttggtaggtttgagaggttggtgcaagaaagatgttgggaatttcttgttaatttatgattacatggaaaataggagcttggacaagtgggtgtttgattgtgatgagagcaagatgttaagttatgaagacagaataaggattcttaaagatgtagcttttgcagtgttgtacttgcatgaggggtgggaagctaaggttgtgcatagggacatcaaggccagcaatgttttacttgataaggatatgaatggaaggcttggggattttgggttagctagaatgcatagccatgatcaagttgctagcaccacaaaattggttggaacagtggggtatatggctcctgaagtgattaagactggaagagcttccactcagacagatgtttacatgtttggaatcttgattttggaggtcttgtgtggaaggagacctttagaagagggtaagtcacctctggtggagtggatttggcaactaatggtacaagggcaagttgagtgtgcacttgatgaaaggctaagggctaagggagatttcaatgtgcaagaaatggagagggtaatgcacttgggtttgttgtgtgcctaccctgaaccaaaggccagacccacaatgagacaggtggtgaatgttttagaggggaagaatgaggtagacgactcagaaattgagaatatggatacctatttgctccaacagttgaaatcaagggatatattgtctgaatattctcagtattttagctatacgtcacacccaactttccaagatattcgtcactcttcctcaatgtctcttacttggtccgaagttgagggtaggtgaatctgtgtcatgaatgacaacataggatttgttcattagctcatggttgcatcaaacattggattcattttctagcagcaggaattggatttggtgctaccggagactgtgaagccaaaacgcatgtatcatttagcaaattcatttatcatctaatcggattggtttgg

SEQ ID NO: 9670 - DNA, 1767 bp, Glycine max
  Clone ID: 700863882_FLI
tgctgatgatgttaagcttacattttcaaatgcaatgaactataatccgtctgggaatgatgtccatctcatggctgataccctcaataaatattttgagttgagatggaaagcaattgagaagaaactgccaaaaagtgatgttctgccaatacctgcaaagccagacaatagtgaaggtgtaaaaactaaaagacaagcgcctccttcaaaaaagaggaaaattgcctcattaccccctcaacctaaagttatgccacctacaaagaaggttatgtcggatcaagagaagcatgatctaggtcgagaattggagtctcttctgggagaaatgcctatgcatatcattgatttcttaaaagaacatagttcaaatggtagagaatgtggagatgacgagattgagatcgatattgatgatctcagtgatgataccctgttcacattacgaaagcttttggatgactttttgcaagagaagcaaaagaacaaagcaaaagttgaagcatgtgaagtagaggtgttgaatgattctggaccaagcaattcctcattgcaaccatttaaaggtaatgatccagcggatgaagaggtggacattggtggaaatgagccccctgtgtcaagctattctcatgtggagattgaaaaggatacaacttacagagtgaacaaaagcctaagcccaggcagctcaaatgatacagactctgatagttcttctgatagcgaagccgatgatgttaaagcaagtccagcaaatgtagcaaaggcaccagaaaatctgggttctgaagctcagttggatgaaatgaccatggctgctgctactcttgaaagaaatcaatctgttagtggcttagatcaacttgaggataactctcagcataagccaagttcttttgattctgattgccaacaagatggggacagtgctccaactgagagacaggtctcacccgataaactttatcgagctgctgtattgaagaaacgatttcttgataccatcttgaaagctcgagaaaagacactcacacagggtgaaaagggggatcctgagaaattgcgccaggaaagggagaaactggagatggagcaaaagaaagaaaaggcaaggctacaagcagaagcaaaggcagctgaagatgctcgaaagcgggcagaagaagaagctgctgcagaagccagacgaaaaagggagcttgagagagaagctgcacggcaagcattgctccagatggaaaagactgttgaaatcaatgagaattctcggattctcgaagatttggaaatgcttagagctgtacctgctgagcaattgccaagttctgtagatgagacgagtcctgcacactctcaggatggtctgggtagtttcaagtttgggagtagtaaccccttggaacaactaggattatatatcaaagccgacgatgaagaggaggaaggagagccaccttgtattccaaatcctgtaaatgatgtagaagagggtgagattgattaaaagttatgcacatattgtatgataaattgaggatcgaagtatacttaatcttgatcccaaaaaagttcccaaattaatgcattaacataagtgggacgaagcatattttcttatggaagcattcagcttctagaagggtaatatattcagttttgggctgtgatggcaatagaggaacagtttgaacagaaactaagctatgtttggggctgtttgcaatgaaaatagaagtaatacatcaaccttcttgtttttat

SEQ ID NO: 9671 - DNA, 486 bp, Glycine max
  Clone ID: 700864006_FLI
atgcaatggagtggtctggtcaaaaacaatttggggcgtctggtacagtcccatttttagttgatggtgcagaagcaggaacgctgaaaagccatggacctctctctttcctcaaggtatacgaggctggtcacatggtccctatggatcaaccaaaagctgcacttgagatgctaagaagctggatgcaagggaaactgacaatgacaaagagtggagataatgtctctcctaaatgatgcactcacagcacaaaaaccaaaaccatccctctattgctgcatagatattgatgtcatttccttgtgtatactgggagggtggaatgtaattctttttcttttttcttttttttttctttctctagtttctcttatccctgaccattgagggatttggaactaatcatctatcattgtcaccaaatcacgcacaactttacacttgtaacctgatttcaatcaaagcaaatttcaattcttgaac

SEQ ID NO: 9672 - DNA, 1988 bp, Glycine max
  Clone ID: 700864136_FLI
ccttacatcaccgagaataacacgatacggctcattgggaggaattatataatacacgtgaacgtgctcggcagttgttagccaatggaagctctgaaatccctgaggagactaccttcacaaatgttgaacagttcctggagcctcttgaattatgttatagatcgctgtgtgcatgtggtgaccaaccaatagctgatggaagccttcttgatttcttgcgccaagtttccacatttgggctttcacttgtaagacttgatatccgtcaagaatcagatcggcacactgatgttatggatgctattacaaaccacttagagattggatcttatcgagagtggtctgaggaacgcaggcaggaatggctgctatccgagctcagtggaaagcgccctctctttggtcctgatcttcctaaaacagaagaaattgctgatgtattggaaaccttccatgtcattgcggaacttccttcagacagctttggtgcctatatcatctcaatggcaacagctccatctgatgtgctttctgtagaacttttacaacgtgaatgtcatgtgaagcagccattaagggttgttccattgtttgaaaaacttgctgatcttgaggctgctcctgctgcggtagcccgcctattctctatagattggtacagagaccgtatcaatgggaaacaagaagttatgatagggtactcggactcgggaaaagatgctggtcgtttctctgcagcatgggcactatacaaggctcaagaagagctcataaaggttgcaaaagagtttggtgttaagctcacaatgttccatggcagaggaggaactgtgggaagaggaggaggtcccactcatcttgctatattatctcagccaccggatactattcatggctcacttcgggtaacagtgcaaggtgaagttattgaacagtcatttggagaggagcacttgtgcttcagaacacttcagcgcttcactgctgctacacttgagcatggaatgcaccctcctgtggcaccaaaaccagagtggcgtgccctcatggatgagatggctgtcattgctacagaggagtatcgctccattgttttccaggaaccccgtttcgttgagtacttccgatgtgctacacctgagctggagtatggaagaatgaacattggcagtcgtccgtcaaaacgaaagccaagtggaggaattgaatcacttcgtgcaatcccttggatctttgcttggactcagactaggtttcatctacctgtatggcttggctttggggcagcatttagccatgttattaagaaggatccaaagaatctccaaatgcttcaagatatgtataatcaatggcctttcttcagggtcagccttgacttggttgagatggtgttcgccaagggagaccctgggattgcggctctttatgacaaactcctagtgtcagaggaactgtggccatttggcgagcgattaaggtctatgtttgaagaaaccaagagccttctcctccaggttgctggacacaaagatctccttgaaggagacccctacttgaagcaaagacttcgacttcgcgattcatacatcacaaccctcaatgtcctgcaagcctacacattgaagcgaattcgtgatcctgactaccatgtgaagttgaggccacatttgtccaaagactacatggaatcaaacaagccagcagctgagcttgtgaaactcaaccctacaagtgattatgctcctggtctggaggatacccttattttgacaatgaagggtattgctgctggcatgcaaaacactggttaagaagctgcatgcctgtgttgccttcctatacaagtaacttaactttggatacacacattttaacctatgttgtctgctacagatgtggaccagcattaaataacaattacgctatctattatcgttatcatgtaataaaaacggattttggcttatgccagcttggatttt

SEQ ID NO: 9673 - DNA, 1375 bp, Glycine max
  Clone ID: 700864206_FLI
aacgaagtaaaggatcgaaatggaaatagacgggaatagagtggtaatcctaggaggtggcgttgcgggatccgtcgtcgctaaatctcttcaattccatgcccatgtcacactcgttgatccgaaggaatattttgagattacatgggcgagtttgaggtcaatggttgagccatcttttgcagagaggtcagtgatcaatcacagagattactttaccaatggcgacatcgttacgtccaatgccgtcaatgttacagaaacagaagtgttgactgcagatggccatcgaattggctatgactatcttgttattgccactggccatgcagatcctctccccaaaagtaggagggaaagacttaatcagttcaaagaagacaatcaaaagataaaatctgctcaatccattctgattattggaggaggtcccactggtgtggaacttgctggagagatagctgttgattttccagataagaaacttacactagtgcacaaaggagcgaggctgctggaattcataggggcaaaagctggggataagactctaaattggttgaaatcaaagaatgttgtggtgaaactagagcaatcagttgacttgaatgcattcaaagatggacagaagatatatcaaacttccaacggagagaccattgaagcagattgtcatttcttatgtatagggaaaccacttgcttcagcatggcttaaggaaactgtgttgaagaatgacttggatggtcaaggaaggatcaaggtagatgaaaaattaagagtcaagggcaaggacaacatttttgcaattggagatattacagatattccagaaatcaagcaaggttttttggcacagcagcaggctgaagtggttgtgaagaacttgaaggtgatattagagggaggaagagaatgtaggatggaaacttacaagccacattcagcaatagcaatagtttcacttgggaggaaagatgctgtggcacagttaccattcttgacaatcggtggaagaattcctggattcatcaagtctggagatttgtttgttggtaaaacaagaaaacaaatgggactcaatccagatattgtacaagcttgactagatatcgtgcatggtgtgtatataaattacaaaaccgatctgtttcattgtttgtgtggtttattgcagtattttcaattgattcctataaagaacacatatgtactatatgtaaaatatccttatgcttaagtggtgtttctagaaatcatgaaatggaattgtgagttagaagcaggatgctgattttaccatggaaccattgtatcattgacatatatatatggttttgataaaattgattggatgctttgttggtttgtctgc

SEQ ID NO: 9674 - DNA, 394 bp, Glycine max
  Clone ID: 700864430_FLI
gatttgtcttcgatggctatatgaacaagggttgacttttgttgttaagagctatgacaaagagaggatgaagcaaaacttggggatttttgattggtcactgactgaggatgattacaagaaaataagtgaaatccaccaagagaggctcatcaaaggaccaaccaagcctcttcttgatgatctatgggatgaagaatgagcagtcacctaaatttcatagtttgagtgttttctggttactcttgagagaataaagcaaagtgtcaccattctgttggtgccagatattgctcgagaattttaattaaataacccttgcgaatgttgattatagtgacactacgctattttccatgtgatgtggacgcaatccaaattccaatttaatttc

SEQ ID NO: 9675 - DNA, 1469 bp, Glycine max
  Clone ID: 700864578_FLI
gattgtttcaaaccattgacgaaaatcaagatgacaatcttactcataatgaattgagagcactggttattggaattcagtttgaggagattgacctggatcatgatgatgctgtaaaaagaatcatggacgactttgatacttctggtaatgaacgtgttgatcgagaagaatttgttaatggtgtcagtagatggcttcaaagggcccagcgtgctcgagttgcatctggtgatgctggtccacacacaatgaagtttttaagtgattttcacacggaaacaaagagggaacatgatctgctggatgtgggaggtcaggttaatgaagaggctgagggcattgagaatgctaaatggatttccatcaaagcagttctgcttctgctattgggtactattattgctgctgcgtttgctgatcctctggttgatgcagtggataacttttctgaggctacaagtattcctgctttcttcatttccttcatttttctgcccttagcaaccaattcaagtgaagcagtgtcagctataatttttgctagtcgtgataagaggcaaactgcctcattaactttctctgaggtttgttttctggtttttactctgtctctttagggcattagcatgcaagaattgattatgacctataaactattaagcttttgaaatcaactctttcactcaaattatgttgcatgatctattcattcagaacttagctaaataacatgggtgaattgactatgatttattcaggatgatgtttatagttaattcagttattatttaacgtgatgtacatgactaaggctggcttattttataagctttgcagttttttttataagcctttcaacacatgcacatgtataattagtgtaattttttcccctccttaagtcatttaaaaatgatttctattgtttttgcagctatatggagcagtgacaatgaataatgtgctttgcctatcagttttcttggcccttgtctatgcgaggggattgacatgggacttctcttcagaagtgttggtaattctcgtcgtttgcattgtcgttggcgtctttgccagcttgcgcactgtcttccctctatggacagctattctggccatcctactctatcccttctctttggcattggtgtacgttcttgattatgtatttggttggtcgtagaccaaaaaatgattcagatattcgtgctgtatggctcttacccttgttggggtgtatggtttttgtttgtagtctttgtgtgagactatgttgttggtgacttaaatttatggtggaattgacatcgattgagaacgtttcaggggttacagttttgagtcttttgactattccgctcattgtgagcagcaccgattaaaactatgttgcgaagctggtgattacaccaccgtatgtgattgttttctcatcattcagaaatcagaaacatgttattccattt

SEQ ID NO: 9676 - DNA, 1529 bp, Glycine max
  Clone ID: 700864654_FLI
aacaacattcgtggaagcattccccagtggtttcatgagaagctcttgcactcctggaataacattactcatattgatctcagtttcaacaaattgcaaggagatctcccaattccacccaatggcattagatactttttagtctcaaataatgagctgaccgggaacattccttcagcaatatgcaatgcaagctccctctatatactcaacttggctcataacaacttgacaggccagattctgcaatgcctggcaacatttccttctcttttggcattggatttgcaaatgaacaacctttatggaaacatacctgcgaacttttctaagggaaatgcattggagactataaagttgaatggcaaccaattggatggaccattaccatggtctttggcccactgcacaaatctggaagttttggacctggcagacaataacataaaggatacatttccccattggctagaaagcctccaggagttacaggtactcagtttgcgatcaaataagtttcatggtgtcatcacttgtttcggtgccaaacatccatttctcaggctgagaatttttgatgtctcaaataacaattttagtgggtccttgccagcatcatacatcaagaactttcgaggaatgatgagtgtgaatgacaaccaaactggttcgaaatatatgggtaaccaatatttctataatgattcagtagtggttgtaatgaaaggtcaatacatggagctcgagaggatattaactatttttacaaccattgaattatcaaataatatgtttgaaggagaacttctgaaagtccttggcgaattgcattctctcaaagggcttaacctttcgcacaatgcaatcacgggtaccattccacgatcctttggtaatttaagaaatttggaatggttggacctctcgtggaaccagttgaaaggagagattcctgtgtctttgatcaatttgaattttctggctgtgttgaacctttcacaaaaccagtttgagggtatcatacctacaggtggacagtttaacacatttggaaatgattcctatgcgggaaatccaatgctatgtggattccctttgtcaaaatcctgcaataaggatgaagattggtcaccacattcaacatttcaccttgaagaatcaggatttggctggaaagctgtagcagtgggatatgcatgtgggtttctatttggaatgcttttgggatataatgctttcatgactgggaaagcacaatggctcgcgagacttgttgaaggtgtgcttaattaattaatgaagagtgaaaaggacaaatcatagggaaaggaaatagtttatccttagtttaatatggttctttggtgtgtgtctgtatgttttctgtaattttaacttatgtcctttgtgtaacaaatcacatctctcttgactcgagtgatgtatttcaagttgtttaaaaataagaaaaaaaattgatgatagtagatatcaaaatgagtggtcatcacatgtgatgatattggctc

SEQ ID NO: 9677 - DNA, 1419 bp, Glycine max
  Clone ID: 700864696_FLI
accacgatcatcatccctctttctcttcaatactactctcaactcattcttctctctcaaaaaccattagaaacgaaaataaccaaataagaagaaagaaacaatgaacgacttgttctcaggttccttctctcgcttccgcagcgaccagtcatccccggaccgccaccacgacatcgagatgggcgccgccgccggtggcccccgcggcggcgaggtgaacctcgacaagttcttcgaggacgtggaaggcgtgaatgaggaactaaaggaattagaaggcttagcgcagagtttaagaagcagccacgagcagagcaagacgctgcacaacgcgaaggcggtgagggacctgcggtcaggcatggacggcgacgtttcggcggcgctgaagaaggcgaagctgatcaagctgaagctcgaggcgctggagcggtccaatgccgcgaaccgtaacttgcctggatgtggaccgggttcgtcctcggaccggacccggacctccgtggtcaacggtttgaagaagaagctgaaggattcgatggagagtttcaacgagattcgcgggcttgtttcgtcggagtaccgcgagaccgtgcagcggcggtacttcaccgtcaccggcgagaatcccgatgataagacgctcgatctcttgatctccaccggtgagagtgagaccttccttcagaaagccattcaagagcaaggcaggggtagaattctggacaccatcaatgagattcaagagaggcatgatgccgtcaaagagatagaaaagaatctcaaggagttgcaccaagtgttccttgacatgacagtgctggtgcaacatcaaggagagcagttggatgatatcgagagccatgtggcaagagctcattcttttgtgcgcaccggagccgagcagttgcagactgcgcgaaagtaccagaaaaataccaggaaatggacctgctactgtatcatacttcttctggtgatcatcttctttgtggtgctcttcactgtgaggccgtggaaaaataacagtagtggtggcggcaataatggtaatcagcctgcaccagctcaaacacctccacctcctgtcaatgcttaacgttagggattacgagtctatatttcacgaagcattttggtttcatttattttgatttgaagattgatattttatattttgggatctagcatgggtgagagaaaaatggattggcttaagacttgggaggaaatctgttagggtgaccagcagtttcatttcaatctgggggaagggaatggttggttgttctgtcgaggtaggtttttggacatcattattttgagcatcatattctttttctgtaagtagcttatcagtttgaacagtttaattgctgactgatggtttatataatatgtatggcatctttccct

SEQ ID NO: 9678 - DNA, 689 bp, Glycine max
  Clone ID: 700864767_FLI
ggcaatgcttttgtatgcaacagtagtgtcagtctgtgctccagtgtgggaggagatagttttccgtggctttctactcccatccctcaccaaatacatgccagtgtggtgtgcaatactggtaagttcaattgcctttgcacttgcacatttcaacatacagagtatgctgccccttatatttcttgggatggtgatgggtgtgatatatacacggtcaaggaatttactgccatcaatgctgttgcatagtctttggaatgggttcgtcttcttagatttgatgaaatagcttcttgaacgttgtggttctctagtaagcagagagtccaatgtgtaggtagaatttcaggcactagcatgcgggtttgtgctttggatcagcaattttcagaagtaaatgcatatgcatatagaacagtacctcgttaaggtacgctgatcaagtgtatgtgcaaggaaggagtaacatgagctgatgcaatcttataatgtacattataaaaaacagtgcccctcatttgtccatatatgctatgaatacgtagtataatttgagttactccccctcccttttttcctgtgaacattcattttgggtaacatgatgctaaaggacgtttgtattatatattccttatgggctcatcctttaaggctaatgtaaagttattgaagggattttccgg

SEQ ID NO: 9679 - DNA, 1427 bp, Glycine max
  Clone ID: 700864991_FLI
tctagaaccaccataacatcattctccgttccctcgcgtttcaacaccgataacccgcaaaaatacccattgatctgcgcctcctcttccatggctccaccgccgccggtggaacacaacggcgactccgccgctaccgcctccgcctccgcctccgcggagtctcagagatcaattcccacgccctttctcaccaaaacctatcaactcgtcgacgaccaatccatcgacgacgttatttcctggaacgacgacgggtcaacgtttatcgtctggaaccctaccgttttcgccagagacttgcttcctaaatttttcaaacacaataatttctctagcttcgttcgccaactcaacacttacggattcaggaaagttgtgcctgatcggtgggagttctcgaacgattatttccgccgaggcgagaagcggcttctttgcgaaattcagcggcggaagatctcatcgccggcgccgtctccgactgcgccgacgacggttacggtgccgatgccgttgaccgcgataccgatcatatcgccgtcgaactctggcgaggagcaggtgatatcgtcgaactcgtcgccgttgcgagcgccggcggagcttctcgacgagaacgagcggcttaggaaagagaacgttcagttaacgaaagaactcgccgagatgagatcgctctgcaacaacatatattctctcatgtcaagctacggaaacaaaaacggaaacagcaacggcagttaccaaactgacggcggcgccggtggagcacagggaagcagggagtccggcatgacggcggtgaagccactggatttgatgccggtgaaacggagctccggcgaggacgcggcggatacggtgccgaaggagataaatctaattccgaatccgaagctgtttggcgtggcgattggagcgaagcgagcgagagagggaggaggaggaagtggaagtggtcgagattgcggaggaggaggaggaggaggagaggaagataccctgctgcgcctgcatcacgtgggttctgcagacgtgaaatctgagccgttggattgccagaaccatcgcgagaatcaggaaacgccgtggttgagtccgtgtcacaggacaaatcaaagggtgtgcaactgacacgcggcgacggctaatcgaatgaaacattttagattagatacgtagtgctgtagggaatccgaaaccggcacgcggagacgtcacgtgcgtcgtttaaccgtttgggaccgattcccagaagtttctcagaagtcagaggaaaacgatactttctaatccttttttcttcgctatctcttttttatttatattatatattcgttaaattggacttggactgtagctttgccattgagggtagtgttgaatatttcattagtcctataaattattttacttgcctgtag

SEQ ID NO: 9680 - DNA, 1459 bp, Glycine max
  Clone ID: 700865217_FLI
ggccaggcaagccccactcaaccaccacacctctcctcgttcacgctacccctttctgctcttcttctacctttcaagttttaaaagtataaagatggcagagacattcctatttacctcagagtcggtgaacgagggacaccctgacaagctctgcgaccaaatctccgatgctgtcctcgacgcttgcctcgagcaggacccagacagcaaagttgcctgcgaaacatgcaccaaaaccaacttggtcatggtcttcggagaaatcacgaccaaggccaacgttgactacgagaagatagtgcgtgacacctgcaggaacatcggcttcgtctcaaatgatgtgggactggatgccgacaactgcaaggtcctcgtcaacattgagcagcagagccctgatattgctcagggtgtacacggccaccttaccaaaaaacctgaagaaattggtgctggtgaccagggtcacatgtttggctatgccactgatgaaacccctgaattgatgccattgagccatgttcttgcaacaaaactcggtgctcgtctcaccgaggttcgcaagaacggtacctgcccttggctgaggcctgatgggaagacccaagtgaccgttgagtattacaatgacaatggtgccagggttcctattcgtgtacacaccgtgctaatctccacccaacacgacgagactgtcaccaatgacgaaattgctgctgacctcaaagagcatgtgatcaagcctgtgatcccagagaagtaccttgatgagaagaccattttccacttgaacccttcaggccgttttgtcattggtggccctcatggcgatgctggtctcaccggccgcaagatcattatcgatacttatggaggatggggtgctcatggtggtggtgctttctccgggaaggaccctaccaaggttgacgagtggtgcttacattgtgagacaggctgctaagagcattgtggcaagtggacttgccagaaggtgcattgtgcaagtgtcttatgccattggtgtgcctgagcctttgtctgtgtttgttgacacctatggcactgggaagatccatgataaggagattctcaacattgtgaaggaaaactttgatttcaggcctggtatgatctccatcaaccttgatctcaagaggggtggaaataacaggtttttgaagactgctgcctatggacactttggaagagaagaccctgacttcacatgggaagtggtcaaacccctcaagtgggagaaggcctaagtaattcattccactgctctatgctggaagttttttgagcgttgcccttataatatgtctaatatccataactttccacgtctcttactctgtgtgtttctctcctcttcctcctattttgttatttgtatgttcttttgtaattttttacgtgatcaactaaaaacatgtactctctgtttgtatgt

SEQ ID NO: 9681 - DNA, 1387 bp, Glycine max
  Clone ID: 700865271_FLI
aggatattctgaaatcccatccaatcgaaggctgtgaagtgtgtgatgcactctatccttctttctcttgaacccataattccatgactcggcgttgctcccactgcagcaacaacggccacaattcccggacatgcccttcgcgtgggggcggaggtgtgaagcttttcggggtcaggctgacggatggatcaatcattaagaagagcgccagcatgggcaacctaaacctctcctccgccgccgcacatcaccaattccattcatctccttcttcttccaacctcgccgccgccccctcatcccccaatccaagctccccatgctccgaccctccccaaggttacttgtccgatgaccccgcccatgtctccaccttcgctaaccgccgcggtgatagaaaaaaaggtgttccatggactgaagaagaacatcggctgttcttaattggtctccagaagctaggcaaaggagactggcgtgggatagcacgcaattttgttgtatcaaggacccctactcaagtagcaagtcatgcccagaactattttatccggcagagtcatgctaccaggagaaagagacgttccagtctttttgacatggttccagatatgtcttcagatcaaccttctgtgccagaagaacaagtgttgcttccaccttcccagaactcacaaccttgcaatggaaaatcacagccttcattaaatctctccctcaaatcagaatttgaacccatggagactacttctcaagaaaatgcgcaacagaccaatgaaactatgatgggatcaatcggactgacaccaatggctcctcatggattctttcctgcatatttacctgttccatttcccatgtggccatcaactgtggctcccccgtttgaagaagttaagggaggagagacatcccaccatcagatccacaagccaatcccagtcattcccaaggaacctgttaatgttgacgaacttgtgggaatgtctcatctaagcattggggaagcaaaggtacgtgatagagagccttcccctctttccttaaagttgttaggagagccctcaaggcagtcagcattccatgcaaatgctccagttggtacttcggatttaaacaatggcaaggacaacgcaattcaagctgtctgagcttgtaaggtccggtgaagacagcagcagaattaagccttcttttggtcatttttcatttgtactatcatatataattttgttttcctgatccctagcattttaatcttccaattagtagcaagttatatggtggtacgtagatcaggttagatcaattcttggaaaatacttattctaactgtaaacaaatgaagcttaaataaagaggttctgttcctctaggtttggtt

SEQ ID NO: 9682 - DNA, 1384 bp, Glycine max
  Clone ID: 700865276_FLI
tcacaagcccctaaaagccaccatgtcttccttcaagagcaaataccaagatgagttgattgccaatgctacttatattggcaccccaggaaagggtatccttgcagctgatgagtcaaccggcacaattgggaaacgtttggcgagcatcaacgtggagaatgttgaaacaaacaggcgcattcttcgtgagctcctattcactgctcccggttgtcttgagtgcctcagtggtgtcatcttgtttgaggaaaccctctaccaaaaatcagctgcaggagtacccttcgtggacatactgaagaaaggaggagttctcccgggcatcaaggtagacaagggcaccgttgagctcgccggaacaaacggcgaaaccaccacccaaggcctcgacgacctcgcccagcgctgcaagaagtactacgaagccggcgcaaggttcgccaaatggcgcgcagtgttaaagataggtccaaacgagccctctccgctctccatccacgagaacgccaacgggcttgcttgctacgcggccatctgccaagaaaacggccttgtacccatcgtggagcccgagatcctctccgatgggccccacgacattgcgaaatgcgccgacgtaacggagcgtgtgctggccgcgtgctacaaggccctaaacgaccaccacgtgctcctcgaaggcacgctgttaaagcccaacatggtaacccctgggtccgaggcggcacgtgtgacggctgaggtcatagcggagcatacggtgagggcgctgcagaggaccgtgcctcccgcagttccggcgatcgtgtttctctccgggggacagagtgaggaagaggcgacggtgaatttgaacgcgatgaatcaactgaaggggaagaagccgtggtcgttgactttctcttatgggagggcgctgcagcagagcacgctgaaggcgtggggtggaaaggacgagaatatccccaaggcgcagagcgcgttgcttgtgaggtgcaaggcgaattcggaggctactctcggaacttataagggggatgccacgcttggggaaggggcttctgagtcacttcatgttaaggattataagtactgagaggtctgagattgttttttttttttggaatggaattgtttctttctttctttttttgaactgttttgtaggtttatggatattctcggtcgtaggtggtaatgtgagaataataatggctttagctgctgctgctgcattggcctgatcggcgtttactttttttctttcttttactatgttattttgttattctatttttacactgcttaatctattttttatattagaaaccaagaaaaatgtactacttctaaattctgagtgcactgtttcttcgaatcc

SEQ ID NO: 9683 - DNA, 1600 bp, Glycine max
  Clone ID: 700865409_FLI
gcaagagctgcaagacacaaccttgggttctctcttgtcagcactcatgcagcactgtgatcctcctcagaggcgttatccattggagaagggcgttcctccaccatggtggcctaatggtaatgaagagtggtggccccaaataggtttgcctaaagatcaaggtcctccaccttacaagaaacctcatgacctgaagaaggcatggaaagttggtgttctgactgcagttatcaagcacatgtctcctgatatcgcaaaaattcgcaagctcgtgaggcaatccaaatgccttcaagataagatgacagccaaggaaagtgcaacctggcttgcaataatcaatcaagaggaggccttggcgcgtgagctttacccggattattgccctccattagcagcctcttctggaggtagtggatctatggtaatcaatgattgcaatgagtatgatgttgaagggggtgacgatgagccaaactttgacgtcgaagatcgcaaacctgagaatcttcatgcaccgaatcttgggatggacagaatgatgggaagactgccttctttcccaatcaagggagaggctgttacaaatttggatttcattcggaagaggaagatctctggtgacttcaacatgataatggatcagaaaatttacacatgcgaacaacctcagtgcccttacagtgaaattcaccatggttttgctgacagaaattctagggacaaccatcgattgagttgtccttatagaggcagtgcttcaacagattatggaggttcaaattttcatgttaatgaggcaaagccggtcatattcccccaacagtcctttgttcaaccaaaacctactactactccgtctgttgttaacttggttccatctgttattgatctaaccggactcggagttccagaagatggcaagaaaatgatcactgaccttatgtcaatctatgatacaaatgttcaaagcaacaaaaatctaagttccagtaaccatgtatctgcagaaaatccaaaccttcctcagccaggcattcagcagcaacatgacaacttctttcgcagtcaaggaatcagtatggaaggaaacttctttgatgaagccaacatgtccaacaacaatcatcacatgtttgcaagggaggaaggtcaatttgaccggttcaaagctttgaatgcaccaccctttgagaccaatcacaacaacaacaacttccatttgatgtttggttccccttgtgatttggcatcctttgatttcaaggaggatatgcaaggaggagtagtagggatggatgctcttcagaaacagcctgatatctctatttggtaccagtgaaaatgacagcttaaagcttgaaacctcctcatcatcttcatctatcatggactcttttattttccttctaaaagggttggcacccccctaatcatgtgaagttcctttggccgaaaaagggtttcactgcaattttcttcacatgtaatcctgtaggcccagtagaactaaataatattttaagcttggcaggtctagtatgtgttatatacataataataataatatataataaaaacttgcatgttacccatt

SEQ ID NO: 9684 - DNA, 920 bp, Glycine max
  Clone ID: 700865466_FLI
cacaggactctcaattaaaatcagggggccggcaggattcttttgaagatgaaccctctcaaaatggcagttcagcatatactcctcaaaatgggggactaaatatacctcatacagtggtcaatcaaaccatgtctatcatacctatctctgcaggtggtgctcctggagctgttcctggtcccacgacaaacttaaatataggaatggattattggggtacaccaggttcatccaacattcctggacttggcagaaaggttccatctactgcagttgctggagggatggttactgttggatcacgggatagtgctcagtcacaactctggctacaggatgaaagagagcttaaaaggcaaaggcggaagcagtctaacagggaatctgctcgcaggtccaggttgcgcaagcaggccgagtgtgatgagttagctcagcgtgctgaggctttgaaggaagaaaatgcttctctccgttcagaagtaaatcgaatcaggagtgattatgagcagctactctccgagaatgcagctctcaaggagagacttggggaactacctccgaatgatgatcatcatcataggtctggcaggaatgatcagcatgtgggtaatgacactcaacagagtgggcagacagaggccgtgcagggtggtcattagcaccaaccaaccacttcatgctgcctttcagggagataatctaacttaaatagcaagagcaagatcttgtttcggataggttgtagttcaaattgtattaatgctgaccatttatcgtcttaagatctgtttaatgttatgtgatccttcattcctaatttaccttttttttaactcattcaaaacgacctggattgtatgtagtgtgtgaattctgtgtcataccttatctgcagcttcaaagttagtgttctc

SEQ ID NO: 9685 - DNA, 1388 bp, Glycine max
  Clone ID: 700865583_FLI
ctggtgggcccgacaatgatttcggcatcaagtacaacgtcaacaacggtggtccagctccagagagtgtgaccgacaagatcttccaacgcaccaaggagatttccgcctacaaggtccttgatgctggcgagcttgacctatccaagattggtagctccacctatggtcccatggaggttgagatcgtcgactctgtcaaggactatgttaccctactcaaggacatcttcgactttcctctcatcaaatccttccttcagtcaaacccctcttatcgcgtactctttgacggcctgaatggtgtcactggcccgtacgccaaggcgatattcttggacacactcggtcttgccccttcgtcggtgcaacaatgcgtgccccttcccgactttggcggtagccaccccgaccctaatctgacttatgctcactcgttggttgaagtcgtggagcgggaaaatattgcttttggtgctgccagtgatggtgatggtgatcgaaacatgatttacggaaagggtgcatttgtcactcccagtgactctgtcgctatcatcgccgactgggccgatgtgattccctacttcaagaagactggtattcgcggtctggcccgcagcatgcctaccagcaatgccatcgactacgtcgccaaggcgaagggattcgagatcttcgaggtacctactggctggaagttcttcggtaacctcatggacgctgggcgtctatcgatttgcggtgaagagtctttcggtaccggatctgaccacatccgcgaaaaggatggtatctgggcagtcattgcttggcttaacattattgccgctgctaaccagaagacccctggaaccggtattaacgaactgctgcaagatcactacaccaagtatggtcgttcgtttttctctcgctatgactacgaagaggtttcttcggaaggctccaagcagttcacagacaacctcgatgctttgttcgcctcttcctccttcgttggctccaagcacggtgaattcatcgtaaaaaagaccaccaacttcagctacaccgacccgattgacggcagcgttagcaagaatcaaggtcacattgtcctcttcgaagatggttctcgcgttgtcttccggttgagcggaaccggatctcagggcgcgactgtacgtgtgtatatcgagaggtacagcaaagacccgtcgcaattcaagaaggatactgcggagggcctccagcccttgatcgatgcggctcttgagtttaccaagctcaaggaatacctcggacgtgacaagcccaccgtcattacttaaacacaaaattattttcgtttgtaatctcatgtaactaaaccgtgaacgtgatataattacacgatcttcgtcttt

SEQ ID NO: 9686 - DNA, 1347 bp, Glycine max
  Clone ID: 700865705_FLI
gatatgattactgtcttgtcgggtccgataggaactttagccaatcagttttttgaatccaggaagctttcacaaccaaccttttccgatctttctctcaaaccggctcgcatttccagaaaaaccctgagcttgaagatggcccaagttgctcaaaacccttctcagcagcagaaagtcataataactaacaagtatggcaataaactagtgggcattttgcatgaatctggaaccaaagagattgttatcctatgccatggtcttcgatccactaaggaagacgatatcataaaaaatcttgctgctgctctagaaaatgcaggagtcagttcttttcgctttgacttcactggaaatggggaaagtgaaggttcatttgagtttggtcactattggagggaggttgatgatctgcatgatgtggttcaacactttcatggggcaaaccataaagttattgcaattattggacacagtaaaggaggtagtgtggtgcttctttatgcttctaaacatcatgacattaaaacagttgtcaacctctctggacgctatgatctgaaggcaggacttgaagaacgccttggaaaagattatttggaaagaattatgaaggatggcttcattgatgtgatgcagtcaggaagttttgattaccgtgtgactttagaaagtttgatggatcgattagatacaaacatgcatgaagcatgccttcagattgataaagaatgcagggtactcacagttcatggttcttcagacccagttatccctgttggagatgcatctgagtttgccaagattataccaaaccacaagctaattatcatagagggagctgatcattcatacactaatcatcaagatgaattagcctctgttgttgtgaaccgcataaaggaagccttggtccatttttctaatgatgtgtaattgtggtagaccttgcagttacgagccaattgaaattgcaacaggtgacaaaatttcagttgtggatgaacatgcctatgatgttctgcagcatgtttgagctcttctagtttttgcttataaaattggtgaatcttgcatcatgatgaaaataatggcgagagaaatatctgggagtatacaatgtcatttttaaattatcaattatgacaaatgcaatatgtaaacagttatctcatggtagcatatggtagccatagtggggggttattcccacattttaagggtctggggacacctcagtattatagaataagtgtaaggaaaccttatggtaaagactgtttagtcgtcacctgtttgatgaacatcttaaaaatgatgaaaatatttgtaagattgatttct

SEQ ID NO: 9687 - DNA, 1410 bp, Glycine max
  Clone ID: 700865758_FLI
gttcaacatagatgagtaatattttttaatgcttgatgaatagagtgtatgaatgaaccaaagcaatttattattaaatcatttttcaggaaactgctttaaatcatgtcaccagctctgggattggtggagaaggatttggagcaacccgcgagatgagccttagaaaactcatttgggtggttactcgtattcaagttcaagtgcaaagatataacaaatggggagacgaaattgaagttgatacttgggtcgatgcagcaggaaagaatggaatgcgaagagattggataatcagggatcattacaccaaagagatcataacaagagcaacaagcacatgggtaatcatgaatagacaaacaagaagactatccaagatccctgaagaggttaagcaagagctgcttcctttttatcttaacaggcttgccgttcctaccgaagaaacagattgtgaaaagatagacaaactcactgatgagactgctcagatcagaatcctatctggactggctccaaggtggaatgacatggatgctaaccagcatgtcaacaatgtgaaatacattggatggattttagaggtacgaattagaaatggcaaaacaaattacctatgtggcaaagattgcaatactctatttcttatagacgttacaaggttttaaatatcggtcgcggttgtgttaggattttgttgcgtttgctgatatcacggcacatcgaatacaaatacgatcccaattgagatcactgaaagttaaaaaatcttgatgttgcaatgcaaattacagtcgccaacctttttaaaaccttttaacgttagagatgataaaatgtagtactgtaaaatgtagtaccaaaatgttgatttggcctattaatttggttgcagagtgtgccaattgaagtgctagaacattataacatgacaagcatgactttggagtttcggcgtgaatgtacacaatcaaatttgttggaatccatgacatgtccaacagcaagagttatggaatccaataataattccaagaatagaaaacccgacatgcaatacacacacttgcttcgtctgcaacaagataaagcagatgttgtccgagccagaactgaatggaattttaagcaaaagcatcagtgatacacaacattgacaaaaaccacagtatctgtggaccctgtacccttcttcttcgatgttcctgtttgctttttgctcttatggttttgctttctaggatcctttaagttctacattcattacaacacatttgtcaatttatcctctttgtgaattctttctgtgaggagaattgtagattgctagttattgagaaatttgttataaataaaagcatttgataataactgattaaaatatatcaacatatatcgcatagtttg

SEQ ID NO: 9688 - DNA, 462 bp, Glycine max
  Clone ID: 700865834_FLI
agcctgttccccaagaacttttggacagggtcctaactgcccacgcatattggtcccagcagcagactaagcaacagctcaagcaccactctacaaaaccttgccttctcctttaataaggacttgacaccaccacgtgcctttgttaaaagtgtcatttatcattttttcttcttcctgtatttatgacaaagtgtgtttatcactttgatttttagtacaatgtcacactttatctatcatgtaaaattagaacaaggtgatgcctatagagaatttgcgtcataggttttcactccaaagtcaaggttcggtgtgtaactggagtggaggggcacgtggatgcacgtgttgatgatagaagtttatctgcaaattgaattatggacccacagcagctaataatgttagtgtagctagagcttatccatgaataaaaaagagctaatattattctaaatg

SEQ ID NO: 9689 - DNA, 911 bp, Glycine max
  Clone ID: 700865877_FLI
gccatggattatccaggatttggtctctcagaaggactccattgctatattcatagttttgatggacttgttgatgatgtcattgagcattactcaaaaatcaaagaaaatccagagttccattctcttcccagcttcctatttggacagtccatgggtggagctgttgcattaaagatacacctgaaacagcctaaggcatgggatggtgccattcttgttgcgcctatgtgtaaaattgcagatgacatggttccaccaaaattcctcactcatatcctgattggtttagccaatgttttaccgaagcataagttagttccaaacaaggatttagcagaagcagcattcagagatttgaagaagagggaacagactgcttacaatgttgttgcttacaaggataaaccacgtttgaagagtgctgtagaaatgcttaaaactaccgaagaaatagaacagcgattgaaagaagtttctctaccaatattcatccttcacggggaagctgacactgtgactgatccatcagtgagcaaagccttgtatgagaatgcaagctgttcagacaagaagcttcagctttacaaggatgcctatcatgcacttcttgagggtgagcctgatgaaataataactcaagtttttggtgacatcatatcttggctagatgagcacagcttgacacacaatcaatcttcctcttaataccgattaattatttttgctctctggattcaaaagatgaatattcattcagcttgttttcagcaatggaaaatagaaagttgctattgtttccataaaagtaactagagtatcaaatattgaacttgtctgttgtttgcaacttaagtcagttactagacataaccttgtttttatgtaaagaacctattttttttttcgat

SEQ ID NO: 9690 - DNA, 978 bp, Glycine max
  Clone ID: 700865886_FLI
tcaataaccagtgagagtcacaatcaaatagtagggaatgggttaatccttggaacagggctgattccatattgtgcaaccttctttgtattcactgactacatgagaggtgccataaggctttctgcgctgtctgaggctggggttatttatgtcatgacccatgattcaataggacttggagaagatgggccaacccaccagcctattgagcacctagcaagcttccgggcaatgccaaacattttgatgcttcgtcccgccgacggtaacgaaacagccggagcatacaaagtggccgtgctcaacaggaagagaccctccattcttgccctatccaggcaaaaactgccccagcttcccggaacttccattgaaggagttgaaaagggtggttacaccatttcggacaactccactggcaacaagcctgatgtcattttgatcggaactggttcggaattggaaatcgctgccaaagctgctgatgacctaaggaaggaagggaaggctgttagagttgtttcccttgtttcttgggaactttttgatgagcaatcagaagcctacaaggagagtgttttccctgctgctgtttcagccagagttagcattgaggcaggatcaacatttgggtgggagaaaattgttggagcaaagggaaaagcaataggcattgatcgttttggagctagtgctccagctggaagaatatacaaagaatttggtatcactaaggaagctgttgttgctgcagctaaagagcttatctagaacttttgattttttttgccttctggttttggttgagagcattccatgtcatgaataagaaaaaggttaaatatccttcgattgggaatttgggattttaagtgaagaagcaacatagatcaaagaattttgtgaacttgtaataactatttgacaatttagttttgcactgccacatggttaaattcaatgtttgatcatatc

SEQ ID NO: 9691 - DNA, 2167 bp, Glycine max
  Clone ID: 700865957_FLI
tgtgaacagggtctgtggttctgatagggccacagctctacattgtgcggttgccgggggctctgaatcctcacttgagattgtcaagctcttgcttgatgctggggctgatgccgagtgccttgatgccagtggcaacaagccggtcaatctgattgctcctgcctttgattctttgtcaaaatcgcgaaggaaggccatggagatgttcctcaggggtggtggggaaagagacgatgaactcatgagccaggagattcaagagagaaaagaagcaattagtgataataagaaagaataccctgttgatatatcactgccagacataaacaacggtgtatatggaacagatgattttaggatgtacaacttcaaggtgaagccttgctcaaagggcttactcccatgactggaccgagtgtccattcgttcacccaggggagaacgctaggaggagagacccacggaaatacccttacagctgtgttccttgcccagagttccgcaaagggacctgccagaagggtgattcctgtgagtatgctcatggtgtttttgagtcctggctgcatcctgcccaataccggacaaggctttgcaggatgagactggctgcgctagaaaagtctgcttctttgcccacaaacctgaagagctacgccctgtctatgcttccactggctcggctatgccatcaccaaaatcatattcagctagtggacttgacatgactgccatgagtccattggctctaagttccacatctttgcctatgcccaccgtttcaaccccacccatgtctcccttggcagcttcatctcccaagagtggaagcttgtggcagaacaaaattaaccttactcctccatcgttgcagcttcctggtagccgactgaaggctgctctgagtgccagggatctggagatggagatggaactgctcggcctagaaagccctgcccgccaccaccaccaccaccaacaacaacaacaacaacaactgattgaagagattgctagggatctcttccccttctttccggagcaaggaattcaataggttggtgatttgaatcctactaaccttgatgacctgttattagcatctgccgacccttctgtattatctcaactacaaagtgggcttcagatgcggcaaagcatgaacaaccacctccgtgcgagttatccatccaacgtcccttcctctcctgtgaggaagccctcatcttttgggtttgactcatcagctgctgtggcaactgcaatgatgaattccaggtccgccgcgtttgcaaagcgaagccaaagtttcatcgatcgtggagctgctgcaacccaccaccatcttggggggatgtcttccccttccaacccttcctgcagggtgtcctctaccctttcaggttggagttcccctaccgggaaactggattggggcgtaaatggagatgagctgaacaagctgaggaaatctgcttcctttggtttcagaaacagtggggtaactgcatcatcatcatcatcccccatagcacagccagaatttggcaccgagcaggatgtctcgtgggttcattcattggttaaagatgttccctccgagaggtctgagaagcaacaatatgatcatctcagcaaagagatgcttctttcaccatgggtagaagcacaatatgatcttcttcagtaaagagatgctgctttcaccatgggtggagcagctgtatatagagcagaagcaaatggtagcatgagcagcaagggctgctgccatgacaatgcttcttggttattctgacatagtttgtttatttatttatttaattattttattcattttgaactgcttctactatccacaacattacacaatattatagttagggataggatgagatatgatattgcaaagaacaaagttcaggttaatccagagatttgaacggagagttccaacttctaggtcagggaagacttggagaaacgttgaacgaagaaggatgctgaattttattttattttattgtataatagtataatttattccccccttttctctacgggtggatggatgtattttctctagcaagtggacctcaaagtatttgccattgattaagcagcacaattcttttttatataaaaattattatgccattttatc

SEQ ID NO: 9692 - DNA, 2011 bp, Glycine max
  Clone ID: 700866001_FLI
aatcaaactgatcaaggagtattcaggatatcatggacgagaatggaagctcaagcaatgcaccaaagaacaagagaaaccttcctgtctccgttttcttcaaagatgcaagacatgttttcaagatggattccattgctaaggagatacttgggattgcattcccatctgcactggctgttgctgctgacccaattgcttctcttatagacacagcattcataggccatttggggcccgtggagcttgctgctgcaggagtgtccattgctttgttcaaccaagcttcaaggattaccatcttccctttggttagcatcacaacttccttcgtagctgaggaaaataccattgaaaaaatcaatacagaaaagaagttaagtgataaggctaagtccaaagaacaagtaatgctcgatgatcattcccttcaagacatagagaaagttgcatccaaagagaacaatgagactgagaatgtggaaatgaatgattgcaatacaagtatatgcaagtctacctctgatactagtagtagtagcagtaacaagagtgtgccaaaagatggaaggaagaagcgacacgttgcttcagcatccacagcattactttttggcacaatccttggtctccttcaagcaacaacccttatatttgctgcaaaacctctattagctgcaatgggtctaaaacctgattctcctatgctaaaccctgctattaaatacttgagattgagatcattaggtgctccagcagtgcttttgtccttggccatgcaaggaatctttcgaggattcaaggacactacaactcctttatatgttattctttcggggtatgcattgaatgtcattttggatcccgtgcttatcttctactgcaaattgggcatcaaaggtgcagccatttcacatgttctctctcagtacttgatggcattggccctcatggtgatattaactagaaaagtggatcttgtacctccaagcattaaagacttgcagatttttaggtttcttaaaaatggaggtctgttgttggcaagagtaatagctgttacattctgccagaccttggcagcctcattggcagcaaggtttggtccaattcctatggctgcattccaaacctgcttgcaagtgtggctcacatcttcccttcttgctgatggattggctgttgctgtacaggcaattctagcttgttcctttgctgagaaagactatgaaaaggtgcttgttgcagcaacacgaactctccagatgagttttgttttaggagttggattgtcttttgcagttggatttggattgtactttggagctggaatcttctccaaaagtgttcttgttgtgcacttaatcagaataggcctcccgtttgttgctgccacacaaccaatcaattcattagcctttgtctttgatggtgtgaactatggggcatctgattttgcatattctgcatactccttggtcaccgtgtcattggcaagtgttgcttcattgtttcttctctctaagagcaaaggtttcgttgggatatggattgcactaaccatctacatgagtcttcgcatgtttgccggtgtgtggaggatgggaacaggtacgggaccatggcgttttctcagaggccgctcaatgtcttgatgatgagatgacatctaacaaaagaaatttcattgttgagcagaaaatgttttgtatcacttttcaccatttaggaccagttgtctttattcaaaacatgatttatgcactatacaactatggtgatagtcttattatatattatattggacgggttcattttacacttgcaagtgttatattcaaagtatctttctttttttttggcctatgtttactgtatggtctctgtttaatgatgtatcctctgcttattgtaatattttgtcgtatttagaagattattcttcgtactgttagtagtatgtaaactctgagtgcatgtatacaaatgagaaaaataaattacttttttc

SEQ ID NO: 9693 - DNA, 1362 bp, Glycine max
  Clone ID: 700866138_FLI
gctgtgtttttaattgatggatttgcttgcagatgagcttatcgccaatgctgcgtacattggcactcctggaaagggtattcttgctgctgatgagtcaacagggacaattggcaagcgtttggccagcatcagtgtagagaacattgaatccaacaggcgagctcttagggagctgcttttcactgctcctggtgttcttcaatatctcagtggtgtcatcctctttgaggaaaccctctaccagagcacagctgcaggcaagccctttgtgaatgtcttgaaggaagctggtgtgcttcctggcatcaaggttgacaagggcacagtcgagcttgctggaactaatggagaaaccaccactcagggtctagatggccttggtcagcgttgtgccaagtactacgaagctggtgcacgttttgccaaatggcgtgcagtgctgaagattggtcccaacgagccatctgagctgtctatccatgagaacgcctatggcttggctagatacgctgtcatatgccaggagaatggcctggttcccattgttgagcctgagatccttgttgatggacctcatgacattcacaagtgtgccgccgtcaccgagcgtgtccttgcagcatgctacaaggctttgaatgatcaccatgtccttcttgagggtaccctattgaagccaaacatggtcacccctggatcccaatctgctaaggtttcccctcaggtggttgccgagcacactgtcagagcccttcagagaaccgtgcctgctgcagttcctgctgtcgttttcttgtctggtggccagagtgaggaggaggcatccgtcaacctcaacgccattaaccaggtcaatgggaagaagccatggtcactctctttctcctttggaagggcacttcaacagagcacccttaaggcatggggcggaaaagaagagaatgtgaagaaggctcaggaagcccttttggtaagagccaaggctaactcagaggcaactctgggaacctacaagggtaactcacagcttgctgatggtgcctcagagagcctccatgtttcgaactacagctactgatcaatcgaagttggtgttgtttgaagagactagtgcgagtaggaatcggtattatgggtacaacaaccgaatttcttgttgataagtattattgtggtttgactcttcccagaataatcgtttggaattttgctttttgttttcctagtgttccttttatgtcaattttagtaattcagtgtatttggtcaaacctgtgcaacagggaagggaatgtaactttgttttcttgaaagacaccaccgtgctgtgaatgaggctttgtgtttatttttgcgatt

SEQ ID NO: 9694 - DNA, 856 bp, Glycine max
  Clone ID: 700866218_FLI
tacaggaaaactgctgaggctgtaatgtgtggtcttcttccggattctccaacagccacaaaaagcagaacagatgatggtcttatatgggtgagccaatggaactctttgcaacatcctgttgcatccgcattcttagctgctgtttacagtgactatatgctaacatcgcagacaccaaaactaaaatgtggttcagattcctttaccccatcagatcttcgagactttgccaaatctcaggctgattacgtattgggcaagaatcctatgcatatgagttttctggtgggctatggagataaataccctcaatttgtgcatcataggggtgcttcaattcctgctgatgcaaaaactggctgcaaggatggcttccagtggcttgagtcatctgatcctaatcccaatgtagctactggagcacttgttggtggacccttcttaaatgagactttcattgattccaggaacaattccatgcaaacagaaccaagcacgtacaacagtgctgtcatagtcggtctcttatcaagtttagttaccacgtcttctgccgttcaatcctttacctaagctgtagcttcctatccgtcctgagttgcacttgttgacgtagatttatgttttttgttgctttattcacttcccaatccttacaaatgaagtgttgtcaaaagcacgaaacataatattgtaacgatatgcatgattgtatgagtgtaaaccctgaggtttggataggtttatcgtgaatatgtacgggtgtagtttgctttggcattattagctcagcaggtgtggagctattttgttgtagtatgtagagcaaatctttaaaatttattattattat

SEQ ID NO: 9695 - DNA, 1384 bp, Glycine max
  Clone ID: 700866402_FLI
caacaaatggtgccccagatgctgggattagcatccaccagaattgcattaccagttgagcttgcagaagatgggcccatttatgtcaatgccaaacaataccatggtatactgagaaggcgacagtcacgagcaaagcttaaggctcaaaacaaactcatcaaaagtcgtaaggtatgcttcacaaattacagttatacattattttgattcaccctgtttatcctaccttattcgtgtatggtcatgcattatattttgtggttttgggggggggggggttgtctttggaaagaatgttggtgaggaggaagagatgggcttggttggttgtatatgtatattttcacctgtttacctgctatggtgtaaaatataaaatgtagtttcattttctatataatttttcgtttttttatatactatacaattttaagttatttgagctatgacatgggagaaaaaaatgcacctgtttacctgttatagagtatttttttttctttctcgcttggataaataattaaatttagaatataagcctatacagctaaattacatgttaactacagtctagaagtgttatttatcattgcaagggagcattggaggaatcactctgaatattgaacttagaaatgaaccgtgatacagtagaataacaattacatgttgcattattctgtgaaatgttattattacatttagtcatatggcaaagctgtacagcctgctttcttgaatctgttttggaccaaaagaaatagtgttactccactgatttccctccctttctaattgattgcagccatatcttcatgagtctcggcaccgccacgcattgaaaagggttaggggaactggggggcgctttcttagtgccaaacagcttcaacagtttaatgcagaacttgtcaccgatgcccattcaggcccgggccctgtcaatgtttatcaaaagaaagatgcatctgaggcagaaagtcatccctcaagaactggaaaaaatgcatctatcacattcacagcaatctctggcttgacaagtatgtccggtaacagtgtcagtttcaggcggcctgagcacaacttcttggggaactctcctaatataggtggatcgtcgcaatgcagtgggggactcacctttggtggtggagctcggcaatgtacttcagttggccggtgagaggtggaaccaatcaaaatcaagttcactggtctggcaaatcatccttggcttagtcactttactttctgtgtttcatgtgttgttacggaaatgttgtcttttggaagactctgcattagcactcagacttttgctagtgctttcccatgtattttgaaagttgctcttgtttctgttgttgaactggacccc

SEQ ID NO: 9696 - DNA, 1394 bp, Glycine max
  Clone ID: 700866411_FLI
cccgcatgtgccgtagcagttgagctgaaaccgagaagaagaagatggagatgtatcagatctggagcaggagaatagcgttgggagcgttcgcgtttgttctgcttttcctatcggcctcagcagacgacgtcgttgtgctctctgaagataacttcgagaaggaagttggtcaggacagaggagctctcgttgagttctatgctccttggtgtggacactgcaaaaagcttgctccagaatatgaaaagcttggtagcagcttcaagaaagccaaatctgttttaatcggcaaggttgactgtgatgagcacaagagtttgtgcagcaaatatggagtctctgggtacccaacaattcagtggtttccaaaaggatctcttgaacccaaaaagtatgaagggccacgcactgctgattcacttgctgagtttgtaaatacggaaggaggaacaaatgtgaagattgctacagctccttccaatgtagtggtgcttacatctgaaaattttaatgaggttgtcttagatgaaaccaaagatgtcttggttgagttttatgcaccctggtgtggacattgcaaaagtcttgctcctacttacgagaaagttgccacagcatttaaattggaggaagatgtagtaattgcaaatctggatgctgataaatataaggatctggctgaaaagtatgatgtgagtggatttcctaccttgaagttcttcccaaagggcaacaaagctggtgaagagtacggaggtggaagagacttggatgactttgtggcttttatcaatgagaaatctggaacaagtcgagatgtaaaaggacaacttacttcccaagctggtatagtagaaagcttggatgtcttggttaaggagtttgtagctgccagcgatgaagagaagaaattcgtgtttacccgaatggaagaggaagttgagaagctgaagggttctgcctcaaggcacgggaagatttacttgaaagctgccaagaattacttggaaaaaggttctgattatgctaagaacgaaatccagcgcctacagcgcatacttgacaagtccattagtcctgccaaggccgacgagttaactctaaagaaaaatatcttgtcgacatatgcggcttgactttttggtgcatcattaaccatctctcatggaagctcgtgatcaatcgcagctcctgatgattgtttgactttgatatcgaaaatgctgggagatattcaacgtggatacttgtagtgcttaatttgagtctgtactattgaccttatcttgcatggcgcttttggggttaaaaattccgaacttacgattcttctccccattgtagtctacctgagcggtttaaaattttgggagacgatagcttttgtcttt

SEQ ID NO: 9697 - DNA, 529 bp, Glycine max
  Clone ID: 700866481_FLI
gtgagctgaaaaaattcaaggctcttgacaagacctacatttgccctagctgcaaagttactctcaccaacacaatgtcgcttgtggcccttagtacatgtgggcatgtcttttgcaagaaatgtgctgacagatttatggctgttgataaagtttgtcttgtttgcaacaaggcgtgtaaagagagaaatttggtgaatttggagaagggagggacaggttttgctggtcatggagatcatcttgaagccacagacttcaagcatttgggaagcggtagtggtttagggctggttagacctgcaatgaaaacttgatgctttatttaggttctttcaggagaagaaaattgtgctttaacttctcttgatgaagttaccttgttaccgtggtaaacatcattatctatcttatctatgatatgatgttctacttcgtttattttatttttacttttttttgtttacccgagataaacttaacgtgaaaaatcagcttgatccattaatgactagcgattggcaatgtt

SEQ ID NO: 9698 - DNA, 1004 bp, Glycine max
  Clone ID: 700866569_FLI
cagttgatcatacacactcttcttcttcttcttcttctctcttcttgcttgcaatatggacatgaattcctcaggtggtgcctgcggttggctttatgattatggctttgatatccctgttgctggttctgacttcatggcttcagactctggtggtttcagttgggggccccagagttacaacttcaagggtccttcaaatatgagcttggaaatggaatactcactggattcaactgtcatggaaaatggtccttcaaagcggttaaggactgaatcatgtgcatctggctccaaggcatgtcgtgagaaattgcgaagggataaacttaatgagaggtttctggaattgagttcgatcttggagcctggtagacagcccaaaacagacaaagttgcattattaagcgatgcggctcgagtggtaatccaattgagaaatgaagccgagaggctgaaggaaatgaatgatgaattacaggcaaaagttaaagaattgaagggtgagaagaatgagcttcgtgatgagaagaataggctgaaggaagagaaagaaaagttggagaagcaagtgaaactgacaaatatacaacccagcttcctacctcaagccccagatgctaaagggcaagttggtagccacaagctgatacctttcattggataccctggaattgccatgtggcagtttatgtcccctgctgcagttgatacttcaaaggatcatctgcttcgacctccagttgcataaagtggttagcaatagcatccacttctttgttgtatgtgttctttacatgtgttatatttttgtgtttaagttatccatcctgtctaatgtgtgttttctaaagtcactggtagaaagtgtgctcggaaactggttaatagtataagtttgtgctgttgctgtctgaactatgataagaaagtgctacatgtcatggctacaaagtgtgttgcattattaaaaataaaagtgagtttaagtggttctttgctgt

SEQ ID NO: 9699 - DNA, 795 bp, Glycine max
  Clone ID: 700866613_FLI
cggaaattaggctgcccaacagccgtcaaaggatttggttgggttcctacgacagcgccgaaaaggcggcgcgtgcattcgacgcggccatgttctgcttacgtggcagcggtgccaactttaatttcccgagcgaccggcccaacatcgctggcgggaggaacatgacgccctcgcagattcagatcgccgcggcgcgtttcgccaattcggagccccgaaaggagtgttcgggtaaacccgtggagtctttgacttcgattgaggaaacgacgtcgtttccagtaaattcggatacggatacatcttctcctctatcagtagtgacgatccaaaacgacaccgaagtagcaaccgggtcgtttccgggtatattttcgggtttcgggtcgggtaatttcgtccccgaattctccgattttccgagcttcgatgatttcggccacgatttcttcgtgcatgagcttccgggtttcgattacggagaagagaacttggatgggttgataattcaggactcgttcctgtggaatttctaagcgggtcggggttaggataattttattatatcccaaccgtgtttagaattcggatcggatccggatttgggttggtcaatttttgtgagaccatgccctctgtgttagtagttagtgatggtaatgttttttttatgtacctagtagtcaaggtttcgattttttgggatgagaatcataatttatttatttgtcatgactcatgtcattaattgtaaagttgtctgctgatagtgtaattttcttttggccattc

SEQ ID NO: 9700 - DNA, 2119 bp, Glycine max
  Clone ID: 700866653_FLI
atcatatcattcttccgatttcagaagtcagagagagagaagatgaagagcgaaagcgaattggttggattctgcattgaggcagcatgtgagagcagagaaagcgtggataaatggcggatgcagagccgcagtctcgatcgcttgccttctcatctcgccgactctctcctccgccgcctcatcgcccgccgcctcctttacccctctctcctcgaggttttcaaacatagtgctgaagaggttgatgtgagaggggacaactccgtggacgcagaatggatggcgtatttgggagcatatcgtcacttgcgctacttgaacctctccgattgtcatcgagtctccacttcagctctttggccaattacaggaatgagtagccttcaggagttggatctatctagatgcttcaaggtcaacgatgctggaattaaccatattctttccattcctaatctggagaggctacgtatttcagaaacaagcgtcactgcaaaaggagtcaagcttctcgcctcgcttaaaaacttgtctcttcttgacttgggtggtttgcctgttgatgacgtcgcattaacttcattgcagtaaaatatcaaacaaaggtgcttctgttctcaatacattcccaaagttgacctatctcaatcttgcttggaccagtgtcacaaaattgcctaaattatcatttcttgaatacctgaacatgagtaactgtactattgattctatacttgaagatgataaagctcctttggcaaagcttattctctctggggccatgttcatgaatgaagctgaagctttgttatatgcaaatacaaatttcctatcctttttggacgtggccaattccagctttcacagattcttcttcttaagtaaaatgaaagtgatagaacatctcaatctcagctcatgcatgatgggggatgattcagttgagatggttgcgtgcgctggtggaaacttgaaaagtctgaatttgagtggtaccagggttagttctgctggattagggattttagctggacatgttccccatcttgaaattctgtcattatctcagacaccagtggatgacactgccatctcatttatcagtatgatgccttcattaaaggatgttgacctgagcaatacaaatattaaaggttttctgcaccaaggaaggactgatgtgaactccctgctctctctaatggctctgcaaaatcttaaattagaaaggttgaatttggagcatacgcaagttagggatgaagcgttataccctttgtcaagcttccaagagctgagatatttatctcttaaaagtgcttcacttgcagacatctcactttactatttatcatcaattcctaaattgacaaatcttagtatttgtgatgcggtattgacaaattatgggcttgatatgtttaaggctcctgaaactctgaaactgctggacctcaaaggttgttggctcttaactgaagacactatcttgtcattctgtagaaatcatccacaagttgaagtcaggcatgaacttggtaccttatttcctgtcaatcaaaacggacttaatcattcctctccatctcgatcaacttccaagactatgcaaatgactaagaagaaagatcaaattcccttatctccatattttgttgatcaaagattgaagtatagcagggacgagttacttgcattgcagtttacatctttgccccttgcatctagtagtgagagtggcaattcaatatttgagaaacaattgggttgagtggagaaatctccttccatataattgtttgcactcatggcgttgggaagggaatgcgatttgaacagagattgcctcaggattaacagcccaagtatgatgttattcaatgtttcataagtatggcttctcaccaaaaggaaaggtgcaactcgaatgcacaagctcaaagctgaatcacgtttctgatagagaaatcgaatgatatgccttgactccaacttagtaaacatgtagatatgcaatgtggttaaagaaaggctttttagtaattttattgcatgatttggctgacacgttattctttttccagtgcaatggtgaacacatcacacatggaatgtg

SEQ ID NO: 9701 - DNA, 936 bp, Glycine max
  Clone ID: 700866722_FLI
gtggctttgtagatttggatggatttcttactggaaactatgtatgcaggatacatgcgggttcttttaaactgttttgccttctcccaatgtttatcaaacaaaatcttattctctattctctattttttaagctttgtatgtgatgctgttgatggctggtgtgcccgcaaattcaatcaagtgtcaacctttggagctgtgctggacatggtaacagacagaattagcactgcttgtctacttgtagtcctttcccaactgtacaagcctagccttatcttcttgtcattgcttgctttagatattgccagccactggctgcaaatgtacagcactttcttgacgggaaagactagtcataaagatgtaaaagacagcagcagctggcttttcagggcatactatggaaataggatgtttatggcttactgctgtgtctcatgtgaggttctttacttaatcctgttttatcttgtggagaatcaaacacagaaactggtggacgttatatcaagtaatttacaaaagatatcattactttctctcctaatgggttctagtttatttggatgggcagccaagcaaattataaatgttatccagatgaagacagcatcagatgcatgtgtgctttatgacatcgaaaaaaaacataagaactgatatttcttccacgacccgaatcccttatctttgtttttcagtaccaagttgtgcgctcaaagattaatatgaattatcccagatggcaattgggattgaattgttcggttttctataatttgtaatgaaagaaaaagaacatactgaactaaagaatctacctttccatatagctgaaagattctgtagcgcaatgttcagtgcttttttgtttagccgctgttaatcacactgcgacgctaagaaagatttgttcagttttgaatttgc

SEQ ID NO: 9702 - DNA, 1065 bp, Glycine max
  Clone ID: 700866786_FLI
tttagaagattctcggcatcactttcatggtcaacgagaatgaaaattgctgttggagctgcgaagggtttagcatttcttcatgaagctgagaagccagtcatctatagagatttcaaagcttccaacatcttgttaggctctgattacaatgcaaagctatctgattttgggttggcaaaagacggtcccgaaggagatgatactcacgtttcaacccgagttatgggtacacacggctacgcagctccagaatatatcatgacaggtcacttgacagcaatgagtgacgtgtatagttttggagtagtgctgttggagctgctaacagggagaaggtcagtggacaaaaatcgccctccaagggagcaaaacctagtggagtgggcaaggccaatgctaaatgactctaggaaactcagcagaataatggatcctagacttgaaggccaatattctgaaatggggacaaaaaaagcagcagcattggcttaccaatgcctcagccacagaccaaggagcagaccctcaatgagcacagtggtcaagacccttgagccactccaagattttgatgacattccaattggaacatttgtttacacagctccaccggataataatgaaatgcatagtgcaaaggatcaatgtgagacacctaagaggagggaaaataataataacaatggtcaccttcataggaatggccacaggcatcatccacttaaatcccccaagacccctaggccacaatcacaatcacaatcacgttcaaatgatcacaaacaccgaaatggaagaggaagtggatcaaattctcctccatcacatgggaaaattaggcaaggagttcttgcctattagggcacataaatgataaatcatgttttgtacatatacatagagatattttccctcaaaattggttagttttgtgtagtgtaccaactagctagctagtagacccccccccccccccattgccaagaaaagacaaagacaagaagacagtgagcgtgcaagtatatatatatatggtccacacatggaaaacatgcttaagtt

SEQ ID NO: 9703 - DNA, 1134 bp, Glycine max
  Clone ID: 700866804_FLI
ctactattggcatggacgaaacaatagaactatatatgaattaagtcccaagacactgtcatctggatttgatgattatccacgtgcttcacacccaagtgcagatgagcgccacgtggatcttagatgttggatgttacttgcaaccgattgtctgcaatacattgaagagttgttggataaggaaactaaacctggcaaagtataaatttgaaaaaattatggttctactgctaaattgctatcagatgtcgagttactgaaccagatgcattttgatgatgcacatggtgcttactttgattttggaaatcatacagaaaagattcaacttaaatggaaagaagtggagataggacacaatcatactgctcgccaacttgtcagggttgttttagagaagcccgtattgagattggttcctcacattggttatgttagtctattcccattcatggggaagatcattccatctggatcatggattctggaaaagcagcttgaactcatttcaaatcacagtctcttttggactggctatggactgcgatcgcttgccacgacaagttccttgtacatgaaattcaactctgagcttgagggtccatattggagaggtcaaatttggataaacatgaattacagaattctttcagcgctccaccattactccaaagagaatggaccatatcaggacagagctaaagctatctacaaagaactgagaagcaatttaattagaaatatagtacgcaattatcaacaaactggatttttgtgggaacagtacgatcagaataacggtaagggaaaagggtcacatccatttaccggctggacatcacttgtagtattaatcatgggggaagaatatgacataatttagaataactacgttacccaagcattggaccttttattcactgtggagtaagcaaaccagcaagatcttcatagcatattacaagatggccatctaatttctcataaggctatcatactgcaacaatgtataataaccctccaactcccttggtgggtgtcaaattgtcaatgataatgtataatgtatgggtcatttcaaattaaaagttctgtcaacaaaaataagtggaggcaaaaagttatcattcc

SEQ ID NO: 9704 - DNA, 641 bp, Glycine max
  Clone ID: 700866962_FLI
ccttgatagagacattgctcttgcagaaatagagaaagagaaacgattgtctaatgtgaaggcttgggaagaaagtgaaaaatccaaagcagagaataaagcccaaaagcagctctctgctgttgctgcttgggaaaacagcaagaaagcagctcttgaagctcagctgagaaaaattgaggaacaactagagaaaaagaaagcagaatatggtgaaaaaatgaaaaacaaaatagccttagttcacaagcaagcagaggagaagagagcaatggttgaagccaagcgtggtgaagaaattctcaaggcagaggaaatagctgcaaaacaccgtgcaactggaacctctccaaagaaggcctttggatgcttttaaatttttattccttttttttgttgttgtgcttttgtgcctgatgtcatagcaataatgaaatttttgtctataatattttcatgtttgttttttaaatgttgtttatgtgtgtacgaaatggaaagggggacactatgaagtttgtgacatacagaacagcctctagatctttttgttaagatgaagtgttctatgctgtttattcatttgttttttccataacagaatcattctattcaccaagcaatagattttctctctcttc

SEQ ID NO: 9705 - DNA, 2800 bp, Glycine max
  Clone ID: 700866989_FLI
cttctgagagtgtttggttgaaagtagcaaagatgtttcctttcgggcaaaagggtcaaaagataaaggggactatggtggttatgcagaagaatgtgttggatatcaacagcatcaccagtgttggagggatcgttgaccaaggcttaggcttcataggcagtgcagtcgatgcacttacttttgcagccaccaaaatctccatccagttgattagtgctaccaaggctgatggtgggaaaggaaaaattggaaagagtacaaatttaagaggaaagataacattaccaaccttgggagctggcgaacaagcatacgatgttaattttgaatgggacagtgacttcggaattcccggtgcattttatattaagaacttcatgcaaaatgagttctacctcaagtctctaattctcgaagacattccaaaccacggaaccattcacttcgtatgcaactcctgggtttacaattcaaaaaactacaagactgatcgcattttctttgccaacaatacatatcttccaagcgagacaccagctccacttttgaagtacagagaagaagaattgaagaatgtaagaggggatggaactggagagcgcaaggaatgggataggatctatgattatgatgtctacaatgacttgggcaacccggatagcggtgataaatatgcacgccccgttcttggtggttcagccttaccttaccctcgcagaggaagaaccggaagaggaaaaactagaaaagatcccaacagtgagaagccgagcgattttgtttaccttccaagagatgaagcatttggtcacttgaagtcatcagattttctcgcttatggaatcaaatctgtatcccaagatgtcttgcctgtcttgactgatgcattcgatggaaatattttgagccttgagtttgataattttgctgaagtgcacaaactctatgaaggtggagttacactacctacaaactttcttagcaagatcgcccctataccagtgatcaaggaaatttttcgaactgatggcgaacagttcctcaagtatccaccacctaaagtgatgcaggtggataagtctgcatggatgactgatgaagaatttgcaagagaaacgattgctggtttaaatccaaatgtcattaagattatagaggagttcccactaagtagcaagctagatactcaagcctatggtgatcatacctgtataatagcaaaagaacatttggagcctaacttaggtgggctcactgttgagcaggctatccaaaacaagaagttgttcatcttagatcaccatgactatctcattccttatttgaggaaaataaatgcaaataccacaaagacttatgctacaagaaccatatttttcttgaaagatgatggaactttgacaccattggccattgagttaagtaagccacatcctcagggtgaagaatatggtcctgttagcgaagtctacgtgcctgccagcgaaggagtggaagcttatatttggttactggcaaaggcttatgttgttgtgaatgatgcatgctaccatcaaatcattagccattggctaagcactcatgcaattgttgagccatttgtcatagcaacaaacaggcaactgagtgtggttcaccctatttacaaacttctgtttcctcactaccgtgacaccatgaatattaattcacttgcccggaaagccctggtcaatgcagatggtattatagagaaaacattcttgtggggtaggtactctatggaaatgtccgctgtcatttacaaggactgggttttcactgatcaagcattacctaatgatcttgtaaagagaggagttgctgttaaggacccatctgctccccatggagttcgtcttttgattgaggactatccttatgcttctgatgggctagagatatgggatgccatcaagtcctgggtgcaagaatatgtctcattctactacaagtcagatgaggaactccaaaaagaccctgaactccaagcttggtggaaagaacttgtagaggtgggtcatggtgatttgaaagataagccatggtggcaaaagatgcaaactcgtgaagagttggttgaagcttccgctatcctcatatggattgcttcagcccttcatgctgctgttaactttggacagtatccatatggaggtttaatcctaaacaggccaactattagcaggagattcatgcctgaaaaggggtctcctgaatatgatgcgttggctaagaaccctgagaaggagtttttgaagactattactggcaagaaggagaccctcattgaccttacagttatagaaatcttgtcaaggcacgcatctgatgagttctaccttgggcagagagatggtggtgactactggacttctgatgccggtccattagaggcatttaagaggtttggaaagaagcttgaagagattgaaaagaagcttatagagaagaacaaagatgagacattgagaaaccgctatgggccagctaaaatgccttacactctgctctatccttctagtgaggagggattgactttcagaggaattcccaacagtatctctatctaaggaccctatggttgcttaagtactgttcctggttttaaataaatgtgaaattgaaggaaccagattccttaatcagttgtgtatgcttaagtcatgtatttggagtggctgaatgtatttgtatttgtcattaataaagagagttgtgttagtataatggaaaccaaaaataataaatgcaatcatgcatgtttttaacttttaac

SEQ ID NO: 9706 - DNA, 1210 bp, Glycine max
  Clone ID: 700867050_FLI
tgaagatgggaatctcatgaagatccacagagttagcattgacgatttcgagattttgaaggttgttgggcagggtgcatttgcaaaagtttatcaggtgaggaaaaagggtacttctgaaatatatgctatgaaggttatgcggaaggacaagattatggagaagaaccatgctgaatacatgaaagctgagagggatatttggacaaagatagaacacccatttgttgttcaactcagatactcttttcagacaaaatacagactgtatcttgtgctggattttgtaaatgggggccatctctttttccagctttatcaccaaggccttttcagagaggatctagcacgcatatatacagctgagattgtttctgcagtttcccatctccatgcaaatggaataatgcatagggatctaaagcctgaaaatatcctactggatgctgatggccatgttatgttgactgattttggcttagctaaacaatttgaagagagtacaagatcaaattcgatgtgtggtacattagagtacatggcacctgaaattattcttggcaaaggccatgataaggctgctgattggtggagtgtaggtgttctactgtttgagatgcttactggaaagccgcctttctgtggtggaaaccgtgacaaaattcagcagaagatagttaaagacaagattaagctgccagcatttttgtcaagtgaagcacattcactgttgaaagggctgctacagaaggaacaagctaggcgcttaggttgtggacctcggggtgttgaggaaattaaaagccacaagtggtttaaaccaatcaattggagaaagttggaagcaagagaaatccaaccaagctttaggccagaagtagctggtgtgcactgtgttgccaactttgagaagcgctggactgatatgcctgttgtggactcaccagctgccagcccaaatggtggaaacccctttaaggatttctcttatgtgaggcctgcagcctcttttcttcaaaggaataaccctgcttactagccagcttgaaatggcgttggcttaagatgccaacatgaaacattttcatgtgcccttgacttgtgtgaactttgcaggttgtgggttcattcacttattatgtgcaccttgctgcggctctctgcaaatgtattgagctgtcatgtatgcagaaaataaattactttattt

SEQ ID NO: 9707 - DNA, 1113 bp, Glycine max
  Clone ID: 700867273_FLI
gtaaagtttgtagctcagggtgaatcattcctaactgcttcagcagataagacagttcgtctatggcaagggtcagatgatggtaactataactgcaggcacatcttaaaggatcattcagctgaggtgcaagctgtcactgtccatgcaaccaataattactttgtgactgcttcacttgatggctcttggtgcttttatgaactttcttcagggacgtgtttgactcaggtttatgacacttcaggttcttcggaagggtacacatctgcggcttttcatccggatggtctcattcttggaaccggcaccacagaatctcttgtcaagatttgggatgtaaaaagtcaggcaaatgttgctaggtttgacggacatgctgggccagtaactgccatatctttctctgagaatggatacttccttgcgactgctgctcatgatggtgttaagctttgggatctacgtaaactgaagaacttcaggaattttgctccatatgattcggaaacaccaacgagctccgtggagttcgaccacagtgggtcctacctagcagttgctggttctgatataaggatttaccaagtagcaaatgtgaaatctgaatggaactgtatcaaaaccttccctgatttatctggaacagggaagaacacgtgtgtaaaatttggtccagattctaaatacatagctgtgggatcaatggaccgaaatcttcggatattcggcttgcccggtgaagatgctcctactgagtcataaaatgcctcagttgtacaagccaaagtcttgctctggagtaaacagttgctacctgctattggtgcttggtctaaatatctatgatgagattggaaaagttaatgaaggtagtggtttctttgattattcagtcttgctcctcacatggcatgttgcgtatgtaggatggaacaaatgtactttcaggctttgtgcagcaacattacgatgccttgatcatggctgctaaccttagtgatagaaagctgcaatatttgccttagtcatcaaaacctcaaagcttatgttgtccgtagataattttgtaacgtcaattgtttaattagtgagataactgatttgtcggcc

SEQ ID NO: 9708 - DNA, 1571 bp, Glycine max
  Clone ID: 700867375_FLI
gcgccgagtagccagtcgtacttgctgatcccgaatgttctgtcggctgctattagccgcagatgcacgatgttgcatcctggctatggttttcttgcggagaatgctgtgtttgttgaaatgtgcagggaacatggaatcaactttattgggcccaaccctgacagtattcgggttatgggtgacaaagcaactgccagagagacaatgaagaaagcaggtgttcccaccgttccaggaagtgatggccttttacagagcacagaagaagctattaggctggcaaatgagattggtttccctgtgatgatcaaggcaacagctggtggtggaggacgtggcatgcgtcttgctaaagaacctgatgagtttgtgaagttgttacagcaagctaagagtgaggcagctgctgcatttggcaatgacggggtttatttggagaagtacattcaaaacccaaggcacattgagttccaggttcttgcagataaatatggtaatgttgttcactttggagaacgtgattgcagcattcagaggcgtaatcagaaactgcttgaagaagcaccatctcctgccctgacccctgagttgcgaaaggcaatgggagatgcagcagttgctgctgctgcatctattggttacataggtgttggaacgattgagtttcttttggatgaaagaggttccttttactttatggagatgaacacacgtatccaggttgagcatcctgtgacagaaatgatttcctcaacagatttgatagaagagcaaattcgtgtagctatgggagaaaaacttctatacaaacaggaggatattgtcctcagaggacattctattgaatgccgtatcaatgcagaagatgcttttaagggatttagaccagggccaggtagaattacagcatacttgccatctggaggtccatttgttagaatggatagccatgtttatcctgattatgtggttcctccaagctatgactcccttcttggaaagctgattgtatgggctccaacaagagaaaaagcaattgaacgcatgaaaagggcacttgatgacactattatcacaggagttcctactacaattgattatcataaacttatccttgacatagaggatttcagaaatggaaaggttgatactgcttttattccaaaacacgaggaagagttggcaatgcctccgcagaagatggtactcgctaacagggtgaacgaactagctggttcaactgcctgatgaatgattgtgtgatgtcagaattgctttttgtaatcgccgtgttgtcagtgcctcgaagtgaatgttttaatgaaattttgataattagtctcgtacattccttttcttcacataattatattgtaaaatcaattaattcatgtttgatttcatcccaaatattattgcaaggaattaagaataggtccttgcatttttttcggaagtcatagttgtcacaatggttggtttagaggatcttgtattaagagctcgatgctagatacagtaataaaaacttaaccttatcctaatagactgggtttgttatatggatc

SEQ ID NO: 9709 - DNA, 1732 bp, Glycine max
  Clone ID: 700867504_FLI
caccagttgtacaaatacttcaaatcctagcgtaatgcttggagctgcattggttgcaaagaaagcatgtgaattgggattgcaggtgaagccatggattaaaacaagccttgccccaggttctggtgttgtgactaagtatttgcagaggagtggcttgcagaagtatttgaatgagctagggtttaatatagttgggtatggatgcaccacatgcattggaaattcaggggatattaatgaagctgttgcatctgcaattactgaaaatgatatagtagctgcagctgtactgtctggaaataggaactttgagggccgagttcacccattaacaagagctaattatcttgcttctcctcctcttgttgttgcctatgcccttgctggcacagtggacattgactttgacactgaacccattgggatagggaaggatggcacaaagatcttcttcagggatatttggccatccagtgaagaaatagcaaatgttgtacaatcaagtgtgctgcctgctatgtttagggacacatataatgcgatcacccaagggaatcccatgtggaataatttatctgttccaactggcactctttatgcttgggaccctacatcaacttatattcatgagccaccttattttagagatatgagcatgtctcccccaggctctcatggagtgaaagatgcttactgtttgctcaactttggagacagtatcacaactgaccacatctctccagctggcagcatacataaggacagtcctgcagccagataccttatagaacgtggggttgatagacgggacttcaactcctatggaagtcgccgtggtaatgatgaggtgatggcccgaggaacttttgccaatattcgcattgtcaacaaatttttgaatggagaagttggacctaaaactattcatattccttctggggagaagttatcagtctttgatgctgcagagaaatacaagagtgaggggcatgatatgattatcttggctggtgctgagtatgggagtggaagctctcgtgattgggctgcaaaggggccaatgctactgggcgtgaaagctgtcatagcaaaaagttttgaaaggattcaccgaagtaatttggtgggaatgggtatcattccattgtgttttaagcccggggatgatgctgattctcttggattaactggccatgaacgttacaccattgatctaccaagcaatgtgaatgaaatacgacccggccaagatgtcacagtggtgacagatgccgggaaatcatttgtatctacactgagatttgatacagaggttgaactagcttacttcaaccatggaggcatcttacaatatgtcatcagaaacatggtcaatgctaaacattgaatcagatataaaccaagtttgcaggttgaattgatagcactcactggcgctgattcttaactttggtcttaataatctagtatggcctgctacaaggaaatccattgctattcagctattgtatcaataaaccaaggaactagatggctactacgaggaagagttatgactgtcgtttgttgaagaaatgtgattttctttttcaaaaattctattggtcattgaggatgaaaattccttgttacatttttactggttttacagttgagtttttaggaaacatttgccttctattgctgcctcccgactcttgagaattaaggaaatcaggaacattttttg

SEQ ID NO: 9710 - DNA, 1969 bp, Glycine max
  Clone ID: 700867581_FLI
acaaggacacaagaagtacgacaaattaagacagggcctaagagaaggtgttgtagagaggatacagcgagagcaaaatgtattctcattgggttcgattgatgcttctcattgcttgcattcttccagctttggttgaatgcagagagaggcactacaaatttcatgtggtgtctaaacaaactaatagattgtgttcaagcaaatctattgtcaccattaatggcaagttcccgggacccactctttacgccagggaagacgatacagtgttggtcaaagtcatcaaccaagtcaatcacaacgttaccatccattggcatggtgtgaggcaattgagaactggttgggctgatggacctgcatatgtcacacagtgcccaattcaaccagggcaaacctatgtatacaatttcacactcacagggcaaagaggaacacttttgtatcatgcacatgttaattggctaaggtcaactctctatggtgccttggttatcttgccaaagagaggtgtgccttatcctttcccaaaaccagatgatgagttggttgtggtattaggagaatggtggaaatctgatacagaagctgtaatcaatgaagcactcaaatcaggattggcaccaaatgtctcagatgctcatactattaatggccttccagggacagttaccaattgttctacacaggatgtttacaacctgcccgtggagagtggaaagacctaccttttgagaattgtcaatgctgcactcaatgaggagctattcttcaaaattgctggccacaagctcactgtggtagaagttgatgccacatatgtaaagccattcaagattgaaacaattgtgatagcccctggccaaaccaccaatgtgcttctaaatgcaaaccaaaaatctggcaagtacttggtagcagcttctccattcatggatgctcctgttgctgtggataacttgactgccacagcaacattgcactacaccggcactcttgctgccacccccacaattctcaccaccccacctcccaaaaatgctacccaaattgccaacaacttcatcagctctcttagaggccttaactccaagaaataccctgtcaatgtcccattaacagttgatcactcacttatcttcactgttgggttgggaattaacccttgtccatcttgcaaagctgcaaatgggagcagggtggtggctgctatcaacaatgttacatttattatgccaaccattgccttacttcaagcacattatttcaacatcaaaggggtgttcaccactgatttccctgccaatccaccccatgttttcaactactcagggcctggaccagccaatttgaacaccgaaaccggcacaaaggtttacaggctaccattcaacgccacagttcaggtggtgctacaagacacaggaatcattgcacctgagaaccacccagttcatcttcatgggttcaatttctttgttgttggaagaggagtaggcaatttcaaccccaaaattgaccctaagaactttaaccttgttgatcctgttgaaaggaacactattggagtaccagctggagggtggactgcatttagattcagagcagataatccaggagtttggttcatgcactgccacttggaggtacacacaacatggggactaaagatggcctttttggtggacaatggcaaaggtcctaagcaatcagtgatacccccaccaaaagatcttcccaaatgctaatgtgtcaatcatcaattaattatgcaatacacaaaagaaaggccttccaatgccaaaacaaaagaagctttggagggatacagagaagccaggcaaaagaaaagtgagtgaagaagaaagggttatttaataagcgagtatcccaaatgttttttctttgagcaaataggagaatttgttcaaccacatttaataaaatggagcgagcattttagttt

SEQ ID NO: 9711 - DNA, 782 bp, Glycine max
  Clone ID: 700867615_FLI
atctctctggcccaatacccgattttttcgcgcaactcaagaacctcgacgatatcgacctttcctttaacaacctctccggccccataccaagctcgcttggtaaactgcctaaactcgcgtatctagatttgagccgcaacaagctcacgggctcaattccggcctcatttggatccttccaaaagcccgggccggctattatgctctctaaaaaccagctttcagggcgccttcctgcttctttggccaacttagactcggacaggatagacttgtcaaggaacaagctcgaaggcgatgcctccatgcttttcgggagcaataaaaggacgtggtctcttgacctttcaaggaacaatttcgcgtttgatctatctcgcgtggagattccccacaagaccctggcaaggttggatctcaaccacaataagatttatgggagccttcctgtggggttgaccaaagtcgaacattttcagctattcgacgtcagctataatcagttatgcggtctcataccgaagggtggagaattgcaaaagatcgataagtctttgtactctcacaacaagtgtttgtgtggctctccactatcaccttgcaaccataagcagatgactgtctaagtcgatttcatactttgataagtattcgtattttcatgtgtgtttgtgtgactttccaatttcacctttcaaccattataagcatatgcctatcaaagttggtttcatcagattaattattctgatttcaataaaatcgattacttgtttttc

SEQ ID NO: 9712 - DNA, 945 bp, Glycine max
  Clone ID: 700867665_FLI
gtttccaaatatgcccgtggcgacggactagaagttgttgggaaacaggatcatcaatccctgtgatccgaacatggggattgatgatcctgtttccaaatatgcccgtggcgacggactagaagttgttgggaaaaggttggccttgatgtctgagaaatttggcatcccagttgagtttcatggagttcctgtttttgctccaaatgtgacaagggaaatgcttgatatcaggccaggagaggccttggctgtgaattttcccttgcaactccatcacacagctgatgagagtgttcatgtgagcaacccaagggatggacttctgagattggtaaggtcactttctcccaaggtgaccacactggtggagcaggaatcaaacacaaacacaacccctttcttcaacaggttcattgaaaccttggattactacttggcaatctttgagtccattgatgtcaccctcccaagagatagcaaggagaggattaatgtggagcaacattgtctggccagggatattgtgaatatcattgcttgtgaaggcaaggaaagggttgagagacatgaactgttcggcaagtggaagtcgaggttaacgatggccggcttccgtcagtgtcctttgagttcttatgtgaattctgtcataagaagccttttgatgtgctattcagaacactatacactggtggagaaggatggagccatgttgttggggtggaaggacagaaatttgatatcagcttcagcatggcattgctaaaaacatagatagtaggaaatactgtgtagtggtaatagaaataccatgatgatgggaagccaaatggtatttgggagggtttaacatgtagctgattaaggtttatgttcattgccattgctctcatctcatgtactggtagtatattgattcttttataaaatgtcatttatgtt

SEQ ID NO: 9713 - DNA, 678 bp, Glycine max
  Clone ID: 700867713_FLI
gaacggggaaacgggtcgggtcttgcccaaatgcaatcacagtttccatactgagtgcatcgatgtgtggtttcagtctcatgccacgtgtccgctttgcagggaaaccgtggaggctatgcccgagcgagaaacccgatccgaggtggctgttattgtgtgcgagaccgaaccggttcgagaagaggtgaaccggtctggaccggtgggtgcttcttcttctgctgctgctacttcgttgcatatcgagaacttggggtgcgaggatgggtgtgaatcggagtcatcgtttcgttcgccggtgagtcgtatattgtcgttcaagaggattctgagtagagagaagaaaggaagcgttgtaggagtgtgcagctccatgaccgagttagacgtagaacaacgtggagagtgtgactcggtgagttgatggcagcgacaacgtgaaatcgaaattggaatgagtctgagattgaggaggaatttacgctgcggcagagtttgcagaggtgacatgacacacaacactgtcgagtgtcgacgtaatatctgatatgtaccataccttgtacagtcaaaagagaatgacaggttaaaagattcttttattttatttaattttaaagtttgtgtttttgccattttctttaaatttaatagaagaaaatgaatttttgtttt

SEQ ID NO: 9714 - DNA, 3023 bp, Glycine max
  Clone ID: 700867833_FLI
atcagagataatcaattttacaagcaaactgctttcagaatcccaagttaaagtgcagagaaacaccctgaaaatgccagcattaattttggatgaaaaagagaagatgatttccaagtttgtatccagtaatgggttggttgaagatccattggctatcgagaaagaaaggactatgatcaatccttggaccccagaagagagagaagttttcttggagaaatttgctgcctttggaaaagattttcggaaaattgcttctttttttgaccacaagacaactgctgactgtgttgaattctactacaaaaatcataagtctgattgttttgagaaaattaagaagcaagatggtgataagcttgggaagtcatattctgccaaaactgacttgattgcatcaggtaataaaaaattgcgggcaggaagctcacttttgggtggatatggtaaagtgaagacgtataggggtgaggacttcatagagaaatcaagcagttttgacattcttggggatgaaagagagactgctgctgcagctgatgtattggctggtatatgtggttctctttcatctgaggctatgagttcctgcataacaagttcagtggatcctgtagaaggtaacagggataggaagttcctgaaagtaaaccctttatgcaaactgcccatgacacctgatgttactcaagatgttgatgatgagacttgttcagatgagagctgtggtgaaatggatccaacagattggaccgatgatgagaaaactgcttttcttcgggctgtatcatcttttgggaaggattttgccaagatagcacggtgtgttgggacaaggtcccaggaacagtgcaaagttttctttagcaagggccggaaatgccttggattagatctcatgcgcccaatacctgagaatgttggatccccagttaatgatgatgcaaatgggggtgagagtgacacagatgatgcatgtgttgttgagacaggctcggtggttgaaactgataagtctggcactaaaacagatgaggaccttcatttgtatggcacaaacacataccatgatgaatcccatcctgtggaagctaggaacctgtcagctgaattaaatgaatcaaaggaaattaattggacagaagtagatcttgaagatgcaaatgtcacttctggtgcttgtcaaatcaatattgattctaaacagggctgtgatggtagtgaagttttcttgtgtggttctaacaagtctggatctgttggtgaacgagcagatataattatgtcagatagcacagaagttgaaaatgataaagcaaataaattgggaggtgcagctacagaattgatttctgctccaaatacaagggaaccatgccagagtaattccattgctgaggatagaatggtggtttctgaggtatcttctggcggtcttggaaatgaattggagaggcatagagtgtcttctaccctatgtgttgatgatagagataataagcatgaagctgattcaggtgttatagttgatatgaaaagctctgtgcatgatttaagcactatgataaattcttcaatctcatctttgggcaattcttgttcaggattgagttttagttctgaaaataagcatgtgccccttggaaatcctcgtgtctctgcattgtctatggacaaccttcatgcacttttgcaaaatacagttgctgttgatgttcaatgtgagaaaactgctagccaagatcaaatgtcctctacttgtgatattcggggaggtagagatatgcactgtcagaattccattagcaatggtgaccatcagcatattactgggaatttatcagaccacgttgatgctgttagcattctccagggatatcccttgcaagttcctgtgaagaaagaaatggacagtgatatgaattgcaccagttcagcaactgaattgcctcttctgccccaaaagattgaacatgatgatgatcatatcaaagcattccagtcgtcagattcagataaaacattcagaaatggtgatgtgaaactgtttgggaagatactaaccaatccttcaaccacccagaaacctaatgtgggtgctaaagggagtgaagaaaatggtacccatcatcctaagttaagcagcaagtcttctaatccgaaaattactggccatcatagtgctgatggaaatttgaaaattttgaagtttgaccataatgattatgttggccttgaaaatgttcccatgaggagttatggttattgggatgggaacagaatacagactggtctctcgacattgcctgattctgccatcttgctagcaaagtatcccgcagccttcagtaattatctcacgtcttctgccaaattggagcaaccgtcattgcagacatattccaagaataatgaacggctcctgaatggtgcatccacttttacgactagagacatcaatggcagcaatgctttgatcgattatcagatgtttagaagggatggtccaaaagtgcaaccatttatggtagatgtcaagcactgccaagatgtattctctgagatgcagagaagaaatggtttcgaagcaatctcaagtttacagcagcagagcaggggaatgaatggtgttggaagaccggggattcttgtgggaggatcttgcagtggggtctcagatcctgtggctgcaatcaaaatgcattattccaattctgacaagtatggtggtcagactgggagtattgcaagagaggatgaatcatggggagggaaaggggattgactgagacaggtagtagattgtgctgagcggcaaacacctctttttgccgcactcctgtattatagtttctgttatttgctcaatacagtgtagggtgatttaatggttctcaagcccgtctttttggtaaaatatttaggtgcttgtaatatggcagcagctttgtatttgttgtatttgatgaaaatacagaaataatctctgaaaaaaattaggaggggcgattgccattgcc

SEQ ID NO: 9715 - DNA, 496 bp, Glycine max
  Clone ID: 700867888_FLI
ggacattgaacaagattctctacctcaggccccctaagaacatttactcgttcaacgagcttgtggccttgtgggagaacaagattggcaagaccctcgaaaaaatttatgtaccagaggagaaggttctcaaggacatcgaagaggcacctcttccaatcaatgtggtattagcaatcaaccactcagtgttcgtgaagggtgaccacaccaactttgagattgagccatctttcggggttgaggcttctgagttgtacccggatgtcaactacaccaccgtggaagaataccttggtcagttcgcttgagaatttaaaaggagaaagatgctcttgtgatcggatatttaaataatctgagttgttgatttggagagtggaagattgtgttttatgtcaaaagatcgctatgtgatgtaatcttgcctttcatgtgtagaatgttcctacttgaatggttgaaaaataataaatgacttacgagttgagataat

SEQ ID NO: 9716 - DNA, 1105 bp, Glycine max
  Clone ID: 700867974_FLI
ggagggtcctagacctcgaatgctaggaaacattgagctgattttcagttcataacaaataatcaaggcaaaatatggacaagatgcatgtaatgttggagatgaaggaggatttgctcccagtgttcaagataacagggaggggtttgttttactcgtggatgccattgagaaggctggttatactggcaagattaaaattggtatggatgttgcagcttcagagttttacactaaggatgggaagtatgatttgaacttcatgaaacagccaaatgatggagctcatgttcactctactcagagtcttggtcaactatataaaaattatgttaaagaatttcccattgtgtcaattaaggatccgtttgatcaagatgattggggttcatgggcttcattgcttgcttcagttgatattcaacttgtagatgatttgttagttacaaatcctaagagaatagctgaggccatcaaaaagaaagcttgcaatggtttgcttctaaaggttaaccagattggtacagtgaccgaatctattcaggctgcacttgactcaaaggctgcaggttggggtgtagtggttagtcatcggagtggcgagactgaggataacttcattgctgatctctctgttggcttggccagtggacaggttctatatccttaatttttttttggtgaatttaatctttttagctaccatacattatactgtggtgttatcactttcatattgattatccaaattttgtcctctagacaaagactggtgctccttgccgaagtgagcgattggcaaagtataatcagcttcttcggattgaagaggaacttggaagtgtgcaatatgctggtgaaactttcagatcaccttagagtgaactcaattgatccaaaaaatcttattctggaaatgattctgcatcataatcattgtcatcattgatttaccaaggaaaatcctgatttttgatatagttgcttgccttctggggttttcagatctacttgatgagttagtcttaagatatgtgttttgaactgaaataattactatgtgattggatgataacttggggcagtaacatggtttcgtcggtgt

SEQ ID NO: 9717 - DNA, 1780 bp, Glycine max
  Clone ID: 700868013_FLI
ggcacataacggacatgtacttgtacttctcattgctcttgttacctcattcattattatcacagaaggcgttactacccctaatcctgaaatagcatctctgaatcggaatagtttcccaactggcttcatctttggcacagcatcctcggcatatcaatacgaaggtgcagcaaatgagggtggtagaggaccaagtatttgggataccttcacccataaatatccagataagataaaggatagagacagtggagatgtagccattgattcatatcatcgctacaaggaagatgttgggattatgaaggatatgaatttggatgcttacagattttccatatcttggtctagaatactcccgaaaggaaagctaagtggaggtataaatcaagaaggaattgactattacaacaaccttatcaatgagctactagcaaatggtctgaaaccatttgtgactcttttccattgggatcttccccaatcgttagaagatgagtatggtggcttcttaagccctcgcattgtgaaagattttcaagactatgcagacctttgcttcaaagaatttggagatagagtaaaacattggataactttgaatgagccatggagttatagccaacatggttatgcaacaggggaaatggctcctggtcgatgttctgcttggatgaatcctaattgcaatggtggtgattctgcaacagaaccttatttggtctcgcatcaccaacttcttgctcatgcagcaagtgttcatgtgtacaagaccaagtatcagacatttcaaaatggtctgataggcataaccttgaatgttaattggtacgtgccgttctcggataacaaacttgatcacaaggctactgaacgagctattgacttccagtatggatggtttatggatccactaacaacgggagattatccaaaaagcatgcgattcttagtgagagcacgattaccaaagtttacaaaagagcaatccaaattacttattgattcttttgattttattggcatcaactactattccgcttcttatgcctcagatgcacctcaactaagcaatgccaaaatcagctacctaacagattccctttctaattcctcatgttgcttcaaattggttgtacgtttatccaagaggatttcgagacgttttgttatacactaaaaagaaatacaacaatcctttaatttatattacagaaaatggtataaatgagtatgatgattcatcattatcacttgaagaatctcttcttgatatttatagaatcgattatcattatcgtcatctcttttatcttcaagaagcaatcaagaatggtgtgaatgtaaaagggtatttcgcatggtctttgctggacaatttcgaatggcacttaggttatactgtgcgatttggaatgaattttatagattacaaaaatgacttaaaaagatactcaaaactttctgcattatggttcaaggattttctcaaaattgaaatcaaacttgaggaagattccatgtaatagtactactgtatgagattccttaaacaatcatatttgtaaatatatatagtttaggtttatttaattctttggctatttcttatgaatttgtagttcttataattattcttgtgaatttattgttcttgtaatttgaaatctatacgtggaagcttgttttaaagatgtgctgaaatatattaaggtcaagcaatcctaagaatgtaatatctcttaattttgtgaaaataaaaaatatttattatggg

SEQ ID NO: 9718 - DNA, 1410 bp, Glycine max
  Clone ID: 700868056_FLI
tcaccatccatctttgttctttctcgtgcatggtgcaaccttctccatggccaaaaaatcacagctgcgtacccagaaaaacaatgttaccaccaatgacgataataatcttaacgtaaccaacactgtgaccaccaaggtgaaacgaacaaggagaagtgtccctagagactccccacctcaacgcagctcaatataccgaggagtcactaggcaccgatggacaggccgatacgaagctcatttgtgggacaaacattgctggaatgaatcacagaacaaaaaagggcgacaagtctaccttggcgcttatgacaatgaagaggcagcagcacatgcttatgatctagcagcactgaaatactggggtcaagataccattcttaattttccgttatcaaactacctgaacgaactgaaagaaatggagggtcaatcacgggaggagtatatcggatcgctgaggaggaaaagcagtggtttttctcggggaatttctaaatacagaggtgttgcaaggcatcatcataacggaaggtgggaggctcggattggcaaagtttttggcaataaatatctttacctcggaacttatgctacccaagaagaagctgctactgcctatgacctggcagccatagaataccgtggactcaatgctgtcaccaatttcgatctcagccgttacattaagtggcttaagcctaacaacaacaccaacaacgttatcgacgaccagattagtattaatctcactaacataaacaataataataattgcactaacagcttcaccccaagtcctgatcaagaacaagaagctagcttcttccacaacaaagattcactcaataatactattgtagaagaagtcacgttggtgccacatcagcctcgtccagcgagtgccacgtcagcattggagcttctacttcagtcatcaaagttcaaggaaatgatggagatgacatctgtggccaatctttcatcaacacagatggaatctgagttgccacagtgcacatttcctgatcacattcagacgtactttgagtatgaagattccaatagatatgaggaaggagatgatctcatgttcaagttcaacgagttcagctccattgtgccgttttaccaatgtgacgagttcgagagttgaagaagtcaggtttatataatgcatggaaaaaagaaactctgatatgtttgtttatttgtttaatttgttgattatgttaaagaccatattcataaatctttagctaattaaggtttaagtttttagaagagagatcatgtcattcacaactattataataagtggacttgttttcaatttgtgaacatgaaagtttattctttttatagcaacgtcgtcattaatcacataaaaatgaatattaatgcggc

SEQ ID NO: 9719 - DNA, 793 bp, Glycine max
  Clone ID: 700868076_FLI
ctcgtggaatgggccaggtctgctttgaatgattcccggaaacttagcagaataatggatccaaggcttgagggtcagtattctgaggttggggcaagaaaagcagctgcattggcttaccaatgccttagccacaggccaaggagtagacccttgatgagcactgtggttaatgttctcgagccacttcaggactttgatgatgttccaattggaccctttgtttacactgttccagctgaacaacaacaatacaatgaagtcgcaaaagagagtgaaacacctaaggagaggaagagggaaaatggtcatcatcataaccgacgtcatcatcatcatcgccacaatggtcataggcatcatccacttaaatctcctaagacaccaatgccatcagatcagtcacagaatgatgaacaccgaaatggtagaaaaagtgggtctaattcacctgatacattcaatgcatcagaagctcaacgaagcatgggttagtagacacatatagatctttactgtacataggtgaattattagagttacatagtgtgccacgtactagtactaagtgcaacgagccttcaaggcaataagaaacaggaaaaagatgaaaaggaaaaggaaaagaaaaagagagtgccatatgtaatggtccttgcatggaaaacatgattgagttctattttttttttttaatttgtttatttgttccagaggaagttaattattttgaattgtgtatacaatgatgaattttttcccttgatgaatcaaaacaaaagaccagttcaat

SEQ ID NO: 9720 - DNA, 481 bp, Glycine max
  Clone ID: 700868082_FLI
gttggtcgtcctattggggagtttcagtttatacaggggaaaattgctgacatgtatacttcattacagtcttctaggtcttatgtgtattcagtagctcgggattgtgacaacggaaaagttgacccaaaggattgtgctggagctatactttgtgcagctgaaagagcaacccaggttgctttgcaggcaatacaatgtttaggtgggaatggttatgtgaatgagtatcctactggtcgtctcttgagagatgccaaactctacgagattggtgcaggaactagtgagatcagaagaatgattattggacgtgaactcttcaaggagcaataacatgccaccataccttatatgtggatggtgttgagccccttgggaaattcccttgcagatgtttgttaaactaatgctacattcatcaaacgagaattgatcattggtccaaggaataaaattctgccatattacatttttatat

SEQ ID NO: 9721 - DNA, 1125 bp, Glycine max
  Clone ID: 700868174_FLI
atgactctggccgcttggatgacgatccacaggcacaggatggatctcgtgttcttcagaagcgcttgagccacgccataagcatgggaaatgggagccctttggaggagttctccctggagacactgcttcaagtcaccaacaatttctgtgaggacaagagaattgggcttggtagcttcggtgcagtgtaccattccaccctggaggacggcaaggaggttgctataaaaagagccgaagcctcatcctcaacctacacagttttgggtgggcaagggcaagtggacaaagacaatgcctttgtgaacgagctggaatcactctcaagactccaccacaagaacctggtccggttgttggggttctatgaagacagcaaagaacgcattttggtgtacgattacatggacaatgggagcctgagtgatcatctccacaagctccaaagttcagctctcatgtcatgggcagtgagaatcaaggtggctctagatgctgcaaggggcatagagtacttgcaccaatacgccactccaccaatcattcaccgtgacattaagtctgccaacatattattggatgccaagtggacagcaaaagtgtctgattttggactctctctcatgggccctgaccctgaagatgaggatgcccacctttcacttctggccgctggcactgttggctacatggaccctgaatactataggcttcaacatttgacccccaagagtgacgtctacagctttggggtggttttgcttgagttgctctccggctacaaggccatccataaaaacgagaatggggtgccacgaaatgttgttgattttgtggtgccattcattttccaagatgagattcacagagtgttggacagaagagtggccccacccacgccctttgagatagaggcagtggcctacgtcggttatttggctgctgattgtgttaggcttgaaggtcgagatagaccaactatgtctcaagttgtaaataacttggaaagagcattggctgcatgtttagccaagccaatactctctaggtccaccaccgattctatttcttcacaatagctcatctttcgctcccttgaatggattctcaaaagaaattgtc

SEQ ID NO: 9722 - DNA, 1629 bp, Glycine max
  Clone ID: 700868215_FLI
ctttcttcaaatgattttacaggggagatacctgcatccctttcaaattgtacctatcttaatacaattagacttgaccaaaaccaactcactggtcaaattcctgctaacttgagtcagctcccgcggcttaagttgtttagtgttgccaataatcttttgacagggcaagttccaatctttgcaaatggtgtagctagtgccaatagttatgcaaataattcaggtctgtgtggtaaacccttattggatgcttgccaggccaaggcttcgaagagtaacacagctgttatagctggagcagctgttggtggtgtgactgttgcagcattaggtttgggcattggaatgttcttctacgtgcgccgtatttcttataggaagaaggaagaggaccctgaaggaaacaagtgggcaagaagtctaaagggaactaaaacaataaaggtttctatgtttgagaagtcaatttcaaaaatgaacttgaatgatctcatgaaggctactgataacttcggcaaaagcaatattattgggactggaagatcaggaactgtttacaaagctgtccttcatgatggcacatcactcatggttaagagattacaggaatctcaacattcagagaaagaatttctgtctgagatgaatatactaggttctgtcaaacatcgtaacttggttccgcttttaggtttttgcgtggctaaaaaggagaggtttttggtctataaaaatatgccaaatggtaccctccatgatcaactacaccctgatgctggtgcatgcaccatggattggcctctaaggctcaaaattgcaattggagcagccaagggattagcatggcttcatcatagctgcaatccccgcattatccaccgaaacataagctctaagtgcatcttgttggatgctgattttgagcccaaaatttctgattttggccttgctagattgatgaacccaattgatacacatttgagtacttttgtgaatggggagtttggggatttaggttatgttgctcctgaatatacaaaaactttggtggctactcctaaaggggatatttatagcttcgggactgtgcttcttgagttggtgacaggtgaaagacctacccatgtgtctaaagctccagaaacttttaaaggaaatttggtagaatggattcaacagcaatctagcaatgcaaaactccatgaagccattgatgaatcactagttgggaagggtgtagaccaggagcttttccaatttctgaaggttgcatgtaactgtgttacagcaatgccaaaggagaggcctaccatgtttgaagtataccagcttctaagagccattgggattaattataatttcacaactgaggatgagatcatgttgcctatggacactggtgatgctgataacttagaagaacttattgtagctcgagagggacatgattgaaaaggtatgtgagatataattagggtatgtaatcaattttaatatgtaagtatctcttgccttgtggtcctaaaataaatgttagtgctatataaggttttatggtttagatccatttgtgtgctatcaatattgaaacatcaatttaatatcatcaaccatgaatgccattat

SEQ ID NO: 9723 - DNA, 1477 bp, Glycine max
  Clone ID: 700868226_FLI
cgagattccccctaaacccgtttgcgttgttgtttgcgaagaaatggcgactaagaggagcgtgggaacgttgaaggagggtgatttgaaagggaagagggtgttcgtgagggtcgatctgaacgtgcctttggatgacaaccttaacatcaccgatgacactagagtccgtgctgctgttcccaccatcaagtacttaactggtcatggagccaaagtgatcctttctagccacttgggacgtcctaaaggtgtaacacctaaatacagtttgaagcctcttgtgccaaggctgtctcaacttctcggaattgaggttacgatggcaaatgactctattggggaggaagttgagaagttggttgcacaacttccagaaggtggtgttttgcttctagagaatgtgaggttctataaggaggaagagaagaatgaccctgagtttgcaaagaagttggcttctcttgctgatctctacgtgaatgatgctttcggcactgcccacagagctcatgcttctacagaaggagtggccaaatacttgaagccctctgttgcaggattccttatgcagaaggaacttgactatctagttggagctgtgtcaaaccccaagagaccatttgctgctatcgttggtgggtcaaaggtgtcttccaagattggagttattgagtccttgttggagaaagttaacgttctcttgcttggtggaggaatgatctttaccttttacaaggctcagggttattcagttggttcatctcttgtggaggaagacaagcttagccttgcaactacacttctcgaaaaggccaaggctaaaggggtttctttgttgcttccaactgatgtggtcatagcagacaagtttgctgctgatgctaacagcaagactgtgccagcatcaagcatcccagacgggtggatgggattagatattggtcccgattccatcaagacatttggtgaagcattggataagacccagaccgtcatttggaatggaccaatgggtgtttttgagtttgataagtttgccacaggaacagaggccatagccaagaaactggcagagctgagtgggaagggagtaacgaccatcattggaggaggtgactctgttgccgctgtggagaaggttggtcttgcagacaagatgagccacatctccactggtggtggtgccagcttagagcttcttgaggggaagcaactccctggtgtccttgcccttgatgatgcttgagtaaacatcactagttcctctgtaatttgtgctttatattattattatggttggatttcagccaacagtggattgaggtacaatgagagagctcttgttgctcctgtagaggcttaatataggttaggtttcgaaataagagggttttgtggcatccttggtgttgcattgagctttgatctaattgttcttgaacaatgttcatttcaaaaggagttttactttgtt

SEQ ID NO: 9724 - DNA, 633 bp, Glycine max
  Clone ID: 700868230_FLI
gagcgtgcatttggtatgttcaaaactgatcgcaccgtgtcgtacgacgttggattaaccaagtctagccagcagactccatcaactagtccaacaactccagcacctaaaactgctggatggtgtatacccaaagctggagtttctgatgctcagttgcaggccaatattgactacgcctgtagccaaggtatagattgcgggccaattcaaccaggaggcgcttgttttgagcctaacacagtagcatcccatgctgcatattccatgaatctatactaccaaacttctggcaaaaatcaatggaactgtgatttctctcaatcagcaacactctcatcccaaaatccaagttacaatgcttgcatttacactggtgggagcacctgaaaacagaggctttagcttgatgatgttaactaataaattttgtggatagagaggtgtatctttagaattaaattaatgaataagggcttatactctgccctcttttagttataggctttcgattttatatagctttaattgtagagccattccgattctggttgtgtatgatatccactttttagtgtggcaatccacccctgttttctttaattttgcgattccgataccaccatatttttt

SEQ ID NO: 9725 - DNA, 1118 bp, Glycine max
  Clone ID: 700868256_FLI
ctcatgttttcccttcagaaacgtgaagttggtgatgcattcaatgattctgatcctcagtggttggtaccgggtctccctgatccagttccttctagtgttttgcctgatgctttttttaacaaacaaggtggatatgctacttattataaacttgctcagaggttcaaggactccaaagggatcattgttaactctttttcagagttggagcagtatgctattgatgcattatgtgatggtcaaattcaaacaccccctatctatgctgttggtccattgattaatctgaagggtcaacctaaccaaaatttggatcaagcccaacatgataggatattaaaatggctggatgagcagccagattcttcggttgtttttctatgttttgggagtaggggaagctttgagccatctcaaacaagagagatagcactagcacttcagcatagtggagttaggttcttgtggagtatgctttctccaccaaccaaagacaatgaagagagaatcttaccagaagggttcttagagtggacggaaggtaggggaatgttatgtgagtgggcaccccaagtggagattctcgctcacaaagcccttgtggggtttgtgtctcattgtggatggaactctattttggaaagcatgtggtttggggtaccaatattgacatggcctatttatgcagaacaacaactgaatgcttataggatggtgagggaatttggattggcagtggagctgaaagtggactatagaaggggtagtgatcttgtaatggaagaggagatagagaaagggctgaaacaattgatggatagagataatgcagtgcacaagaaggtgaaacagatgaaagagatggctaggaaagctattcttaatggtgggtcttctttcatttctgttggagaactaattgatgttatgacaggtagcatttgatgactattgtcgaatttcataatggggttggttgtccattttctttgaatcaaagaaaaagtcaaattatttcagtaactatgtattctaagaaattgattgcacaaggaagctgatcattctaataagaaagtgtttgctgaatattagttgaaaattaaaattgtttt

SEQ ID NO: 9726 - DNA, 1807 bp, Glycine max
  Clone ID: 700868263_FLI
ttctgattgccttcaaatcacacactctcttcaatttctagggttttgctattgctttgcctccgttccccctttctcacaaaaacaacgccttttctcttctccttcgtatctattctttgcgtttggtttttggttgattgaaggcattcacagcgtaattcgttgctgcattttaatcgatttatctaaccaggactgaatgacctaatggagtctaaaggtgggaaaaagaagtctagtagtagtagtagtaaatcaattttttacgaagctcccctcggatacagcattgaagacgttagaccaaacggtggaatcaagaaattcagatctgctgcttactctaactgttctcgcaaaccatcctgatacacatccggattgatagttcgttgcatgcaaccatagttttattaggattttttcttctttgttttcaattaggtttttttgttgctctccttcaaactccatctttccaaatcctctctttgcgattgtgttttgatctgcttcctactgcgatagtttctctactgttacatggccatggcggtttccgcaattggttttgaaggtttcgagaaaaggttggaaatatcctttttccagccgggactttttgctgaccctgaaggaaggggtctaagggctcttacaaaatcccagttgggtgagattctaacaccagctgcttgcaccattgtttcttcgctcaaaaacgataatgtcgactcctatgttctatctgagtccagcctctttgtttatgcctacaagatcatcatcaaaacctgtggtactactaagctattgcttgcaatcccacccatattgaagttcgctgaaatgctttcccttaatgttaagtctgtgaattacaccaggggaagtttcattttccccagtgctcagccatatccccatcgcaacttttctgaggaagttgctattcttgatggctactttggcaaacttggtgcaggaagcaatgcttatattttgggtggccaagacaaagcacagaactggcatgtctactctgcttctgcagattctgtaactcaatgtgacaatgtttacactcttgagatgtgcatgactggcctggatagagagaaagcacaggttttctacaaagaacaatctgcttcagctgccatgatgactgttaattccggcattagaaaaattcttccagattccgagatttgtgactttgactttgaaccatgtggttattcaatgaactctgttgaaggcgctgctgtttctacgattcatgttaccccagaagatggtttcagttatgcaagcttcgaaactgttggttatgacttcaaagcggtgaatctgaacgaaatggttcagagggtattggcatgtttcctcccaactgagttttctgttgcagttcatgtggatggtgcaagcaagtcgtttgagcagacctgctttctggatgttaagggatactgtcgtgaagagaggagccacgaagggcttggaatgggtggttctgttgtctaccaaaaattcgggaagactagtgactgtggttcacctagatcaactctaaagtgctggaatgaggaagatgaggaagagtagtttccttaagtgtctttattattctgtccttgtgaaaataagtctggttttccagatacgttattgtttttctttgttgtcttttttagcttctgttagagaccatttgggcatttagacctttattgtttctattaccatttgaacatcgaatggattaataaatcactttgtttgcgtgcaaaatttgttt

SEQ ID NO: 9727 - DNA, 1114 bp, Glycine max
  Clone ID: 700868378_FLI
gtttcataatttttcatttcactgtgagcaaacaagatcttcagatccatgacaacaacgacaatgcttctgcgaagctcgtccacgccgattctcaattctcgcatccctcacccgaaggattcgcctcacgaacccgaaatccttcaccggagcccgcgcacgcgctcgctcacgctctccgcgtcgtcgagttcgctctcgccggtcgaagcttcgccgagcagaatgacgcgggcgctgtcggagacggatctctccgcgcgctccaaaacgtcttcgttcggctccgctctgttttccttcaccgagtcggacgaaggagacggagttggcggcggcggcggcggtgatggatgggacaacggtgacggcggagggtcggggttttgggattcgaataatgggaatgatagcacggacttgtattaccggacgatgattgaagcgaatccagggaaccctctgtttcttggcaactacgcgaggtacttgaaagaggttcgaggggactatgtgaaagcggaggagtattgtgggagagcgattttggcgaatccgaatgatgggaaggtgctatcgatgtatgcagatttgatatgggagagccagaaggatgcttcgcgtgctgagacttattttgatcaagcggttaaagcagctcccgatgactgttatgttctggcatcctacgctcattttctttgggacgcggagggagaggaagatgttgaagtgcaagaagattcatctgaaatatctcctagtttcttacatggagctgctccactaccaccgcctttagctgctgcttcttcttaagctgcttccactggtgtctggcttccatatataactttctaacttttgtttatactaccttaaccttgtaatatttttggccgatgaggacagttgtaatggtttttgtccactgtgtcatcacttgtagattcatgtagcgatacaagagaataaaagatggcggggacattctcctttcctttttgcattttgtttgatttgccgaatcttcctctacaggcatgcttgtattatgtccaagaaaaacgcttgaacaggttttggagttatattattcacccgtgcaagt

SEQ ID NO: 9728 - DNA, 1392 bp, Glycine max
  Clone ID: 700868419_FLI
ctcaagtccaacctacccctttttcttctcccaccaacttcaccgtcttcttcctcgatcatgtctcacttcaagggcaagtaccatgatgagcttattgccaatgctgcttacattggcactcctggaaagggtattcttgctgctgatgagtcaacagggacaattggcaagcgtttggccagcatcagtgtagagaatgttgaatccaacaggcgtgctcttagggagctgcttttcaccgctcccggtgctcttaaatatctcagtggtgtcatcctctttgaggaaactctctaccagagcacagctgcaggcaagccctttgtggaagtcttgaaggaggctggtgtgcttcctggcatcaaggttgacaagggcacagttgagcttgctggcactaatggagaaaccaccactcagggtctagatggccttggtcagcgttgcgccaagtactatgaagccggtgcacgttttgccaagtggcgtgctgtgctgaagattggtcccaacgagccatctgagctggctatccatgagaatgcctatggcttggccagatacgctgtcatatgccaggagaatggcctggttcccattgttgagcctgagatccttgttgatggatctcatgacattcacaagtgtgctgccgtcaccgagcgtgtccttgcagcatgctacaaggctttgaatgatcaccacgtccttcttgagggtaccctattgaagccaaacatggtcacccccggatccaattctgctaaggtttcccctcaggtggttgcggagcacactgttagagcccttcagagaaccgtgcctgctgcagttcctgctatcgtttcttgtctggtgggcagagtgaggaggaggcatccgttaacctcaatgccattaaccaggtcaatggaaagaagccatggtcactctctttctcctttggaagggcacttcaacagagcacccttaaggcatggagtggaaaagaggagaatgtgaagaaggctcaggaagcccttttggtaagagccaaggccaactcagaggcaactctgggaacctacaagggtaactcaaagcttgctgatggtgcctcagagagcctccatgttgaggactacaagtactgatcaatctaagtgcgggtaggaatcggtattttatgggtacaaccgaattttcttgttaatgagtattgtgcttcgactcttcccagaataataatcgtttggaattttgctttttgtttttcctagtgttccttcatatcaattttagtaattcggtgtattggtcaaacctgtgcaaacaggggaggggatgtaactttgttttcttgatagacaccaccaccttgctgttaacgaggctttgtgtttattttgc

SEQ ID NO: 9729 - DNA, 278 bp, Glycine max
  Clone ID: 700868431_FLI
cactattgaagttggctggattgttcaagaacaattttgaaaccttcaccaactacaagattggcaagggcaacaacaacctgacagaagagattctcgcagctggtccaatcttttgagacaatgttatgtaacatgttgtgtggttgggaatgttaatgttaggatggtagataaaatcttgccttagaataaaatattgtaccattggtttggttgggctcataatgtcatttctattcttcctccaaaaaaatgaagtttattttctaggcttt

SEQ ID NO: 9730 - DNA, 1752 bp, Glycine max
  Clone ID: 700868488_FLI
ttcactccaaaaaaatactactaaagagatgagttttgcaggttttctttctcttcaatcaatgtctgctacctgcggcttcttcttcttctccttcacccttctcttctccttcttctccttcctcgtcttcatctccaggatgaagccctggtgtaactgcgatctttgcaagagctacttgacggtgagttggctgaaaaagttccccaatctctgcgactggtacactcatctcttgcgtaaatccccaaccggcaccatccacgttcacgtgctggggaacaccatcacctcgaatccccacaacgtggagcacattctcaagacgaatttccaaaactaccccaagggaaaacccttctccaccatcctcggcgatcttttgggaagaggaatcttcaacgtcgacggcgaatcgtggaagttccagcgcaagatggcgagtctcgaactcggcagcgtggcgattcggacgtacgcgatggaattagtcaacgaggagatccacgcgcgactgatcccgatcatggaatcaaccgcgcgtggcgaattaaactccgtctgcgttttggatttgcaagatatactacgaagattctcgttcgacaacatatgcaaattctcgttcgggctcgacccgggttgtctcctaccgaatctcccagtctcggacctcgccgtcgcgtttgacctggcctcaaagctctccgccgaacgcgccatgaacgcgtcgccgtttatttggaaactaaaacgactcctcaacataggatccgagaagaaactgagagaaacaattaacgtcgtaaacgacgtcgcaaaagagatgataaagcagagaagagaaatggggttcaagacgcggaacgaccttctctcgcggttcatgggatcaatagacgacgacgtttatttaagagacattgtggtgagttttctattagcgggtcgtgacaccatcgctgccgggttaacgggcttttttatgttgttatcgaaaagcccggaggtggaggagttgattagggaggaggtgggccgggtgatgggcccgggccaggagtttccttcgtttgagcaaatccgcgaaatgcattacctgaacgcggcgattcacgacagcatgaggctgttcccaccgattcagttcgattcgaagttcgccacggaggatgacgtgttgccagatggcactttcgtgagaaagggcagtagggtaacttaccacccttacgcgatgggccgaatgtaaaatatttgggggcccgattgtcttgacttcaggcccgaaaggtggctgcgtgatggggtgttcgtgccagagtgtccctttaagtaccctgtttttcaggctggtgtaagggtgtgtttggggaaggacttggctttgatggagatgaagtccgttgtggttgcgttggttcgcaggtttgatattcgggtcgcccaaccggatcaggagccccggttcgcgcccggtctaaccgctactttgagaggggggtttccggttcgggtttgtgaaaggaaatgaatagataaaggagttcacaacatgaatgtgaatggaatcatgaaatgaatgagtgaatgaaggaacagttttcgtgtaaataatataatgttgcagttaaatcgaacgtttttctttttttttctcctcttttaaacaggcgtctttttgaatttgcgtttatgtttattattgcccagtgaagtaaatactaaagccattgcaaattttggatt

SEQ ID NO: 9731 - DNA, 364 bp, Glycine max
  Clone ID: 700868519_FLI
ctattggatataattttgatggagatggcaggcaagaggaaaaatctaaatccccatgcagagcgttcaagtcaacttttctttcccttttggatttataatcatattagagacggggaagatatagaaatggaagatgtcacagaggaggaaaagaaaatggtaaagaaaatgatcatagttgcactttggtgtatacaattgaaaccaaatgaccgtccctcaatgaacgaagtagtcgaaatgcttgaaggagacattgaaaacttagaaatacctccaaagccaactttgtatccaagtgaaacgatcacaaaaaattaaaaaatcaagtctataatgagataatatcgaattatttcat

SEQ ID NO: 9732 - DNA, 2216 bp, Glycine max
  Clone ID: 700868572_FLI
cttctcgatttccttctctataacacaacgctctcttctcttgcaaccaaagtacttgttccagtgtctactctactcaaaaaggatttgggacatcatgtgcagtgattcgaaaagtaaactttcttccccaaccctcgtcgtcatggagaatagtaacattcagaagcagaatctggatggtctctacaactcggttttgcttgaattgtctgcatctgatgattatgaagctttcaaaagagaggtggaggaaaaaggcttagatgtgaacgaggcaggcttttggtacggtagaagaattgggtcaaagaagatgggatctgaaacgaggacccctctgatgattgcttctttgtttggaagcgccaaggtgctcaattatattcttcttcagaaaggaggaggtgttgatgtgaacagggtctgtggttctgatagggccactgctctccattgtgctgttgctggtggctccgaatcctcacttgagattgtcaagctcttgcttgatgctggggctgatgctgagtgccttgatgcgagtggcaacaagccggttaatctgattgctcctgcctttgattctttgtccaaatcgcgaaggaaggctttggagatgttcctcaggggtggtggggaaagagatgaactcatgagccaggagatggagctacagatgttttctgttccagagaaaaaagaaggaagtgataataagaaagaataccctgttgatatatcgctgcctgacatcaacaacggtgtatatggaacagatgagtttaggatgtacaacttcaaggtgaagccttgctcaagggcttactcccatgactggactgagtgtccattcgttcatccaggggagaatgcgaggaggagagacccacggaaatacccttacagctgtgttccttgccctgagttccgcaaagggacctgccagaagggtgattcctgcgagtatgctcatggtgtttttgagtcctggctacatcccgcccaataccggacaaggctttgcaaggatgagacgggctgtgctagaaaagtatgcttctttgctcacaaacctgaagagctaccccctgtgtatgcttccactgggtcggctatgccatcaccaaaatcctattcagctagtggacttgacatgacagcgatgagtccattggctcttagttccacatctttgccgatgccaactgtttcaaccccacccatgtctcccttggcagcagcttcatctcccaagagtggaagcatgtggcagaacaaaataaaccttactccaccatcgttgcagctccctggtagccgactgaaggctgctttgagtgccagggatctggagatggagatggaactgctcggtctagaaagccctgctcgccaacaacagcagcagcagcaacaattgatcgaagagattgccaggatctcttccccatctttccggagcaaggaattcaataggattgttgatttgaatcctactaaccttgatgacctgttagcatctgctgacccttctgtattttctcaactacatggactttctgtgcaaccttcaacacccacacaaagtgggcttcagatgcgccaaaacatgaaccacctccgtgcgagttatccatccaacatcccttcctctcctgtgaggaagccctcagcttttgggtttgactcatcagctgctgtggcaactgcagtgatgaattctaggtctgctgccttcgcaaagcgaagccaaagtttcattgatcgtggagctgcaacccaccatcttgggctgtcttcagcttccaactcttcttgcagggtatcctctaccctttcagattggagttcccctaccgggaaactggattggggtgtaaacggagacaagctgaacaagctgaggaaatctacttcctttggattcagaaacagtggggtaactgcatcccccatagcacagcctgaatttggtgctgagccggatgtctcatgggttcattcattggttaaagatgttccctccgagaggtctgagatatttggtgctgagaagcaacaatatgatctcagtaaagagatgcttccaccatggatggagcagctgtatatagagcaggagcagatggtagcatgagctagggctgccatggcaatgcttcttggttattctgacaaagtttatttatttatttaattattttattcatttg

SEQ ID NO: 9733 - DNA, 930 bp, Glycine max
  Clone ID: 700868620_FLI
gatagctgcagtttttgtagaacccattcaaggagaaggtggaatttacagtgccacaaaagaatttctacagtctctgcatagtgcttgtgatgaagctggggcacttctcgtttttgatgaggttcaatgtggtttaggtagatcagggtttctttgggcccatgaggcatttggtgtcttcccggatatgatgacccttgcaaagcctcttgctggaggcctacctattggagcagtcctagtgactgagagagttgcttcttctataaattatggtgaccatggaagcacttttgctggaaaccctcttgtttgtagtgctgcccttgctgtttttgataaaatatcaaaacctgatttcctgtcgtctgtatctaagaaaggcctctacttcaaagaattactcaagcagaagttaggaggaaaccaacatgtgaaagaaattcgtggtgttgggctaatcataggaatagatttagatgtacctgcctcaccctttgtcgatgcatgccgaaattctggccttttagtattaactgctggaaaaggaaatgttgtcaggcttgtcccaccattgatcataacagagaaagagctcgagctagcggccgacattttgtgcaaaactttaccagttcttgataactaggagtgtaagagaaagaggtttggctttacaagcaaaatagaaaacttaattggttgtgtattgttgagtagcttttagatgccaaaacttcatggtttccctttcatttaagatgtctcgatggtaagaatatttcagaaatattgtagcatttctttgattatgcgtcccggatcagatggtttacatggtctattctctttctgcaagagatttatttgggtattttttgtcatataaagtgtaataataactacaaggtcttctgagttcccctc

SEQ ID NO: 9734 - DNA, 2806 bp, Glycine max
  Clone ID: 700868630_FLI
aatcaatcaatcttctgagagtgtttggttgaaagtagcaaagatgtttcctttcgggcaaaagggtcaaaagataaaggggactatggtggttatgcagaagaatgtgttggatatcaacagcatcaccagtgttggagggatcgttgaccaaggcttaggcttcataggcagtgcagtcgatgcacttacttttgcagccaccaaaatctccatccagttgattagtgctaccaaggctgatggtgggaaaggaaaaattggaaagagtacaaatttaagaggaaagataacattaccaaccttgggagctggcgaacaagcatacgatgttaattttgaatgggacagtgacttcggaattcccggtgcattttatattaagaacttcatgcaaaatgagttctacctcaagtctctaattctcgaagacattccaaaccacggaaccattcacttcgtatgcaactcctgggtttacaattcaaaaaactacaagactgatcgcattttctttgccaacaatacatatcttccaagcgagacaccagctccacttttgaagtacagagaagaagaattgaagaatgtaagaggggatggaactggagagcgcaaggaatgggataggatctatgattatgatgtctacaatgacttgggcaacccggatagcggtgataaatatgcacgccccgttcttggtggttcagccttaccttaccctcgcagaggaagaaccggaagaggaaaaactagaaaagatcccaacagtgagaagccgagcgattttgtttaccttccaagagatgaagcatttggtcacttgaagtcatcagattttctcgcttatggaatcaaatctgtatcccaagatgtcttgcctgtcttgactgatgcattcgatggaaatattttgagccttgagtttgataattttgctgaagtgcacaaactctatgaaggtggagttacactacctacaaactttcttagcaagatcgcccctataccagtgatcaaggaaatttttcgaactgatggcgaacagttcctcaagtatccaccacctaaagtgatgcaggtggataagtctgcatggatgactgatgaagaatttgcaagagaaacgattgctggtttaaatccaaatgtcattaagattatagaggagttcccactaagtagcaagctagatactcaagcctatggtgatcatacctgtataatagcaaaagaacatttggagcctaacttaggtgggctcactgttgagcaggctatccaaaacaagaagttgttcatcttagatcaccatgactatctcattccttatttgaggaaaataaatgcaaataccacaaagacttatgctacaagaaccatatttttcttgaaagatgatggaactttgacaccattggccattgagttaagtaagccacatcctcagggtgaagaatatggtcctgttagcgaagtctacgtgcctgccagcgaaggagtggaagcttatatttggttactggcaaaggcttatgttgttgtgaatgatgcatgctaccatcaaatcattagccattggctaagcactcatgcaattgttgagccatttgtcatagcaacaaacaggcaactgagtgtggttcaccctatttacaaacttctgtttcctcactaccgtgacaccatgaatattaattcacttgcccggaaagccctggtcaatgcagatggtattatagagaaaacattcttgtggggtaggtactctatggaaatgtccgctgtcatttacaaggactgggttttcactgatcaagcattacctaatgatcttgtaaagagaggagttgctgttaaggacccatctgctccccatggagttcgtcttttgattgaggactatccttatgcttctgatgggctagagatatgggatgccatcaagtcctgggtgcaagaatatgtctcattctactacaagtcagatgaggaactccaaaaagaccctgaactccaagcttggtggaaagaacttgtagaggtgggtcatggtgatttgaaagataagccatggtggcaaaagatgcaaactcgtgaagagttggttgaagcttccgctatcctcatatggattgcttcagcccttcatgctgctgttaactttggacagtatccatatggaggtttaatcctaaacaggccaactattagcaggagattcatgcctgaaaaggggtctcctgaatatgatgcgttggctaagaaccctgagaaggagtttttgaagactattactggcaagaaggagaccctcattgaccttacagttatagaaatcttgtcaaggcacgcatctgatgagttctaccttgggcagagagatggtggtgactactggacttctgatgccggtccattagaggcatttaagaggtttggaaagaagcttgaagagattgaaaagaagcttatagagaagaacaaagatgagacattgagaaaccgctatgggccagctaaaatgccttacactctgctctatccttctagtgaggagggattgactttcagaggaattcccaacagtatctctatctaaggaccctatggttgcttaagtactgttcctggttttaaataaatgtgaaattgaaggaaccagattccttaatcagttgtgtatgcttaagtcatgtatttggagtggctgaatgtatttgtatttgtcattaataaagagagttgtgttagtataatggaaaccaaaataataaatgcaatcatgcatgttttaactttt

SEQ ID NO: 9735 - DNA, 1437 bp, Glycine max
  Clone ID: 700868646_FLI
cttccaggtaaaaaatcatttcccattctttgacatggcttatcaaggattttcaagtggggatcttgacaaggatgcaatagcacttcgaattttccttgaagatgggcatttgattggttgtgctcaatcttttgcaaagaacatgggattatcagaacataaagctggttgtcttaggtaagaatagtcctatatcctagtgagtagagattcagaggcagagcatattctatgacacgtataatagaagttagatgtcaaacatgttccataacgcatttttgaggcaaggttcaagtacatgatattatgattgttataacatgaagctcaactttgtaataatattgccattatgtttaactattttgcttcttatgttcttttcagctttactaatctacaataaaatctataacagtgttttgtgccagagtataaagcaagtagctgcactaaaaagccaactgcagctgatgtcccatgcaatgtatagcagcattccttttcagggtatttcactagttactatgatattaagcgagccagatacagaagcactttggagaaaagagataaaggtaatattcaactttttaacactccttttttgacctttacctttctaaattgattgaggatctaatcgcatctgatggcaatgctgtgtttgaaggtcatggctaaacggattcaaactatgcgaactaccttgcggcattgtcttgagaacttgcattcatctttcaattgggagcacataactgatcaggtttgggatgtttgatttgtaatatttatatgaagttacaatattcttgaggaatcgtattatatatcgagcacacagttttacactttgatgcatattcaaatgcaggttggcatgttctgtttttctggattaacccctgatcaggttcaacagatggagaagctgttccatatatacatgacccctgatggaagaatgaggtattctttaaaggaaatactaatacttcaaccatggttaccatggttaaaatctcaattttttttctcttcctttgttaatttgatagttataactgcactagagaatattctaattcttcctatataactccttggtgatacttgcagcatgtcaggtgtgacctctagcaatgtggattacttggcaaatgcaatacatcaggtgaccagaatcgatgaggaagccctaagatcatgttacgtatagcattattagtccttttctaccttattctgatcatagggtacataaccattttttctcttttgtaattatctatgtacctgatatacatcataccaatttagtgaaaatattgaagtcaatatttttggaccatcgtggatattactctaaaaaaattatttgtaaacacagccacatattaagtgatgaatgaaataacagatttacgt

SEQ ID NO: 9736 - DNA, 719 bp, Glycine max
  Clone ID: 700868652_FLI
caatgaaagatgggaaggtgttcctttcatactaaaagcagggaaggcactaaattctagaaaggcagagataagggttcaattcaaggatgtccctggtgatattttcaagtgtaaaaagcaggggagaaatgagtgtgttatccgcctacagccttcagaagctatttacatgaagcttacggtcaagcaacctggactggagatgtctacggttcaaagtgagcttgacttgtcatatggacaacggtatcaaggagtaaccattcctgaggcttatgaacgcctaattcttgacacaattagaggtgatcagcaacattttgttcgcagagatgagttgaaggcatcctggcagatcttcaccccacttctgcacagaattgatgaaggggaattcaagccactcccctacaaaccaggaagcagaggtcctgcagaagcagatcagttacttgaaaaagctggctatgttcaaacacacggctacatatggatccctcctaccttgtagagtgatctaatgtaataagatgaggaatttttagctgctaatgaatacacaataagcttgtgaggcttcttccctttgaagcactcccacggatgtgtatcaagcatttggaacaatataagagactaagagtgtttggcacggtttgtgtaactgatttgcctttaaatgcaaaataaatggaaaatgaagtccatttactagt

SEQ ID NO: 9737 - DNA, 670 bp, Glycine max
  Clone ID: 700868689_FLI
tgcaacagtgtcagggacacggtcaagtgcaagtttccattcatcgaaaaacgaaccgagactgcatccaaggaacttgagaaaaaggcttcctctctgagaaaccttgagaggaagttctacagctcatattctatggtaggcattagccttcctgattctgcacctgacaatggacaagttttggatgcacgcgacccacttgctgagaaaaaactggaactggcaacctgccaaaggcgtgttgaagatgaaatgctgaggcattcaaaagctgtggaggtaacaagagccatgaccctcaacaatttgcaaacgggcttgcctggagtgtttcaggcactgaccagtttctcttccttgttcacagaggctcttgaatcagtgtgtacccgttcatatgccatcaagtaggtgaggtaattcatttgttctgcatgggatctaagttcttcataagggctgggggattttttggcggcaagctcttattgctctcactattttgagttatattttgaaatgtaaatatgaagaattttggggttccacctattttgatggaaaagggaattttcttattgtacagggaaatttcttggtttattgtatcagaggattgcaatttttagtatatcaataaattatacgcattgtgctttcatgttcc

SEQ ID NO: 9738 - DNA, 382 bp, Glycine max
  Clone ID: 700868865_FLI
ggcggttgagtctcttgtgtttgctcccttctttgctacacatggtggcctactcttcaagatctaaaggatttgatagaaaaagagtatcgtccatcatttttctacaacgacagaacaaggaaaagccgtccctttaccaatgccttctcgtttttgtgttagtctttaactcatctgtcatgtcaattccattgtttttgaaaccttttcctcccccaccttgaaacaaagtatattttgtctcatgtagttttaagacaacttgattaggctgagtctgttgcgaaaattttccttgtatgatgacgatgatgtttaccatctcttccgcgtggtcaattttctaaatatattcctttccggatggttcaactttctt

SEQ ID NO: 9739 - DNA, 1902 bp, Glycine max
  Clone ID: 700869115_FLI
tggcaaaggccagaggacatgacaaccgaccgtcatgcctacaagatcgatccaagcaatcccgggtcggatcttgccggagaaaccgccgccgctatggccgctgcctccattgttttccgacgctctaaccctgcctatgccgccgaactcctccgccatgcctaccagctatttgattttgctgacaaatacagaggcaaatatgacagcagcattacggttgcccagaaatattacagatccatcagtggttacaatgatgaattgctctgggctgctgcttggctctaccaagcatctaacaatcagtattacttggattaccttggaagaaatggtgattccatgggtggaactggttggaagatgactgaatttggttgggatgtcaagtatgctggtgttcagacattagttgccaagttcctgatgcaaggcaaagctgggcatcatgctccagttttcgagagatatcagcagaaggctgaatctttcatgtgttcgtgccttggaaagggtgatcgcaatgttcagaagactccgggtggcctcatcttccgccagagatggaacaacatgcagtttgtcacaagtgcctcatttttagccactgtctactctgactaccttgcttcctctggtagaaacttgaggtgcagttcaggcaatgtgccccctgctgaacttatctcccttgcaaagtctcaggttgactatcttcttggtgacaacccaagagccactagctatatggtgggctatggaagcaacttcccacaaagggttcatcacagaggttcatccattgtttccatcaaggttaacccttcatttgtcagctgccgtggaggttatgctacttggtttagcagcaaaaggagcgacccgaacctgctcactggtgctcttgttggtggacctgatgcatatgatgactttgctgatgaaagagataactatgagcagacagagccagcaacctataacaatgctcctcttatcggtattctggcaagactaggtggaggtcatggtggctataaccagcttcttccagttgttgttccagctcctaagcctgttgttaccaagcctcaaccaacccccagtcccaagacaactccacctccagcttcgtggtcaggcccaatttccattgaacagaaaatgaccacctcgtggattgcccatggaataacttactacagatactcaacagtggtgactaacaaatctaacaagagtctcaattctctcaatctttcaatatccaagctttatggtccaatctggggtgtcacaaaatcaggtgattcatacacattcccatcatggctcagctcattatcagcaggcaaaagccttgaatttgtctacatccattctgcttcagcagcagatgtctccgtgacaaactacgtgttggcctgagagtgacatgggaatggtttactgctttgttgtgtaagattgtgtagccatacaaatgtgcagtgaggagagggtctttacgtttttccttctatattttgatgtcaaatcttcttcttcccttgtgtattttgcatttcagtaggttagatcaaaataggtagattatataagatggaaggaccggagcagaaaggagtgaagagacaaaaggcagagctcatcctctttcttctccgctttacaacttatatacagtgagtgatacaagacagacagtgaaacagtgttgttgagaagtttaaaaaacaaagtgaacttctcaatatttcagagaagagtcatctcttgtatttttcaacagctttggatgtcttttctgtgtttgatgttgtaagctttgcagcattttgtattctctacagagaaacagtttgtgctatatagtgttatgtttttgtgctgtgc

SEQ ID NO: 9740 - DNA, 1053 bp, Glycine max
  Clone ID: 700869137_FLI
cggtgattgacatgaagcacatctatggcggggatgagaggcggagggcggagacgctccggctcgtgtcggaggcatgccgggaatggggtttttttcaggtggtgaaccatggggtgagccatgagttgatgaagggggcgagggaggtgtggagggagttctttcagcagccacttgaggtgaaagaggtgtatgccaatacacccctcacttatgaagggtatggaagcaggttgggagtgaacaaaggggccattttggattggagtgactacttctttctccatcacatgccttgttcccttagggaccaagccaagtggccggccctcccaacatccttaaggaacattatctctgaatatggtgagcaagttgttatgctaggaggaaggatacttgagatattgtccataaatcttgggcttagagaggattttctcctaaatgcatttggtggggaaaatgaccttggtgcttgcttaagggtgaatttctaccctaaatgcccacaacctgacctcactcttggcttgtcccctcactcagaccctggtggcatgaccattcttctccctgatgaaaatgtgtcaggacttcaagtacgcagaggagaagattggatcactgttaagccagtcccaaatgctttcatcatcaacatgggtgaccaaattcaggtgctaagcaatgcaatttacaagagtatagagcacagggtgatcgtgaactcaaacaaagatcgagtttcattggcctttttctataaccccaggagcgatatacctatccaaccagccaaggagcttgtgactaaggataggccagcactatacccaccaatgacatttgatgagtatagactttacattaggacaagaggacctagtggaaaagctcaagttgaatctttgacttccgaatgagattccaattgagtagttgtttgcagtacagaaaattaatttgcatatgaataacttatcatgatctttgtgtttgtatttatcagactcagtaaataaaaatatcatatcccactcttattct

SEQ ID NO: 9741 - DNA, 717 bp, Glycine max
  Clone ID: 700869211_FLI
actaattcgccttggttttgagggatatagaaacgtgatggaaaactgcagagacaacatgttggtgctgaaagaaggactagagaaaacagggagattttcaattgtgtccaaagacaatggagtgcctttggtggcattcacactgaaagaccacacccactttgatgaattccaaatctctgacttcttaaggcgctttgggtggatagtgccagcatacaccatgcccccagatgctcaacatgtcacagtgcttcgtgttgtcatcagggaggacttctcgaggactctcgcagagcgcctcgtggccgatgttgagaaggttctgcatgagcttgattcacttcctgctagggtcataagcagcactagtgtgacagtcactgctgaagaaaatggcaaggtagtggttgctaagaagagtgctatggagactcagagggaaatcactgccatttggaagaagtttgtgttggagaggaagaagaacaatgacaagatgaatggtgtttgttagagttagcttcaagagtgtgttgtgttgtgttgtgcctatccctgccttattctagttctttttttcatatatatatttgaggagtaagtacttttgattgagtcaagctatttatctgattcggttgcttattgatgagaggcaaatatcaaactgtattttcatctgtataagtatgattcactgtatttttgact

SEQ ID NO: 9742 - DNA, 2558 bp, Glycine max
  Clone ID: 700869225_FLI
cctcagttcagctcggaggactatatgatgctatacacgaccatatacaatatgtgcactcagaagccgcctcatgactattcccaacaactgtatgacaagtacagggaatcgtttgaagaatacatcgtatcaacggtattaccttctttgagagagaagcatgatgaatttatgttaagagaacttgtgaaaaggtgggcaaaccataaaattatggttaggtggctttctcgtttctttcactacttggaccgctactttattgcccggaggtcacttccgccacttaatgaagttgggttgacttgcttccgtgatttggtttacaaggaattaaacgggaaagtgagagatgcagtgatttcccttattgatcaagaacgtgaaggagagcagattgaccgagctttattgaagaatgtattagatatatttgttgaaattggaatggggcaaatggatcactatgagaatgattttgaagctgcgatgctcaaagacacttctgcttattattctcgaaaggcttcaaactggatcctagaagattcttgtcctgactatatgctcaaggctgaggaatgcttaaaacgggagaaagatagggttgcccattatttgcactctagcagtgagccaaagttattagagaaagttcaacacgaactgttatctgtatatgcgaaccaactccttgaaaaggagcattctggatgtcatgcattactaagagatgacaaggttgaagacttgtcaaggatgttcaggctcttttctaaaatacccagaggtttagatcctgtttccagtatatttaaacagcatgtgactgctgaaggcatggcattagtgaagttggctgaagatgcagtgagtaccaagaaggcggagaaaaaggatattgttggtttacaggagcaggtttttgttcggaaggtgattgagctgcatgacaagtacctggcatatgtgaatgattgtttccaaaatcatacactttttcacaaggctcttaaggaggcttttgagatcttttgcaacaagggtgtcgctggaagctcaagtgcagaactgcttgccactttttgtgacaatattcttaagaaaggaggaagtgaaaaattgagtgatgaagcaattgaagaaactcttgaaaaggttgtcaagttgcttgcctatattagtgacaaagatttgtttgctgaattttataggaagaagcttgctcgaaggctcctttttgacaagagtgccaatgatgatcatgagagaagtattttgacaaaactgaagcaacaatgtggtggtcaatttacctcaaagatggaaggaatggttacagatttgacattggcaaaggagaaccaaacaagctttgaggagtatttaaccaataatcctaatgcagaccctggaatagacttgacggttacagttttgactactggcttctggcctagttacaaatcttttgatctcaatcttccagcagaaatggttagatgtgttgaagttttcaaggaattttatcaaacaaaaactaagcacaggaaacttacttggatttattccttgggaacctgcaacattagtgggaaattcgatccaaaaactgttgagctgattgtaacaacttatcaggcttcggcattgcttctatttaattcctcagatagactgagttattcggagataatgactcagttaaacttatctgatgacgatgttattagactgctccactccttgtcatgtgccaagtacaagattcttaacaaggaaccaaacacaaaaacaatatcttctaccgactattttgaatttaattcaaaatttacggacaaaatgaggagaatcaagattcctcttcctcctgttgatgagaagaaaaaagtaattgaggatgttgacaaagacagaagatatgctattgatgcctcaattgtgcgtattatgaagagtcggaaggtgttaagttaccaacagttggtaatggagtgtgttgagcagctaggtcgcatgtttaagccggatgtcaaggcaattaagaagcggattgaagatttgatctctcgagactacttagagagagacaaagacaatgcaaatttgttccggtacttggcttgatgtggtcttgacgattttgcaaaagaagtggtggttactgcattcgatacaaacagcaaaacaagagcatcatatttgaacatgcaaaatatcagtttctccatagtttccttggaaggaggagctgcgagtgcttgtacattttgcctccatatccaggtatggattactgtagatgtgtgctcctgttggagaagttgtaatgaattccataagtagggccagctcactggtaccttcacttccttttccttttgattgctgcagttccatatgatgacaacttagttgatgcctgtgttaattatttcacccaacccccataaaggaaatagaaatcgtgtaacactagtttcagttaaattgtagttttattgtcgtcttcaaaaccatcaagtgaatgggtatctcaaggatttcaagat

SEQ ID NO: 9743 - DNA, 607 bp, Glycine max
  Clone ID: 700869231_FLI
cagacacagaagtggtaggtctcacgtctcatcataaggtcgaaaactccattgaaacaagtcttccacataattccaatttgccagaagaaccaatggtgtcaacgaaaaaggaagcaacatgttatgcaacaaggcgttacagaggtgtgaggagaaggccatgggggaagtttgcggcagagattcgcgaccccaaaaagaaagggagcagggtgtggcttggcacatttgacactgagattgatgctgctaaggcttatgattgtgctgccttcagaatgaggggtcacaaagccgtgttgaatttccctctggaggctggaatgtctcatccagagcccaacagtagtggcaggaaaaggagaagagattatacaacagctgtcacaagttcaagtcatgtcatgtcatgagaaataattcagtgtgggataaccatgtttttcttttggcattttttgtcagttacataagttaatgcaaggttttatagttctactacagttgagcgtgatgaggtctgttatttatatccttgacttatgattaagggaagcaaatggggtgaaattgaattaaaccaagaattaaacagttcataaag

SEQ ID NO: 9744 - DNA, 931 bp, Glycine max
  Clone ID: 700869342_FLI
ataaggctgattgcatcatcactagcagacggaattaaagcagaaagatgcacaccggcaagctgtggaaactggtagtgatgatgcaatcagccttattacatcactttgctcctgggatccctgcaagaggccaacggcttcagaggcacttcaacatcctttcttccagagttgcttttacattcctccatcccttcgcaacagagcagtagcgagaactcctccacccgctggaacaagaggagcactggatcagcaaggagtcaagagatattccggtgctttacctacttcaaagctctccaataatttttcttccatgaaattacatcctcctttagcttcaggtgtgcaacggaagctggatatggtaaatcaggatggaattaagaacgaaaaaccaatgaggactactaaaccaaaatatcgtcagccaggaaaggacagcccaacttctatgaacaaagggaggtctgtacgtggggtttcagaaacagctgaaaagttgggcaatttgtctgtttccagtcgaagacaatcaatggggcaacctcgtcctcctccaccaatgaaggctggaggcaattggatttctgaatctggaaacttcatccttgggcccgcacagcagattccgactggaagaacttttgcaagaaaagttgcctgatgacaagtatgaatgagtaaaatgtgagtgatgatgattctataatgctcaatgatgtgattgtgaatgtatcctaatatcaaataaaaataaaaataaatgtatggttagacattctgatgactttgtcgatgtctaaactacaaaactagtactgcccgtgtgttattacttgttggtaatcgtttcgtacttttgggacatacagagctaagttgatgctttttactattactataaataaatgctatttgtatg

SEQ ID NO: 9745 - DNA, 1011 bp, Glycine max
  Clone ID: 700869544_FLI
gttactcacatggggggtgcacctacagtgttaaacatgataatcaattcatcacctaaagtccagaagccgcttccgggaaaggtccaagtgatgacaggtggtgcaccacctcctccggatgtgattttcaggatggaagaactaggatttaatgtgactcattcatatggtttgacagaaacttttggtccggcatcaatttgcacttggaaaccagaatgggacaatctgcctcaagatgcacaagcaaaactcaaggcacgtcaaggagtggcccatgttggaatggaaggcctagatgtgaaagatcctcacacaatgaagagtgtaccagctgatgcaaaaaccatgggtgaggtgatgttcaggggcaacactgtgatgaatggatatctgaaggacttgaaagcaacacaagaggcatttaaaggtggatggttttggactggtgatttgggagtaaagcatcctgatggatacatagagcttaaggatcgctcgaaggacatcatcatctctgggggagaaaatattagcacaattgagttggaaggagtgatttttagtcatccggcagtttttgaggcagctgttgttgggagacctgatgattattggggagagacaccttgtgcatttgtcaaactgaaggaggggtgcagtgctacatcagaggagataatacaattttgtcagaatcgattgcctcgctttatggctcctcgaactgtggtgtttactgatctgccaaagacatcaactggcaagacacagaaatttgttctgagggagaaggcaaaggccatgggaagcctgactaagaagaacactagccggttataaagcacatttattctgtcatttgaatgcaatgtttgtcaatgttatgtgctttcaggttgttattttcgtttacatataaaataaaatctgtccatttgtatgaatagacacttatgcatagttgtaacaagaaaaaaaagactcttatgcaaagtcaattggacc

SEQ ID NO: 9746 - DNA, 941 bp, Glycine max
  Clone ID: 700869552_FLI
gaatctttgcgggaactgacaatcaatccctttgagtccaccaaccaaatattcgctccaacattttaagaagccctgggctcatgagcatgaacctgttagaaatcttgtagatgctgttaataaaattaagccaacagtgttgattggaacatcgggacaaggaagaacatttactaaagaggtgattgaggcaatggcttctattaacgagagacctattattctttctctttccaaccctacgtcacagtcagaatgcactgctgaagaagcttacaagtggagccagggacgtgccatttttgcaagtgggagcccatttcctcccgttgagtatgaggggaaagtgtttgtgcctggccaggccaataatgcatacatatttcctggatttggtcttggtttaataatgtctgggaccattcgagtgcatgatgacctgcttctggctgcctctgaggctttggctgcacaagtgagccaagagaactttgataagggactcatatacccaccattcaccaacataagaaagatttcagcacacatagctgccaatgttgctgctaaggcttatgagcttggcttggccactcgccttcctcaacctaaagatttggtgaagtttgcagagagctgtatgtataccccatcctaccgaagctaccggtgaagcgataataaatagcctatttttctttttccttttcgttttatcattttattgtcaattatttaatttttttaccttctttatgttgctgttctgttcttgtaagttatttgttgggttagtaggttaggacggtggtagttggactaaaaaggtagcttgaaaatttgtgttctgctataaatgttatgtgacagtaatctaaattagaaaaggaagcatttctaaagtccgcatagtatataaaattcttgaaaagttgttg

SEQ ID NO: 9747 - DNA, 832 bp, Glycine max
  Clone ID: 700869580_FLI
tggttgcccctcttgggtaaagcaatgtttgttgtgcattgtgcaacacaattacctctgttcctccccctgggatggaaatgtctcaactttattgtggagggtgtaggacattgctaatgtacacacgtggagctacaagtgtgagatgttcctgctgtcacactgtaaaccttgttccaccagcatctaatcaagtagctcatgtccattgtgggaactgccggacaacactcatgtatccttatggagctccatcagtcaaatgtgctctttgtcactttattactaatacgaacaatggaaggcttccaatccctgtccatagacccaatgggacaaccaatgctggaacattacctactacttcaacatcaatgccccaatctcaaagtcaaacagtagtggtagaaaatccaatgtctgttgattcaagtgggaaattggtgagcaatgttgttgttggggttacaacagataagaaataacgccgtcacatataaaaggtacagttcacgtcatgacgcattaccacagttgctgtcacaggaagatattgtttgtgtatatgaatatatatgatattgcagcctgcaattgttgaattgaaattgatatttttccaatataagagctggacgaatatcatgtacgtatgtatgaatgtatatgaggtggacaagtcgtgaaaagggcttaaaacctgttttgtgtgattaccaaagcctactttgttgtttccttggtagccatacccaaatcaattagttcattcacattatatgtttgacttgtaagtcctaaactagtaaatggtatttctttcatgtct

SEQ ID NO: 9748 - DNA, 2444 bp, Glycine max
  Clone ID: 700869601_FLI
gtcttataagattaggttagaaattttatttgaaaatgaactccgataatcaacaacaatcggaggaaccaggaaatgcacaaaaatcactggagcattcggcagatattgctcaaccacaatccccaaatcaaacaactgctggaacatccactttgacggcagaggacacagaaaagccaaaatgtgcggtttgcggtgaggaaaatgccaaaatgcattacggtgttttggcatgcttgggttgcaagggcttcttccgtcgtgcactgaaaaagctgaatgaatatgaatgtttgcgcaacaacaattgcatcattgataaacaggaacgaaattcctgccgatcttgccgccttcaaaaatgtctcgatgttggaatggatccagcagccgtccgtcctgaccgtgatttcactggcaaacaacaattggcccgtcgattttcccattcaaaaggaagcagcaaccataaatcctctcagccaatgggaaaatgcagtggagagcgaaaaggaggaggaagggatgaggagaccgccggcaattgggcacatcgtcttccggtggaaatgcgcacaatggtgatgactttgcagaatattgaggcaaaggttgttcacggcgatacggcaaaagatgcagcagaaatttatccattgagggtcaacacaatccgcgagatcatcgaagagccaaccaaattgaggggaagacgcaccgaaatgcgctatgagccatacagaatggcaaaaaatgaggaattttcggtgattgtttatcgtcgactgattgccgccattgattgggtcgaattgttggccgaacgaatgggtgggctttcaattgaggatcgtattgcactggtcaaatcctgttttgggcccttgacgttgttcaaatgttcggcgaggacggcggttgtgaccagcaatgagaatttgctttgcctttgcaattttgcctatgttccacgcgaaatcaacaaagcatacaatgatgcatatcacctggaaaatggcctcgtggatcggctactcaatgaattggttgctccatttcggaaaattcatttagccgaggaggaaatagtttgtgtgtcggccataattgtgctgaatccaatggcaagggatttgtcagaaaatgcagccgaaaaagtttttcagcttcggaatcgagtctacacaacactttatcaaattatcaaagaatgtcgtccaaattgtaacacaaatgccacatttggaaatttgcttctctatttgccaattattacgtctctggccaatgcaatgagcgataatttgcgttttgcacaaacattttccgcacacggaggaagtcctttgctgaccagtctattcggctgttttcccgttgaaccatttgtggattcagaaatggcattggtcaaggcggttgaggggaaatgcattgctgaaaaacgagtgcaaacagaagaagagaagaaaatcaaagcgaaggagaagaaagaaacagtgttgcagaaacaaaaacggcgcaaatccgatgcaggcacccaaactgaatggaaatcacaattgaatcaaattacacgaaaacgtcgtctctgtccattggcctctgtggaagaaagcaatgaatttcacctgctgaaggccccatgctcttataccctcacggaaatgttcgacgatcgaatcaacaattgtggtgttgacgaaattgaggaggaggaagaagacaatatggaaaagaattatggaaacaatgcaacattgccatttgggacggaaaatcggcgattgattcggacaacaagctatcaacaaatgcacctccaacaaggaattgatgagcaacaagagttccggagaccgtcagccacttggacaaatgcaccttcacaaaaccaatcacaatcgcatggtcagcaacaaacacaaaattggccacagccacaacaacagcaatgttggccaaccaattcagcttcaacttcaaagggaattcccgcgatacttcctcctaccacccaaattcaaggcctttttctcaatgagccatcatcctcttcgcaacaacaatattttcaaggagcacgacaatatggcgatagccaatggactgtgccaccctcatcatccatgcaaatgcaatcaaattttacgccaatttatttgccctattcatcttcaatttcgccacattttgcctcaaatattcccacacaaattcattattctcaatcagcagcacaatatttccctcaacaatttgccccatctttttatccacctgaaccacaaagtcaacaacaattcacatatctcacggttaatcctcaacaacaatttttcaatgataataatactaataataattaacatttattccatttcaatatgattttgtgatattaaaatgtgatttaataaatgaataaatatttgaatttt

SEQ ID NO: 9749 - DNA, 817 bp, Glycine max
  Clone ID: 700869710_FLI
gaagcccgggcccacttccgagagaaactttggccttttttaccctgacgagaggagggtttacaatgttccgttaacggtggaagagctcaaggactaccacgaccgtccgtcggcgccggtgagcggcggcggacagcagaaggagacgccggcgcccgttgtgagcggcggggtttcgaagagtaccactgggaacacatggtgcgtggcgaaccccgacgcggataaggtcaagctgcaggcggctctagatttcgcttgcggcgagggaggttctgattgcggtccgattcagcgcggtgccacgtgttacgatcctaacacgcttgttgcccacgcttcgttcgcgttcaacagttattaccagaagcagtcgcgcaagggtggtagctgctatttcgggggtacgtcgtacgtggtcacgcaggaacctaggtatggtagctgcgagtttcctactggatactaaaagctgaagagggcagagatattcccgcatgaggatatgcatctggctgattttgctttgtgtaaagtatgttatgggaaggtgtctggaagtgagactaggaagagaagataaattaattgttggtttatattagttttaagattttttggggttatggattatgttagttaataacgttgacttttcttccagttggtggaaactgggaatgggttagctagtaactacattaatttaactttggggactaaagtaaattgtatctaagatttttttttttactttgcagtagactttatcttttgtgatttctgaagtgatcgttgttcttcaggtttcatc

SEQ ID NO: 9750 - DNA, 607 bp, Glycine max
  Clone ID: 700869725_FLI
aagtatcaaggcaacattgatggggcttactttggaactacatttccacacctcttcttgatgacttatggacaactgaagccacagaaaccagcacaaggctatgttccaagagtttttgggttcaaagttcacaagccataaagctgaagttgaagctttcatgaaagtaaaaatctgcccgtgtctcatttaactcttccttatggttctctttgcaacatccggcaaatcatatgctttccaaaccagtacaatctaggcatctgttttaattgttataggagcttgttgtaaagaaatatgcagacatgcgaagcaagtgcttagtttcagcttcagattcaatgagaaagtgcttaggtacttgatgatactttttaatgactgtttacgaattgtattcttgcgattaacttaatattgtctatggttatgtctcgaactacaaataccctgctatttttatattgttttattccatttctcccaatttctgtagcctttgaatttgtggatttgctcccaatggattcatacattactaatttccaagttcacttgcttggatgttatactcagctatccaacattattggttatttgg

SEQ ID NO: 9751 - DNA, 977 bp, Glycine max
  Clone ID: 700869769_FLI
atccaatcttgggatggaaagagtgagggtaactctgccagttcaacagccctctttttcaataaagggagagactgttacaaatttggatttcattcggaagaggaaggtttctaatgacttcaacatgatggatctgaaaatttacacatgtgaacaccctcagtgcccttacagtcaagttcgccttggtttccctgaccgaatttcaagggacaaccatcagttgatttgtgcttatagaggtacttcagattttgggggtccaagttttcctgttaatgagataaagccagtcgtacaccccccgtcctttgttcaacccaaatctactgctcagcctggtagtatggttccacctgttattgatctaactggacttgaagtttcagataatggccagaaaatgattactgaccttatgactaactatgacacaaatgttcgaggcaacaagaagacaagttcctgtaatcacttagctgcagaaaatttcgaccttcctcagcatgccatgcagcagcaacaggacaacttcattcgcggtcaaggaatcactgcagaaggcaacatctttgatgaagctaacatgcccaacaatcatcacatgtttgcaagagaagaaggtcaatttgaccgtttcaaagctttgaatgctccctttgagaccaatcacaacaacaacaacttccactcaatgtttggttccctttgtgatttggcatcatttgatttcaaggaggatatgcaaggagtagggatggatactcttcagaaacagccagatatttcaatatggtaccagtgaaaatgacaagttgaatctggaagctcgttatccacatcatgaattcttattttcatgtgatgttccttcagccaagtcttactggaattttcttcacatgtaattctgtaggcctagtagaactagatatttttgacttatcctttacaggtctagtagttgttacaat

SEQ ID NO: 9752 - DNA, 1597 bp, Glycine max
  Clone ID: 700869793_FLI
caaaaagacagagggttaattgtggagtattttggaaggatgtcttacgttgctcataacgttaatcagccccaagagaaagatttaatatcaaaggaaaaatttccctctaacaaatcttctcttttgattttgataccccttattattatttatttccataccctctcttcacttcttcctcaccaattttctgaacactgacactcttctctccttaaagccaccacattctgatacccttttgatcaatcaaagtgaagatcagcatagaatgcttgtttgattctatttcattgctatggataagtacgaggctgttaaggatttgggagctggcaattttggggtggctaggctcatgaggaacaaggtcaccaaggagcttgtagccatgaaatacatcgagcgtggccccaagattgatgagaacgtggcaagggagattatgaaccacaggtcccttcggcatcccaatataattcgttacaaggaggtggttttgactcccacacatttagcaatagtgatggagtatgcagcaggaggagagctctttgagaggatatgcagtgctggcaggttcagtgaagatgaggctagatatttctttcagcagctgatttccggtgttcatttctgtcataccatgcaaatatgccacagagatttgaagctagaaaatacccttctagatggaagtcctgcacctcggttgaaaatttgtgacttcggttattccaagtcatctttgctgcactcacgacccaaatcaacagttggaacaccagcttacatagcaccggaagttctttctaggcgagagtatgacggaaagttggctgatgtatggtcatgtgcggtgactctttatgtcatgctggttggagcatatccctttgaggaccaggatgaccctaggaattttaggaaaacaattcagcgtataatggctgttcaatacaaaatccctgattatgttcacatatctcaagattgtaggcacctcctctctcgtatatttgttgcaaatccattgaggagaattactattaaggaaattaagaatcacccatggtttttgaggaatcttccaagggagctaactgaatctgctcaagctatctattaccagagagacagcccaaactttcaccttcaaagtgtggatgagataatgaaaattgtaggagaggcaagaaatccacctccagtatctaggcctgtcaaaggttttggctgggaaggtgaagaagatttggatgaagaagtggaggaagaagaggatgaagatgagtatgataagagggtcaaagaggttcatgcaagtggcgaatttcaaattagttaaagccctcaaattcttgtgtactttgttgaaatattgtactttttagaagtcacccttttttgtgtacacgaagtcacctatttatgtgcattataattatggctctgttgttgtaatatagtaccgggtatcatcaaaatggttgctatgtatgagaatagtagttgtctaattacgttctaaatcgacatgagaaccatagttgtctgattacatgctaaaatctaaattaccttttcctgtttt

SEQ ID NO: 9753 - DNA, 2230 bp, Glycine max
  Clone ID: 700869920_FLI
gcgttcctttcttccttccttctttttcccccctacaaacaaaaacaaagcaacattcccttttctatctgtttccttcgcgaaccagcaacaacccccggcgcacgatagcgccatcgctttcgttacgcggttggtaaccgtctctctttcatcaccgtttttatttccattcacaaaaccaacaacctctctgtgatttttcttcacttttctctctcggaacaaaacggaggatccgtcatagtattggtcaaatattggctaatgtgggtgggacattcatctatgtacaagcgcactccttcgagagataattcaaacatggaggacatggaagaaaactcagatcttttagacatcggcctggacaagggaacatcaaatccttcattgatgctttctttaccgcatgtacttgtggcgaccatttcttcattcctttttggataccatctgggggttgttaatgaaccacttgagagcatttctgtggatcttggcttccgtggaaatacattggcagaaggtctggtggtgagcatatgccttggtggtgccttgattggatgtctactaagtggttggattgctgatggggtggggcgtcgtagggctttccagttgtgtgctctgccaatgataattggtgcttctatgagtgcagcaacaaacaacttgtttggcatgcttgtaggaaggttgtttgttgggactggcttgggcctgggccctcctgttgcctctctgtatgtgacagaggtttctcctgcttttgtgcggggcacctttggagctttcatccagattgcaacatgccttggtctaatgggagctttatttattggaatccctgtcaaagaaatttctggatggtggcgggtttgtttttgggtatctaccattccagctgctatacttgccgcagctatggtcttctgcgcagagagtccgcattggttatacaagcaaggaagaactgctgaagcagaagctgagtttgagagacttctgggtgtatcagaagcaaaatttgcaatgtcggagttatccaaggtagatagaggtgatgatactgatactgtaaagctgtcggaattgcttcatggtcgtcattctaaaggtatacatttttcctggtttgtctctaggatagttgagtgtatttgctgttgttgttatctcttgtcactgatttccttaggtttccaaaagttattttttattcacgagttcgttttgcagttgtttttattggatcaaccctatttgctttacaacagctatctggtataaatgctgtgttttatttctcttcaactgtttttaaaagtgctggagtcccatcagacattgcaaatgtctgcataggaatcgctaatttggcaggatctatcgtttcaatgggtttgatggataagcttggaaggaaggttctacttttctggagtttctttggcatggcaatagcaatgatccttcaagccacaggagcaacttcacttgtatcaaacgtgggagctcagtacttttctgttggtggcatgttactgtttgtcttaacatttgctctgggggctggtccagttccaggtctccttctaccagaaatctttcctagtcgaataagagccaaagccatggcagtctgtatgtcagtgcattgggtgataaatttctttgttggactactgttcttgcgtttgctggagaaacttggtccacagctgctttactccatgtttgctaccttttgcatcatggcagtaacttttgtaaaaagaaatgtggtggaaaccaaagggaagtcacttcatgaaattgagatcgcacttcttcctcaagactagatctctattcatttgattgctctaattttgcatagtttttcggctgagcagattgtgtttcgtctattttggttgaccttaacattacaaggggaagctcaggaactatgcattgttttgctgcaacattagtacgaagaggcttaggtattatggctagctgtgatgtagtaggtggtactattagcggcttacaacacgagacccttctgttgttactcgcggcttgtgattctatgatttggcatccacgtaaagggagacataattcatcaggggggatctatgcatcccataatattccataaatgtactactttatgtaatattatatatgtttctgtacgtgacattatttttaatcgcttcaattttgtccc

SEQ ID NO: 9754 - DNA, 686 bp, Glycine max
  Clone ID: 700869926_FLI
tatctatctatctttcccgttttctgggtgaaatgaagaactgaaaggatctatcgatccatcccagattcaaccacacagagaacgagggaattgaattgggttagggttttgggaaagatgaaaaagaggcaggtggtcgtgaagcgagattacgccacgtcatcaccagcggtggggaatattcgatacggggagtgccagaagaatcatgcggcgaacacgggaggttatgctgtggatggctgcagggaattcatggccagtgccggtgaaggaacaaatgcggcgcttacgtgtgcggcttgcggctgccacaggaactttcacaagagggaagtactgcacggcgtaaactgaacgaacaagttctcaacttgtcatatgaattgagtgagttcacacaattacccctctttccaattctgctccttcatatatgattcgtacgaaccacccacaatgaggaataaaaaaaatagaaacacaatatatatatatatatattttgcagagtttgtgtatcaaattagatgattgaattgaaggtttaagtttcttcccatcttgctttttttctctggtgcttgcaattaagtgttgattgccgatacaatagacattgatattgatattgttgtaaaagaaaatatattgaacttatggacttttttagttcttggaat

SEQ ID NO: 9755 - DNA, 927 bp, Glycine max
  Clone ID: 700869954_FLI
ggttggttcacaattggctgagccagagataaagatgctgatggaagtggctgatgttgatgggaatggagtacttgactatggagagtttgtagccgtgacaattcacttgcaaagaatggagaatgatgagcatttccgcaaagcattcatgtattttgacaaagatgggagtgggtatatcgagttaggggagctagagaaagcattaacagatgagtcgggagatactgatactgctgtattgaatgacatcatgcgtgaagtcgacactgacaaggatggtcgcatcagttatgaagagtttgtggccatgatgaaaactggaactgactggagaaaagcatcaaggcagtattcaagggagagattcaagagcttgagcataaatttgatgaaggatggctcacttcagcttcatgacgatattagtggtcaagctgaagtggtttgagtccgaaattgtaatcttagtgctcactcagtttctcatcttccttcaccacttaatatgcttgaaagcatagtttctttactctccttgaaaaagcaagcaagtttagtgttgaagcattttgaagcatactgatttaccttgggttggagttgggttgcttaggttttggattggatgttattagatgcctgaagcttgaagcatgcgttggatggttgcatactaaagtcgttttatagcttgtcagcacaagttgcgcgggcacatgctgcaggcctcaaaatgtcacatattctttgtatatctttgtcgtgttgttcttgttttgataatttcattggtaattgtgatttttctaattgatgggctaaaaacagttgggatttgtctcattggcggtgtgatcgaacttctaatgtaaagtacctgtaaaagcaattcaaagttcaaaatatagatatcttgtgccc

SEQ ID NO: 9756 - DNA, 1680 bp, Glycine max
  Clone ID: 700869958_FLI
tgaaaagaagaaggttgatttgaatgtgaaagcggggggcccatcccaccaaactccctctacctacagctgttgaagcttctccttcttgattcttcagtaaccccttctctcccaaaatctctctgttcagttttcatatggcgaacacactatataacggcgccacatgccgaatccctctccggaaccaatccctggccttctctcgccacgtttccagatccctctctttcctccctataacacgtgcggcaaaacaacccaacgcaattgcggttaaggcttcttcgcactctgacttcgacgttgacccttcgctcagtcctcgtgtcaatgccgtcaagccttccaaaaccgtcgccatcagcgaccacgccaccgctctcgtccaagccggcgttcccgtcatccgcctcgccgccggcgagcccgatttcgacacgcccgctcccatagccgaggctgggattaatgcaattcgtgaaggttacacgaggtacacgcccaatgccgggaccatggaactgcgccaagcgatttgtcacaagctaaaagaagagaatgggattacttatactcctgaccaggttgtggttagtaacggagccaaacagagtattgctcaggcagtgcttgcagtttcctcccctggagatgaggttattattccagctccattctgggttagttacccagaaatggcaaggttggctgatgcaacacctgtgattcttccaaccttaatatctgataatttccttttggatcccaaactcctcgaatccaaaattactgaaagatcaagactgcttattctttgttctccatctaacccaacgggatctgtctaccccaaagaattacttgaagagatagcccgaattgttgcaaagcaccccaggcttctggttctctctgatgaaatttacgaacacataatttatgcaccagcaactcacacgagctttgcatctttaccaggaatgtgggacagaactcttactgtgaatggattttctaaggcctttgcaatgactggttggcggcttggatatattgctggtccaaaacattttgttgcagcatgtggaaagatccaaagtcagtttacttcaggggccagtagtatagctcagaaagctgcagttgctgcattaggactaggccatgctggtggggaggcagtttctaccatggtgaaagcatttagggagcgaagggatttcttagtacaaagttttagagaaatagatggcatcaagatatctgaaccccagggagcattttatctattccttgatctcagcttctattatggaagagaagctgaaggatttggtaaaattgtggattctgagtccctctgtcaatatctactggaggtgggccaggtagccctggtgccagggagtgcatttggagatgacacttgcatccgcatctcttatgcagaatcgcttacaaccctacaggcagctgtagaaagaattaagaaagcacttgtcccgctgagctctgctgcacttgtttaatatcgatgttttttttgttgttatgcgtgtattttatttctattttggcaatgtgtaatctgtttattctgaaaataataagctttggctacttttccacaaatgaagtgatgcaactgtcttattaatggtttaaaattataat

SEQ ID NO: 9757 - DNA, 1546 bp, Glycine max
  Clone ID: 700870005_FLI
aaacatggttgatctagattggcaaacaaagatggttcactccaacatgcctccaaagtcccccaaactctctctcccggataataacattccaatcccccttcgccagaacgacatcaccgcagcgtcgtctccaatctgcgctgcctacgacaactacctccgcctccctgagctcagagccctctgggcctccaacgacttccctaattgggccaacgagcccatcttaaagcccaccttacacgccctcgaaatcaccttccgcttactcgcaaccgttttatccgacccgaggccgtacataaacaagcgcgagtggacccggcgggtggagtctctcgccacggcccaaattcagatcatagctatgctgtgtgaagatgaagaagaaaaccccgagacacgtggcacgacgccaccggtgagtgacattaacggcttcatcgctcaaagcagaagctacagcgaggagagcctgctcccgcgcctcgccacgtggcacaaatccaaggacgtggcgcggagaatcctcgattcggtagagtaccagatgatgaggtgcacgtacaccttaggtttaggagaggcgaatctcgcgggtaagaagatattcctttacgacgccgtttgcaggccgagcgagattcactcgttggagacgacgccgtttgattacgtggggaactgcgagaacaagaccgctgcacgcgacgcagcagatcgcggagtgttggacgcgcgcggtgaggaagctgctggagagagtggtggagtcggtggagagaaaaacgttggagaaggcggcgagggagtgtcacgcggtggagcggatctggaagttgttaacggaggttgaggacgtgcacgtgatgatggatccggaggatttcttgaggttgaagaaggagttggggatgatgagaaattgcggggaaatggtggcgttttgcttcaggtcgagggagctcgtggaggtggcgaggatgtgtagggatctgaggcagaaggtgccggagatattggaggtggaggtggaccccacgggtgggcccgggatgatggaggcggcgatgaaggtttactcggagaaagagaaaaggaacgggttcgagaaggttcatgttttgcaggggatgcaggcgattgaggtggcgatgaagaggttcttctacgcctataagcaggttgtggcggttatgatggggagctccgaggccgataatgggttcactcagatattccttgaacccacttatttccctagcttagatgctgccaagacctttctcgcttattattgggaaaataataatcaaaatggggttccctgctagttaattaaaaaattaatcaattaattcctagtcatatatacttactcacacaaacgggaaaacaaagagaaaaaaaaaaggactaaatttttgtaataggttggtgtaaacaaatctttgtctgtaaaataatatttatttgactattcttttggatcatgttctttcggctgctttaaattatgacctgatccccgcttttgaatttt

SEQ ID NO: 9758 - DNA, 1678 bp, Glycine max
  Clone ID: 700870015_FLI
catcagtaaggacagggttaacctttccccatggtaacatgctggcaattccaaggaagaagacaggaattcttgacgattttcgttctagcggttggctcgatgcaatgaaatcgtcttctcctactcacactaaggtatccaaggatgttagtcatgggattggatcacctgattctgcttatagtacctggctgctaaagtttccatcagcactagcatcttttgatcaaattaccaactgtgcaaaagggaagagaatagcattgtttctggattatgatgggactctttcacccattgtggataatcctgactctgctttcatgtcagacaatatgcgtgctgctgttaaaatagtggcggaatattttccaaccgcgataattagtggaagaagccgtgacaaggtatatgaatttgttggagtaagtgatctatgttatgctggtagtcatggtatggacattattggtccttctagacaatcttttctgataatcaccctgattgcattagttctgctgacaagcagggtgttcaagttaatttattccaacctgctgctgaattcctgcccatgattaatgaggtacttgggttgctcaaggagtgcacagaagatattgaaggagcaacagttgagaacaacaaattttgtgtgtctgtgcattaccgcaatgtagatgaggaggtattaacttcttttctgatgcttgcacaaaatagggagtttttctacataaaatgactccctctttttaccaacttatttcatattttaccctaaactaatatatcttagtgctagaaggcttttttgctatgcaaaggtatgggggagggttattgtacgcaaccttacctttgccatatgctaagaagttgtttctcaattagaatccataaccaacccgtcaccaaggcatgactctattgttgcgccagagctcgccctcaatttcatattttaacatgattgtaattatttatttcctcttaatttgtttcatttaatgtacagagttggcaaattgtgggacaacgtgtatatgatgttctgaaggagtatccacgtttgcgtttaactcatgggcggaaggttttagaggttcggccagtgattgactgggataagggaaaagctgtcacatttttactcgagtcacttggacttaattgtgatgacgtgctcgctatttatgttggggatgatagaacagatgaagatgcatttaaggttttgaaagaagctaataaaggttgtggcatcttagtgtcccgtgccccaaaagaaagcaacgcaatttactctcttcgtgatccctctgaggtcatggaatttctgacatcacttgcggaatggaaatcaagcattcaagctcgctgaaaagatttacatattgtatagaggagaacatactccactatgctatatattagagacagtcttttgtttttagtttgaattttttgttagaagactttccaagaggtctgctggaacatatttgagctcagaagacctctgacctgacgacagcaacaacattgtcattacccaattgttttactcaaattttgtgtggtagctgtaaattcctggctgagaattatatatatatatatattgggaagattaaggaaaatctcctcatagggtgtttcttttttccgc

SEQ ID NO: 9759 - DNA, 989 bp, Glycine max
  Clone ID: 700870119_FLI
gaggatggctacacacccttgtttggtgaccataatttggccatccatagagatggcaaatcagttcacctttcacttgatgaaagaacaggttctggatttgtgtctcatgacctttaccttcacgggtatttcagtgcctcgatcaagttgcctgccgattacactgctggagttgtggtcgcattttatatgtcaaatggtgacatgttccagaacaaccatgatgagatagactttgagtttttggggaacattagaggcaaagactggaggattcagaccaatgtttatggcaatggaagcaccagcattggtagagaggaaagatatggcttatggtttgatcctgctgaggatttccatcagtacagtattctttggacagattctaagatcatattttatgtggatgatgttcctattagggaagttaagagaacagaatctatgggaggagatttcccttcaaagccaatgacattgtatgccaccatatgggatgcttcagattgggcaaccaatggaggcaaatatagagtaaattacaagtatgcaccctatgttgctgagttctctgacctggtcctgcatggttgtgcagttgatcccattgagcatgtggccaagtgtgacagtgccctaggttctgaagaagttccctctggtgtcacccaagtacaaataaccaaaatgagaaacttcaggttgaggcacatgacatattcttactgctatgacactgttagatacaaagtccctccaccggagtgtgtcatcagccaccaagaagctgaaaggcttagaaaatttgatcccataacgttcggcaatggccggcgccaccgtggtaaacgacaccaccatagtagtagaggaagccaagaagagattactgcttcttcattttaatgtatggttccatatgcagaatttgtcataaaggaaatattttcatataatgaatcagtttgatttacctgggttac

SEQ ID NO: 9760 - DNA, 2093 bp, Glycine max
  Clone ID: 700870127_FLI
atcttccagacttcttctgcctattttctatgatgttgatccatcacaagtgcgaaaacagagtggagactatgagaaagccttttcccaacaccaacaaagttccaggttccaagagaaggaaattaaaacatggagagaagttctgaaccatgtaggcaatctctctggttgggatatcagaaataagtagcagaaaatgttgaggtcataataattgaagatccatatgacatccttcgaacaagaacaatgagggtcgatgctctatcaacaatgagtagccttaagcttctctaccttggatattggaacgttggcttcgaaatcaatttttcaggaacacttgctaagctttccaatgaattaggatatcttagttgggaaaagtatccttttgagtgtttgccaccaagttttgaaccggacaaacttgttgagttgagactaccttacagcaacatcaaacaactttgggaaggcacaaagcctctacccaacaatttgaggcatttgaatctctctggctccaaaaatctaattaaaatgccatacattggagatgccctatatcttgagagtcttgatctcgaaggatgtatacaactcgaagagatcggtctgtccgttgttctttcacgaaagcttacttctctgaatttgagaaattgcaaaagtcttatcaagttgccacggtttggagaggatctaattcttaaaaatctagatctcgaaggatgtaaaaaactcagacacattgatccatccatcggtcttctaaaaaagctagaatatttgaatttgaaaaactgcaaaaatctagtaagcttacccaatagcatactaggcctcaattctcttcaatatctgattctctctggctgttcaaaactgtacaacaccgagttattttatgaactaagggatgcagagcaattgaagaagattgatatagatggagctcctattcatttccaatcaacatcttcctactccagacaacatcaaaaatcagttagttgcttaatgccttcctccccaatatttccatgtatgagtaaacttgatctaagtttctgtaatttagttgaaatccctgatgctattggaattatgagttgcttagaaaggctagatttaagtggtaacaattttgctacactgcccaacctcaagaagctttccaaactggtctgtttaaagttacaacattgcaagcagttgaaatctttgcctgagctcccttcacggattggcttcgtaactaaagcattgtattatgtaccaagaaaagcaggattatacatttttaactgcccagaattagttgatagggaacgctgcactgacatgggtttttcatggatgatgcaattgtgtcagtaccaggtgaaatacaagattgaaagtgttagtccaggaagtgaaatacgaaggtggttgaataatgagcatgagggaaattgtgtaagcttagacgcatctcctgttatgcatgaccataattggattggcgttgcgttttgtgcaatattcgtcgtacctcatgaaacactctcagcaatgagtttttcagaaacagaatatccattccatttgtttggtgatattcgagtggatttatatggagatttagatctagaacttgttttagacaaatcagatcacatgtggctattctttgtgaatcgacatgacatcattgcagatttccatctcaaggacaaatatcttggcagattggtttcgagatatgatggagtgttgaaagagtcatatgcggaggtgaagaaatacggatatcgctggctatataaaggggatattgaacaaaggaagcacaaatttggggaaattgaagaaaatgtgagctgaagggagaaaagatgatgcaaggtcctcccaggaaaagatagtaaagttgaagcttaggccgtagaatcatcatttcttctctcattttattcatttgagttgtccttcaaattttgaataagcttggtggcgtaaaatcaggttttaaatttttaatccactatatctaagaataaaattcaatgtcattataattaaaaattgcataatttgatttt

SEQ ID NO: 9761 - DNA, 1008 bp, Glycine max
  Clone ID: 700870186_FLI
gaattattcctccttctcaaacatttttttgggcaacacggtggacccaagcccaatgaatgttttctttttgactccttttaaacattagttgaatctaggattcataattttgttctgctctgcaatgtatgtcgtttttcaggattcttatgccattcgaagctttgagagaggaatatctgctcaaaatgctggtcattttgcttgggagatagttccggttgaagtttccactggaagagggagggcttccacaattgttgataaagatgaaggtctggggaagtttgatgctgcaaagttaaggaagcttagaccaagctttaaagaggttgggggttctgtgactgctggcaatgcttctagcataagtgatggtgctgctgcattagtgctagtgagtgaagagaaggcacgtgagcttggattgcatgtaattgcaaagataaaaggatatggggatgcagctaaggcgcctgaattatttacaactgctccttcccttgcaataccaaaagctatatcaaatgctggtcttgatgcttctcaaattgattattatgaaataaatgaagctttttcagttgtagctcttgcaaatcagaagcttcttgctcttaatcctgaaaaagttaacgtgtatggtggagctgtgtcattggggcatcccttgggttgcagtggagctcgcatcttagtcacattattaggggtattgagacagaagagagggaagtatggtgttgctgccatctgcaacgggggaggaggagcatctgctcttgttcttgagctcatgccggttgccgtgggacgttctttattatgacaaagatcatactactttgcaacacttgtacttttatttttttctctttttttaaaggacaaaacatttaataagtatagttaccagcaaagtatgagtgatactagattcaaccctcttaagcaaagtcttgagtttgagtactgtgaatgaaaaaaatgtaattgagaagagat

SEQ ID NO: 9762 - DNA, 779 bp, Glycine max
  Clone ID: 700870190_FLI
gtctatccattccatttctttccaacacacactttctctctctatctttgggtgtctttctttttgttcattgttgatgatgtcacgcgccgccgtgctattacacgcgccggaggaagatgcggcggcggaggagtgctgtacctcgacttcgtcgtcgtcgatcgggaggaacagcgacgtgtcgtcggagagatcaatggaggaaggagaaaacgaggtggaaagtgcttaccatggacctttgcatgccatggaaactttggaagaggttcttcccatcaggagaggcatctcgaacttttacaatggcaagtccaagtcattcacgaccctggctgatgcagtgtcttccccatcagtgaaagacatagcaaagccagagaatgcatacaccaggaggcgtaggaatttgatggcattgaaccatatttgggacaagaataatagaaactaccctctaagaagcagtggtggtggcatttgcaagagatcaatcagcttgagtagaagttctctggctcttgcagttgccatgaacaactccgacagcagtagtagtatcacaagcgacgattccggttccagctcgaattcgatacctcctccctctccactaccgccactccatccacgaaacagagtgtcttccttgcggaatttctctccctggagatcattttccttgactgatctccagcagcattgtgccattgctgcaacaataaagatttcaagtccctccattggaaatgaaactgctcatccatcatagtaat

SEQ ID NO: 9763 - DNA, 861 bp, Glycine max
  Clone ID: 700870207_FLI
tgagaatcttggcttaacaaaaggatacatcaagaaggcactgaatggtggagatggagaaaatgccttctttggcaccaaggtgagccactaccctccatgtccccatccagagctcgtgaagggtctgcgagctcacaccgatgcaggaggcgtaatcctactcttccaagatgacaaggttggtggccttcagatgctgaaagaagggcaatggattgatgtgcagcctttgccaaatgccattgtcatcaacactggtgatcagattgaggtcttgagcaatggtagatacaagagttgctggcacagggttctggccacaccagatgggaacagaagatcaattgcctccttctataatccttcattcaaggccaccatatgtcctgcaccacaacttgtggagaaagaagaccaacaagtagatgaaacttatcctaagtttgtttttggtgactacatgtctgtctatgctgagcagaagttccttcccaaggaaccaagattccaagctgttagggccatgtgagaaaagcaacttgctttcgtatagaaaatgcttttgcgcttccccccactttttttttttgaaaaaaaaaaaaacttcatcttttactttgttttaagggtattggtactataagacatgcttgatagtagaaaagtataccatttggttatcattctctgcacggatttctccagaatagaaaaccaccatgggtattaattagtcttcctttttctagaattttgctttatctttcaatgttatggggggagctagtgtgaatccatctgtgcttgcattgtacaatagttctttcaaatatattctactctaaagttgtccccctt

SEQ ID NO: 9764 - DNA, 2072 bp, Glycine max
  Clone ID: 700870268_FLI
ggtgttgttactgctgctcttttctcttttcttttctctttagttctctcttcccctttctttttctttttcttcttcttctgagcttgtttaagcttttcttccattaacatattatcacaatgtgtggtattcttgctgttcttggttgttctgatgactctcgagccaaaagggtccgcgtgcttgagctctctcgcagattgaagcaccgtggccctgactggagtgggctccatcaacatggtgactgctttttggcacatcaacggttagccatagttgatcctgcttctggggatcaacctctctttaacgaggacaaatccgtcattgttacggtaaatggagagatttacaaccatgaagagctcaggaaacagctgcctaatcacaacttccgaactggaagtgattgtgatgttattgcacacctgtacgaggaacatggagaagactttgtggacatgctggatggtatcttctcatttgttctactggacacccgtgacaacagttttatagtggctcgggatgctattggggtcacttccttgtacattggatgggggttagatggctctgtttggatttcatcagaaatgaaaggcctgaatgatgattgtgaacactttgagtgttttccacctggtcacttgtactctagcaaagaaagagggttccgcagatggtacaatcctccttggttctctgaggctattccatctgccccttatgatcctcttgttttaagacacgcctttgagcaggcagtcataaaaaggttgatgactgatgtgccttttggtgttctactctctggaggtttggactcttctttggttgcatccatcacttctcgttacttggccaacacaaaggctgctgagcagtggggatcaaagttacattcattctgtgtaggccttgagggctcaccagatttgaaggctgcaaaagaggttgctgactatctaggcactgtccaccatgagtttaccttcactgttcaggatggaatagatgccattgaagatgttatctaccatattgaaacatatgatgtgactacaattagagcaagcacacctatgtttctcatgtctcggaagattaaatcacttggtgtcaaatgggttatctcaggagaaggatctgatgagatctttggagggtatttgtacttccacaaggcacccaacaaggaggagttccacagagaaacatgccgcaagatcaaagcacttcaccaatatgattgcttgcgagccaataaatcaacatttgcttggggtctagaagcccgtgtaccatttttggacaaggcgtttatcaatgctgcaatgagtattgaccctgagtggaagatgataaaaagagatgaaggacgaattgagaagtggattctgaggagagcctttgatgatgaagagcatccttatctgccaaagcacattttatacaggcagaaagaacaattcagtgatggagttggctatagttggattgatggccttaaggcccatgctgcaaaacatgtgactgaaaaaatgatgcttaatgctggtaacatttacccccacaacaccccaaaaaccaaggaagcatattactacagaatgatctttgagaggttcttccctcagaactcagctaggctcactgttcctggaggagcaagtgttgcatgtagcacagccaaagctgttgagtgggatgctgcttggtctaacaaccttgatccctctggtagagcagcacttggagtgcacatttcagcctatgaaaaccagaacaacaagggtgtagaaattgagaagataatacctatggatgctgctccccttggtgttgccatccagggctaatacaaagatgtgacaaagaataatttgggcgacaatgaagataactaagctaaaggtgaatgaaaaatttgcctgcagtgtaatttcatctgggcaaagcttttatagtttatagttataaggctttctaaaaagtgttgcgtattgtattatcttgaatgctgtgatttgaagtcttaataaaagtgtttcctttatcagttc

SEQ ID NO: 9765 - DNA, 2286 bp, Glycine max
  Clone ID: 700870331_FLI
tgtcaagcttcatgctgaggaagggagtgatgaagtttattgccaggtggtgctggttcccgaaagtgagcaagtgcagcagaagttgcgggagggggaatttgatgctgatggtgaagaggaagatgctgaagctgtgatgaagtcgacgacgccccacatgttctgcaagactttgactgcttctgataccagcactcatggtggattctctgtgcctcgtcgcgccgcggaagattgcttccctcccctggattacagtcaacagaggccttcacaggagcttgtggcaaaggatctccatggccaggaatggaggtttcgacatatatatagggggcagccgcgaagacacctgcttactactggttggagtgcctttgtgaacaagaagaaacttgtatctggagatgctgttctgtttctcaggggtgaggatggagaactgagattgggaattcgtagggctgctcaactgaaaagtggcagtaccttttcagctctttctggccagcaagggagtcctaccagtcttatggatgtggttaatgctttgtctgcaagatgtgcctttagcattcactataatccgagggtcagttcatctgagttcatcatacctatccacagattcgtaaagagccttgattattcttattcagctggaatgaggttcaggatgcgctttgaaactgaggatgctgcagagcgaagattcacaggattaattgttggaattgctgatgtggatcctgttagatggcctggatctagatggagatgcctaatggtaaggtgggatgacttagaagccacaaggcataatagggtttccccatgggagattgagccatctggttctgcttctactgcaaataacttgatgtcagctggtttgaagaggaccaagattggattgccttcagccaagctagattttccagtttccaatgcgattggaacatcagactttggggaatcactaagattccagaaggtcttgcaaggtcaagaaatgttgggtgttaatactacttatgatagttttaatgctcaaagtcaccagctatctgatttgaggaggtgctatcctggctcgaactatcctaggattgctgcaacaggaaatagcattggaatctcacaagtgagttccaatgtttccaacaacggcataggctttagtgaatctttcagattccagaaggtcttgcaaggtcaagaaatacttcctagccaaccatatggaagggccctgtctgttgacgaggcttgtggaaatggtcgctttggactttttgatggtttccaggcgatgagatccagaaatggatggtcttcccatgtgagcaacaattcctcacatttgcatcctcctgttccatctgggcaagtttcatctccgtcatctgtgttcatgttccagcaagctgtcaatccagttttaaactcggattataacaaccaaataggtcaggtgatgggagataaagtccatcagcgagtttcatatgcgtctgaagttaaaggcggaaaatttgtatcaaccccctatgagcctcttctccgtggactatctcaggaaggcacaaattcttttggtctttcaaactttcataatcagctggatagttcacgttcacacgattctgtttcagtactgagagctagtcaagagttggttccctcgtgtaaaagtagatgcagagtctttggattttcattaactgagggtgctcccgttgcaagtaaagaggcgactgactcatctgcagttgcttgtgctggaccttcctttacaagacatgttgaagatgatttccatccagggcattcacttaggagcaaggcagtggcaagttattgcaccaagggtgtgctgcaatattgacttggaaatcttgatgtatgctggtactgatgctggcataaggtagcagaagagaatgtccacagttgttgtacttgtgtgctttgctctagtgacttggaatattgggagactaaaatattgtaactattcgtctaatttagatacttgttaaattggctatgaccacgttctagattctgtattaatcatgtatctacccttcattgacttgtatggggaaaacctctaaacgatgcatgtttatccaccgttttggccatatgaacaaagtaagccaggtggttgtgcataacccttcatttatcttgaattgggcattgattacattagagagcaatagctctcttaatgtttcatgtccttaatgttgtctccatttttactcactgttc

SEQ ID NO: 9766 - DNA, 1626 bp, Glycine max
  Clone ID: 700870423_FLI
gagtgggaaaaagtgcagggagaagtttgagaacctgtacaaatattacaagaagacaaaggaaggaaaagctggaagacaagatgggaagcattacaggttctttcgtcaacttgaagccttatatggtgaaaacagtaaccaagcctcggtgccagaaaccaattttggcagtggtagccttcgtttccacacaagcagccacaataataacccttctcaaacaaatcaagaaatgtttcagtctcagaagcattgtgacagcctaagcctcaccaactccactgatttggacacttcatcatcggatgacaatgatcaaaatagcactggcagggaactcaacaaggacaatgactccatggagaagaggagaaagagggtgagtggaagaagctggaaggtgaagataaaggacttcattgactcacagatgaggaagctggtggagaagcaagaggagtggttggataaactcacaaagacactggaacagaaggaaaaagagagagtgttaagagaagaagagtggaggagacaagaatctgtaaggttggagagggaacacaaattttgggctaaagagagagcatggattgaagcaagggatgctgctttaatggaggctttgcacaaattaacacgaaatgagataatgaagagtactcattctcacgagggtctaatggtaactggaattcaaatccacagtgaaaaccagaatgaagatgggagtgaaatactaaatagcactgctgccagaggtgctgaaagctggccagaatctgagattgcaaggcttcaacagttgagagctgagatggagacaaggtatatgcaaagtgggttttcagaagaggttatgtgggaggaaatagctaccaaaatggcttgttttggttacgaaaggagtgctttggtattcaaagagaaatgggaaagtataagcagcaactatgcaaggagtgccaaggatggaagcaagaagcgcaaggaagactcaagaagttgtttttacttcgataacagtgaccaatcttctctgtataaccaaggaggtgcctattgtgatatcaatgatcaaaggcacgagactgggaggctgcaaacaaatgacggttcttcaccttccaattcaaatgttggaaatgcagttgcgggtgataactgctttcccttcttgatgactgagggtggaaatttgtgggagaactatagcttaaaggttaataaagcatgccaaaaccagtgatgagagtgaaaaaaagtttgacacttgtaagaggcaagaaaatttcacagccttttatcagatgatctcacattatgtaagcaagagctaactgatgagggtcgtttatgtatagagactgatgatgataaggtgatcaatcttattatatttatgggaatcaaggtgaaaaataatgtgttcaagtcacgtacgtaagtttaatgagggagactagacattggcaaaatttcacaggtgagtatgacactaattcaggtgagtttctcttgtagcagatttcttttatgcgtgcaaaatggaatttgcaattttatattacttcacatgttgcatcttcaatgatgtttatatatcattagttgttaaccctc

SEQ ID NO: 9767 - DNA, 343 bp, Glycine max
  Clone ID: 700870518_FLI
caaaaccgggtgtgaagctggaaatacctgacggagctgtgatcgcagacaaggaaattaatggccctgaggacctgtgagagaaagctgatgatgagttttgaaatccatgtgactgtgcaatctttgagtattgacagtcttaaactaaaatttgtgtattgcttctagtttggtaggggtaaaaataagaaggcagtttctactgagcatgtctgaagactaagctttgtatttctcataattttgtttttaaacatttcttacaaggactcaaggaggatccgatcatgtttcctttccatatcatattaagcgtttacgccttcatcttttgttgagt

SEQ ID NO: 9768 - DNA, 1014 bp, Glycine max
  Clone ID: 700870555_FLI
ttcaaatcatgagacaaatctcttggtgtatgagtacatgccaaatggaagtttaggtgaggttcttcatggcaagaaagggggccacttgcattggtacacaaggtataagattgctgtggaggcttcaaagggcccttgctatctacaccatgactgttcaccactcattgtccatagagatgttaaatccaacaacatccttcttgattccaattttgaagcacatgttgctgattttgggctcgctaaattcctgcaagattctggagcatctgaatgcatgtctgctattgctggttcttacggatacatagctccagagtatgcctacactttgaaagttgatgagaaaagcgacgtgtacagctttggagtggttcttttggagcttgtaacaggcaggaaaccggttggcgagtttggcgatggtgtggacattgtacaatgggtgagaaaaatgacagactcaaacaaggaaggagttctaaaagttcttgatcctagacttccctcggttccacttcatgaggtgatgcatgttttctatgtagccatgctgtgtgttgaggaacaggcggtggagaggccaactatgcgcgaagttgttcaaattctgaccgagcttccaaaaccaccaagctccaaacaaggagacttaacaatcacagaatcctctttgtcttcatcaaacagtttagagtctccaaccacggcatcaaaggaacccaaagatcaacatcctcctcagtcgccaccaaccgatctacttagcatttgaattttgaagtgctcagttggggacagggttgtgtttcatatttatttcgtttgggttgtgatagcttatcttatctacttgctttcttcagttttcttttcttcatttggggtagggttttcttttaaggtgttaaatgtttgaatgtttattctctctttaatgtttttgtaatttgtacagtaggattggtggtgggagtatttttcttatataaagtctttgtcttcatc

SEQ ID NO: 9769 - DNA, 567 bp, Glycine max
  Clone ID: 700870562_FLI
gggcctggctatggtgcatctacaggttccacttatgatgcacaaaggggtgctacttatgacactcagaggttgactggttccaatgcatttagaggatctgcttatgattccaagagaggttcggggtatgatatgcagagagcacctgcttatgatgcacctagagctgctggctatgatgcacagtcaagaggggttgctggtcctcatggacatgctcggccaatgaacaatatgccttatggatccacaacaccgcctgctcgtagtggaggtggatatgaacctgctcgcggtgtaaaccctgctaggagatgatgaccttgagtcttgagagaagccattgatggcaatcacaaatcaaatcattcaaatctgaatggttgaaacttctggttgtcctaccataatttaatgtgcatagtggacgagggaaagaaatgtttattaaatgcatagtcgataatgaaaaatacattctcactgcgtatgattgttgtacatgagtttggtaaaacagggtacaatctacccctaccgattaattgagtacttttatttggg

SEQ ID NO: 9770 - DNA, 2289 bp, Glycine max
  Clone ID: 700870615_FLI
caatttgtcgggggagattccggttgagataggcgagttcaaacgcctcgaggctctgtctttgtacaggaacagattgataggtcctattcctcagaaggttggttcctgggcagagtttgcttacatcgacgtgtcggagaatttcttgacggggacgattccgccggatatgtgtaaaaagggagccatgtgggcgcttctcgtgcttcaaaacaagctctccggcgagattccagccacctacggcgactgtttgagtttgaaacggttcagagtcagcaacaactcgctctccggcgccgtccctgcctcagtatggggacttccaaacgtggaaataatagatattgagctgaatcagttatcaggttcggttagttggaatataaaaaacgcgaaaacactggcttcaatattcgccaggcagaatcggttgtccggtgaaataccagaagaaatctcaaaagcgacgtcgttggtgaatgtggacctgagcgagaatcaaatctcggggaacattccagaaggaatcggcgagctaaaacaactaggtagccttcatttacagagcaacaagttatcaggttcgataccggaatctctgggttcctgtaattccctcaacgacgttgacctatcgcgaaattcactctccggagaaatcccttcctccctgggttctttccccgctttaaattcactgaatctttcagcaaacaaactctccggtgaaatccccaagagtttagctttcctcagattgagcctatttgatttatcatataaccggttaaccggtccaattccacaagctctaaccctcgaagcttacaacggaagcctctcgggaaaccctggtttatgcagcgtcgacgcgaataactccttcccgcgttgccctgcttcctctggcatgtcgaaggacatgcgcgcgctcataatatgcttcgtggtggcgtcgattttgctgctctcgtgtttgggcgtttacctgcaactcaagaggaggaaggaggagggagagaaatacggggagcgttcactgaagaaagaaacgtgggacgtgaaatcgttccacgtgttgagtttctcggagggggagattctagattccatcaagcaggagaatctcataggaaaaggaggttccgggaacgtgtacagggtcacgctttccaacgggaaagaactcgcggtgaagcatatttggaacaccgatgtccccgccaggagaaagtcgtcgtggagcagcactcccatgcttgggaataagttcgctgctgggaagtcaaaggagtttgacgcggaggttcaggccttgagctccataaggcacgtaaatgtcgtgaagctttattgcagcataaccagcgaggattcaagcttgttggtgtacgagtatttgcccaatgggagcttgtgggaccggcttcacacgagtaggaagatggagcttgattgggaaaccaggtatgaaatcgctgttggggcagcgaaagggttggagtatttgcatcatgggtgtgagaggcccgtcattcatagagatgttaagtctagtaacatattgttggatgagtttttgaaacctaggattgccgatttcgggcttgctaagcttgtccaagccaacgttggcaaggattcctccactcgtgtcattgccggaacccacggctacattgctcctgaatatggctacacatacaaggtgaacgagaagagtgatgtgtacagctttggggtggtgttgatggagttagtaactgggaaaaggccaattgaaccggagtttggggaaaataaggacatagtgagctgggttcataacaaggcacgaagcaaagaggggcttaggagtgcggtggattcgagaattccggagatgtatacagaggaaacttgtaaggtgttgagaactgcagttttgtgcacggggactcttccagctttgagaccaaccatgagagctgtggttcaaaaacttgaggatgctgagccttgtaaattggttgggattgttattagcaaagacggcagtgaaaagaaaataggagtcaatgacaagtaatgtattgtattctatactccatagtttttgacaccagattgaaggttatggatcatgaaatggaaccaaccatttctacgagttagctagaattaatgtaaattttgctggaaagagggaacacggtaaaatattagtcatggcttctttaatgtgtattttgaagtgagaagacagtgtagtaaaagactataagggtctccatcaataaaagg

SEQ ID NO: 9771 - DNA, 1391 bp, Glycine max
  Clone ID: 700870650_FLI
ctcagttggggacttcaatttagattccaagtggcttgtagatcccaaacaactatttattggtccaaaaattggggagggtgctcatgccaaagtatatgaaggaaaatataaaaatcaaaatgttgctgttaagattatcaacaagggagaaactctggaagagatttctaggagagaggctcggtttgcaagagaggttgctatgttgtcgagagttcaacacaaaaatctggttaagtttattggggcttgcaaagaacctgtcatggttatagtaactgaacttctattgggtgggacattgcgcaaatatctcttgaatatgcgtccaaagtgcttggatatgactgtggctattggatttgctcttgatattgcccgagcaatggaatgtttacactctcatgggatcattcaccgtgatcttaaacccgataacttgatcttgacagatgatcataaggcagttaaacttgctgattttggtctagccagagaagagtccttaactgagatgatgactgctgaaacaggaacatatcgttggatggctccagaactatacagcactgttactctaagacaaggtgagaagaagcattacaaccacaaggtggatgcctacagctttgcaattgtgttgtgggaactcatccataataagttaccctttgaaggcatgtctaatctacaggcagcatatgcagctgcttttaagaatacaaggcccagtgctgaagaccttcctgaggatttagctctgattgtaacttcatgttggaaagaggatccgaatgatcgaccaaatttcagtcaaatcatacagatgctccttcgatatctctccaccgtttcaccaccagaaccggttgttcctctgcggattacttcatctgagaacgcggtgttgccaccagaatctcctggtacaagtgcattaatgcttggaagagatggctctagagaaaccacaacagccaaagggtttttcttctgctttaaccagtgttactgaggcctcaaaacacatcatttggcgtttgtccttatcccagataacagttaggaaaactaaataaaccaaatttaccaattgtaacaaccagaatcttgataagaaaatgtttattgtcaaatagtgagtttagtagcaattagtaactaagaaagtgcctttgttcacagcaagagtggctggcaagctctttttaacatttatggtaaccttcttctgacttatatccagaaaattttggggttaaggttgctgagatgtaatatcattgtaaagtaaggttcatccaaaggcctttacctctttcttgtttatgtatgtggcatgcataattaaaagtgaaaaggatgaaatgtttacatttgctttcatg

SEQ ID NO: 9772 - DNA, 1317 bp, Glycine max
  Clone ID: 700870679_FLI
atcaccactagcgaacacttccattgtttttatctcacaggatcgatcgatatcaccagcatcaccatggcagaggtggcgccgccgaagaaggaaaacccgaaccttctcctggggcggttcgagctcgggaagctcctcgggcacggaaccttcgcgaaggtccaccacgcgcgcaacatcaaaaccggagaaggagtcgccatcaagatcatcaacaaggagaaaatcctaaaggggggtttggtctcccacataaagcgcgagatctccattctccggcgcgtgcgccaccccaacatcgtgcaactcttcgaagtgatggccaccaagaccaagatctacttcgtcatggagtacgtgcgtggcggcgaactcttcaacaaggtcgcaaagggaagattaaaagaagaagttgcgagaaattactttcagcagttagtttccgcggtggagttttgccacgcgcgcggcgtgttccacagggacctgaagcccgagaacctgttgctggacgaggatgggaaccttaaagtctccgactttggtctcagtgccgtgtcggatcagataaggcaggacgggctgttccacacgttttgtgggacacctgcgtatgttgctcctgaggtcttgtcgcggaaaggctacgatggtgcaaaggttgatatttggtcttgtggggttgttttgtttgttctgatggccggctatttgcccttcaatgaccgtaacgttatggctatgtataagaagatttacaagggtgagtttcggtgtcccaggtggttttcttctgaacttacaagacttctctctaggcttcttgatactaaccctcagacaaggatttctattcctgaagtcatggagaatcgctggttcaagaagggtttcaagcagattaagttttatgtggaggatgatagagtttgtagttttgacgagaaactgttacttcatcatgatgatgatttggcaacatcggattctgaggttgagattaggaggaagaatagtaatggttcgttgccgaggcctgcgagtttgaatgcgtttgacatcatatcgttttctcagggctttgatctatcagggttgtttgaggaaaagggtgatgaggcgaggtttgtgtcatctgctccggtgtcgaagattatatcaaaattggaggaggttgctcagttggttagtttcagtgtgaggaagaaagattgcagggtgagcttggaggggtgtagagaaggtgtgaaggggcctttgactattgctgctgaggtttttgagttgacaccttccttggtggtggtggaggtc

SEQ ID NO: 9773 - DNA, 1320 bp, Glycine max
  Clone ID: 700870685_FLI
gaaattttgaatgctatcacggagcagagtaaacttctgcagcatgctacaaccatatatctacaccatacaataggtgactttgctgaggcattggcagcaaaaatgcctggaaaccttaaggttgtttattttgtaaattctggttcagaagcaaatgaattagcaatgatgatggcccgtttatatactggtaatctcggtatgatttctttgagaaatgcatatcatggggggagttctagtacacttggtctgactgctctgaactcgtggaaatacccaattccagagggccatgttcatcatgttatgaatccagatccatatcatggagcctttggtacagatgctgctagttatgcaaatgatgtccaagaccatattgactacggaacttcgggaaaagttgctggatttatagccgaatcaattcagggagttggcggagcagttgaactggcaccagggtatttgaaacttgtttatgacattatacataaggctggtggtgtctgcattgccgatgaagttcaaactggttttggccgaacaggaagccattattggggatttgagacacagggtgtcattcctgatatagttaccatggcaaagggtattggcaatggtctgccattgggagctgtagttacaactccagaaattgcaagtgtgatggcccaaaagattcaatttaatacctttggtgggaaccctgtctgctctgctggtggacttgcagtgcttagggttcttgataaggagaagcgtcaagctcactgtgctgatgtcggatcttatttgcttgaacgtttgagatttctcatggaaagacatgacatcataggaaatgtcaggggaaggggactaatggtaggcttagagttggttactgaccgaaccaacaagacacctgcaaaggctgaaactgctgttgtgtttgaaaaactcagagaactcggtgtgctagttgggaaaggaggacttcatggcaatgttttcaggatcaagccaccaatgtgtttctccaaagatgatgcagattttcttgtggatgccttggactattctctatctaagttgtgagctgattgtgcatcttgctagcatgaaatgaaatcttcgacaatggagtcaaattactacaagccaacaacaaaaagctcatttagttcatagaaatcaccatgaataatgtaatgttctccccgttgagaagagagggggtttccctccctttttgctgaacattataagttgaatgctgactattattgtatataaatttgggtttcatgacatcaaaaagttgcattc

SEQ ID NO: 9774 - DNA, 997 bp, Glycine max
  Clone ID: 700870726_FLI
gtattctatagctaaaatttattttagaataatatatttaaatcattacattgggaacttcacagcttgcagtttttttctagactgcagatgatgtcgattcatttatccattttcccacttgaaatatattgattttttattttttatatttcaattaaatggaatacttggcatttggccaaatattgagcattaattactaaaagactgcccttataaaaataaagggtcttaaggctgtgcagagttaatcttgatcatttaatcttatatcgatgatcaacatttgctattctcacatctgacactttcccaatgcacttccaatgtgtttagttattgtttcctttattcccttctctcatggaaaactaatttttatccgtttaaccattgttcttctgtaggtatattaaactatatacgtcctctttacctggacatgttcattgacttattggtgttcaaataacttccttgtcttatgttaaactttctcctgatgcatatagactttgcaagagacagcaagatttgaagttgataaaatgatgcttacagatgcaccacttttatttcctcctgggcagttggccttggctgctttacgcaactcaaatgcattccacagagtcattgactttgataggttagaaaatacaaaagtccttctgagaaggaattgaagcatatcaaccgaaaactgaagtcttgttggggtcatcactctcatgacgagggcaagaagcgggagaagaaatcaaagcacaagtccaaaaagagctcaaatgaagctcaaaatatgccatctattgcctagctcatttcatatggatggcaatttttttttgtttctatttggatacaaaaaatgactcggtcagtggccaaaggaaaaggaatcttttgaaaactccttccgctggcttactagtgagtctgattttgttgcttcacttatgtcttctttgttcccaaatgaacttattgcctg

SEQ ID NO: 9775 - DNA, 849 bp, Glycine max
  Clone ID: 700870762_FLI
aaggattcggctccggaggatcggttatttgtagacaaggcattgaaagcagaggtggagaccctgggaagcataagacacaagaacattgtgaaactgtactgctgcttctccagttatgactgcagccttttggtttatgagtacatgccaaatggtaatctttgggattcactgcacaaaggttggatcctcttggattggcctactcgttatagaatagcactggggattgcgcagggtttggcatacctccaccatgatttgcttcttcctattatccaccgagatatcaagtcaactaatatcctgttggatgtggataaccagcccaaggttgcagactttgggattgccaaggttttgcaagcaagaggaggaaaggattccactacaactgttattgcaggaacatatggttacttagccccagaatttgcatattcatcaagggccaccaccaagtgcgatgtctacagttatggggtgattttgatggaactgttaactgggaagaagcccgttgaggcagaatttggagagaacagaaacattgttttctgggtttccaacaaagtcgaaggcaaggaaggggctagaccaagtgaggtattagatccaaagttgtcatgttcatttaaggaagacatgatcaaagtgttgcggattgctattcgctgcacctacaaagccccaacaagtagaccaaccatgaaggaggttgttcagcttctgattgaggcagagccacgcggttccgattcttgcaagttgtcaaccaatgatgtatcaaatgtccccgtaataaagaaaccatatgaattataattataataatttgagtagctt

SEQ ID NO: 9776 - DNA, 2210 bp, Glycine max
  Clone ID: 700870833_FLI
tagaaaaataaacgtatggtataaaatcataaaacgtatatgtaataattattttttgccattttgaatatatatatatatatatgtgtgtgaaagaaaaaaatgtaataaataacttgataagaaagaaaaatagagataaaagaaatgaaataaaaataaatgaatgtatggttataattatttttgcacaccatatttcactttttttttcacgttatttcatagtttctttctgtcactatatttttgtttttattttttacattctctctttttatcgtatcacatcaagtcatcaattatttcatcgatccattgcctctcatgtatttttcattcccgcgtgctcattgaccgcgacattgtttgatagattcttgcaaaccattggctccgatcaaatagtgacagctagcaataaactattgcccgtgacttaaaatctaatcaaaatctttactaaagtgcccgactttgagtctattttattaaataagttttgacatgtacagggcatgatgaacaactgctggttcagagtgaaaaccaatgtgtgcaggccccacaagggtgagataggtatagtgtttgaacaccccacccaaccaggcaaccaatccggcggatggatggcaaaagaaaaacacctagagaaatcatctgagtccaacccaaccctcaagaagagtgtctcctccccattcatgaacaccacctcaaaaacctataccatgtctgaagtcagaaggcacaacaacgccgattcggcttggatcatagtccacggtcatgtctatgattgcacccgcttcctcaaagaccatcccggtggcacagacagcatcctcatcaacgccggcaccgactgcaccgaggagttcgaagccatccactccgacaaagccaagcaaatgcttgaagactaccgaatcggcgagctcaccaccacctgctacaactctgattcttcatcgtcaaacccctccgtgcatggcagctccgacaccatccctttgacccccatcaaggaagtgattacaccaatgcgaagcgtggctcttaacccacgcgagaaaatcccatgcaagctcatctccaaaacctccatctctcacgacgttaggcttttccgctttgccctcccctccgacgacctactcatgggtttgccagttgggaagcacatattcctatgtgccaccgttgacgagaaactatgcatgcgagcctacactccaacaagcagcgttcacgaagtgggatacttcgacctcgtcgttaaggtttacttcaaaggggtgcaccctaagttccccaacggtgggatcatgtctcaacacttggactctctccccattggttctgtcttggacgtgaaaggcccacttggccacattgaatacactggcagaggaaacttcctcgttcatgggaaaccaaggtttgccacgaggctagccatgttggctggtggcacaggaatcacacccatttaccaagtggttcaagccattctaaaggatccagaggactgcaccgagatgcatgtggtttacgcgaaccgaaccgaggatgatatattgctgaaggaagagcttgatgagtgggctaagaagtatgataggttgaaggtgtggtacgtgatacaagaaagcataagagaagggtgggaatacagtgtgggattcatcactgaaagtatcctgacggagcatattccaaatgcatctcctgataccttggcattgacttgtggaccaccacctatgattcaatttgcagtccagccgaatttggagaagttgggctacgacacccagaataacttgctcgtgttttaggggactaaactagaatacattgtatgtgtatatagtagtttattgttatatataaataatggattctattagctgcttcgtttcaagatttttttatgtttcaatttttaaataaaagtgtacatgggacagctagctagctacgcaggtttacttttcctcgtcaacttttgatgtagacaagtatgtcaattattttgactacttttgcatgtataaataaataaataaaacagtgtgcaactatcactttttcaatttatttactctgaatcaaaggcattacaacattatgtcattaatttaatgacattttatatgaataaaatacatattacaaggcacgactcgtacctttcattctat

SEQ ID NO: 9777 - DNA, 994 bp, Glycine max
  Clone ID: 700870883_FLI
aaggttgctttagtctccgcaattttctgcttgcttcttcacttttttttttcctctgtctcctcctcaatcttcattgtcctgttctttcccttggtgacaaaccaagactaacacacacagaacatagcttgtgttggtgaggtgagaagataaagaaagaatggcatttgcaggaacaacacagaagtgtatggcctgtgacaaaaccgtttatctggttgataagttgaccgcggataaccgagttttccacaaagcttgcttcagatgccatcactgcaaaggaaccctcaagctgagcaactacaactcttttgagggagttctttattgtaagccacactttgaccaactgttcaaaagaacagggagccttgacaaaagctttgaaggaacaccaaaaattgccaagccagagaaaaatttggaagagaaacctgcagcagccaaagtctcaagtatgtttggaggaacaagggacaaatgtgctggttgtcagaaaacggtttatcccactgagaaggtgactgtgaatggaaccccttaccataagagttgtttcaaatgctgccatggagggtgtgttatcagtccttccaattacatagcacacgagggaaaactctactgcaaacaccaccatgtccaattgatcaaggagaagggcaatttaagccaacttgaaggtgacaatgagaagagtgcaactaatgggaaaatcaatggtgaagaagttgccacggagacatgatgaaagagtcgagtctcagaattgtactttctcaagttccatatttgtgcaccatatgtttctgctgtctctcatgcttttaccattactttgcagtccgggaagctctttacccgtgacaaatatggtattcaattttttgttagttgaactgtgtggatcttcatcatctgtttttggttgttgtgagcgtttgattcagaatgtgtgatttagaagtacatgctactgcacttcttg

SEQ ID NO: 9778 - DNA, 1272 bp, Glycine max
  Clone ID: 700870907_FLI
tcgcaatcttaggtcgcttcagacgctcttgatgtctcacattctcccgacgcgaatcgcctctcaccactggccctccgacgacctccgccaccgcactctctccgatcaccgcctgcatttggcctccaagccctccggccatagaaccgtcgactccgccgagatcctccgcgccgacgacgtcctccgccccgacggcgtcatccacggcatcgagcgtctcatcgtcccccgatccgtacaggaggacttcaaccgccgccgcaacctcgccgccatctccgccgtccttcccgagggagcgccggaggtcgatccccgtactcaccgcctcaagaagcccgctcccgttcccgccggcgcgcctccggtcctcccaatctacgacgccatggcaccaggcccatccctcgcgccggcgccggcgccgggaccgggaggcccgaagcaccacttcaacggcgagcgccaggtcaaggacttcatccacacactcttacattacggaggttacaacgaaatggctgatattctcgtaaacctaacgtctctggccaccgaaatgggaaggctagtttcagaaggttacgttctcaccgttttggctccaaacgacgaagccatggcgaagttaacgacggatcagttgagcgaacctggcgcaccggaacagataatgtattatcacattattcctgagtatcaaaccgaagagagtatgtacaatacggttagaaggttcggtaaggttagctacgatacactgcggttaccgcacaaggttctggctcaagagtctgacggctccgttaaattcggtcacggcgattcctccgcctacctgtttgatcctgatatttacactgatggtaggatctccgttcagggaattgacggcgttcttatccctcctgaagaagaagaagaacgcactcgccgcaccactccacttgttaaggttgctgctcctaaaccaagaagagggaagttgatggaaatcgcttgtagcatgtttggatcttttggacaagtctgccaatgaaatcgcattctcaactaatcacaaaaataataaagagtgaatgtatgtaaactcgaagaatgttgtagagtagtcatttcaatacaaaggatggatgcatggtgaatctataaacggagagcgagcgattacacggaagataacaaaaacaaattttctgtcattttgcttcatactgtaattacataccatttttttattaaattttattttatgttgattctccg

SEQ ID NO: 9779 - DNA, 565 bp, Glycine max
  Clone ID: 700870920_FLI
agagattgcaaataaacgacggaaaaccatgtcacaagttgctataaattggtgcatatgcaaaggtacggttccaattcctggagttaaaacaattaaacaagcagaggaaaatttaggtgctcttggttggcgcctctcctcagacgagttgcttcagttggaggatgcagcaaacgaatcacctcgcaggatgatccaaaacattttccaaaccagataaaacctgtggcgagacctcagcactcggttcgaaggaatgcatacttttcactcaatgatggtcactggtttgtatcatctggtatcatgaaaggcagagagcaaacaaccttgaccaggagaattgacaacgtaccactctattgtggcacatgggcttaaaactaatgcgaagagtccgtgacagtgatggtgcaacgtagttttggataatctcgttgtcggataatattgctttattgttaaaaattatactgacgggtagaaatgtacaatgaaatgattctatactgaccaaaagccacgcttacattcacaaaaattaaaaaaatcagttgctttc

SEQ ID NO: 9780 - DNA, 2202 bp, Glycine max
  Clone ID: 700870927_FLI
gtgacaccaagtgaaccccagataagagagatagctttgtggttgtctgagtaccatatggattccacaggctttagtacagatagcttgtttgatgcagggttcccatcggctctttctctgggtgatgttgtgtgtggaatggcatctgttagagtaactgcaaaagacatggtattttggtttcggtcacacactgctgcagaaatccgatggggtggtgcaaagcatgaggctggagaaaaagatgatagtaggaggatgcatccaagatcatcattcaaggctttccttgaagttgtgaaggcaaggagtttaccttggaaggaatatgaaatggatgctattcattccttgcagataatactgagaaatgcattcaaagaagataccgagagtttggatttaaacgcaaaagcaattaatacaagactaagtgatttgaagattgaagggataaacgatttgaagattgaaaggatgcaggaactggaagcagtgacaagtgagatcgttaggttgattgacacagcaacagtgcctattttggccgttgatgttgatgggctggtcaatgggtggaacataaaaattgctgagttgacgggtcttccaattggtgaagctactggaaagcatttactcacacttgttgaggattcttcaactgatagagtcaagaagatgcttaacttagcactgctaggtgaagaagagaagaatgtccaatttgagatcaaaacacatgggtctaagatggattctggtcctattagtttggtagtaaatgcttgcgcgagcagggatcttcgagataatgttgtcggggtttgttttgtggcccatgatataactgctcagaagaatgtcatggacaaattcatccgtattgaaggtgattacaaggcaattgtacagaaccgcaatccattaatccctcctatatttggcacagatgaatttggctggtgttgtgagtggaatccagctatgatgaagttaactggatggaagcgagaggaggtgatggataaaatgcttttgggagagatttttggcacccagatggctgcttgtcgcctaaagaatcaagaagcttttgttaatttgggcgtcgtacttaataaagccatgactggttcagaaacagagaaggttccttttggtttctttgctcggaatggcaagtatgtagaatgcctgctttctgtgagtaagaaattggacgtagagggcctagttactggggtcttctgcttcttacagctagctagcccagagctccaacaagcattacatattcagcgtctatctgagcaaactgcttcgaagagattgaatgcattaagttacatgaaaaggcagatcaggaatcctttgtgtggaattgtattttcccggaaaatgttggagggtactgacttgggaacagaacagaaacaacttctgcgcactagtgctcagtgccagcagcagcttagtaaaattcttgatgactcagatcttgacaccatcatagatggttacttggatcttgagatggctgagttcaccctgcatgaagttctggttacctcccttagtcaagtcatgacaaaaagtaatggaaagagtatccgaatagtcaatgatgttgcagggcatattatgatggaaactttatatggtgatagtcttaggcttcagcaggtcttggctgactttttacttatttccatcaatttcactccaaatggaggtcaggttgttgtagcaggctctctaaccaaagaacagttaggcaaatctgtccatcttgttaagttagagctcagcataacacatggtgggagtggggtaccagaagtgttactgaatcagatgttcggaaacaatgggctagaatccgaggagggtattagcctactgataagcagaaagctgctgaagctgatgaatggagatgttcgctatctaagggaagcaggcaaatcagcttttatcctctctgctgaacttgctgcagcccataatttgaaagcttaaaagttttggaaaaaagaataaaagatgatgcaacagcaacacaatctgttttctacatcataaagagaacggagctagaaattaatttgcatccaatgtaactctaatttgttcccacgtttctttaactgcttcttgtaatgtacgttgtagatatgtatgattaatcttcttccc

SEQ ID NO: 9781 - DNA, 1331 bp, Glycine max
  Clone ID: 700870931_FLI
caccatcaatactaatacgagtgtcaggggttgtaagtgctgtaatgggaggattcatgatatgcatcataatttgttgttttagatacaagttattaatccaaccaatcaaactttgttcgaccacaaagagtgatcaagacattgaagcattcttaaaaaataaaggagctgtagcacaaaaaagatacaaattttcagaagtcaagaaaatgaccaattcctttaaagttaaactgggtcaagggggttttggtgccgtatacaaaggacagctacccactggttgtcctgtggctgttaaattattgaactcatccaaaggaaatggtgaagaatttaccaatgaggttgctagcatcagtagaacctctcatgttaacattgtgacccttcttggattttgtttgaaaggccgcaaaaaagctcttatctatgagtttatggccaatggttcgttggacaagtttatctacaacagaggaccagaaaccattgcatctttgagatggcagaatttgtatcaaatctcaatagggatagcgcgaggattggagtacttgcataggggatgcaacactcgaattctacattttgacataaaaccacataatattcttttggatgagaatttttgccccaagatatcagattttgggctagcaaagctctgtcccagaaaagagagcattatttccatgtcagatactagagggacactggggtatgtagctccagaaatgtggaatagacatttcggtggagtttcacataagtctgatgtttatagctatgggatgatgttgctagaaatggtaggagggaggaagaacattgatgctgaagccagtcgcacaagtgagatatacttcccgcatttggcatacaagaggctagagttggacaatgatttaagaccagatgaggttatgaccacagaagaaaatgagattgcaaagagaatgaccatagtgggtttatggtgcattcaaacatttccaaatgatcgacctataatgagtagagtgatagaaatgttggaaggcagcatgaattccttggaaatgccaccaaaacctatgctttcttctcctactagatcggcaacagagtcttcctcttgaaattagttacattgcattttgagcaaatctgaatggatcactgtacatatttgttttgtactttttaatcgtcctgaaaatcaaatggatctcacatatgtgataaattgccgctacattgattgcaaaaatcagaccaatttcttgtaacaagccaaatcaaagtagataatactgaaaatagatttacattctagtcttattagg

SEQ ID NO: 9782 - DNA, 1624 bp, Glycine max
  Clone ID: 700871050_FLI
ttttgctggtgatgtcttgtcagtttgctactgtaatctgacaatatgcctttcaatcatagctacatccttcggccaatctcagttgcaacctttgtttcctttcatggaggctttgcctgatgaaatgcatgttgctgttccctttcttcttagttttatcatgggtgatccagtgaagatggcatcagtcagtattgaaaataagcttcctcctgccaaaaaaattgaacaattgtcatacaaccttactgcattgctgccgtgtcttcctgagctggctgatattataccaagggatactcttctttggaagctgaaacttctcaaatcagctgctgcatatgctaattcgcgtattcatgctgttgaagctgaagttcttgtgcttgctaggataacatgcttcccagcacaaacgaagctcaaagactcgtgggattattgcaaaactgcaaagttcgtgtctttaaggacagtggacacacacttctcctggaagatggcattggtctgctgacaatcatcaagggaacttgcatgtaccgtcgttcaaggaggcatgatttggtcagggatttcatacctcccagtatgacagaattcagatatgcaatggatcaagtagttggatcatttcgttctgctactggatctgtatttttctcaaccttggaggatggaaagattgtaaaaggtctctctggtgttctagatgaaggtcctgtcttatatgttgggtatcacatgttgttggggttagagcttatctcacttacagatggatttttaagtgagaagggtattgcacttcgtggaatagcccatcccgatctgtttaggcctgaagtggagtcttggtcttctgagttttctatgtttgattgggtgaagatatttggtggggtgcctgtttcagcaagcaatattttcaaattactttcaacaaaatcacatgttctcctatatcctggtggtgcgcgtgaggctctccattataagggggaagaatacaagttgatttggcctgatcatccagaatttgtgagaatggcagcacgatttggtgccacaattgtgccatttggagctgtaggtgaagatgatatagctgaattagttcttgactacaatgacttaatgaagatccccatagtcaacgatcaaataagaaatatgaaccgtgactcagttaagtttagagatgaaacaagtggcgaggtggcaaaccaaaatctctcttttccggtgcttctaccaaagataccaggtcgcttttactttctatttgggaagcccataagaacaaaaggcatggataagatgctaaaagacagagaaagtgccaaccaaatgtacctgcagattaagtcagaagttgaacacaatttaaattacttgatcaagaagagggaggaggatccatacaggaacttcatcgataggaaaatgtatcagatattttatcctcctgaaactgattcaaccccatcatttaatccctgaaaaatgttttgatatatataatactgatttttatgtaatcataattatttttaaacaggtacatgtacatgtacatggccattattctaataaaatatggtgctttctatgtaccctt

SEQ ID NO: 9783 - DNA, 993 bp, Glycine max
  Clone ID: 700871114_FLI
aacctattattgaagagccaatcatggatatggatcccatgacagccaccatctccatgatatcttgtggggaagatgtctcctcacagggactaaaatccactgatattgatattcttcaaaatgatcagtttctgcatgaggtgttctatgaatgtgaaaaggatctcttagaaaaggcagcaatagagccaccattctctgagattctggaaatcaaggttcctcttctgaacattgatgagaacacaattcaagaaaacaagctgcttcctgacatgcaattagcaaagagtgtcagctcaggaagtttgagctcaatggactggatgcgtggagctgcaatgaagcctgctttcattgatatccctgcaatagatttcaatgcagattatggcatgcggagatcatttagcgaaggagatataaagactcttggtaatggtaacatgaacatcgtccaatcaccccttgagaggcccttgcttatcagcaactgcaccagtgaggaacgctttcaaaagctctcaagatacaggaataagaggacaaagaggaattttgggaggaaaatcaagtatgcttgcaggaaggctcttgctgacagtcagccaagaatccgtgggagatttgcaaggactgaagagtctgatgtcaagagggaatgaatgacttataactgatttagtaggaagaaagtagagttgagtagctatatctgatcaagctatatggaaaaactcagcagtaatatgtgattagaacttatgtggggattctctgtatgcttgagcagatatttgctgaataaaccaggccccaaacttcttggggtagttcatctcttatctattgtattaacgcccctatagacggaaataaccttccagatatgtatataggtttgttgaataatggaaagaaaaagaaaggattttactatgttcatatatatgatgaaatgacaaggtaacatcaataatttcgttctct

SEQ ID NO: 9784 - DNA, 500 bp, Glycine max
  Clone ID: 700871174_FLI
gtactttcatgcattttactttaaaaaattcttttattcacttcttttccaattttgtttttttttctttctcaaaatttcatcttacgtggtagggcaaaatatggcattgatgagatgtgccgcgatcaatggaattgggctagcaaaaacccttatggctatggagatcaggaggattccaccgtttaactatatatatatatagtgttctctttgggttcttttccgaactcccccacaccgtagtccgtaggtcttgtgaatttagttttctcaaaagcttttctttagtccgtaggtcaaggtgacaagtacttgtattattatgattcatagttacatggtaaataagtagtggtttactgcactgtaatttaatttaaaggttctataggttccttcttacaggttattgattattagattcgaatactctcatgttccacatgagcagcatcctgttttgtaaatctgaatcacatgtttgtttaaagtgt

SEQ ID NO: 9785 - DNA, 1473 bp, Glycine max
  Clone ID: 700871178_FLI
gttccattatcgggtctgagttcaatggagagatttcacgaagtttgcaggtactgtcgaggagatgctatgcgtcagcctcagatctccccccacaccaggaaattggaatgccttctctctcacctacaatgacagagggtaacattgcaagatggttgaagaaagaaggtgatagaatctctcctggtgaagtgctctgtgaagttgaaactgataaagccactgttgaaatggaatgtatggaggaaggttttctggccaagataatccgtggggatggggcaaaagaaattaaagttggtgaggtaattgccgtaactgttgaagatgaaggggatattgcaaaattcaaagattaccaaccttcagcatctgaaccaagtgaaccccctgccaaagaaacatctgccccacctccaccaaagaaagaagaggtggtagaggagcctgcccgagaacctgagccaaaggtttctaaacccagtgcaccaccttcatctggagatcgcacatttgctagtccccttgctcgaaaattggctgaagagaaaaatgtacctctctctagcattaaaggaacaggacctgaagggctcattgtcaaggccgacattgatgattacttggcttctggtgctaaagaagtttcggcatcctccaaggccaaggttgcagcagatgcagcattggattataccgacattcctgtctctcagatacggaaggtcacagcttcacggttattattatcaaaacaaactatccctcattactatttaacagtagatacatgcgttgataaactcatgagcttgcggacccaactcaattcattgcaagaagcctctggtggctctcgcatatcagttaatgaccttgtaatcaaggctgctgctttggctctccgtaaagttcctcaatgtaacagttcatgggcaaatgattatattcgccagtatcataatgtgaatattaatgttgctgtgcagacagataatgggctctttgttccagttgtcagggatgcagacaagaaaggcctctctaaaataggggaagaggtcaaacaattggcaaagaaagccaaagaaaacagtttgaaaccccaagaatatgagggaggtacatttacagtgactaacctgggagggccatttggtgtcaaacaattctgtgcaatcatcaatcctcctcaggcaggcattcttgccgttggatctgctgagaggagggtcgttccgggttcgggtgctgaagaattcaagtttgcttccttcatgtctgtgaccctcagctgtgatcatcgtgttatagatggtgcaattggtgccgaatggttaaaagcattcaaaggctatattgaaaatccagagaccatgttgttgtaagaataaatagaaggctcccatgacgtactaaattcctttcaagtcattctaggcaggggatgagattttgttcacctgggta

SEQ ID NO: 9786 - DNA, 1673 bp, Glycine max
  Clone ID: 700871314_FLI
ctcgtcatggagaagttattggaaaagctgcgctgtcgcactttgacagttaccaacgggtctgaagctatacggtatgccatgggcgaagtcaaatttgatgtcatcatgatggagtttcgactacctcaggtcaacggcgctgacgttgctcgtatgatacgagatacgaagaatgccaacacccataccccgatcgttgctgtcactggatatctcaaggaactacaggcgcctcactactttgatgcactcattgaaaaaccacctacagtcgccaagcttacggatacgctgagtaggctttgtcagtggaaagcgccgccgccgggctggacaccgaaccaagtttacccatcaatgatgccctcgggacttcgacaggagtcttcgcgtcaagaagatagccccacaacctcgaactcttccggctatccacctgtgccttctgccagctatcgaggctctagccgcgaagattctattagctccagcttctttggcgacaatgacagtcgtgcaggcgaggatatgtcggtgagagtgcacaacgccgacgattggagggagcgcgacatcgcgcgagccatgagtggtttgggcatctcggatgacgcagctaatgccgatcacaaaggagctattcctaaccgtatcggtgcacctgacctaccccacggagaatctgcaccagccgttcttgaagaggcaacgatccgccgtcagcgatcggcggagcaagtaggcgccaaacgtcgcatattagagacacgtaaacacgagtcagcagaatctggagatgacgaggacgatgagttaggtcacgcccctgttcgcacacgcagtccaaagacaagaccgaaatccacgtccaagcttggcattgagatgatgcgaacaaacagcagaggcagtgtgatttctgttgaagatgttgggcaagcggactcggcattaccctcatctccacctccaatgatcacagaagatcccgctgcggaggaacatgaaagcaatcttgacgcacccaccgtcgctccggtgcttcttacaccgccagtaatgttccctgaagaacctggcgacgatgttgccgactttgtcattgaaacacctaagtcgcacaaggatgcaactagtccagatccagatcctacacccaaagcgaagtctgccagaacaccagactctgaacccacaggactcgacagtgcgacagacacctaggcggtgccacgcctggcgtttggtacctgttcagtaaattgtacatttgatttcaaagcttaaacacacttttcgcagcaaggcgttggcggtgtgttcactgggtagtgtaccgggaaagtgccattccagcaagcccttgatgttatttcttatcctccacgctctgactagctgcccttagcagccatttgtgggctgtgtcgagcgcttctttttccaaattatgtctacatactcagcgttttctttcctttacacgtcaggtgtgagtttacgcttcgagagggggaactctcatcattcgctttcaacattgttacccagcccacacacgaagtgctcgttgggtccagactgtcgctcgtttctcagatcctgcttgtactaagtgtactactattgaatcaaatatctagaggccctcaggctctcgtgcattctac

SEQ ID NO: 9787 - DNA, 555 bp, Glycine max
  Clone ID: 700871346_FLI
ccttgtggctggaagtcgtggtctttacactggaaccagagatattaatgctattgcaaacagcattgctgctatgggattagtatcactgtctggggtatccaaggtagacagtggagtctattcggagctatgtgaaaactatgggaatttggaagcagtgaaaaattccaacgattcaggtggtggtgcctttttggatgatgagggcggatcttctttggattcgaagcagtagtgtagtgatgaatgcaattgtttttctttttttatttatgtagatctcttttgtttagcaaatgtagatatgcgctgtagcacttttgaatggttttaaagttaaaatttcaccattcaagccttgatcccacgtaggaggatgcattgatgattctttgttgattagatatttggaatgtggctgaatcagattttggctagctgtatatccgatttcagtgcatgcaaaggtaaattggtatggaacaatatggcattgtccggtttcctttttttttttttgataggctaaatgaatattattcgaaaaacacc

SEQ ID NO: 9788 - DNA, 1208 bp, Glycine max
  Clone ID: 700871366_FLI
gcaactcaatgaccctttcatacggaattggattgacctcctctcattcttgcttgctggggtcaaggctaatgccgtactctcagcagagatgatttacatgtttgcagagtggtacaaaccgggatgctgtcttgagtacccccttcatggaagtgcagctattattgatgctcttgtgcgagggctagagaaatttggtggaagaatttctcttcaaagtcatgtggaaaacattgttgttgaaaatgacagagccattggagtcaagctgggaagtggtcaattcatacgtgctaaaaaggctgttgtcagcaatgcatcgatgtgggacactttaaaattgctacccaaagaagttgttccaaagtcctactcagatagggttaacacgactcctcaatgtgattcattcatgcatctccatttgggatttgatgctgagggtatacgcagtgatctgggaattcatcatatagttgtaaatgactggaaaagaggagttgatgccgaccagaatgttgtgttgatatcaatacctagtgtacttagtcctaatctggcaccgcacgggaaacacgtgttacatgcttatatgccaggaactgaaccatttgagttgtgggaaggacttgatcgtaggagtgctgaatacagaaatctcaaagctgaaagatcagaggtaatgtggaaagctgtggagagagcagtaggcacaggtttcagcagggagaaatgtgaagtgaagttggttgggagtccactaacacatgaaaggtttcttcggaggaacagaggaacatatgggccagccgtgcaagctggttcagatgcctttcctggacattcaactcccattgcacagctttattgttgcggagactccacctttcctggcattggagtcccagcagttgctgccagtggtgcaattgtagcaaattcattagtctcggtatctcaacattccaagctgctcgatgcaattggcatataaaaccaaggtttcatcttcatgtccccacgttttcacactggaaaagattgaatcttttctacttctcgtgcaaaaactacatcttggtcaataacttatgtgtggcttttcacatctagcatgttttacctagctctcttcattcaattttcacttgtaattattactagactaaatgttacctttttaatgattcacaaaaaattgttgg

SEQ ID NO: 9789 - DNA, 1417 bp, Glycine max
  Clone ID: 700871534_FLI
gaagatggagaagtatcagatctggagcaggagaatagcgttggcagcgtttgcgtttgctctgctgttccaatcggcctcagcagacgacgtcgttgtgctctctgaagataacttcgagaaggaagttggtcaggacagaggagctctcgttgagttctatgctccttggtgtggacactgcaaaaagcttgctccagaatatgaaaagcttggtagcagcttcaagaaagccaaatctgttttaattggcaaggttgactgtgatgagcataagagtttgtgcagcaagtatggagtctctgggtacccaacaattcagtggtttccaaaaggatctcttgaagccaaaaagtatgaagggccacgcactgctgaatcacttgttgagtttgtaaatacggaaggaggaacgaatgtaaagattgctacagttccttccaatgtagtggtgctaacacctgaaaattttaatgaggttgtcttggatgaagccaaagatgtcttggttgagttttatgcaccatggtgtggacattgcaaaagtcttgctcctacttacgagaaagttgccacagcatttaaattggaggaagatgtagtaattgcaaatctggatgctgataaatatagggatctggctgaaaagtacgacgtgagtggatttcctaccttgaagttcttcccaaagggcaacaaagctggtgaagactacggaggtggaagagacttggatgactttgtggcttttatcaatgagaaatctggagcaagtcgagatggaaaaggacaacttacttcccaagctggtatagtagaaagcttggatgtcttggtaaaggagtttgtagctgccagcgatgaagagaagaaatccgtgtttacccgattggaagaggaagttgtgaagcttaagggttccgcctcaaggtacgggaagatttacttgaaagctgccaagaattacagggaaaaaggttctgattatgctaagaacgaaattcagcgcctacagcgcattcttgacaagtccattagccctgcgaaggccgacgagttaactctaaagaaaaatatcttgtcgacatatgctgcttgacttattggtgcattgttaaccaactctcatggaagctcgtgatccaccgcagctgccgatgattgtttgactttgatatcgaaattgctgggagatattcaacgtggatacttacttgtagtgcttagtttgagtctctattaatgaccctatcttgcatggcgcttttggggttaaagattacgattcttctccccattgtagtcttacctgagcagtttaaaattttgggagacgataacttttgtctttataccatgtgtttccttcgctatttgatggtgtacgatttgcttataaataagaaatgaacgcaac

SEQ ID NO: 9790 - DNA, 708 bp, Glycine max
  Clone ID: 700871711_FLI
aagaaggaagccattgagaacataggagctgactcatttgtggttagccgtgaacaagatcagatgcaggctgtaatgggaaccatggatggtatcattgacacagtttctgctgtccatcctcttgtgcctttgattggcctgttgaagcctcatggtaaactagtcatggttggtgcaccagagaagcctttggagttgccagtattttctttacttatggggaggaaaatggttggtggcagtagcatcggagggatgaaagagacgcaagaaatgattgattttgctgctaagcatggagtgaagcctgatattgaggttattcccatagattatgtgaacactgcaatagagcgcctcgccaaagcagatgtgaaatatcgatttgtaattgacattggaaacacgttgaagccaagctcttgagtaaataaagaaatatgcatgcgtgattcagacttcagatactgaacgtacatggggcaagagataaagattgagaattgataataatttctttaagcattatatgtgttttccgtaatgagtttttgtttcaaggatttagctacgctattccttgataaataagcaattaagtgtggggtgtgcaattgcttaagcttggttataatccctttgggacgaaaattgttttgtactatatatacattttaaagagtgaaattgtgtgagattatgaac

SEQ ID NO: 9791 - DNA, 1450 bp, Glycine max
  Clone ID: 700871767_FLI
gcaaaaccctgcagcccatgctgcagcgagttttgctgctacattttggccatatgcaaatgcagaaacttctgcagattctcccgtgtgcactccagattttccatcaagacaaattggctcgcctccaagtgtgacagctattgcagctgctacagtagctgctgcaactgcatggtgggctgcccatggactgcttcctttatgtggtccactccatacagcttttgcctgtcctcctgcatcagcaactacagttccatcaatgattattgatgaatcaccacaaaaaacagaacgaggagagattaaaccacaaaatcctcctctgcaagatcagataccggatccagaacactcggaagctcaacattcagctcctaagtcaccagctgtttcttcatccaaatctgaggataggggagatgccaatttagatacttcaccaaaggctactaatcatgagatgaaccaagcaatttctgagaaccccgattccaacaaaatgaagggcagaaaacctgtagaccgttcctcatgtggttccaacacaacctctagcagtgaagagactgagttactagagaaggatgagaaagaaaaggaagagcccaaaacacctgatgcgaacgttttagataccgagcttagtaatcgtcgaagtagaagcattagcaaccttactgattcttggaaggaggtctctgaagaggtatgattgcatatcttatgatgaaatgttaatgtaatgtacggatgtattgcttctttcctcatgccactgttattttcaggggcggcttgcctttcaggctctattctccagagaggtgttgccacaaagcttttcacctactcatcatttgataaataaagataatcagatagatagcatcaaggataacgagctaaacacagactacaaagatgaagaccttgaaagcaagaaatgcagttctatttgtgatggggtgcagaaaaatctgctatttgtcaaagataacaatgaggaggagggactgctaaccataggtcttggaccaggaaagctaaagactcgtcgaacagggtttaaaccttacaaaagatgttcggtagaggccaatgaaaacaggatcggaacagcctgcatccaaggtgaagaaaaaggtcccaagagattacgcttgaatggggaggcttcaacttgatgcctgatattcccatgcaaccacacaaagaaaatctctagttttgcatatatttctaagtttccttgttcattgtctgtattgcttattttctaattctgcagctcacgaaacttgtcgtgtaggtctgtgtaccatattaaattactacatacacactttttactttcttggcctgatgttactgcagttaaaaactccgctaaaatagacttagacaagaaacattaagtaccgtttgagcatttgatcatttaagt

SEQ ID NO: 9792 - DNA, 1000 bp, Glycine max
  Clone ID: 700871802_FLI
gacgggtcaaaagcagatatctggtcatgcggcgtcgttttgtacgttcttctcgctggatttcttcctttccaacacgagaatctcatgacaatgtattacaaagttctcagagccgagtttgagtttccaccgtggttttcgcctgagtcaaagaggctaatctccaagattctagtggcggatcccgcgaagagaaccaccatttccgccataactcgcgtgccgtggttccggaagggcttttcttcgttttccgcgccggacttgtgccagttggagaaacaagaggccgttacggaggaagaaaacaattccaaggtgcccaagttcttcaacgcgtttgagtttatttcgtcgatgtcttccgggttcgacctctcggggctgttcgagaccaagaggaagacagcggcggtgttcacgtcgaagtgctccgcggcggcgattgtggcgaagattgcggcggcggcgcgggggctgaggttccgcgtggcggaggtcaaggacttcaagatccggctgcagggtgcggcggaggggaggaaggggaggctggaggtcacggcggaggtgtttgaggtggcgccggaggtcgccgttgtggagttttcgaagtccgccggcgacacgttggaatacgccaagttctgtgaggaggacgtgaggcccgcgctgaaggacattgtttggacgtggcaaggggatgccacgtgtgctgctaacttccccgcctgtcacggtgaggagtgtcaaaagcaggttgttgttagtactatataattagttaattaactattaattataattagtgtgagggtccactgagagggttctagaaacggtagcgttctaacgacttttcttttgctttgggttttgtcgctttcgtctttattccctgcctgatttttggaaagatagggttttgcaccttttgaaggtgaggctgtacataaactgtaattaatatattgtattttgctgcccttacattcgg

SEQ ID NO: 9793 - DNA, 1556 bp, Glycine max
  Clone ID: 700871904_FLI
cgctttcaatagatagatagagcattcattcatcaccaacatggctcttctaggcttaatgagttttgctgccttgacccttttcttggtcctaacaactgtgcctcgtcaagcacacgcttcaagccgtggcaacttaggcagaaacatcaacccttcagtgtatggcatatgtgcctcttctgtcattgtgcatggatacaagtgtcaagaacacgaggttacaactgatgatggttacattctgagcctgcaaaggatcccagaaggtcgaggtaaaagcagtgggagtgggacaaggaagcaaccagtggttatacaacatggagttcttgtagatggtatgacatggcttctaaacccaccagagcaagatctgccgttgattttagctgataatggatttgacgtgtggattgcaaacacaagaggaaccagatatagtcgccgacacatctcattggacccctctagccaggcctattggaattggtcttgggatgaacttgtctcctatgatttccctgcggtgtttaattatgtgttcagccaaacggggcagaagatcaattacgttggccattcattgggaactttggtagctttggcatccttctcggaaggaaaattggttaaccagctgaaatcagcagccttgttgagccctatagcctatttaagccacatgaatacagcacttggtgttgttgcagccaagtcctttgttggtgagatcactaccctcttcggtctagcagaatttaatccaaaagggttagctgttgatgcctttctcaagtctctctgtgctcaccctgggatagactgctatgacttgttgactgcactaactggtaaaaattgctgcctcaattcttcaactgttgatctattcttgatgaatgagcctcagtcaacatcaacaaagaacatggtgcacttggctcagactgttagacttggggcgttgacaaaattcaattatgtgagaccagactataacattatgcactatggagaaatatttcctccaatctataacctttccaacatcccccacgatctccctctcttcattagctatggtggaagagatgcactttcagatgtccgtgatgttgagaatttgcttgataaactcaagttccatgatgagaacaagcgcagcgttcagttcatccaggaatatgctcatgctgactacattatggggttcaatgccaaggacttggtgtataatgctgttctttcatttttcaatcatcaagtttaacactggatagaatgaatcaagttgtatgaaaagagtgccttcatgtattaggtagctatcattgagatcaatctaagttatctagtggagattaagtaacggctaattacaaaagtaatgaagtattatcactagtgatttgctttggtgttgcaaatggctattgcatctatctattgtgttgcattgtaatgcagaggaaagtggcttttggcttcagttatctaagatgaaaaacgtggatgagatcatttatcaaaagaattataaaaactatgtttcc

SEQ ID NO: 9794 - DNA, 1647 bp, Glycine max
  Clone ID: 700871938_FLI
ctgagtcttgcaattgaagttgaagtcttgcccttctctcttcaactccaaacacaagacatcatcatccatggctgcctccgtctccactgtcggagctgtcaacagagctcttttgaacctgaatgggtctggacctggggtttcagctcccagttcatccttctttgggagcagcttgaagaaggttattggctcaagggtccccaacacaaagatttcctctggaagcttcaagattgttgctgtagaagagaagaaagagattgaagagacccagcagaccgacaaggacagatggaagggtcttgcctatgatatctcagacgaccaacaggacatcacaagaggaaagggtttggttgactcccttttccaagctccacaggatgctggaactcactatgctgtcatgagctcctacgagtaccttagcactggacttcgccagtacttggacaacaacatggatggattttacattgctccagcttttatggacaaacttgttgttcacattaccaagaacttcatgaccctgcccaacatcaaggttcctctcattcttggtatctggggaggcaagggacaaggaaaatctttccaatgtgagcttgtctttgccaagatgggaatcaaccccatcatgatgagtgctggagagttggaaagtggaaatgcaggagagccagcaaaactgatcaggcagagataccgtgaagccgcagacttgatcaagaagggaaagatgtgtgctctcttcatcaacgatcttgatgcaggagctggtcgtcttggtggaaccacccaatacactgtcaacaaccagatggtgaatgccaccctcatgaacattgctgataaccccaccaatgtgcagcttcctggtatgtataacaaggaagagaatccccgtgtgcccatcatcgtcaccggtaacgatttctccacactctatgcgcctctcatccgtgatgggcgtatggagaagttctactgggcaccaacaagggatgaccgcattggtgtctgcactggaatttttcgcaccgattcaattcctgaacaggacgttgtcaagattgttgacaccttccctggccaatccattgatttctttggtgcactgagggccagagtatatgatgacgaagtgaggaagtggatttctggtgttggtgttgacggcattgggaagaagcttgtgaactcaaaagatggacctccaacctttgagcagcccaagatgactctggagaagctcttgacgtatggtaacatgcttgtccaagaacaagagaatgtcaagagagtccaattggctgacaagtacttgaacgaggctgcacttggaaatgctaacgaggatgctattaacaggggaactttcttccaatcttgaattggaggcaaagcaaacttggcaagtaaatatttctgttcctgaaggttgtgctgatccaagtgctagaagttgtgatgggacttgcgtgtaacattcttagaattctcaatgtcttaggtgcaaagagaagatgccaagtttgagatgattttactatatttttcatattggactgtcttcctctataattttgagttaaagtgtccacttaaattgaatttggtgccttttccttttgtcct

SEQ ID NO: 9795 - DNA, 1287 bp, Glycine max
  Clone ID: 700872020_FLI
gcctttttttgttactcgattcagggaggcactgtttcactactcttcactctttgacatgcttgaagccattgtttctcgcgaggaatgggagaggatgctcattgagaaagaaatatttggtagggaagcattgaatgtcatagcatgtgaaggctgtgagagagtagagaggccagagacatataggcagtggcaagcccgaattctaagggctggatttttgcaacaaccttttgagcgtgagatagtaaagagggcaatagagaaagtaacaactagctaccacaaggattttgtaattgatgaagatagccaatggttgttgcaaggttggaaggggcgaatcatttatgccctttcttgttggaaacctgcatgactaaccaagatggtacaagtgcatctcactcgggctttgtgaattagtttgacttctgaggagctcagggttcgagatcaaaaataaggattcaagctgtgagttcagttgaggaaaacatggctacttaatagcctggtatgaaagtagataatctatgttattatcctatagatcatttataaagtctgttgtgtgatagctaacttgagggctgtcaaatgaacatgatccaatctaatgttgcagatgaatttagcatgtaataagatcaaacctttattgctgttactcattttgagctttcaacttcaatgcttctgatagtttacttaactgaaggtaatagcttgtgtatttcatcttttttgtatttcatcctaacaattaatggaagatttactttggagaaatacttgttgcacagcagatggcatgttactattctagctgtaccaaaagcaaaaagtttgactaggtccacgtagcttagatgctgcaattggttcaagtgtggaagtgatgtacaaacagcagatctcttcacatttgcttttgaagacttgttttcaacatttgacccataatgggtggtgggggcctcttgttgatacagattttccttgttgaataatgtatgattgtaatctgacttgccatatggtgtgcatttactacatatttggacctataaccaaatctatagttggtcacaccattcatcatttgactttccctttggtggacagctgatgaaagttgttctttggaacagtggtggcacgatgacttgaacatgcccctaggaagctattggaaatcttcaccactagctcattgcttgtaacttgtagctattgaaagtggatcaaaagtaaattctattttatacattttgttctcac

SEQ ID NO: 9796 - DNA, 777 bp, Glycine max
  Clone ID: 700872206_FLI
ctcctattaaacccggttcacgccattgcccgattgggagggtacagggccccggagcaagaacagaacaagaggctatctcagcaggctgatgtgtatagtttcggagtattgttgttagaagttctcacaggaagagctccttcatcgcagtacccttcaccggctcgtccccgaatggaggtagagccggaacaggctgcggtggaccttcccaaatgggttcgctcggtggtgagagaagagtggactgcagaggtttttgatcaggagttgttgcgctacaagaacattgaggaagagcttgtgtccatgttgcatgtggggttgacttgtgtggtggcgcagccagagaagaggccaaccatggaggaagttgtgaagatgattgaggagatcagggtggagcaatcgcctcttggggaggactatgatgtatcatgcaattcgctttcgccttccattcccaccactgaagatggtctagcttaggagtaatgttgaatattgttgtctggtatatataagattaattcatgtcatgttttgtaggtacttgcagtctcctcctctagttgcatggtctaaatgcacattacttattggcgctgttcagtgttctttgtaaaatttgtgagttatttggaatttcattgttgaacgtagcgcaaatctgaatgatctgatcttgagcttgagcttagagtaagtactagtgtgtagttgaattgtataaggtacatttggagtttgcatcaatggacacagtcttgagat

SEQ ID NO: 9797 - DNA, 693 bp, Glycine max
  Clone ID: 700872266_FLI
ctcctccgtttttcttatttatcatcgcctgcttttaatttataattccttgaattctgtagggcctctgataagtgtcagagagaaaagagaaagactattaacggcgatgatttgctctgggcgatggccactctcggtttcgaggattatatggatcctcttaaaatttacctcactagataccgagagatggagggtgatacgaagggctctgccaagggtggagactcatctgctaagagagatgttcagccaagtcctaatgctcagcttgctcatcaaggttctttctcacaaaatgttacttacccgaattctcagggtcgacatatgatggttccaatgcaaggcccggagtaggtatcaagtttattattgaccctcttgttgtaacgtatgttttctacgccagttaccaagtgctcacggcatattgaatgtctttttatgttatgtgaatactgacaggagatgttggttcttgtgtccgtttttttttttaaattaaggtttgtatattatctttggattcgaattattatttgaaagttattattatattgtaaatcctagagccctgttgtctgaatccatcaggcggcttggtaaagaccgagattttaggactgattgtaagcataaatccgaatattcttttcctaatttctttgcacaataatgtatgaagaa

SEQ ID NO: 9798 - DNA, 1151 bp, Glycine max
  Clone ID: 700872389_FLI
ggggtgctggtttgtgctgctgggcaggagtttaggggggacgtggcgctttgtaccgtgccattgggggtgctaaagaagggggatattgagtttgtgcctgagcttcctcagaggaagaaggatgctattcataggttggggtttgggttgttgaacaaggttgcaatattgtttccttataatttctggggtggggacattgacacgtttggtcatttgactgaggatttgagtatgagaggggagttttttctgttctatagctactcctcggtgtctgggggcccgcttctggttgcgcttgttgctggggaggctgcgattaggtttgaaatgatgttgccggtggagtctgtgaagagggtgttggacattctgaaggatatttttaatccaaaggggattgttgttccggatccagttcaggcggtttgtactcggtgggggaaggatcactttgcatatggatcttactcttatgttgcggttggatcttcaggagatgattacgatattcttgcagagagtgttggagatgggagagtgttcttcgctggagaggcaactagcaaacagtatcctgcgactatgcacggcgcgttcctcagcggaatgagagaggctgcaaacattttgagagtggcaaagaggaggtcttcgatgactattgatacaacaaaaagtgtcaaccaggagaatgatgatttgaacaaattatttgtgaaacctgatctgacatttgggagcttctctgccttgtttgatctaaatttgaatgatcatgattccagttcattactgagggttaaaattggaggagttgtgttggactctggcagtctttatctttatgcctggctttcaaagaagcgggtcattgagttgagtcaggtggagggagatgagaacaggatgagaatgttaaaccgcaattttggggtgagtttggttgggaggaagggtttaagtagtgctgctgaatctcttattgctaacataaaactttctagacccaactttaatgaaacggaaaatggccttatggctgagaaggaaaattcttagtagcatcttatagagaatatacctccgtgctcagttaactgtattaaacacatttttctgttaaattcaattagtttctgacc

SEQ ID NO: 9799 - DNA, 678 bp, Glycine max
  Clone ID: 700872405_FLI
ggcaagcctcaaggttgcatttgtggttgctgtgctatacatggttgtggtgagtgcacacatggcacatgctaggatcaactgcggccgtgtcgcggtcgcggtgtctccgtgccttggctaccttcgtcgcggtggaaggccacaggcgaggtgctgcaacggagtgagaaacctccacgccctggccaagaccaccgtggaccgccggacggcgtgcaattgcctgaaaacctttgccagaggtcttggtaggggtgtcaatgccaacaacgcagctgcacttccaagaaaatgtagagtcaacatcccctacaagatcagcatctccaccaactgcaacacgatcaggtaaggatggatctggtataaggaagaaacaacagggcaatttttcagtcacagggcactatatatacgataataatagtgctgctgaattaactaatgaaaaataatgggagggcgatgagggctctacttgtgcgagtctcttcttggtctcggtgtgtcccttagttgtttcaggctttggtccagtaattatgttattattgtaagtacgtgttggctgaaatttctctcatttggttgttgcatgtaataatggcatatatattgtgctgtaattccttgctacttgctactttacatatgaaaaacaattgcacttgtgtt

SEQ ID NO: 9800 - DNA, 643 bp, Glycine max
  Clone ID: 700872446_FLI
atttattttgtcatatatgtcttgatgagtacattctacttctatgtcatgctacttctagttcctattgctgcacttttctgtgactttgtttaccaaggggttcaaagatggttcttcccctatgattatcagattattcaagaaatgcatagagatgaggtagatagcactggtagagcacagctgctggagatagggaaccagcttacaccagctgaggcaaggagtcatgctatatctcaactcccacgcgaaatatcaaagcacactgggtttgcttttgattcacctgggtatgaatccttttttgcctcacagctcggtgtatatgctccacccaaggcatgggatgtagcaagaagagctagcatgagatcacggccaaagattgggcagcaaaaataactggagtaggatcattgtacattgcatagtttcggttttccaccttgagagccagcctaggaattctctaaaattaggatgtgccatattaaatatttagtcattttcatttaggatatatttttcttttttctttccttttttctttttgggtgacagggggattagttcaggattcgtcagatgtacattccaggatatttcagcaattagtatagtcaattttgtgaagttc

SEQ ID NO: 9801 - DNA, 762 bp, Glycine max
  Clone ID: 700872483_FLI
tcttaagctcgccgacttcggttcggcggagtggttcggcgacgggaggagcatgagcggcgtggtggggacgccgtactacgtggcgccggaggttctgttggggagggagtacgatgagaaggttgatgtgtggagctgtggggtgattttgtatataatgttggcggggattccccctttttacggagactctgctgctgagatctttgaggctgtggttagggctaacctcaggttcccttctagaatcttccggactgtgtcccccgccgccaaggatctcttgagaaaaatgatctctagggactcttctagaaggttctccgcagaacaagccttgagacacccttggatcttgagtgcgggtgacacggctgaactgacttgagaatgtagctacatgctgtagtagtagtgtagctaattttgcccctttgtcttttctctctactagcttaataaggtctactcgtggtggcagaggaaggaacgcttctgtaaattttcatggtgcaagtagttttttttctttctaggaatcttatatctgagactctgggtatgagtcgagagaatcttgttttccactctcggtgattctctcttttgtagtagaaagtgagaaagtgggtgatctcccagactccctccccctagtacaaaggaggagtttgattctactatccttgtagtttttgtatatgtaaatcataataaacaatcattttgaatgaatgtaaatggtgtttaatcttctgg

SEQ ID NO: 9802 - DNA, 1094 bp, Glycine max
  Clone ID: 700872524_FLI
aaccattcacattcttccagaatcatcaaagccatcaacgggcttgacttggcaactagctggaagatgaagcaagcaactcttttcttcttctcactcttcctactcctttcctccaccaccatggccatttcaccagcacctgcagcagcaccaaaagccacagcaaaaactcctcctaccccaaaggcaacagcaccatcaccaaaaccattagttcccacaatacctcagtctccagactctcctgactcggtccccgacgacatcaccagaatcctgaaaaaggccaaaatgttctcagtcctaatccgcctcctcaaaaccaccgaaatcatgaacaacatcaactcacagctcataacagccaagagtggcggcataaccatccttgcaccagatgattctgccttttccaacctcaaagcaggcttcctcaactccctaaacgaaggccagaaaatcgaacttgtgcagttccacatattgcccgagtttgtgtccagctcaaactttgattctctaagcaaccctgtgcagacagtggccggtaaagatcccgcaaggcttccattgaacgtgaatgcattaggaaacagtgtcaacatttcaaccggggtcgtcaatgccaccgttctcggggtagtatactcagataacaaacttgggatttatcacgtggacaaggtgcttcttcctctagatttctttataaccaataaggctccagcttcagctccatcaactcttgcaaagtctcccaaagctgctaaggataactcttctgaggacgatcaagaagaaacaaatcagcatcagaataaatctggggcagtgagtgtggttagcattggtggagcaacgttgatgtcgcttgcgatagctttggttgcaaccatgttgagttgatccatttggcagctgcactttcaattttatttgtcaaacacgccattaatttctttctttttaccttttttgtttaaattttggtatgtgtttctgttttcttgtgtattggtgttatatatgaaaaggacgtgaatacttcaatgattaatgattcagtggctaagccataattgttccttaat

SEQ ID NO: 9803 - DNA, 1123 bp, Glycine max
  Clone ID: 700872534_FLI
gtaatttcaatttagtctgtgccgtttcgaaccctgggcaactacagcggcgtttgaaactgagaaaataatggggtgggagagcttcgtggtggtgcacaacatagcaaagaggcacaacgtgggaacacttgctcgcagtgccaccgcgttcggcgtatcagaactcatcctcgttggtcgaagagatttcaactgtttcgggagccatgggtcctcctcccacctccgatttcgacacttccactccctccaagacgctcgcaaattcctcaaagacaaagactttgatatttgcggcgttgagatcacaaccgattctctccccgtaaatcaacacccttttactaagagcactgcattcctactcggcaacgagggcactggtctttctcctaaggaaattgagatatgcgactttttcgtctatatccctcaatatggcggtggcactgcttccttgaatgttactgtagctgcttccattgttctccatcatttcggagtttgggcaggttttactgagagatctcgtgatggaaataaatttgttgtggctgagagacccgtaaaacagggtggacgtaattactgcactgaaacagaggattctatcattgaagagcggaaagctagaagagaaaatgctgccaatggtttctttgatgagactgagagtggcaattcatcttcaaacctccttgatgcattatttgttgatggttgatggaaaatgtgtgattactttacagtaatgattaattgatctttgggatcgtaggttgagggcttaaatgcttaagttgcaacagaggataacgaataacttctctacttattggggattggaagaaaactgattactgattattacatgggctggctttatatatgtatgtaccatttgaaaaagagctattagccgggggaaggttgctactgagattaggtgtttatattgtaacttatcagtgagtttgctgcaattgccacccgtgacagggcatgaagttgttaaagccaatattgttcttgtaacatcaacacggtactgccatttgctttactgatgatgattatcaaagcagcttaaatgataaatttgtcctcctgctaggtatgg

SEQ ID NO: 9804 - DNA, 983 bp, Glycine max
  Clone ID: 700872615_FLI
atcagagcctcttagattatctcccacttcacagccactcacacataaaatctctccaagtgctgcatttgcgaattgaacctcaaaatcagtctctaatatttttctcactgtcttgtctctccagagaactgtatagagagagatggcagctgcaacatctggtgctgtgttaaatgggttgggatcttccttcttgagtggaggaaacaggagccaaacccttctggccactgctattggaggcaaagttggtgctgctgctgttactgttagtcctagaagactcattgtggtagctgctgctgcaccaaagaagtcatggctccctggtgtcagaggtggtggcaacctcgtcgacccagaatggcttgatggatcgctaccaggtgactatggctttgacccactaggccttgggaaggacccagcattcctcaaatggtacagagaagctgagctgattcatgggagatgggcaatggctgcagttctaggaatctttgtgggccaggcatggagtggagttccatggtttgaagctggagctgacccaaatgcaattgctcctttctcctttggtactcttctgggaacccagttgattctcatggggtgggttgaaagcaagagatgggtggacttcttcaacccagactcacagtcagtggaatgggccactccatggtcaagaacatctgagaactttgccaatgccactggtgagcaaggctacccaggaggcaaattctttgaccctttgagcttggccggcactatcaaggatggagtttacattccggataccgagaagctcgaaagattgaaattggctgagataaagcatgccaggattgctatgttggccatgctgattttctactttgaggctggtcaagggaagaccccccttggtgctctcggcttgtaaactaaacatttcatgtagataattgaattgagaggctagacagttgcaaatc

SEQ ID NO: 9805 - DNA, 740 bp, Glycine max
  Clone ID: 700872707_FLI
agaggtagaggaaagggtaaaaaactaactgttgccaattttgaggatccagcgagtggcgaggatgaaaaagttcccacgcaaaagagaagagggaggccacaaaaaccgctaaaggacgactttgatgaagaagaggtagagaaaatagaagacgacagtgacaatgttaagaatggaaccgcttacaaagagatgaaaagccccactgcaactgaaaatggaaggaaaagaaagcgaaactcacaggtaaaagagaaattagactcagttgagaaagaaaatagcattggcaatggaacaagcaccactgatgagttgacaaaggccaatggttttaggcataatggaagcaggcgcaaaagcacgccccgtcgagctgctgaagcaggtgtgcagtgcaagtaaggatagtaaaagttgtgcaatagctttcttccttttccatattatcagtcaaaattcatgagaagataggaagtgaggcgtagtatcatttattttgtttacttgttttgtttctttattcccatttttagtttcctttttcctcggtgagtctgatttgaggggctgcatttggtgataccctatcattaattccttttttctttatttcaatcatgaatttgagagtttacaatgctggttgttgtcttataatgctgtaacacttcgaatttaatcttttctactttgactttcaatttaatttttatgctccctctcctttcatcatc

SEQ ID NO: 9806 - DNA, 1073 bp, Glycine max
  Clone ID: 700872742_FLI
ttcccctctaagggtatctttctctctagctttttgttatgctttgctattctgtctttgggagctgaagctcgtagatcaccatcacccatctcttctctcattagcaaagagctttttgattccattttcatccacaaagataacaatgcatgccctgccagaaacttctacacctacgactccttcatcaatgcatccaaacgcttcccaagatttggcaccactggtagtccagccacacgcaagcgtgagattgctgcctttcttgctcagatttcacatgaaaccacaggtgggtgggctactgcacctgatggaccctatgcttggggattgtgcttcaaggaagaaattagtcctcaaagtaactattgtgattccaccaacacacaatggccttgttatccaggacaaagttacaaaggcagaggaccaattcaactctcatggaactacaactatgggccagcagggaaggctttgggatttgatgggttgagaaacccggatgtggtgtcaaacaattcattgattgcctttcaaacaggtctctggttttggatgacagagcaaaagcccaaaccttcttgccacaatgtaatggttggaaaatatgtgccaacacaagctgacatagcagctaatcgaactaaagggtatggcctagtgactaacataatcaatggtggacttgaatgtggaattcctgatgattcaagggtgaatgatcggattgaatactttaagagatatgcaaccttgtttaaagtagatacaggacctaacttggattgtgcatatcagaagtctttccaaactgtagcttagcttttttctttcctggtgtattttttcttttcttttctgttataatttctctggcatagatttaacaataatgtactgaaagcatatacgatatacctagttagtggcattttccctttgtaatttatttctacaagtctatgaatacgaagctttatgatgcacctagctcctgattactagacgctgtagccaaaagaaacccaccaggtaaccaaaaataacatgaaaatgttcaaaat

SEQ ID NO: 9807 - DNA, 908 bp, Glycine max
  Clone ID: 700872746_FLI
atccttctttacattagccttccttgccacccttatttacacaagagacacaacctcatcttcctctaccactacctcttccaccccattatctagtttcgctaacacccctttaccatccactgtaatcaacaccctcctccactatgcctccaaatccaacgacaccttccacatgccccactcagacctaaaaaccatctctgacgtgctccgaaagtgtccctcaccatgcaacttcctcatcttcggcctcacccatgagaccctcctttggaaagccctcaaccacaacggaagaaccgtcttcatcgatgaaaaccggtactacgccgcgtacttcgaagaaaaacaccctgaaatcgatgcctatgacgtgcaatacacgaccaaaaggagcgagttgaaggagctgatagcttcgacgaaagaacaggtgggaaacgagtgcaggccagtgcagaatcttctgttttctgagtgcaagttagggctcaatgaccttccaaaccatgtttatgaagtggattgggatgtgatattggtggatggaccgaggggggattggccggaagctcccggaagaatgtctccgatcttcaccgctggcgttcttgcccggagcaagaagggtgggaaccccaagacgcatgtgtttgtgcatgacttctcagggaaagtggagaaggtttctgggaatgagtttttgtgcaaggaaaatttggtcgaggctactcatagtttgggacactatgtgctggaaaaaatggacgatagtagcgttcagtattgtaagaatcattcatcaggatctgcttagttggtgtcttcaatgttactatatatatatatcgtccatctgggtatttaatatagtttccctgtttacttattggttggagcatgtt

SEQ ID NO: 9808 - DNA, 1059 bp, Glycine max
  Clone ID: 700873011_FLI
tagagccgtagaggaacctggaaacttccacgaggttttcggtgaaaaccaaatttggggctttgcatcgcaagatttaccctttccaatcaaaattcttctgccttccccaaccaattgtctttctcactatcgatttggtttggttggcattgtaattgattttgtttgtgaagatctgagtgaggggttaggcaaatgacgagtggttttggtgaatcaacgagagcatctgcaccgagcccatcatgctcggggaacagttcaaacgatgctggcgatttcgaatgcaacatatgcttcgatttggcgcaagatcctgtgatcacactctgtggtcacctattctgttggccatgcctttataggtggctccatcatcactcccattctcaggagtgccctgtttgcaaggcccttgtgcaggaagagaaattggttcctctttatggaaggggcaaaacacagaccgatcccaggaccaagttatatcctggaatggagatcccccaccgtccttccgggcagaggccgcaaaccatgccgcccccgccgcctcccgaggtcaacccatttgggagttatgggtttggactcatgggagggttcattcctatggcaactgcccgatttggaaacttcacgctttccactgcctttggtgggtttatcccgtccctgctcaacattcatttccatggttttcaggatgccactgtctatgggacaacgtctggttatccctttgggtttaatggctttcatggagggaatgcgcggggttttatgcaggcaaccggtcaagtgcagcggcaggaggacaatgttttgaagaatctgcttatgttgattgggtttctcgtccttcttacggttatttttgtgtggtaatggtcgttttgtgttgaggttacaatgcttcttaaggagttgttgtgtgtaaatattttagctgacttcgtatgagggaattgtatgcttgagaaggttgccactttggctctttattaactgtattataagcattgcagtaaacttgaatgctgcctgtttgtcttt

SEQ ID NO: 9809 - DNA, 1774 bp, Glycine max
  Clone ID: 700873018_FLI
agaaaggggcacaccttgggctgggtggagcaactattggtgtggactcttcagcttggcccagcaatgacttgacaggtggtggagtattaggaatgctaggttatactggtattggtgcctctggattaggttgggaaattcaacaagattttgaagattttgtggatccacttgccactttggagaacataagtaccagggctttgtctagtcatcctatgagaccttttttcttggttggttctagcaatacacacatttacttgtgggagttcaacaaagacaaagctactgctacatatggagtgctgcctgctgccaatgtccctccaccttatgcccttgcatcaatttcagccttgcagtttgaccactttggacaccggtttgccagtgctgcattagatggaactgtctgcacgtggcagctggaggttggaggaaggagcaatgttcgtccaacagaatcatctctttgctttaacggtcatgcatcggacgtcacatatttttcctcaagtggatcgataatagctgtggctggatatagctctaatggtgttaatgtggtcatatgggatactttagctccacccactacttctcgagcttccattttatgtcatgaaggtggtgcacacaccgtgtctgtttttgataatcatgtgggaagtggttctgtatccccccttattgtgactggtggtaaaggtggtgatgttggacttcatgacttccgctatatagctactggaaaggctaaaaggcataagcgtgctgataacattgggcaaagctctgtctcatctttaactcgtgataaggatcaaaatgtagatgggatgctttggtacattccaaaggctcactcagggagtgtcacaaaagtagttaccatcccaaataccagcttgtttttaactggaagcacagatggagatgtcaaactctgggatgcccagagcacaaagttaatacatcactggtcaaagatacatgaaaaacacacctttctgcagccaagttctcgtggatttggtggtgttgttcgggctgctgttacggatatacaagttgttccccatggttttctttcttgcggtggggatggaattgtaaagctggtacggctggacaatcacctgcgtgcccatggaattgagttatgatacttctgagatcctttgtgttgatgacaactctactatgctgcaaatgcttcacgacagtggtcatcatcggtcagaggttatcaaatctgcattattggcttcgtcaacagcttaatataagaaatgtgaacattgctgaagccaccatccattttgaaaaaggattcttcattggtatgttcagatatccaaaacaactgcaacttgggcaagccatacatcccggaacataaacatctcatgctagtgaacctcattgcttctttgaacagattggatgggttcattttgattcgagtcagtctttctgcatggaacaaaactttagtcagtggccgggctataattgtattaagttatgaatacctctcgaggttggcaacatttttgagacaaaacttgtctttgttcttggtgtacattacctgtttgaatttgttgaggcatgtgagtatagtgtatacacacggcaaaaacttagattctctagtgagttttgtttacatttgtagtcatactttgcagcatgtatatattaagaaatagtgtcggtgattttaattagaacttgagaaaagttataatatactactgttcat

SEQ ID NO: 9810 - DNA, 1038 bp, Glycine max
  Clone ID: 700873022_FLI
ctgaagccgagcttaggttgcttgaagttttctatcacaagatatacaaggtcttccctcccaatgaaaagatcgaaagcattaatgatcaatactggacattacgtgcagaggagataccagaagaagagaaaaatctgggtcctcatgatcgtctaatccatgtgtatcattttactaaagacacagctcagaatcaaatgcaaattcagaactttggggaaccctttttcttggtcatacatgaaggggagactttggctgaaattaaagtaagaatacagaagaaacttcaagttcctgatgatgagtttgtcaagtggaaatttgcctttttttcattagggcgtcctgaatatcttcaggattctgacattgtatccagtcgttttcagaggagagatgtttatggtgcttgggagcagtatcttggcttggagcatactgacaatgctcctaaaagatcatatgctgttaaccagaatcgccacactttcgagaacccagtaaagatttataattaggaaactggtattgatgagtactcatcttgcgagggatgaatttggcatattctgctacatctatgggcatttgtaaaaacagggaaaaatagcgaaaggctactctgtataggccataattagtgagatcagcaattccaggtggtttctgcaagttagaatttatattagaattgtggtatgtaattctttctgtcaacggatctcaacactgtctgccgaccactgcccgttgagctttactacttccaactgtgtggaagttgttcaagttgaggtcattgatcatcatcactccactgtatcagtacataagatttttggattagtgagtgtatacagggtatagttggttgactctttttttgttcatcttgattgcttccagattttgttcagtcagtagtgttactttaagtgagggctgcaaaatggtgtgtggcagagttaatgtaatgttgtaaaagagactcgccagcctaaaaatatagtttcctgccgcaccatttgctcc

SEQ ID NO: 9811 - DNA, 818 bp, Glycine max
  Clone ID: 700873131_FLI
ctcatccatcatgaaaggaggaaagtccaagaccgaatctaagagagccgatgccaaacttgctgtgaataagaagggcgccgccaccaagactaggaaacccgccggaaaggggaaggcagcgaaagatcctaacaagccaaagaggcctccaagtgctttcttcgttttcatggaggaattcaggaaggtgttcaacaaggaacatcccgacaacaaagcagtgtctgctgtgggcaaagctgctggagcaaaatggaagacgatgtctgatgctgaaaaagcaccttatgtggcaaagtctgagaaaaggaaagtggagtacgagaagaacatgagagcttataacaagaaacaggcggaaggtcctactggtggggatgaagaagaatctgagaagtctgtatctgaggtgaatgatgaggatgatgacgaggaaggcagtggcgaggaggaggatgacgattagagaatggactgatgataatagcatttatgtaggttctgatgattttgatcatccgtgtaggtggtctggtcatttccttataaacatatttctctttccaaaaaaatatttccctgctcctccttccgtaaattgctcgtctttccaaaacgtgaatagtttaaagaagggagttctctttatttgtatttctaaatccaactgtttagttaagggatggttatctcttgtagagcttttagtttgatttagagttttcttgttgaaatctggttaagtttgtatcaatataattgacttatcatcccctttctgctgtatatatgcgatttatgttttttagttcctg

SEQ ID NO: 9812 - DNA, 576 bp, Glycine max
  Clone ID: 700873187_FLI
aggaattataaaaggctctggttatctttgtgggtgtcagtcatgtaactatacaaaggttctgaatgcttacgagtttgagagacatgctggctgcaaaacaaaacatccaaacaatcacatttattttgagaatgggaagactatttatcaaatagtacaggaattgaggagtaccccagaaagtttgttgtttgatacaattcaaacagtttttggtgcaccaattaatcagaaagcatttcgcaactggaaagaatcatttcaagcagcaacacgggagcttcaacgcatttatggaaaggaagaacttaacctataagtcccaaccctttgtgaaaacgtaacttgggatagattctagtgtgcatagtaagatatgtctatttttaccattttcctgtgtcttttatatggctccgcaaccttcagtaatgtgctcctttggatgccttgcttaaaatattcgaagctttataagttagcttatgtacaaatcaatagtattaataggtgctttggtggacagaattatctatattacattatcgataaagctaatgttcttgtgcaatc

SEQ ID NO: 9813 - DNA, 1975 bp, Glycine max
  Clone ID: 700873188_FLI
ctcttcacccatcaaaaaaaatcttttccctttctctctagaatcttcctcatcccctaccttaaattgcttctaccctaagccccaagtaacgtttcactcattcacattcacacactcaatgaagggagttacagtgaaagttgaagaaacaatggcgtatgctaatgctgcttcaactagcccaacaacatcttcaaacctctccccgcaacccatggaagggttgcacgaggtgggtccccctccgtttctcaccaaaaccttcgacgtggtggaagacccatccaccaacgacatcgtttcgtggagcagatcccgcaacagtttcgtcgtttgggactctcacaagttctctaccaccatcctgcctcgctacttcaagcacaacaatttctccagcttcgtacgacaactcaacacctacggttttagaaaaattgatcctgacaagtgggagtttgcgaacgaagggtttttggcggggcagaggcaattgttgaagacgataaagaggaggaggcacgtgacagtgacacagacacagtcacacgagggaggaagtggggcttgtgttgaattgggggagtttgggttggaaggtgagatggagaggttgaggagagacaggacagtgttgatggctgaaattgtgaggttgagacaacaacagcacaactcgagggagcaattgttgtccatggagactaggttgcaagccactgagaagaaacatcaacagatgatgaattttctggctaaagcactcaacaaccaggcttttattcagcagtttcttcaaaggaatgctcagaacaaagagttgcaaggtgcgagaagaaagaggagactaactgctaccccaagtgtggagaatttgcagcaagatcatttcgctttgtcaattgaagaaggatcggctactattgagtcacagatggagtcttttttctcagctgcgtgtaatgatccgttagaatcaaacagtgaactcaaagacccaatattgagttcagttccagttgcaagtgggagtaatttgggggaggtgagtgattctgtttgggaggacttgctgaaccaagacttggttgctggggaccctgaagaggaagttgtgattggtgatttttcacaagttgatgttcctgtggaggatttgattgcggatgctgatgagtggagtgaggatttgcagaaccttgtggatcacatgggttatcttgggtccaaaccgtagtggaaaggaaggattttcattatctagggggttcagataaaactttcccctttgaaccgtggtggtattatttcataaggcttcattgtttttttgttgatatttgtcgtttgataatttctgtgattgtaattgatgtagaatattggatggttctatatgcagcagcgaagatggtaatactagttgaagaagtggtcgacagatattgcctcattatccgtatcctttgtaaagaatatgatgttttgtgaatagctgagtattcgttgtgctagtgatgatgctatttttactcttctgttgcccagtttataactacattgtacatttttgcagggtaggttactcaaaagcagatgttcaatggggtgtgatcgactgggaaaagaagtagtattagtctaatcataatttgttggattctcaaattttcagtgttgagggaggttgtagtaagatcatttgattgattcttgtacggtggctgattccatagtggaacatcaattaacaattctttgcttaccagtcatctcacctgatttaatagaggaataagcattcgtctcccttttcaacttttattttgttcaattatttgtaatcattgagttctgttgctctttctgttaaaaggttatgttgggtacttttttttttttttttttactgaatgttgggtaatttctgagatattactccatctctatctatgaacatttcaattcttct

SEQ ID NO: 9814 - DNA, 2141 bp, Glycine max
  Clone ID: 700873194_FLI
atacccgaacaactcgtatcgggtttgcgcaacattgtacaaatcgaactctacgaaaactctctctccggcgcgttgccacgcgccgcgtttacaaacctcgccaacttagaaagattcgatgcctccacgaacgagttgactgggacgattccagaagagttgtgtgggttgaagaaactcgggtcgttgaatttgtacgaaaataagctcgagggttctttgccggagactatagtgaaatcgttgaacttgtacgagttgaagctgttcaacaactcgctcactgggtcgttgccgagtgggttgggtaaaaactcgaagttgcagtctctcgacgtttcttataaccgattctccggcgagattccggcgagattgtgcgacgggggagcgttggaggagctgattctgatatacaattcgttttccgggaggatcccggagactctcgaggaatgcaagagtttgaggagggttcggcttgggaacaataacttttctggcgttgtgcctgaagggttatggggtttgccccatttgtatttgttggagcttgtttataattctctttctgggtcgatttccaattcgatttccggggcttggaacttgtcaatgttgttaatttccgggaataagttttctgggtcgattcctgagggggttggggaattgggtaatcttgaaaagtttgtagctaataataatagtcttactggtcggattccgaaaagtgtgtttaggttgagtcagttggataggcttgttctcggagacaatcagcttttcggagaaattcctgttggagttggtggttgtaagaagctcaatgagcttgatttggcgaataataggttaggtgggagtattcctaaggagttaggggacctgcctgtgcttaattatcttgatctttcagggaatcagttctctggtgagattccaattgagctgcagaagttgaagcctgatttgttgaatttgtcgaacaatcagctttctggggtgattcctcctctttatgctaatgagaattatagaaagagttttcttgggaaggtttacaaagttgcgctgagtaatggcgagttggtggcagttaagaaattgtggagagcaactaagatgggaaatgaatctgttgattctgagaaggacggttttgaagttgaggttgaaacattgggaaagattcggcacaagaatattgtgagattatggtgttgctgcaacagtaaagacagcaagctcttggtttatgagtacatgccgaatggaagtcttgctgatttgttgcacaatagcaagaaaagcttgttggattggcccaccagatacaaaattgctattgatgctgccgaggggctctcatatttgcatcatgattgtgttccctccattgttcatagggatgtcaaatctagcaatatcttgctagatgatgaatttggagcaaaagttgccgattttggagttgccaaaatttttaagggagccaaccaaggggcggagtccatgtctgtgattgccggatcttatggttatatcgcaccagaatatgcttatacacttcgggtgaatgaaaagagtgacatttatagctttggtgtggtcattttggagttggtaactgggaagctccctcttgacccagagtatggagaaaatgatctagtaaaatgggttcagtccacattagatcagaaaggactggatgaggtgattgatcccactttggatattcaatttagggaagaaatcagtaaggtactcagcgtggggcttcattgcactaactctcttcctataacccgcccttcaatgcgtggtgtggttaaaaagctgaaggaagtaactgaacttccaaaatccttaagtggaaaactctcttctccttattttcaggaagaggcttcggatattgatcatgagggaagcttagtttgagctagatgctgaaaatcataacagtcagcttcaattttcacttcagctttggtacttaaaatgttagtttttgcataggtaatagtaattgaagcagcaattgtaacaaaatagcaagaaactttccaatttcaatcgtgtctaatgaaattcacaatagaatatattatgttctactttgcattaaactc

SEQ ID NO: 9815 - DNA, 944 bp, Glycine max
  Clone ID: 700873216_FLI
ggctgctgaacttgcatactttggtgctcaggtcctgcatccacagtctatgagacctgctagagaaagtgatattcctgttagggttaaaaattcctacaaccctaaagctccaggtactctcattgctaagacaagggatatgagcaaggcattattaactagcattgttttgaaacgtaatgtgaccatgttagatattgtaagcactcgcatgcttggtcagtttgggttccttgctaaggtattttcaatattcgaagagttaggtatatcagttgatgttgtagctacaagtgaagttagtatttccttgacattggatccatcaaagctatggagcagagaactaattcaacaggaacttgactatgttgtcgaagaactggaaaaaattgcagtagtaaatctcttaaagaccagatccataatctctctcattggaaatgttcagagatcatcactaatattggagaaggcctttcatgttcttcgaactcttggggtcactgttcaaatgatctctcagggtgcatctaaggtgaatatctcgttagttgtaaatgacagtgaagcagagcagtgtgtcagggctctccacaaagccttttttgaaagcgaactctttgaattagagaatgaatgcatacctggaaatggttctgttcctgcattatcttagggggatactttggttttgccaatatagcagattaataccttatcttatgcgttaagaaatgttttggctagcactagtacagtatttattagtcctgttactactagagtatacctttgtatattctggtcgcctcctccataaggggggatgaccagctgcaagaagttatttgtaatttattgtgagtgagtttgaataaacttcttaatactgagaattatgtaattgatatcactatctatcattatattattgggtt

SEQ ID NO: 9816 - DNA, 1754 bp, Glycine max
  Clone ID: 700873228_FLI
ctttcaaggagagagagaaaatatagcacgccgaaaaacacgctcccacttgtaacttagtataacgacctccaacaactgatacatacaatctcctttccttcgtgttggacaacaacaatggcggcgaaatctagttcgagttcgacaacaaacgtggtgactctgaaggcggcgtgggttctcccgcagcgcacgcagaacatccgtgaggtgtacgaggtggggcggaagttggggcagggtcaattcgggactaccttcgagtgcacgcgccgcgcgtccggggggaaattcgcgtgcaagtcaattcccaagcggaagctgctgtgcaaggaggactacgaggacgtgtggcgggagattcagataatgcaccacttgtcggagcacgcgcacgttgtccgcatcgaagggacgtacgaggattcctcggcggtgcacctcgtcatggagttgtgtgagggtggggagttgtttgacaggatcgtgcagaagggacactacagcgagagacaggcggcgaggttgataaagacgattgttgaggttgttgaagcgtgtcactcgcttggggtcatgcatagggacctcaagcctgagaacttcctctttgatactgttgatgaggatgctaagcttaaggccactgatttcggcttgtctgttttttacaagcctggtgaatccttttgtgatgttgtcgggagcccatactatgttgcaccagaggtcttgcgcaagcactatggacctgaatcagacgtgtggagtgctggggttattctgtacatcttattaagtggggtgccaccattttgggctgaatctgaaccagggatcttccgacagattttactaggaaaacttgattttcaatctgagccttggcctagcatttcagacagtgccaaggatctaattcggaaaatgcttgatcaaaatccaaaaacaaggcttacagcacatgaagtactccgccacccatggattgttgatgacaacattgcacctgataaacctcttgattctgcagttttatcacgtctgaaacaattctctgcaatgaataaattgaaaaagatggcattgcgtgttattgcggagaggctatctgaagaagaaattggtggcctgaaagagttattcaagatgattgacacagacaacagtggaacgataacgtttgatgagttaaaagatggcttgaagcgagtaggatctgaacttatggagtctgaaatcaaggatcttatggatgctgcggatattgataaaagtgggacaattgattatggtgaattcattgctgccactgttcatttaaataagctggagagagaggaaaacctagtgtcagccttctcgtattttgacaaagatggcagtggttacataacccttgatgagatacaacaagcctgtaaggactttggtttagatgatgtccatattgatgacatgatcaaggaaattgatcaagataacgatgggcaaatagattatggggaatttgctgccatgatgagaaagggcaatggaggaattggaaggcgaactatgagaaaaacactaaatttaagagatgctcttggattagtagacaatgggtccaatcaagttattgagggctactttaagtaataattacttggagacaaaattgactaaagataatttagtaaatttctacgttgtttgtagctgcttgaccaaattttgcgtatcttttgctggaaaagtttttcatcttg

SEQ ID NO: 9817 - DNA, 1264 bp, Glycine max
  Clone ID: 700873239_FLI
cacctcactcttcagcttcggagattccctcactgataccggcaacttgtacttcatttcccctcgtcagagccccgattgcttgctccctccctacggacaaacccattttcatcgccccaatggacgatgctccgatggacgccttatcctcgatttcctcgccgagtctctggggcttccgtatgtgaaaccgtatctgggtttcaagaacggcgcggtgaaacgcgggaatattgagcagggagtgaattttgcggtggccggagccacggcgctggaccgcggtttctttgaagaaaaggggttcgctgttgatgtgaccgcaaacttttctctgggggttcagttagattggttcaaggaattgctgccttctctctgcaattcttcttcaagctgcaaaaaagttattggcagctccttatttattgtgggagagattggaggcaatgattatggctatcctttgtctgaaacaaccgcatttggagatcttgtgacttacataccccaagtaatatctgtaatcacttcagcaatcagggaattgattgatttaggggctgtaacgtttatggttcctggaagtttaccacttggatgcaatccagcctatttaacaatttttgcgactatagataaagaggagtatgaccaagctggctgtttgaaatggttaaatacgttctatgaataccacaatgagctgctccgattgaaataaatcggcttcgagtgctatatcctcttaccaatatcatttatgcagattatttcaacgctgcattggagttttacaattctccagaacaatttgggtttggtggaaatgttctcaaagtttgttgtggaggtgggggtccttacaattacaatgaaacggccatgtgtggggacgcaggagtggttgcttgtgatgatccttcacaatatgttagctgggatggctatcatttgaccgaggctgcttatagatggatgaccaaaggtttattagatgggccatacacaattcctaaatttaatgtctcgtgtttcataggtgaaaccatcagagattttaataactatgcaatgaaatataaatcaatgtaaaatatccacgtatttgatgaggtttaagtagtactccaataaggtgattttcactgcctcgtgcagttgtatctgtttaatgaatgaataatgcataacgttttttagcagcacctgtatgtaaaatgatgtttaatgaatagtatatgattgcatgctttagcat
